United States Patent Application Publication US 2014/0057251 A1 - sequence listing, part 142

SEQ ID NO: 268726 - DNA, 1000 bp, Cannabis indica
aaaaaaactcactttccactttccactataaatataatatatatttcattaaacactgagaatagatcatatacctctcctcctactgtatattgttaccaatattaatatgtttaatgacaacttttagaatagatctaatttattttttataatagagtataattgttagtgtattaatttatattttttataaattgtgtatacagatcagcaaatatgagaagatcttctttttctgatgtaccgagaactctaagtatgaggagatcttctttttctgatgtacagagaactcaaagcatgagatatacaccgatatcaccaaatcatcttcatcatcactttgagtttaatgatgtacaaagaccaagagaaagaaaaaattaggagcgcttaaagaaattaaaggagccgtaaataagatgttcaaaagcctttttaagagtaaaaagaagcagccttcggagaatgcagaggcggagattccagctgcgatggtgaattcagaggcgggtgcatctgattgataatcgtcatcacccccctaaacccaaggttttgggggggggggggttaccccgttttaaacagaagttgcggtgggggggcccccttaaacccatgtcgagggtggggtccccctaaaccaaagttggaagggggggtcctccccttaaacccaagttgggggggcggggccctaaacccaaggttgggggggggggaccaaacctaagttttttttgggggggaaaagaacaaccacccaaattgagggagcatctcaactgtcatgactttacaccttcatcattaatttagtcccggaatttttgtgccacgcggttctattcttgacacgtcatcgtcgtcaaaatttgggtaaacatatatataagtaacatttatgaaagtaggagaaaagaaaaccacaagaacaacaacaactagtatatatgcatagtttagaagcccaggaatatcatccaaaaccagt

SEQ ID NO: 268727 - DNA, 541 bp, Cannabis indica
gattttattaaactctaggggtattatttgtcctatatgtgaattatgcaatttttgtaatttttgcttgacgacaacgaaaaatgcgatggatggatagtttgatcacatgggtaagtttagaaccttattttttagtgggaaatattttatagaaaataaaatatcgggattaagcggggttatagaatttgaccattttacccctagctttagaattactctaagtttaagtcaagggcaatttagtctttttgcaagttaaggttaggtggctaccttgttatttgacacctagcaactacatttcagcaaggattaacttaatcaatcctttattcattttagagaaaacctaaggaaaatacaaaaaaatcaagagaagctctctcttcctttccctctctcttcgaaccagctcaggacaacggaattgctgctggtttttaggtgttttagcaagagaatcaagaggaaatcaagccaaggtaagccctagcatctccttgccttagttcttgaatttaagtttaggttgagt

SEQ ID NO: 268728 - DNA, 909 bp, Cannabis indica
aggaaaggctgatgaaccttcaatggaaagagatcttatctctagcttgtcaagtgtccaatgtcaaaagttgatggctattcttgctcaaaaggccactgagaacagcactcaaaatgcatctgaagatcagcctgttgtttcacatttttctggtatgaaaatctctactcctagctcctattggattattgacacgggtgccacacaccatgtgtgttatgatatttgtttatttaaaaacactgctgtcaataccagattaaaaaccgttttgatgcctaatggattgcatgctgagatttcttgcataggaacggttcaattgagtcatgaacttgttcttgaaaatgtcctatttgtgcctacttttaagtgtaatttgctgtctgtcaatgcattaacagccacaactaattgcactttcttgttttctgatgatgattgtatcattcaggacactaccaagaccaaggtgattgggatgggtagaaaacttgacaatctttactacttgaattgtgatcaaagatgtaataaaaactttgcttctgtttcagcatctttttcagattctaaaatttcaaatgaaactgtttggcactatagattgggccatccatcttgtgtaaaaactcatccgttgaataaagctttgaaatttcatgttgattcaaattctttatttcattgctctatttgtcattatgccaaacaaaggaaacttcctttcatttcaaatcataacattgctgaaaagtgctttgatctcattcatgttgacatttggggcccttacaatacttgtaccattgaagggtataagtatttcattaccattgttgatgattgttccagatatacatggatcaaactcatcaaacaaaagtctgatgctcagcatgctat

SEQ ID NO: 268729 - DNA, 903 bp, Cannabis indica
atcttccatacttagctcaaatgctaaagttttttccttgtgcaggtcgatctgaaggtggcctacacttactcccgggctaaatctgctgcttcaggaacacggctctgtccgacaccatgagggcggaggcggacttggccaggaaggatactgaagaagccagggggaaagtcggaggtgttcggttggagttgggtgaagccaacaagaagctgtttgccgctcagaagaagatcactgagctgactaaggatctcgaggttgctgaccgttttgaggagaccatcgagaccttatctgctgaggtaaacaatcttcaggatgagaggacttcccttcgaacagttcttcatcggatgaaggaggaaaaggaagccaaggaggaggaaccttcggccgaggtggccaggttgaaggagaaggtcaatgccttggagacagccggtcttgagctcttctttgatttttggaaggctaatcctcaggccaattttgactacttgggtgatgctaaggacatgtaccttgagttctgcaagtcccaagtggcctatggcgaaactaaggcggctgcttcaacctccggtcagactactgatgtacctcttgctcaagcaatagatcctcttgctctgattggcccagaagaaccgaaccaagagcttgggactcgagctgcctaaacacttctctttttatctctttactttatgtatcttattcggcctcaaggccttttctaagacatcataaacaaccaagcggtctttaaacttagaattatttttcatttttcggacaacaggctgaccgggcagcttttaatcccggtattacgtgctttttttatccttaatgaattttattctctgtttataattgtcgtgcaattgtgattgt

SEQ ID NO: 268730 - DNA, 850 bp, Cannabis indica
tttccctaatatttttagaacttagataaagctgtgctaagctaaaaaaaaaattgaattccaccttgttacacaatcaagtgatatttttggtggatggtactccaacttgacgagcaatgtcctcaaattaatcatgtctttttggtgtgcccgaccaataagcaatatcgtctcaaattttgtcaacactatcaccaataacagataagctatccttgacaattagatttaaaatatgtgcacaacaacgcacatgtagcaactttcccttcaaaataaaactattaggctcaaattgtcctttcaaaagctcagtcatggcatcatttgcagtatagttatcgagagtcattgtactgatcttgtcttttattttccattcattaagacaagatcttagtgtctcaagtagtgctggagcatcgtgaggacacgaaaaatacttaaaactcaagatctaactatgcaattccaagaatcatcaataaaatgagctgttacagccacatatcccctcttctgatgattcatagtccacatgtcactggttatggctattctgctcctactttttttccaaactttgcctgcattttttttctcaattatatacatttgcatgataccagacctaaccgtattccttgacactatttgaaacatgggacacaaagtactttaatattctataaacccactatgctcaaccatggacaagggatatttatgcttagcgatcatttgagccaatttgatcctttctaaatcaggatcaaaattgaaagtaactgaagggcttacagttgcactagaattagcggcaagttgggcctttcttactggacac

SEQ ID NO: 268731 - DNA, 703 bp, Cannabis indica
acccattttataataaatcctcatagatagggcattttcaaaaatttctacttttgaaaaatcttataattaatatatatatatatattgtaatatatatagataacaagaaataatccttttaatatatagtaaatgtaattatatttgatcagtttgtaattgtattttgtgattaacatccaataatcgattcaatctaataagaatctaacttttaacatctaattcaattcaattgtaattatatattcaatttttttgtaatttgattatattagttcggtttaattagattgaattttggattgcccatctctctgttatattattttatataatataatatttagattaaataattaagttatacataattaatggtgacaaaatattaattttgtcaaattgtaacatacattatggagttaaaaaatgtgtaaaatgatcacaaaatagtagttgcaaatcttttaaattgatgatcacttgaatatgtaactgtcatctctttttcattcttaaattagtaaaagatgttactaattgtttatgaatgggaatgaatgatagctatttaaaatattattgttggagacttgatttattcatttataaggtgtataaatggttcaaaatcaagtgggaatgatttggaacactttggagaagaatgggccaatgctgaaaaaatagtaactag

SEQ ID NO: 268732 - DNA, 1528 bp, Cannabis indica
atacgtttttttttttaaaaaaaaattcatcatctttattaattgcaatccatagtgattacatgattaaaatctggagtaacatcactactcctgataacacgatcaacaactaaataggatgctcgagctaagaaatgagcaacactatttgcagaacgtctaataaaattgacataaacatctcgcaagtcatttaacaacatcttacaatcagaaataatactcccaaagtatgaaaccataggaatagagctacgtaacgcttgcaccacagaagactatcagtttcaatgacaaccttcctccaatctttccgtttaacccaactcagtgcctccttaacacccaaagcttccaccatttcgggttgcaacacccctgaccgacagcaggtaaaagcttccaccaatgcgccagtttcatccctaatcacccctgcaaagctataagttgcagttcctgaaaaaatggcagcatctacattaatcttcaaggtgttttcagctggtttggcccaagtttcagcaccatcgacatcagtaaggaatgcagccgtaggattaaatgttgaatcttgagcccgagtccaatctgcgagtaaagcttgagctaagtgagcaacactcgcaacagtaggggacttatcagaccatactagctcatttcgatgtttccaaattgcccaacatgtcattgcgatcaacctccttttctccccatccgcctgctgtagaaccgtagcaaaccagttggcaaaagaaccaactgccgtcaaattaacaccagcagccaactgttgccaacacgctttggcaaaagagcaatccaccaagcaatggtagatggtttcatcagttactttgcacacagggcagatggtatcaacaggcacatgtctagaacgaagtctggatttcgtaggcagacagttagtggcagcacgccataacaagtctttcactttcggaggaacacttagcttccaaagagtattccaaaagacggaattatcatcctgtgcacccaactctttgctcaattgtaagaacttataaactgattttactgagaaatggcccgagctctcccaactccaataccaaacatcacataaacgacttgaagacaaggaaatactaagaatcaagttagcatccctttcattaaacatatcatgcaccaagtcaacatcccaagccaacgtatcagtttccataagtgctttaacattttgatcaataagagcaggattattcgaagttactcttggattatcttcattcggcagccacggatccaacactatattaattcgagaaccatcaccaactctgcatctcgccccttttcgaacgatctcttgagtttcataaatacttcgccacacgaaacttggattgctccccaactcagcatttaaaaaggtaccattacggtagtacctagctttaaaaatcttgctgacaagtgagtccagacgactaaacaatctccatccttgtttacaaagcaaactcaagttaaa

SEQ ID NO: 268733 - DNA, 887 bp, Cannabis indica
aaaatattttgaatcgtctaattacgagaaatactgaaagagttatggccaaaacattatcagacgttgcaccaagaagcttactgccaaaaactggcttcaagcgcctcgacactacaaggtagtgtcgcggcccgccttttctagactgtgaaaatttagattttttttagctatacaaaggctattttttaacattttttagtagacgtttgggagtatgaaaattagaagtgagaagcgactttgaagactttcatcaatacttttcgatgagttcttctcttttacttttttttttctaccttcttaattaattattttcaattatttacaatgattataagtgggtagactttttataagagtgctaatggagattaattgacagtttattttggttttaatgtgatttaattctttcttaattttctacatgcatctatttcatttatacttaatctattttagttggttgatcaccaattaaatattttatgatttcaatacaaaatttaaggagtgagtattaattatgctatagtgaaataaacatagatttcgataaaacgatgagagtacctgctatacccgaaattcggctatttatcagaagctgacatgtgtcccactaaaggaatgtgaatcaactcaaagaatataataatgatgttgtatcattaaatgtaattaaataactcgttacaattaaatataagtttaacagaaaatattcaaactcgttgaccgtctagtcttatgccagacaaggataataactattaaactggtattgacgagacatatgtctgcctcgatacactcaaataaatatacgtgaagatgatactcactcgctccggtagattaaaagtggcaacactcaa

SEQ ID NO: 268734 - DNA, 1773 bp, Cannabis indica
tttcaaggatgggtgacctcctgggaagttttcccaggatacgtgtgagtgaggacaaagcacgctggaaacacttgtgttggtctgtagggtcagtcatcaatccaggaagcaaccagagtggcgtactcatgtataagggccattagtctgtgggcgtaagggcccaatggaggcttgaagcggggacgctacattactctactcagaatggcgagtattcaaactatggacactcagacgtactggaaatataaataacacaaagagaatatagtggttcggttacatcacggtctgcttagtccactgttgcaaggattttctgtcttctgttcattccattttggatcactcctttatatacaaagcaagtgtcgtttgattacacggagattgatttaattatcaatccgtttgtacattgaatataaacatttaaactatttaaaacgtaaatacaataaatgaagaatattttcggcccaatttactaactacatcaacgtatgtgactttcatggtatgagttgtctgttcatattctcgtataagctcgtaggctcaagatgcgtacaggacttatcgagtctaggatgtctgcgtcctattcgagtcgcatacacggacatcttgtaataggtcgataacttaggacatgcgagtccttatcgggttatcgagaatgttgggtcatctggaccagctcattgagtagagaatcgatctttactactgcgcaggaagacctttatagttctcgcatatacctcggtatatgcgagttttaaacttgatcttcgatcctccttcgtgcgagtcataagaatgcaactagactctgtcaaggtcacatcatcccgctgagtttggttaaggtgaagtttacattcaagaggtctccttctgacatctcagctctcctcgaggaaagtgagtccttgtgtcattttacgggagcctggtctcgagtttttaggtggaaaattctcattataacaaatacaagtcacaacctcatgtatggataatttttttttgatatttatatgtaaattatttaatattatatattaataaggaattattacatgaaaaatataaattaacactttatttacaaaaatacctccataaggtatggacaacatttataccttttatgtgcttttaattacaaaaacatctcttacactatcacttacacaatcaaatgatagttgcatggttgttgctaggtggttggccgaaggttgcataagacaaaggtttcgatcagacgaaggtcactaggtggttggccgaaggtttcaatcagatgaatgttgctggatggttggccaaaggttgcatcagacgaaggtttcaatcatacgaaataactgttagcaaaatatttatgcaactgtaatgcaattgttatgaaatattaaaaatcataagagtatttccatgtatgtaactctatctacatgtctctttatgatttaatatgaacaaattcactattagaaatttaaaaaacaacaaaaatacaccaaggtaaacatttaaatataatatggatgtaattgtttttggattatacttgagttagattgtttgggaactccagttcaactttttgagatttgcatttcatggatttgaaaattaaagtcatgacattagttttatgtaaattaaactggattttctagttgaattttagttttgtagtagtttttttatacttttttttcatgaattcgaaacagatcatgttttgattga

SEQ ID NO: 268735 - DNA, 1235 bp, Cannabis indica
caatcggccctgcctgcacagcaggggcatgagccacctgcacttctggagcaagcattgtaggagcaccttgctgcctcaggcgtctaatttcttcgccttgtttgttgattctggtttgcattgttgcaacccattttttcccattcatgggaagcctgcagcgggttagcatcttcccaattgcgtgccctaattcttgagcctctacctcggccacatctttccggagcaaactaaactccctgactgccactgtatctgaccttacctcctggcttctcgcatttttccttacattcattctaataaaacagcttgcaaaaccacgagctagcctggtcagatcacaatcaagaataatttactaactatctcttattttggaaattaatacatgcgcctattcaactatcgggctactaacatgcttctatcaagcttttctaatagcatactattaaaataaactactaaggcaataaaggcttactgaaccgtgagtcgagtcaatcgttgatgatgattgtacatgtcgtgacgatctttgaaagacaacccggtggctctaataccaaattgtaacaccatacaagttttggcgtgctgtcgttattttatattaactgttcagctcgttgctaatcaaccagtttattgaaaactatgaataattaaaacttttactgaattacttttaaaacaaaaaataaatatgttttacataaccgggatcctgtattaaaaggtatttacatttgagttacataatatttattacaaaacttgtcgcctagcaaccatttaaagtacaacctattgtctcaaagattgtacgctccaagtctaaccgccccgatatgtacaatcttcatctgctcgctctcacggctgctcaaccttagcttttccttacctacacatgcaagcaatatctgtgagtcgaaaaactcagtaagaaaagtataatcataaacataaatatatattcagaccgcaaccaggcacccatatacctaatcacaatctactgactgagttaggaaccttctcaacaaagtatgactaactacgaatcatgtctatacttagtactctagtcataccgatgtggtagcaattagttcatactatctgatagcctagcatatatctgttggcagctctgtgcaactctatgaacacctcactgatgccctgatatgctaatctgatggctatagatttgcctaaca

SEQ ID NO: 268736 - DNA, 916 bp, Cannabis indica
tttttttatatatatatatatatatataatttatatattatttatatttaaattataattataaactttttttgtttgatattagattgttgagttttctttattatgtcttcataaatttattttaataaaatttcaataataattacaataaatagtattttgctcatgatttaatctaaaatcatattaaaataaaaaaaaaatgatagcatatcattcaatcttacaatataatattttaagcaaaaaatattcatcaaatttgataaaaaaaatcaataacaggtcaaagattaaaaaaatatacaaaatatacaagtctcggttataaactgacacttatgctcaatctgtatgtatatatttttttaatttaagtgtcaatgtcagtctactaacccacactaaaagtttcaagccatgttcttgtcgtgtaataacctgaacagtagttgtaaacattcaagttcatctcttttatcacagcaagcgcatgagcacacggtaattcgtgaagttggaatctattgcaactgcatgttttctcctttagattgattacccatgatcttgttagttctaccacttcgaacatgctctcgtttattagctttacctgcaaattaggtcaattttatcaattttcattctgtacaggaaactaaaaacaaactattaaaaaactgtaatgcaacttaaagtttaaagagattttacatatcctgtcaatgagtccataaaattgttgactagcttcttctctgctgtaggtgttaaaaatgttgttgttttctgtgcctttttcctgtttgtgtatgtccattgttgtatcaaaactctgtatgactccatcagtgttgtgattggtagttctctagctgctaagtttgttgcatttagagattcagcaatg

SEQ ID NO: 268737 - DNA, 786 bp, Cannabis indica
taaaaattttgaatttctcacaatattttctaatcatctttacttttacacaagtttcacatttaccataatttcttatatcacaatcaatcatagtataaaaaccaatatgagctaatctaagatgccacaaaaataaagaattatattcaatcatataagtggaactagatgctttattattgctaacattaaaagttacatcattggtgcacaatttcaccattctgtcacaagagtactccttgcccaaaaatacattagacttggtaagtatgagcttaccagattcataaacggccttaatgctggattttccaagtaagtcaccactaatcaaatttatattcatgtcgggcacataagacacattcaccaatgtgactttcttaccggaggtaaaaaaacacatcaatggtacattttcctagtacctttgatttgacctcattgcctatttggatctcatggttaccctttgattcttcaaaggtcttgaacagtgatttgtcatatgtgacatgaacggtagcacatgtatcataccactattccttcactttcccttgcacggaatttacctcactaagagtagcaatgatatccttctcgatagcatttactttgggtcccttaaagtcttttctacgcttacaatctttagcatagtgtccaagtttaccatatacaaaacatggaccttttctacctttaaattggtttagtttagactttggacccaaggtattaccttttttggtcatacccttgttcttattaggaact

SEQ ID NO: 268738 - DNA, 580 bp, Cannabis indica
tgttatttagtttataagttataattaaaaattattttatggtatgtattttttttttaagtaattaatttttgtaattgatatatattttcattactgtaggttttatatatttgttcactttttagtcgattgtaatatgaaactagttatgtattaaattattatttttgttataatacgtatatggttctaagatttagtttttaatttgattaatctacataactagtttcttggtatcatatttttaactaactgataaatattactgatttttcattgtcaaattcaaagctccaactccgatgcaactctaacgtccaacatcggtgacaacttcaatgtctaactataatgacttttttgacaatgatagctattttgtcgaatgttctcattctattttctcaaaaatttgtaattggttttaattttagtctcttgattttagttttagtagtgagttggtgatcaagtcttagagcttctaagaagcacgtaaaatttatatatgaaatttggtatttgtaactagtttttttttgtttagaatccaatttttgattatataaaatta

SEQ ID NO: 268739 - DNA, 564 bp, Cannabis indica
gagtccgtgtaggttgggataataggctcgctcaggtgaggattgactatttctcaactctatttcaagcttctaattcgacttgccaagaagtgattgatagtatcaatagctcggtgcctagccttgttcatgaggagttgagtacggctgtttctgaagaggaggttaaaaaggcgatttttcagatgcatcctgataaaagtcctagtccagacggcatgacacctgcgttttaccagaaatgttggagcattgtgggccgtgatgttgtaaaggctgttcagagatttttttcgacaagggagtttgatccgggttgtagcaaagttaatattgtgttgatccctaaaaagaaaaattcagagaatatgactcaacttaggcctattgctttgtgtaatgtggtgtacaagacaatcacaaaggtaatggtgaatcgtatgaagcctttcatggatactattgtagctgacactcaaagcgcttttatcccaggacgtcttattttggacaacattataatttcgtttgaggtgcttcacttgttgggttttatgccct

SEQ ID NO: 268740 - DNA, 617 bp, Cannabis indica
tcttcttcttctttctctctctggtatggctgcaggtaaggtgcgactaggaccaccgagctggagtcgttgccgaggaccaccaagctggagtcgttgccgaggaccaccaagcaagcgtcgttgccgaggacgaggaccaccaagccagcgccgttaccgatcgatctcaaccacgtaccgcgaagaaccaccgaggaccgctggttagccccgattcgattctctctctcaacccctatttggatttttttgtgttctttagatttagatgggaaaagataatagttgtggggaaataaatttagggtttttaagtatgaggttttggggctgagattttgtgtatatatatgtatatgtgtgtgtttgtttatttgttggatttggatttgtttaaattggtttgagttttgttttgttttttttttttgtgatttggatttgaaaaataggttgtgtggtgattttggtgggtggtgttttgttttgattttttttttttttttgtgatttggatttgaaaataggtagtggtggtggttcagtaggtggtggtgattttagaaatggtgggtggtggtttcggtggctgtaaatggtggtggtgataattt

SEQ ID NO: 268741 - DNA, 685 bp, Cannabis indica
tgccaataattctccgataactacttcactgccaccatacatttctcccatttctcttactccctctgaagctaaatctcatccaagtccactacccactgatccatcgactactgctaagttaaaaggaaaaactgtgattattgatgatttggttgaagaagctgctatcttcagtaagacttacaagaggcaagtcgatcctgataaccttagaagtgtgttaaagaggtgacgtaataacaagaaggacgagtcaagtgttgatgatcattcttctcagtatgtttctgatatgcattcggattctgttgaaggtttatcatcctgttcagcggaggttgcatcattgcagccccgccctcaaccatgaaactcatcagttggaatgctaggggcttgggaaacccctctgcattcagacatttgaaactgcttatcaaagagcagtgcccgaatgtgttatttcttatggaaacaaagttacaatgtaatgctattgatcgttttcggtcttctcttagatttagtaatggacttgaagtcccaaggttaggtatgaagggggtttaatgcttttatggatggctaatgtcgatgtaactctcatcaattactcaatgaatcattttgatgttttggtttcgtcggataattgtcaccaatttcacttcactgcttttta

SEQ ID NO: 268742 - DNA, 770 bp, Cannabis indica
aagtccttaactatcctatccatcagatccataaaaggctactagagcactaattagtccaaaggacgtatccaaggattcataataattgcccttactacgaaggcagtatttgaaatattttcctcttgggttctcaaccaaggataaaccgagcccgggtcattttaaaagaaaattgttttcctccaaactgattttaccacgtatagatcctaaacagagagtatttattcttgattaaaaacttggataaacttcaatagttaatacttataagaaatgatctatctttcttcttaataaacaaccccagagcttcccaaagtgacacaacaggttgggtaaaccctaagttcatcatcccttatggtcaccaattaactttcttgagttctgttaggagccattctatatggtgcctcataaccacctccactccaaataccaaataacaacaaaggttaacctttgttgtggtgataatctaagaagttctactggaaaatacatccaagaactcttatacaactctaatgtttcaaggctgaattatctcgaccagatagtaactaacaccattgctaattgtaaagtcctttttttggcaagttagttgacaaaatatttttctattatggtaagattgttttgcattcatacccgattttcttaccttgtttattcggttttagtcgctctttactatgttaggaaagatgcacttttcagctggactttcctttgtttggaaatttcttgtaagagaa

SEQ ID NO: 268743 - DNA, 526 bp, Cannabis indica
ttgtgactaaaaatacatttagtcacaacaaattgtgatttttggtgactaaaatatttttttattaaagttatatgtgtaataattataaatgtaaaagaggtttcgccacaaatattcctattttatataagtaaaagagacagaaacacaagagttgataaaatattgttagcagttctaattaatccccctctcaaaaataaatatatatttgtgaaaaaaaaaatagaatattgatatgaagcattacatttacatgcctacatggtgtgaagctctatttaataaggtatttaaaaaagagatacgatattaaaaaaaaaaaaaatagagatacgacattaaattaaatattattataaaaaatagaattgtaattgtttgttttaaatctttttaatattaaatatggctaacataaaaagtattttttttttaagtttattgtaatttaaatttaaattccctgcacatattttcaaaaaaaactataaaaaataataagaattttttatttttacac

SEQ ID NO: 268744 - DNA, 655 bp, Cannabis indica
ctgctttaggaacatcctcctttggagtcttcaaatggtaataaccagattgaagaccgaccatagagaaaagtaatccttccctaaattattcaacataacatctgtccttattaaaggacacttatgcttcgcaaataaaactggtgtactccagaatgaaatacttagactaataatttcaaacccaacctttcctacaactgaatcttcactcctttcaattctacaattaacattcaattcagaatcaatttttccgcttaaccaattaccctggtggctcctctaaatgcatctagaaaccttgagccacaagactgtatccccacttttattaatgttccctttatagtattggccactaactgaaaagttaatacatccatcccataataatcccttcagcttagacgccgggatcattggattttgggacctttgaaccttgctcaagaacacaaatgggtcctcacttttaaattcaagagtttgccacctttcttttcaatcgatagttttattataccttgcaaattagttcaaccctagtatagtattagatttctctaaattcagcacaactgaaacaacaaactatttccttgccctcacgatctgggaagggttcagaccacatactggaaaataacca

SEQ ID NO: 268745 - DNA, 794 bp, Cannabis indica
ttttaaaaaacagaaaacagtttttatgtaaagccaaacagcgtcaaagtgtttctagttttcaccattattttactaggctacttatgacttcctacaactctcagtgaaagcaccaaaatgttgatcgaggttttcgataactagtaattagaacagtatgaagtaattgatgaatgttagaagggataaatttttacgtggttggggcattagtcagccttagtccacgaatcattgtattaatgagaatatttattacagagtttttcaaccgatccccatttttgtttatcattgaggtatttatagatttatgaaggtggtaaaaaggccactattgtcgtgtttgttacaccgtacttggcacaatttcccaactctaactttgggcagaatttcctactttatggtgggtttcaggatgcctataggagtttggtaggatgtgatttatcccttatttatgacttgacgactcatttatgcagctgtcgattgatgtatgatggtttgtaaaattagggaataatgggcttaaacccttaaactaatggaattattttaccaggatctagatttactaataactatgttattaacatcctaaatatgaacttctaaaatgatatgaaataaacaaatataaagtataagaaaccttacagtggttgcagcggaatatagtgtctccttccactcagatctctaacccttgtatcctttatgtagcagaggatcaccaagatctgtgtctgaatctccttctcttgaaactggattcttcacagcct

SEQ ID NO: 268746 - DNA, 1096 bp, Cannabis indica
tgagatggtggctcgagttctacgggcagcatagcttcatatccatatgccatgacaaatggagtctgtctggttgccgttttctcagttgttcgatacgaccatagaacttcatgaagttcttccggccaatttcctttggcatcttcgagtcctttcttcagtgtatccttcaaggtcttattgactgcttcaacttgaccattcgcttgaggatgtgccactgcggagaaacttttgatgatgccatggtttacataaaaatcagtgaaggattggctgtcaaactgcttgccattatccgaaactattttgtacggcaatccgaactgccagattatgttcttcacaataaagtcttgaactttctttaatgtaatagttgggtgtggttcggcttccgtccacttagtgaagtaatcaaccgctaccactgtatattgcactcctcctttgcctttgggtaactgtccgatcatgtaaattccccaaatggcaaagggccatggactatgcatctgagttaactcgttgggcggagctcgaggtatctttgaaaatctctggcatttgtcacatttcttaacataggcctttgaatcttcaatcatcgttggccagaaataaccttgccttagaattttcttagataaactctgccggtagcatgatttccacaaaaatacatcgtgcaccttagataggagtcgtgcaacttcttcttgagtaacacatctgaggaacggcacaaagaataatcttctgtacataattccctctactatgatataccgtgcagccttccttatcatctttcgagcttcattccgattatctgggagttccccagtgttgaggtaggtggctatcggtgtcatccaatttggggaagtatcaatcatttcgatctcttccgtgctagtgatgctaggctctttgaggaattggataagaaccaagttcgccttatcacttacattactgcttgccaattgagccaacgcgtctgcagtcgtgttttcttcccttggaatttgtctgagccgttgcttttgaatcttgcgagcaagtcctgtattttgctcaaatatgctat

SEQ ID NO: 268747 - DNA, 658 bp, Cannabis indica
gtgccaggctatggcaagggcttacctgattaggcaatgcaatacaagattatcagattaaagtgtcaacttgtctaattaggaaatgctatgtaattaagatggttactttatgacgtaacatatacataatttatattattaaatgaatatgaaatctgttattggtataatagttttgtattacaaaatatctgtatactgatgtttattcgtggtagagtggtagatggcaatagtgcttgagatttcatcttatgagcaacgcatgattgtttaattttgattgtgtataaatgataatattcaaatattaaactatatgattattattattacttttcttactgagtccttatgatgcacgagtgctgtgtggtgcaggtaacgacaaggaaaagttagagctaccttgaagtaactgccttctccagcaatgtacatattgacctcatcggcctgcgtgctagattgcaaggagttattttaggttgtatctattgcttatttaagttttaggttttttaagcatcgttgtatatagctcttttataaaacttttcataacaaggatctcaaaaacactctttttacgttgttataatatttgtgtttagtgttttagtttattcaagcttttaatattatcaggattttt

SEQ ID NO: 268748 - DNA, 740 bp, Cannabis indica
aagagaaattatccttttttttaataaaacatttctccaatgttctttctctttattaattctttcttgagcatgtttatcaattgttttattcattaataatctcgattctaaatcaaaccaagtactcatgttgattatatgttcgttacttgtttcatgactttttaacctatcaccaagatgtttccaatctttagttccttcgttgctcaattggttcatcgtactagaattaacactaaataatttacaacaaaaacaatatactttattcaaacactttgaatacactaaccactttctatcatgttgttctccatttgataaatttctagtatagtgataagtagaaaaacgtctaccatcatcttttggaaactctatatcactcaatctaattggacctttttctactaataagtctattagtttattatcaagatttttccatcttcccggatcatcaagataatctaaattgttgttacaatttctagtttccatatcatcctccttattttcttgacattcttcatcaactatcatattatcacatattttatgatggcaattttctaaacctttttctaccataatttcataatcacctaaattatttaaatttaattggtcattaatttctttatttgtgttattttcatctcttttgctagtggtaacaaatttatctaaagctccttgttgagtttttatcaaattttctatttttctttttt

SEQ ID NO: 268749 - DNA, 536 bp, Cannabis indica
atactttctttcttattcaagcaaagttttgccaatccgaaatcagaaatcttgggacacaaatcatcatccaaaagtatgttatgtgattttatgtcgaaatgcaaaattcttgtgttgcaaccacgatgtaaatactccaaccctggagctatgccaatagaaatttgaaggagtttttcccattctaatggtagatggttattgtcattattattatgtataaacttttctagtgatccattagacatgaattcataaatcagagctttatttccactgtctaagcaaaaccccaaaggagatacaatattaacatgagaagttctactaatacttgcaacctcattaataaattcttctccatttccttttgatgcatttggatgaatactcctaatttttcataaatatactttttaagttaattatgtttaaattatatatataaataaatatttaatgttgttacctatttgatttctaattgaacatattttttattaatcactttaatttattttatttttatttgt

SEQ ID NO: 268750 - DNA, 547 bp, Cannabis indica
aaaataaaaaataaatgtaatgtatctgaactctccatgtgtctacatttatgaattaacggaagtggtagtgtaaaaaatctgaaacattatgtatttatgccgcaatttacctttttagaaattgcatcatttaccaaaatttatttacagcacacttttacattgcactatatatcagttttaaaatatatcactaaaactttacttttaaaaaaaaaaaattgttatattttattcattttaattataaaatattaatatttacacatatccctatacaaaaataattattaaaatctaaaataattaataaaacatgtttagagcaataaatagtattctataaatgtagagcataaatagagtatttaaaaaaactttaaaatgaagaatgaatttaaagtatctattgtaagtgttttagtacaatttttaaattttttaaagtttctctattttagagaaactattacgagtgcactaaaaatagaataaagaagttgtcaggagtgctctaaaatattaagaaaaaactttaacaatt

SEQ ID NO: 268751 - DNA, 1135 bp, Cannabis indica
taatgtgtcatatatgttgttatgttattttatttaattacccaatttctgtgtttgtgttcggaagcggtggaaagcggcgttgggcctttagagagtcgtattttgtatgttatagcattgttttattccggggcattattgtaggtttaatagtattggttattagttgggatattttggtgattaaaatgccttagaaacccttttattaagttattggtaattaattaagggataattattcttttattcttttgttcctttatttcagcttattaagaatattaataataagaaaagaggtattacccttttattcttgagaaaattagaaagtcctagaaaaccttcactttttcacaacctctctttctctttctctcgattttcttaggagcagcaagggctgtgaattttcaatctatcatcaaggattctagctgaatactaaggttccaattcaaggtaatttcccttactcttcttccttaagctttctttagcctaagttaggtttttttgaaggaatttgggtgttatattgctgtatgatctatggtggtttgatttggtattctggagattgtttgatgttgtttgagctattttgaactgaaattatgggttgaattgaggtttgagaaaagttagagtttatgaactcaaacttagctctctaatggtgaaatgaaaatctgtgtgaattgttgagttttattgattgggattagtttaatatgatgtttacaggtattctggaagttatagaaaagtttgggtttgatttgaattaaagggatcaaatttttgtccccagctcagaaccggtcgaccggttctgagaagcctcgtgcaaccggtcgaccggttggtacccaggaattggggttccggttgggaaccggcctgccagttgggaattttttcccgaaccctagttttcccgttttcaagtaatttagggtgttggcatcccttttatcgatagggttaagcttagactatattttaagtccccgtaaagtgtttagcgtgtctctcatcagattttgaacgttatggtttagggccctgtaaagcgtctagctgcgtttccactcaagctgatcggcacacttgagcacggaacgag

SEQ ID NO: 268752 - DNA, 624 bp, Cannabis indica
aaattcatataaaatcacatatatttaactatataataatataattcctcaattatacataattatttagttagagttttgctaatccatttcttaattctgggtattacaaaggttgttgattagggtgtttgatgaaacgctaaggttgttgattagggtgttttatgaacacagaggttgttgattatatatggatacaaacacttttacttttgtaataattttgttcgtatagatgttgagatgtatatgtacgttgaaagggtatgacccattggtaaatataatctgctgtaatgaaacctgttatcactttccatgatttttctttatgtaatagcttttcttgctgagtcactgtgactcatgagtgttttgtggtatatgtaagaagaataataaatgtattcagccatgagcaggaggtcatccagcagtgtacatatcagccatggtgtcttggcttcttggaagcaggattgagtttttttttatatttggaaatgtaatcttgattttgtaatagctgttttgtatattaggtttaaaagaactttattggcaggggatccccatattacaactgtatttataatggaagtttttagtttaaatttaacc

SEQ ID NO: 268753 - DNA, 663 bp, Cannabis indica
catctagtaaaatatcatgatatgaagaaattgcagtagatccatattgcaaagcgttagcaaccagaagggcatctgcctccacaatagtaattggtaattgcagctgaataacccaattaaggctatgaaacatagccttagcttccataatatgagatgcaaaattaccaataatcagtttcgccatagcagccaggacatgaccagcagaattacgaacaacaaccccaactccaataatgtttcggttagcatcaggggcggcatccacattcaatttcagattcaaaccagttggcggagtccatttcgtggcacctggtgctgatgtaggcagtgtaggagcagatgttgctgctgtatgatacttctttgttgctgatatgaaattggataagtaattaacagcaaaggaggcaagtatcgatgctggttttgcagaagagccatgaaccactctgtttctttctgtccagattgaccaaagcgtgcaaataatttgttccatctcttgtagtttataaattgttgagagatgtaccaagtagtctcccttgtacattgcagaagttttactccagtcaaaaaccagatccatgtggcgccatacagctttttgcatatttgcatccaaatgagcatgcccaattgattcccacg

SEQ ID NO: 268754 - DNA, 554 bp, Cannabis indica
aggacctcctctcggatcattgcctccgcttgggcttccctttgcttggcctcttccttgaacttggccttagcaagggcctcctaccgcgcaacctcctcttggaacgcccgcctttcagcagacaggtcctgcaggatcttcacgacttcgtctatgcccccaaattcggacaagacgaagccgtgattaattatgtttttggaaaggcggccggcctctacagcaagctggaaaaggaagcaagagtgagtaaaggccttaagtaaaataatgagaaaagaagtaaatcacaaaatacttaccgcggccaaggagtggctgagatcctgaacttgaaagcggagttcaaggaggcacaagcagcgtaccgcttaggcgcgcaccgggttagctgagagacatactcgccggtcatctccgcggcaaaaggagccaaggtaggcccgaggaaacgattgaaacagtccgtcaaggggtccaagtttagatcccacgggttctggtagttctcctcgttaagggaatctggcacctcctctcgcaaaaccctc

SEQ ID NO: 268755 - DNA, 1096 bp, Cannabis indica
tcttgaaggattttcttaattggactatttttggaaaatatcttggtgattcttgtttgcttttattttttaaaaaaagaattttgaaaaaaaaagagtggggcggtttttttttcttgtgttcgcgggatggtagtttcctttcttaagttggtttcctttttgctcctcttacacacatttatttaaaccgatttgtttatcatttaatctcaccatcttctcttctacccgattactcttccttgttcttttgtcttttgtttcttcttcctctttcagaaattcatggctaagactaagaacttagggcatccaagcaagacgtggaatccgaacctgccccctcaaatactgcaccggtggctctaaaattgcctcgtgaatccaagagatttattgcttcctcagcgtgaatctcatactatgaagcccaagccgaaacagattcccaaacaagtggctaggaaatttgtgcgacccttgaaattctgcacttcatcgtcttcatcattgaagggttctcctcctcgtgctactgcatcgcctcctgctgcatcaggtaagggtgtagctgcatccactataacaggcccatcctctcccacttgtgcccagcaagcttcactcgagattgaagttcgcaccaaaaggagccatgatagattagttcctgctgtaaagaaactgaagatgaatcgcccttcagcttcctcgagttctaatgaaagagaagaaccaatggaagtgtcatctgatgattccgagaccaaatctgagtcatttcattctgaaaaagatcctccaaaagatctaggaatgtcctctgatagtgaggaaactgacccagggcctgaagctctattgcccaaatcgacagcagccactcctcgttctacttttgtaaccaaagcctctaatgctgacaagggaaaatagcccatgaagagctccagtcctagtaatatttctccatctcaagctgtaaattccagattttattatcatgataatcacgtgattggaatctttatgctacccgaaagtttgaaagtaagaggagttatgatttgcatgctcatcgtgtctatgatat

SEQ ID NO: 268756 - DNA, 878 bp, Cannabis indica
tgcgaatcaggtttcatattttcccaaatctaacattattcttactataagtacatgataaatgtttaatgtactaatagaattatttttctctcgaacaattaaagttgaaccaaaggtcagaaaaggtcgtggtcttgcatcaaatgctaaacttgaacaaagaaggagggacgctggtaagccattagagcttgaggtggatcttgaaactggcaaagtagttgggactgaagccagcgcttacgttcgatttatgggccagcaagtatccattttgtgtccaggtcatcattataatttttctgatgtaccccaacaatataaagatctcgtgcttaatcgaataggggtgagtgattttcaattatttatggttataattattttatatccttatttataaattaagttaaattttaaattattttattacatagtattattttaatattgacgggaatccccatcgagagctacttatggggactttatacgcggagatggcggagaggtatagtgagcgaaagaccaacagacacagatattttaaacaacattacactaaaccagaagattgggagaaagttcttcaattgccccctgactacttgaatacggagagttggaagcctatttgcgaaatgttcattagcaaaaaatttttgaaccgctcaagtaaaaacaaagcaaataggcaacagatgaaatatccaacgacgcaaggcacaagatcgttggcttcgatacgacacggatatgtaagtatgaatcctttaattgtaaaatataatttttcttataatatattataaattaatttatttgtttatgttcgtataggggggtcctcccggagagcatgcagttgatgcatg

SEQ ID NO: 268757 - DNA, 575 bp, Cannabis indica
acgggtctcggtctggttgtggttaaggtcccagatgccatttttgaattttggttcgggatcgagatgtgggtgcggttctatgtcccgacccttgtatcgtgtcactagtctggttcaatgttttggtatgagttcaggttcggggttgagttcggagtccaggtttgggttgggatccggctcttaattcaagtctaggcttgatttggagtctgggtcctcgtcttgttagggttctgtatctaggtccaatttcagttatggttcaggtttgggttcgggtccttttcagggttcgggtcaaggatgggcccaaaatccagacaccgaatacgggttttgtccaagaccttggtccagatccggatccctatctggggttccagtctggttccatttctggtgccgggtcacgagctgagtcctaggttcaagttcaggtctaggtcggatactaggtctcggtcctagttcttgttcccaggtccccatccagattttgggtccagctgctaattattatgtgggtttgggtcccagtctatgttcgggttcgagtcctagtctcagtt

SEQ ID NO: 268758 - DNA, 992 bp, Cannabis indica
gagctttcttatggaaaggccaagctatgtttcatggagcaggtgctgtggcctgggacaaggtttgccaacctaaagctactgggggtttaggcattactaaacttgaaacttggaacaaggctgctatgtccaagtatatttgggcaatttcgaacaatcaagagagcttatggctgcgatgggtgaatagtgtatacatcaaaggtcaaagctggtggagttacaatgcctctatccattcgagctggtattggaagagacttgtagctctgaaaaaccagatatcatccttgaatgttgttgctgatttttgcagggataaatatgctatcaaggcaggttacaagatgttcagctctccaaacccgaaattacattggagcaaagaagtatggtcaagattgaatacacccaagcactctttgatactttggcttgtgatgttgaataagctaaaaaccaaagaccgactactcaaaatgggcataaagcttcaagagacatgtaatctgtgtgctgactgtaatgaaactatacaccatctgttttttgaatgcaggatcaccaaccaatgcttgattgagatcaagtcatggctgaactggaatgctgtcacttacaacattcagcatctagttaagtggattgggagggcaaaagtatcaagattcaagagagctgtctacagtgctgcggttgcagcaatggtgtatgctgcctggaaaatgagaaacgctgtgttgtggcagggggtgcaagctgacactaatcggttgattgaagaggtgaaatggagtctaaggactcgggttcaaagttttttgccaaagaaactttcaagtgtagatagagagtggttttgtgctctatagacatcatagaaatctgatgtaagcaaattgaaaaacaaaaaaacacacagcagcaaaaagaatttgtatagattgaggcctctttttttttttgggggtgctcttagattgtaaagt

SEQ ID NO: 268759 - DNA, 1369 bp, Cannabis indica
ttgttgtatatatttctttagtagaaatttttataatagggatccccggaacacgatttttatgtcgttacaatgtccgtttttagtgttttgttttagttaagtttttaatattatcacggttttaataattaattattctattagtattaaactagtttataaaattacacacgtggcgtccctatagattaggacgttacactcgagtactcctctgacaacatcattaataaggggctctgtcgaaaaggcaggaatcgaatcgctacctaccaaaaatagggcaaaatgattataaataataaatagcccacgcgcatgcagactactggattcgtcactccctgagacaaaaggcgagtctcaagtcttattttacaaagttataaaataagactaggggtaaatattgcccctcttttgtcccaatatacatggcaaccccatggttggccatgtggcgaatgagtcttaagatcaggaagcacttaggataaatgctaagtaaactaatctaaattaaatggacgtgtccaagaggtccatttgagagcttcacctgtatccggatggagagatgttttgttcttctccaggagctaggcaaagtcttttgggtctgactcaaggtctcgaaaatgacttatataaacgcattaaatgcgacatggaggaagcgtctatagatggatctgaaaagacatgtcaactgcattaaactcattctttggcgattacaccctaatcaatgagattagtgatgactacataatgaactatcacgtcaattaagaaaggataagagcttgtaacacctagcaaaaccttatgtaacctattatgtagacatgcatgtgtgtcctattatttgaatctaggaacttgtacaagccaaggtttaagacttgcggcaatagaaattttttggctctcttcataaagctataaatacctttaactacattaaaaaagggaggccggattggaataaatagtgtaaacattccttgtaaaaaacttctatattaaattgcagtgattcgtgaactaaggttcattaatgtcctaactacataaaaatacttgcattaaatctcttttaatcatgtacgtagctttcattaattagttgctgaaatctcggttaatagtaggaaattaagtcatcgcagtagaattagtgacactagacatagtgaaatacttcaaatttcatgtctagcaaactaattaatgaatgttaccaaattatttttaaaattttgagagattaatttggatgttgtgatatgtgagtacaattaatatgatttatgttaaaaaattaataatatacccaagatctatttgtatataacatagaaca

SEQ ID NO: 268760 - DNA, 506 bp, Cannabis indica
taatattttggttttatttgtaggtactattttctcttttattaacatataagttttatgttgttttatggtcacactcttttagtcccaaattccaataggatcaattctaaatattatttattttcattctttgattatctatttgtgaaattgttagaatttgagataagataaatgaggttccatttcaaaatcaattagcaatagaaggagtagtccactcttgttatatattctattatttttttacacattagcaatgtgtgattttctaacatcctcaagattatagctattttatatgctcaccatcttaaacaactcgatcataagcggttcttttttagctcactatccctgattacaagtgactcttttgctttactttttggatcagtatttttggatttttagtggctctttttttctttccgctcactatccccgaattataagcgacatttttttacttttggctcttggatcagtttttttggattttt

SEQ ID NO: 268761 - DNA, 878 bp, Cannabis indica
aaaattatatgtataaagaaatgtttaatttatttaaaatgtaatgtaaaaaaaaaaattgtatataagaatagaatatacatttgatgcattaaatttaaaatgacaataaaaaaaaatggataaaaaaattattaaattttttctcttgttacatttagaatgctctttccttcctttttaaaatagaatagcattctaccaaaatggtggaaagagcattccaatactttaaaatgtaaccaaacaaatgaatggaatcaaaattgtttccttttcattccatttcattacctctaaccagggccgaccctgaaatttagtgggccatagggaaaaaaatatttttgggctttcacttagaaaaaaatatggtatttttaaaaattaattaaaaaaatgtataactttaaaaggggataaattttttttgggcccctgagctaggcgggcccttaggtgggccctaggcacaggcctagcacgcctgtgctcagagccggccctgcctctaaccaaacgccacctaagttttgaaatataattgtattatatgtattagactttttaaattactattttctttacattaaaatgatattcgtatatataattttttaatttttttttataaatatatgtgtggattggttcggtttggttatttttacatgtcaatcaacatccaatccgcataagtgtgaattttaaattttccaatccaactcaatctaatctaatccgcacaagtgcgaagatccgcactttgtagattggattggattgtacggattagattgaatagattattttataaacactcttaacttaaagagcatcaaaacttgaaatagttgttaaaaatccaaccaactaaa

SEQ ID NO: 268762 - DNA, 623 bp, Cannabis indica
attttatattattattaataattttatttattaaaaataaatgcacaattttattaattattatttgaaattatttattaagaagtttaaaatttattatatgtagtattttaaattgctttgttaaaagaaataatttttataaaaataaataaatagggttgtgtagaaaaaaaaattacggtgtttcccataatacattatttgcatatctcgatcattcaaagctattgttattattgtatcttacttgttgtctcattcaaaactattgttattatggatgctctgataccaaattgtaatgtcctattataggggacgccacgtgtgtgattttataaactagtttaatattaatagcttaattaattattaaaaatcgtgataatattaaaaacttgaccaaaataaaacactaaaaacagacattataacggcatataaaaagtgtgttacgggtatccctgttataaaatttttgctaaaaaaatatagagaaacttacaaaaatattggaattttggttaacttttacaaaaatactgtcacacggaaatctttacaaaaatactgtgtttttgtaaaacaccaataaaaacacaaagcagaacagctcaaaa

SEQ ID NO: 268763 - DNA, 630 bp, Cannabis indica
agataatacataagctcagaacgagctttccaatgatatgtagaactcccaaaacgaagttcgaatcataaatttatgcattttctaagtttccattcgaatctgcccagaaacacgagggcgggtcgcggcactcaaaagctattatgcggtacctggggccaatttccaggtttcaaaatgggggcgggtcgcagcatgcaaaattagtgccacggcaccttggttcaaaatccaaaaaatagcagcaagaacttcaaatttcagcccctaaactcatccaattaaactcaatttacaaccaaaacctaaaaccagcaaatagattttctactaattaaacagagagtttagaatactatttcatgcattaaaatccagctataaaactctcaaaactcagattcaagaagagctcaaaacttgagcataactcatcaaaaatcaatttttacaagaacttgaactcaagcctcaaacaactaattctagagctcaaaaacactagtgaagtccttttaaaaatctgtccaaacctaacccaacacaaactcaaaggatccaagatcaatcatgctcaaattaataagaacatcccaacaaacgccaacatgcatctcaagaacataa

SEQ ID NO: 268764 - DNA, 645 bp, Cannabis indica
agtagttgggagggattgagtggccgtggtttagtggacaaaattgaaggatgtggggtggcgttggaagcttgggggaaggagttcacggggaactttaaagatcggatcaaccaatgtaaaatggtgattcgaaatttgaagaagaaaagggatgaggtttcggtcagaattcataaggagaagcaagaggaactttttgagattttgacgaagagagaaatctattggaagcaaaggtcgaagcagttttggctacgctctggtgatactaatagcaaatatttccacaactttgctagctcgaggaaaaggcaaaatcacatacaacgtttgcaaagggaagatggagtgtgggtggattgggaggccggtcttggtggggtgatggtagactattttaatagattgtttgaagcttcaaatgttgatattagtcatgttttacaagaagttcaaccctctatttcggaagaccaaaatgaaatgcttctcggctttgttgaggaggatgaggttcgcatggctctgtttcaaatgcatcctgacaaatcgcctggtccggatgggatgagtccggggttttatcagaaattttgggatattgttgggagcgatgtggttcggttggttcgggagtttatg

SEQ ID NO: 268765 - DNA, 815 bp, Cannabis indica
ggctcgtgatcagcattgtagtctgagtcataattggggtcttcttgaagtgggtgccaacctgatggttcatcttcttcatcacttccagctggtggacatgcatcataatcagaatagacgatctcccattccaatccattgtactgaaagagatagggatcctggttgatttcttggtccatgtatggatcttgtgaatcttcaaaaatgcttgtcttacggagtaggacccccacagtgtctgtttctttgaatagtgatgagtttgtcttttttgctttaggggcttggacctgattgtgactattctcggagatttggaacttttctagagcccttgctatgcgtcgtgaataatctgaggggaacttttcccatggggcatcatcttctattcttggccaaatttctggtggaatagtctgatttttctcaaagataatcttttggagatctctgtactctgcatcttgctctctgaaaggtgcttcctgggatccgtatagttcaaaagtgggattgcaaactattttcttgttctcgtccaattttgcattaagactgataaagaagaccgtatagcaatccatcatgttggctacatgtggtcctgatggataaacaaagacgtgtcgattgttgcgaaccttttcccattcatcccagagtattttttgccactcctctagaggagcgtaccaagacaaaatgtccatttggatttcgtaggctggtttatttttttcttgttcgaggaacgactgtatagcagtgtgaagagccatagtttggacttcgatagccattgtaca

SEQ ID NO: 268766 - DNA, 1092 bp, Cannabis indica
gggacatagctaacttcttcaagctgtgtccaactcagataacaatgaaaggcataaagtacctctcagcgctcttcatcatgtatgccaaactaggttgttgtagccttttcctctcgaagtgaactactgtaacgccctaatctacaggaaagtcatgtgtgtagttttataaactagtttagtaataatatattaattagttattaaaatccgtgataatataaagaaaaaaaacatcaccaaaataaaatcctagtaatgaacaacataacgacactaaaatgttttttttttcagatccctattacaacgcttttacgaaaggactatgcatagtagtaagtcaaaatacacagtagatacagcctaaaacagctcttggccactcgactacacaggtcggaagggtcaatatgtataatcattggagaatactgtcgcctcatggctggtctaagttttccttgcccttacctgctccacagagcatccgtcagtcacaaggactcagtaagaaaagtaataaaggaaatacatatgataattaatcaactatattaatatcataacataattaaacaataatattctaatgatgatgtaatataaccaaccatatttattagactgagaagtaatcatctctattacatcacattgcctaatcaggcaagtcgatgcttttactcggtatccatgtatcgcattgcctaatcaggcaagcccatgccataacctagcattcacatatattactttgcctaatcaggcaagcctatgccataacctgacattcacatatattgcattggctaatcaggcaagcccatgccataacctgacatttgcatatatctcattgcttaatcaggcaagcccataccataacctggcattcacatataccacattgcctaattaggcaagcccatgccataacttggcatccatatatatcgaatttcctaatcaggcaagcccatatatcttgtcatgctatgtgatacaaatatacttttctcacattaagtctcaattctggcatgttgccgcctgtatgagaacaatcaacgatcctgggccctatgt

SEQ ID NO: 268767 - DNA, 987 bp, Cannabis indica
atgaaaatacaaataattaagcatatagaagaatttacttagttataacttcttttatttaattaaatactataaaaatacatctagtttatcttgcattaatttcattaaactaagtgtgtttttttaaattaattttaaaataatctgatgaaaagttaatttcatgtatttcgaaattaattatgttgctaatcaattttattacgttaaactagtataactaacctattatagttagtcaaataaggcaaatgggccttcactattgaggttattcatgtgagtgagggctgggttcagtatgtcgtacccactactaatgccccctaactctcgcacaaggcccaaaggagatgaatttaaccttaattaaacaactgtcattcaataagcccaatactaattggacctaaataaaatctatcaaaagtgacaattttattttagcaatctagtccattttaattacaaaaattaaatgggctctctatatccatctaagcccaaagcaaatatataggcacaggcacacactgatttggatggatcctatcatgttactaggtttatacacaaatgaaagaagattgtaaaatttacctgttacaaattatttatttaacctattgacaattgaactattggttaaaattatatcattggatctgtcgacaagttaaccatgtcaatttagatcaaacaataataggttttataataataagtttgaataataaacaacatataaaacacacacatgcaacaaactcgatagttggatataggatttatttaatttaaattaattaaattattaaattattttcaaaaaatctaaatgataaattattattttcgaaaataataaaattaaattaaataattaattttaaattaaacctataaatttgaaaaattacatttttaacaaacctaaatatctattcaaaaataccaacaaacttttcaaaatttatgttattt

SEQ ID NO: 268768 - DNA, 883 bp, Cannabis indica
caagttctttcaaactttctccagatacatggccatttttaaacccttagcctagtattcccctagaacttgatttactataagctgtgaatcactatgaaatatgagatttctagctttcaatacctcagttatcctcaaaccagcgaccaaagcttcatacttagcctcgttgtttgatgcattgaattgaaatctcaaagcatagtcaaacttaaagcccactagagaaactagtattacccctacacctgagccatgctcattggatgcaccattcacgtataatttccatgtatccgcatctcgctgaacaagcaaattttcctctagagttattccttctatcaggaaatctaccaaggcttagcccttgatggatgttcgtgggtgataagttatgtcaaactgtcccagttcaattgaccattttatcaatcttctagaaacatctggttttgataaaacttgtctcaagggttgattagttaacaccttaatcggatgtacctggaagaaaggtcgtaacgtgcgagatgcatggattaggcataaggcaagtttttcaggagggggatacctcgattctgcccccagtaacctcttactaacatattataacagtaaacataaacgaacagtacgaacgaaaccctcttctaccttcttcaagaaaattttctctccttctatacattttctttgattttcaacctgaaacctagcgatctaagctctggtagtagcgtgatagcaaatccttaaagagggaaagcttaagggccgagatcatcagggatagttctccacttgggttggccaaaatgtatgaacttggattaaaggtaagaaaagtatattgtactgcatagtacgttgtatg

SEQ ID NO: 268769 - DNA, 805 bp, Cannabis indica
atttaaatcaagatggaataattcattccattcaatctccattattttatttatgttagtattttatattagttacttttaatattgatttatttaatatttattaaagattttttttccacataactagcattttaacaacaaattaaataaaattaaagataaaatatcaaattcaaagaaattatatatataaagaaataattaattttattttagattatattatttatttatttataaacaaaaatataatatacatttaatctatcatatttaagattttttaatcaaattcgtataaatataaatatccgcattttgtggattggatggattgaattgaatcatgcaaattgaattaaattaaatattttattgacacctcgagtttcatacttagttatgatatcttagtttatgtaaacatacaaattgatacattataagaaaaatataattttaattaatcttttttattcttaatagatttcttttataaaaaatagtttactatttaatcagtgacgaactcaaaattttagttaagaacgtactttgttttttacataataaacataatataaatgtaaaattggttaacgcatttaagtgtatgtgtaatttatgtatgcaaatattattattattattatctttgtttaattaaaagagagaacctttttgtttgaacaaggaagagagaaccttttatttgggtcactttacatgattttgtccgtgttttcagttaatgtaattatttatttagtttaatagtgtaatatttatttatatatttttt

SEQ ID NO: 268770 - DNA, 1975 bp, Cannabis indica
gcataaaacccaacacattcataggaaaccctatgtttagaaactctgcgattcttctttgtcatggtttcatgcgattttagagtccataatgtttgctttctgaactgcataatgactgtctttcatcttgcttattctaagcttcacgaaatttttgccctaactcgaggaaatttcaagcttcctgagttttgacttttctttgaacattcttattctttaatatgttgagtactcctagtcggcatatttgcttgcttatcgctcgatattccggccaaacactcatcttgtgtgttgtcttttgtagatgaacccgggtgagttttgggagagcgaacatcgaatcgaccaggacttgctttaatttttgcacgaggaccatcctcgtctctgttctagctcactgtcttctagttaaggaaattctccctcaaatcttttatctagccatagaatgatggctcgtaccaagaaaacaacgtgtatggccgacgcgtctgatccttaagtggctcggcatgccaccttacgcagcaccgaataggatccaatcgttaaggaggagggggatcatgaaggggacgctgaggtctaggagattaaggagcagggcgacgttcgtcctagtagttcgtctgaggcgaaggaagaggaggaggttgaacccccaaactatggaggatacaacgaggctggggagccagtcgatgctgacggagacgtccttgttgagggcgtggactacgtcagtgaggagcttactgtcgtggttcctcacagaaggcaaggtgccttgggcgctaggttggtgagtcctccatccagggttaccgaggcacgcctgcagactctcgaccggggtggctacctgggcaaattggactactacattcccgcccagaataatcgtgccacaaaccctgacaagaggatgtgcgcttggtcgggcgctcatgcccagcaagggacattgatgcctttgcaccaatactttaagaatgtggcagacttcttcagtctctgtccgacccagttcactccgaagggaattaagtatctgtctgccctcttcgtcctttatgcctcccagaagtgggacatgccttctccccacgaggttagatggttctttgatttgaagtccaccccaaccaaggcaggccggggtacttctacttctttctactagacttcaagtggttgacgggcaccggaggcaaaattgggcattttgttgatgattacttcttggtggatggcgcgggcatcacccgtactcggttccatcagattccaacatatcaccgccctccgttcactcttgctcttagggatagagctcaaaagattgctcgactgccgggggaagactagaatatcatccagtttacctccgaggataactttgtaaagtataggctctatccaaaggatttcattcctaagccagtgagggagaggaagaggaaatctggtgctggacaggctgaacgagctcataagaagaatgaactcattcaactcaagcgtgaagctaagttgaaaggaggtgcaagggccaagcaatattctcaagagcccttgaatcctgaagatgaagctgaggaagagcaggtgactccgctcaaaaggaggaagaaactttcggccctgcccaccatctctcctgctcggccgccttctcccatgttcggaaaagggaaagctattatgtctaaaataagaggcatgtcaagtgatgatggactttcgaagcctgctcgggcaatcatcttccatactactcaatcttgtttttaagcttcttgactattatgctttatgtttctgatgtctgtttcctctaaccatgtggtttttgttccgtgcagacatgtcacagaagatgcttgatgctctgaagaagagaattggcgaaggctcgagcacatctcccccgaccaagaagtctaaaggcggtgaggggacc

SEQ ID NO: 268771 - DNA, 1312 bp, Cannabis indica
ccttccaaaaataaaaaaaaagagctcgagaccggctgtctccaaggcattgaccttctccttcaacctgtccacctcggccaaaagctccccctccttggcatccttctcctccttcatctgatgaagaactgctcgtagagaagtcctctcatctggaagactgtttacctcagcagataaaatcttgatggtctcctcaaaatggtcagcaacctcgagatccttagttaacacggttattttcttctcagcggcaaacaacttcttcttggcttcgcccaactccaactgaacagctccagctttcgccctcgcttcttcagcttccttcttggccaagtccgccttcaccttcaaggtgtcaaacaaagccacattcttggaagcagtagacttagcccaggagtaagtgtaggccaactttagacctccctgcacagaggaaaaactttatcatattaatctatgtgtggaaaattaaaaggaagtataaaaaacacataccttggtgaactccttcaagactccgcccaccagcacatacaaataagagtgattgtcaacaccagccagttgctcactgacctctgcaaccagccggttcatgtaatgggccagcatctccttgccctttttggcctttggaagcactagcaaaggtggagttggtgcctgcacccgttctggatcactcctgaccaattcagacccagactttggtggtctagactcctttgacatggcagctttaagggcagaggagtttgcagcagtcagctcctcggaaagatcaataacctcctcgaaaggtctcttttcctttgaagaagaccccttaccgcccttagacttcttggccggaggagaggcgctagagctttcgcccattctcttcctcagaacatctagacatgtctgcacagaacaaaaccagtatggttacaagacagccatcagaaacacatggcatgaaaatcaagaagctcaagagcaagataaagtaaaatgcaaggtgaccaccttgcacaagactcagaagtccatcatcacctgacatcgttcttatctcagacatgatagctttcccttttccgaacacgggaggagatggccgagcaggtgaaatgggctcccttatgcgaattgcatgttcaaaaggcttgggcgaggtcgggagtttcttcttcctcttcagtggagtcacctgctcttcctcaccttcatcttcaggatccaatggctcttgagcatattgcttggccttggaacctcccttcaacttagcttcatgcttcagttgaatcaactc

SEQ ID NO: 268772 - DNA, 459 bp, Cannabis indica
aattagatataaacttggattcaatggagaatattattattattatattggatatatactagtatagtatttatgaaatgttaaataggtacgaaccattttcattaatgtaaatttcaggattgttgtaatgatcctttatatgtagcaaaagccttcggaatccctgtggatatatgaaaatccagcccactgcagtctgtatacaacataatacacaatcacatcacatgcatatgtatgtgcaaagtaccattaattagcatgtgagtatctcacttatacaaattttcatttcgtagacttgtaactaattaatggaacactgtttctaaggtacagttgtccttttcataattaattattcataatatgcccttcttaacacgtgtcaattaatactactgaaaacaatatttagactatttggacagactgagagaaaaagagagagagaga

SEQ ID NO: 268773 - DNA, 693 bp, Cannabis indica
aaaactgggaatgaggaacccacaagaatgttggcggttctacgcctgtgagtgagggtgcctatgatcccacgagatacgtagcgtttgcgagttggaaaattgtcaacaccgacgacgtcaggaggaggcaaaccaacaaaacactaagttggaatgggaggcagtcgcagccaacacaactcaggaaaacaacacacggaaccaacttgatcctggtgtgagaaggccgcgaggttaacctcaaggctcacgaacaaggaggctagagacagctcaagagcaacttggggaaactggggatgttcctgaagatgaacaaccaaatgactaggcacctcatcgagaagtgccttgaagaccctgggaattgacaacccaggggaatgaaaataatgatttactagaattttcttgtagaaacacgagtaaaagacaacccaggactagggaataggaaatccctcatggtagcgagagaaatcctggaactcaacctaggataggcgggttaccaccaagacaccatcaacgtccttatcaaactgatagggaaggggcacatgcaaaccacagcaaggggcatgtatcgacttgttcgcaaagaagaaggctagtacgtgacaaagcaagttctagttaatctacgcgaggaggggataaaactcgtcgcagtaatgattgagaaagtac

SEQ ID NO: 268774 - DNA, 643 bp, Cannabis indica
tcttgatccactagaggcgaagccacctaggatctgttttctgttgagttctggttgtatttatttgtattttttctcttcatctgtaaaactgtaataataaaggttacagtgaggtctaattttaacactcctttcagtctggatatcactgacaattttttatgtaacttcttctgaataactaacaatattctataaaaattattacactaaatcatgagttccaaaatacttaatttgatataacacatgaaatgttgctaaataccattactaccttttaccatttctccatgaatcattattgttatttagatgtaaatacaaataattcgtaatgacacgtcctttttctttgtccccctgtttactttcaattcaaccataaaaaagttaaaaatagtgcaaacaatgaagcacatgggcttgcaaaagaatgtgaactgacataactaagtttaatcatgaactaagaagcttttaatttctttgaggaattgtcattctgggcccagaagttcacaagaaaagtatccaaaataatctgcattgataattacttgtgtcagctcagtaataatattaaatagctacaaaggaaagcttgaatgagaaatatatgataatgagagtaaccaac

SEQ ID NO: 268775 - DNA, 772 bp, Cannabis indica
actaaaaccaagactcaggacctcaacctgaaatcagaaccacactaggacctaggaaccggacttggatggggcacctagataacggacctaggccccggaacctagaccatgatgtaaattgtagacttgaacctgaaccaggacctgacctggacccgggaatctaaagtcagacccagacccagacatgaaacctgccccagacctcaactaggacaagaacctggacatgaacacataccagcaaaaaaccataacccggaccaaaactcagacacagaccaagaatcagacccaaacatagacctgaaccaggacccaaactcgaacccagaccaagatcagaacccaggacttagacccagaactaacctcagactcagattgagatcaaaacctaggactcggaccagaaccttgacctagaccaaggaccccaacccacacccagagcctgattcggacctagaccgagatctagacccaaacacaaactcgaactagaactcgaaccccaacccgaactcgaacccaaactcgaactctgaaacgtgattggaactgtaactggactaggactaggaccaggaccagaactaagacacagacccgaacccaaacccaaataaaaacccagaccgagactcaaacctgaacctcgactaggacccatgcctaaacctagaatgggacccaaacgggactaagaccaagaatcgagatacggacttgggcaacgaaactaggacagggacccaagacccgaccc

SEQ ID NO: 268776 - DNA, 685 bp, Cannabis indica
ttctagatttcaccactttaataaaagataaaactatttctgtccatgattctttcactatggttacctcaaataaatatttagtggttgatttaacgtgtgtaatttaaaaccaacatttgttaaacatacaaaacaataatggaacaacccaaaaataacattagaaaaccatgacaaccccaacattaatggttttaatacttttgcttcatctcactggatttaatggttattttttggttgttctggtattattgtggtggttctgtctgtgggtttagaagatagagaccttgttttttattttcagtgtttacagtataaaagaaaaaaaatcccaaggcagtataagagttacttttgccgtgtgacagtatttttgtaaaaattgagtcaaaatccagtatttttgtaaattaccctcaaataaatgggtaattctagataaaacgaggcggcattcctttattctattttagtcacctaaccatatgtatatataaataattattatatatactagtttattcactactacaaaaaatattattatctaatagtatacccgatggttttaaaccgtggagaataaacccaaaattttatcattttgttcaaacattcagattttactccctctccctcatctttaaactcgcgatggaacccactaccaccatgg

SEQ ID NO: 268777 - DNA, 873 bp, Cannabis indica
ctaaatcatgtctttggttaagcatctcgatttcgcctcaagagagaatcaaacaaattctaagacttgtgagatcacaaaatcacatatttacacaaactttcaccaaatcacgcacaattaaatgatcaaggcatttgtgctcaaaattggacatatctcaatcaaaatgaaactagcaaaagaattaatcacaagctcaaacattacttacgttttcaacaagttatacacactatcaatcatgtattagaatttggaaaatcaccaaaccaaagcacatatgcttcaataaaaaaaattgacgaaacaaaataaaataaaaagaaaaatttagtttcccaaaacattgtatgcacaaaattctcatgtgtgagcaagtttaaaataaataaagaagagttaaagaagaactcccctttcaatgatgtgcaaacttgctagtgtcaacctccataagtgcgtctgattccatttcactttatgcttgcacctacaagagagaaagaaagagagaaaaaaaactacaatacaattgtcaaaaccattaaacattgcatatttattgaatttaaaacaaaataaagacaaaatttagaaagcttgggttccctcccaagaagctcttgatttaaagtcgtcggcttgactttttgagaagcactcatcatagagcggcttccgcccatagagagtggtgtatgccctcacaaatgggtctttgtcgtgcgccctcaagcttggcgagatatggaattgaataggcaaaatgtcaacttgacttgaattcgatgactccacatgatggatgcccaggtaccatgccaatggtgggggaggaggtagtggccaaaaaggatcttcataaacgta

SEQ ID NO: 268778 - DNA, 1114 bp, Cannabis indica
tccgggagtacgtggagccctcatatcttcgtccgggaggttattttcttgttgatactcttgatccaaaaagacttagttaagttatcccataatcattatttttcagatccacgtgtcgcagttgcattggttcgtgtattttgggaaaaattaagggcaacaccagggatccttcaaattacatgtattgtttgcaaaaacagaaatatccgtagtaagaagacgatgatcctgttcaaagaaaaacagttgtccaactttcttagctgtcccaatcgtaaaagtcagggagggatcctgaatcaaacattgatcaaaagtaaaagtgactttattagcacaatgttcaagataagcattaactgaaaataaattgaatttaaattcaggaatatacaagacattcgttaagacaagttggtcggaaattttaacagttccagttttgttaatatgaatctgatgaccattaggtaaagtgaccaagttagcaacattatttttatttaaagatgtaaagcaatgaagagagtgacatatatgatgagcagcaccactatctacaatccataagaaaagaggaaaaaaattgtcattaccgaagacgttagaaaccacaggaaggttttcactggtggaaggggcgccttggatttgttgattgagtagagagatcagttgttgactaagctggagttgggaagtgccagccgtggaggggtctggagtgggagtcaccgagacttgatttgcccgagcagtggtggtggccttttttttgtctccatatccgggggaaaaccatggagaaagtagcatttgtcaacaaggtgacctgatttaagaccgttagaacaagttggttgaggtttcttgttccgagatgcttggttgggatttggtttggccgaagtagcagcaacaacgccagtattgccaagacagcgttgtcgctcttgttgaacgaccatggagaacaccttggatagagagggcagtggctcataaagtaaaatctgagcccgaataccccaataagactcattgagaccaatcaagaattgaatgatctggtctcttgtataatagtcttgaaccttttgcatcgcgc

SEQ ID NO: 268779 - DNA, 635 bp, Cannabis indica
tgggaaatagctttgcttaagtcagttatctagtgtataggctctcctttatttgtgtttcgttattttccttccttctactttgtaatcgacccctctgtcaaaagattatttagggtatggggcaattttagctcccacattctaggtttttcactttccctctactttcgctgcttttgatatttttgcatccgatgtttgctaaagaaaatcctttgggtttccatctttggcaaacattcggagggggcctctttccagcggttaagggacccccattctctcttttaacactagggtttggtttgggggctaactgatggattctatctttttacagaagcaaaatgtctactcctgcatctggaaccaaatcttctcggaagggagcggttaccgtggccaccctggaggaagtcatgaagggcccggtcgcccaggaaaactatacttgccgttccaactgctgggaggcgaatgagcttcgctcaaccctgacctgcgcccatcagttggagaaaattgtgactgtagctgacattaagccgtctgcatcaggggtttttcaccgtttacctcaggacgaagagacgcccaatcacaactacaggggtttcggagcttggagccag

SEQ ID NO: 268780 - DNA, 396 bp, Cannabis indica
tgttgacatcaaatttatatgattatataaaaaaatacattataaaaaaaaaaaaattattcataatctcatacctgtttcttcttctacttaatctcacacctgtaaaaaaaacatcacacatatatatagctataaatacatatctatataaataatcgaataattaattaatttataattatatttattattatgtgttttttaaaaaataattaatttaagatagatatttttatagaagatttattaaaataatagtaaaatattaatttgtaaatttatactttaataaagtattaaaaaaattgagaaaattaaggaaaaaaaaaagaaaaataatttcagagagattaactgtaacaccctaactaacttaggcgtattacgtgattt

SEQ ID NO: 268781 - DNA, 1076 bp, Cannabis indica
agagacatgctactatgcaaatcatctacacaagaaataaggtgcattaaaaagtgatcaaaatccatattaccaatcatgaaaattacaccaccaatgttcagattgcatcagctgtttagtaacattaaaaagtgatcaccatgccctttagttcaagcttaggacaacccggaatataaaaaacttcaatttgctgaagttgcgtggaattgatgtcaaattgggacagtcatatatacagacattcccaatggcaccagaatatgcattatggggctacttaaattgataaacacaacatgacatacatcatagaacttcataacataacataccttaatggctggcaaaataatttctttaagttcttgatttcgaaaagaaaagaatgaccaagctacctagcccgatttttttgaaaaagagaaagaggcctttgtctaagactgacccctcccccgatatatatagataacctcacttgtggcggaggaataccgtggttacaagtgccataccaaagaaattgttacagcaaaaaaccaaacacacagtacaaaaaaaatatttgtgtttaactctaacatcctcaatagctgaccagaattttattttctcccaaagttcctcttctgaactctcgtcatgtccctcaaaaattctagaatttctttccaaccaaacagcccaaattaatgccataatcgctgttctccacagtttggtattgtgtttgctgccccttagtttactcaccatgaattcaaatatgcatgacgatccattcactgaatgcaaaaatagagttttctcacactgattgactctccaaccactcccatgaaattcttgacaacaccaatcttctcatcaactgaatcttgaatgtgttgaaatgaaagaatgagactccgaaagtattagttctctgttcttttccacagctaactccacttatgtctccatcttttttggtctgatcattgccccgtctcctttcttgttgagctgaacaccacttcattggatcacaaggatgaattatacaaattgacctgtttctgtttcattta

SEQ ID NO: 268782 - DNA, 637 bp, Cannabis indica
gtagatagtattaaataagtataatttacaagaccaatgaaaaaaaaatttgaacttaaaaaattattttacagatactaaatatatacggtgtatctactttttaaaggggtacattatagaaattttcaaaaattatatttagacttaaaaaaaaaaaaaactttcaattcaaaaaaacaaataaataaataaataaattgaagaggcaatgtgattatgtgaattcatcgtgtgggtcgtttcaatatgtggtatggtagcaaattcttttcaattaaggtgtagaaaaagcgtagcacgctacaacaaagctaagttgattcagttttttttcttttagtttagtttggattttgtaagtggagaagggtgaaaaatgaacaggaagaaagctacgacttcgacgaccacaaaagctgaagcagaggttgatgagcttttgaaggcagtccaggaagatatgcttctcaatctctctctcaattcccacctcgctcgtgtctctcctaactacatcgactccgatctcgacactcgattccgagccctcaaatcacgaccctcaaaatctccccaaaataccaaacctacccctccttcaaccgccaccgccgatcctccccctcaattgccg

SEQ ID NO: 268783 - DNA, 896 bp, Cannabis indica
ggcagaaaatgagctgactttgtgaatcaatccactatgaaccataccgaatcatacattcccgtggttctaggcaaaccaactacgagatccattgcaatgtcctcccacttccactcaggaaagggctgctagatgtctgcttggggggaaaacctcagtcaggaagggcttagtacagcccttatctaaataaactcggacacaggcttgtcagaagccgcgtgacccttgtccgcgcgcacatgcgtgttgctctatttaagatattttcatccaaatttagaaaaacataaccaattcataaaaaatctaaattgagttctgtaaaagcctaaatttattaattttttgtctactttccagtaacaatattttcagaaaaaaaaaaacatttatcaatgtacatagcgatttccataaaatcataaaatatgcacataaacaaacatgaaaccttccaaatcaacacaaacatcgttttaaaatccatatttcatgaaagtaaatcattaccatggctctaagccaattcttggggattatttaccaggatctagatttactaccatgtatgttatttaacatcctaaatatgaatttctaaaataatgtaatttaaatacatataaagtttaagaaaccttacattggttgcagtggaattaaatgactccttccgcttatatgtctaacccttgtatcctttctgtagaagagtatcaccaagatctgatttgagcctgattctccttcagttgaattggattcttcacagtattacacactatgattgagtaccaattttccatgtgtgggcatgtactctatcactatagggctcggaaattgaagagagaaagagagagagagagagagagagagagagagagaga

SEQ ID NO: 268784 - DNA, 1183 bp, Cannabis indica
gttataaatttcgtgtaaaataaaaataactttgactctctcctaccgagacattattggattcttatttaatcgaaattatcctaatttttcgtcttagcttattcatttcgaatttgcttacatagtataacattggatgaatggtttataaatcatctgcttatgatgtcactctgatttctcttatgaaattgaatgatgcagattactatattctcgatattctatcccgaaatgatataaatcctcgatcttagaatctcctacttatatatgcttacattaggcaaattagactaagagttagattagtagaagtggtccaagaaagaataattactcatgtatatttagtataaatttaagtctttgactttaaatttaagattccaaaaagaaattctatatttctgtttcttgaatacaatatagttcaactttcacaagttattaatatccattttctgtcaatggatccaaactatatgttaatgtatggaatttgagtttagtattctgtgaccagtatccacttggactattctaaaaactctttattgtaactagacataagtcatcaaaagaccacaatcacattcttatatatctatggcatttgcatcttgttcatagtggtttgacaagattattctctgcaaagagtcaatatgcctatatccacttgaaagtaggatcatctatatatggatgtacttttcaggggtggataggagttatcgttaagttctttagacgattactctagattttaccttatgcaaagaaatttgaaatgtttgagaaatttcatgaatttctagcaatgttgaaaaacattaaggtaagtggttaaagatcttgcgaactgataggggtggagaaatatttggatatgcagtgcaaatatcactaagttgattttttgaattgtatccaaacttacctccccagaaattcgatttacatattgatgatagtataaggtctatgattagttactagtagttgcttaagtccttccagggatataccctagtgataggaaaatttcaaaatgatgaaatggttgtgtacttagtgtaaacaattactagattcatggatgacctaatcgtgatcttaagaaagctataactatcaactaaggttaacatgtttgatagctattctaagggattag

SEQ ID NO: 268785 - DNA, 643 bp, Cannabis indica
tccttttcttatagcacttacaacagtatctctaaatatgtattcttagataatttttttagagtatagtctcgactaaactgtttgcgaccttttgcctagtgaacaagcatcactatttatagggctataagcttggagaggatgtctttcccctctcgttacaatggatataagcagaaagatcgtgggattaatgctaagtacaaggatcgtaggattgagacagaatacactgatcgtgggatcgtgtgtatgccatatccctgcaatctgatccccaagttagagggatttcgttgatgactcacaatgcgaaagttgaattcgctaagtgttggttgccctgcacggattgttgattgctttgctctgggcatgtcaacgaggcatcgtgctcggactgttccctctgaccagatactccaagtttattccacgtgtcaccattatgcgatgccacgtcagtgtaaaaattgggataatattttccccccaagtctgtacgagacttccaaagttgcgtgtaagcttcatccgagctgcttttgcctttggatggggccacgtgtcaagcacgagtgtccgagactcgatgtgaggctgagtgggcgtcctttcggttttcagctaataaatgctc

SEQ ID NO: 268786 - DNA, 552 bp, Cannabis indica
tcctagattcgagtccaatcaaactatatattataattttgcatatataactaattgcaaatcaatagaatttaattatatttttatattaatataaatatatatctacaatacaaatgatatcgttacatatatgacatatttttgaaacatatgttatacatgtatatgtacacacagacacaacaattttttattttttcttgcgaaaaaacaatgcacacaaacaattgatttgatatatgagaagcttcaaggctattaattagtctcttatcactaatcatttctttctttattattttttaaggaaatttctttctttatttctttattcatttttttttttgttctttttcttgtaacgtctcagaagaaagaaactacaaaatatgacaaaagaaaaaagatataggctctcatgataatctctttacgggatagatcatataataaagggacaacaaaactatcaaaccccacttgtcacacgaagcaaacaatacatattgataaacatataaaacagataaacttggatctgtctgtctt

SEQ ID NO: 268787 - DNA, 887 bp, Cannabis indica
acttctcctttatatatatatactagcaaaaaactacatgcgagacacgtatattaaattttatgctaggttttttctatgttatttgaaagtgagattattattgaatactgaatgcaatatattagtgtttaaaaaaacttaatgattactcaaggccactactgtaaacaagttaaaaaatcaataaattactcaaacataaaaaccactgtaacaaatggagctctttcaacaagagaaattcaatcaattaaatcacaaatacataatcagctcagctgatttcaagttacgccgagctctattgagcctttggacaagcccggagaaaaccgaaggagcaaaagaaaccatgtttgaattgaaattaatctttttttaaaaaaaaaaaacggagatatacttgcagttgcatggtggagaggttgatacaaaaatagcttaaaatttgaaaattatatcagaagagaaaaaaaagtcttacacttctaacgaactggctgcaattgaaaatagcagaaacttaatgtataaatttgatgtcatttacaaattaattaggcaaaaatattggaaaaagtttcttacacataaatcaatctttacacataatgcataattgaaccctgttacaaattcaatttcaaaaagccgaaaaaaacaaaattttcagtttcataacgattatgtgatgaaaacaaattcaatgttacaagctaaaacctactaaatttaaaaaaacacaatagacttacccatttgcgatcaaaaggccttggagctacttctttcttggtcataacatgtcctttgttcaaacaaagaaaaaagttcatatgtggctgtgttggaaccattacttggatcaatacaatcaaactaaa

SEQ ID NO: 268788 - DNA, 708 bp, Cannabis indica
tttttttttctgcattacatcaattaaactagaaatagaaaatatccagacggaatcttctaggtggtaaatactaaatagaaagaaattaaacaagaaagaaaattaaaattccttaataatgaatagataatattagaattctctgtttatttaaattttttacttcacgtcaaaaaaaaattattactttgtgaaatggatgtgagggaataataggattagtttagccgttaaaggaagaaatagttgtagctgtgaaaaaaaaaaataactgtaatagaattgtgaaaagaaagttaagttgaatgtaataaattataaattttaaagtgctgcaagttgttaagattttattataataatgataatgttatagtatagttcattataattacatatatataattatatatatataaatatattacataaatttttattttttttgtatatttttaattatttttctcatagtataaatttatatgcatgcatttgattaaaataatttataatattttaaattatacttttatcacttgtacaaaaaattataatttataagaaatttaggttgatgttgtttgttaataatataaatataaatataaaatattttttaaaataaaataaaaaaataaaaatttaaatattatttatgttatgtttttttttttgttctaatcacgtaactatattgattcc

SEQ ID NO: 268789 - DNA, 494 bp, Cannabis indica
atttcgtgggtgtaagggcccaatggaggcttgaagcgagaacgttacacgaggagtattctcttaggatcttattcttgtaaccgttcatgaaacgtaggaaatccccacgtttcacatatacatcatatagaataatgacaaataattgttcttttagttgtaaaaggttatgctgactatgccttattcttctcgcaatgcaagcaatctccttaagacgctttattctgaagaggattgtcaatgcctaagtatatttcaagtaatacttctcgcgttcttctataaatgttgagtgaagcagatgcaagacacttgtcatagaatgacaattgcgagatgaaccatgctgagaatgttgcccttagtctttcaacatactcaagagtatgtgggtgaatgagatgtgggctctttgaataattcgttatctaccatttccaaagtcattctgttgtttatattcagtgtatctcgagatggaccttatt

SEQ ID NO: 268790 - DNA, 1093 bp, Cannabis indica
acttcggatctctatccgaaactatggattttggcatacgatgcagtcttacaatttctttaatatacaaatctgcatactgatccactgaaaaggttattttaactggtagaaaatgtgcagacttcgcgaatcagtctaccacaacccaaatagaatcaaacaaacccgtggttctaggtaacccaaccacaaagtccattgcgatatcttcccacatccacttaggtaaatttaaaggctgcaacaaccctgccggtctctgatgttcaaccttgatttgctgacaggttaggcatgtcgatacgaattctaccacattcttcttcattccgttccaccagaagtaaggcttaagatcttgatacatcttggtggttccgagatgcagggaatatggagtagcatgcgtttttttgagaatttcatttatgagttccgcactattaggaacacaaaccctggttttgaacaacaacatcccactatttgacattgtaagtccctgacttgaccaattaatacctcttctctgatctttactaactctaaatcagttaactgagcggctttaatcgttcaaacagatcagattgcagcgtcaagttatgaagcttgcctacaacaaactcgatgctagatctgaccatgtcctccgctaactgaggtgaaatctaaatcatactagctacctgcccgagacccttcctggtcagggcatcagccactacattggccttcccatgatgataaagggtctcacattcgtaatatttaaataaatctaaccaacgcctctgtctcatattcaaatctttctgggtaaagaaatacttgagacttttatggtcggtataaatttcacatctctctccatagagataatgccgccaaatcttcaaagcaaatactaccgtggccaattctaagtcgtaagtcgggtatcgctgttcataatctttcagctgatgagaggcataggcaataactcgatcagcttgcatcaacacacaccccagaccctgtctagatgcatcacaatacaccataaatttctctttatcaaaaggcagagctaacactgaagctgtaa

SEQ ID NO: 268791 - DNA, 911 bp, Cannabis indica
aaatcaaaaacataaaatatgggattggataataagtttataaaaatatggcatatcaaataccataaaaaatcttaaatgtgaagaaataccatagaagagtggcaaacctaaaaatgccatattttctaactttgttatgaaatcccatatttcatataattttcacaactacctatgcctcatgtatgcaccgaaacaaactacttatgtgtgggcttctaactgacgcaaaatattctttttttttggacaaacaaatattccttttgttaataaccccaaattgaacccacaccaacattccattctcctttttattcaatttttgattgcctccgccctctctctcggtggtgaactgcgtgttccctccttccgcctcatctctcctcttgaatccctttgtgcatgaaaagctcttgtttggctctcttctctcgagtgtggacggcattgatgaccctctttcggctcagctctcctatctcgtttgagcagcgcccgcttagctctgactctctctattagtccctctctcactcttccatatgtagatttttactttgggtttactagcaaaaaataactcaatatccaggaatataaatgtgttttgttttctcaagctagcattttactttgggttttatgatataaattattatttggtttaatctgtgacaaaatttattttctgtgtttgtgatatagtagttctatattatagtggttttatatatataatcaccttcacactataaatatatgtacaaaataataagataaaataagaatcactatctttatatattaaaagtgcctatctaacggcaattcttgttttaacagaatatacttaaaattaaaagaatattctgttaaatttaacgattaggtttgatctcccg

SEQ ID NO: 268792 - DNA, 595 bp, Cannabis indica
agggagacttaccagatccggatttgctggcatcaagagccctagtattggtaactgggaccagcaactaagcccgagaaggcgtccattcttttcccgcctccagtcgaagggtccttccggcaacggactgagccatgatataggctaactcctgttctctcatgaagagatacttatgataccgatcctccgccgaggctataatgtccgcccagagcacctttttagcgtccggggtacgaatgtttgggtagaggaccttggagaggttgaagtcgtccagtgattgactccctgagatgagcttggccttccgtcagttctccgttgtgaccaagtcccccacgttaagaccatttctgtcataagaggagaaaactttggcatgctggaggaaaagctgggtaggagcagtacgaagcagaggggggatcctgacccacttcctgagaagctccgggcgatccatggcttgaagccggaagagaagaagaagcagtggcgatactccttaacattcttttgaaaataaaaagggatcgggccctcgttagtaggatgggcccggagagtgaaaaaaccgtccttaaac

SEQ ID NO: 268793 - DNA, 791 bp, Cannabis indica
ttttaaaactgtaatcatgatctagaaactggtttttcatatgagaattattttgaaacctcaaacctcaaaaccacccatacacaccaaaaaccagttcctataaataaaacaaagattataactgctcaaacacaacaataatttcttcatgcaaaataaaatccctacaagtttataattgatacaatattttcaacagaaattacatggcttttcagattacacaataaacccacaatttattacagcacattgactctaaaacccgaaattactaaatcatcaaaaaaaatcatacccaaaaaccagtttctaaaaaatgaaagaaaatttatcactaaaactaacaaaaatcatacccaaaaaccaaccaaatttaaaaaaaaataaacacaacaacaacaccgaatattaacaaaaattaaaaaaaaaaaaactaaacaacaaaattctaaagcataaaacaaaacccaaaacacaaaatacttaactaatccaatatgaataaatacaacaacacaataatcacttcggattaaacattttttaaaaaaaagaaaaacaacaacacactaataatcttaaaacagaaaatgggttgagattgttttccaatgattctccttgtttctttcttaatcctcctaattttctctcaaggaactactctcttctattctcatttttcccactctctcttcggattaagcataactcaacaagaaaatgcaaaataaaaaaataaaaacgaaaatataagaatgtaagaacgattaagaacaaatgca

SEQ ID NO: 268794 - DNA, 534 bp, Cannabis indica
ccttttcctcttcctgacatttttgattctctgaagctttttctcttaggatttcttagtggtgagtttgttgttattgttggaaatgaggttgggtaaggtatttatggattatgagatgtgtaatgatgaccgttggattaagtggcgatctgtgtgtggagtgaggttggattatgagccgctggattaagtagcgatccgcgtgtgcagtgagtttggattgtgaaccgttggattagctttacttgaattttattggtggggctgagaatgtttgaagtgcgcgaaagttgataaaatgcgccaaagttcgggaaattaatttctcaaaaaaaaaataataataataataaataatgaagcaagcaaaatataaggcgattctatagtgtttcattttagagcatctccaaagagacatcaaatttggtgttacactatcaccaaatttagtgtcaaaaattatttctactccaaccacaacaccaaaaattacattaaaaaaatattcattattattatattaatttt

SEQ ID NO: 268795 - DNA, 506 bp, Cannabis indica
tagtaactagtacttgttacttttttttataactagtaagtaattaaataattaaaattttaattttgttgtatttcattatattgtaggttgtgagctaatttttaaggttcagaataatttggcgttgatcgaattttaagttgctataggtatagacattcattaactttttgttatgataatttattatcaatgcatggttagtggagtttgaatatcttaaatattcatccatagtaaagtaggttctgtgatatatcataatgtggtcggatggatgtataataatatgcatattagttgagtttgaatatcttaaaaattcaaccatagtgaagtaggttctgcgaatacatgtactgcggtcggatgggtagataaattttgtatattaatgttattttgtttgttttgtattgttttgtttgttatttttgacatttttaaaattttttggaacgtccaattacagttgttatcctgctgaaattttagtagaatta

SEQ ID NO: 268796 - DNA, 1094 bp, Cannabis indica
cagccaataactcaaaacatgcataaattcaatttcttaaaactcaagaaacataagaggataaagtcaagagcttacctaaagcttgagaccacttattccttgctctagctagattaaaatgcaaaaaattagaccagagcctagctagttctagggatttcaagagagagaaagagagagtggaaaaagggagtctatttcatattttttctaattttgtataaatgaataaaaggttgttttattaactaattatcagctaaaaatcaattaaaaatttcattatcaacccaaaataaagtccactaaagaacaaaacacaaatggacaaaaagaccattttgcccttcccacactaaaagtcataaaaggtcacttaggggtattttagtaaattctaaaatcttgactattctcgacattcacaatgtctaactatgttgtcctgctatactaaaaaatactggatgtgattctaatagccaaacactgcattccaatgttgccaggcacaaaatatgcaaaattatgaaattccatatatggcatatataatgcattctaaattcaaataaatcatcataaattaataattcaaaactaatataacaagtttcataattacacctaattatctgctcatttccaagttaaagctaagcggtctttacaaaacacttaagggtttaagaaaaccttatatgggttgtagcagaatataatgactccttgcgttcaagatctctagcccttgattcctttctgtagcagagcattatcaagatctaaacctggatctctttctctccttcaggtttggttacaaccgtcttactcactatgattaagtacttgacttgctatgtgcgagcatggcactcattcactcaaggtttcaaattgtggaagaacaacaaaggaggttgaaatcactaaggaaggaactttctcatcaactagttgtctgacataaaaaactaggtcttatttggttgaaggcatcaagtggatgagtgagagtatcatgttccttttatagtgattcaactagggattagggttgaattatatggattcaaaaagaataaaat

SEQ ID NO: 268797 - DNA, 1480 bp, Cannabis indica
tgtcgagaactttctcaagagcctgctgatcagtaccttgtgaagtgaaaatatcagcaaagtaaagctctacctgctccaaaatgtcacggctgctggtgtaaacactgccatcatcacttattagttttttaattttattgttggagtgtctagcattggcacattgatggaagaacttagtatttgagtcaccagatttaagccaagagatctgagatctttgtcgccaatagtcttcctcttgtgctagcaattcatccaatattgtttctaaatttttaagagttgtaaagtgatctgaatctatgttagaggaattttgaagcatttccacatgtttatgagcttcttttatgtccttcttcatatgtccatacttgtgatgatgccaagattgtaaatgagtagcacaacattgtaaattactcattgtttaagatatagcattcgaagaattgctgacccaattcctaaaaatgatgtccaaacaatcttaatcattgagcaaaattttttcaaatcagaactgagatttgtatgaaggttcaattatttgcaccccaaccattgaaaccattactttaattgctctgtgatccgaatggtagaagtcaagatgctgaataattggtttctcaaataatccagaccaaaaatcattgtagaaaccataatcaagtctctctttaacattgttaagtccttgacttttgttagtccaagtaatgtgttcaccttcataagcaactactgctaaatgatagcaatcaatagttgtttggaaggcttgaatttgaccattattacggggaggaccaccaattttatcatcatgagtgagaatctcattaaagtcacccaaaaccagccatggatgattgggagcaatgtcagaacatctcttaaggagtgtccaagtgtgaagtcgttgattactgttgggatgaccataaaacctggtgaaatgaaaagaagacagatcctagaattcaatgaaacagtcaatgtggttggaagaaaagttattaatggccacatcggcctcacatatccaaaggagcataagaccaccaccaagtccaatacgaggaacctcaatgccattcggaaaatgtaaactattatgaaacttattaatactaccagcttgtaattttgtttccataagaaaaagcacacaggaagcctactcagagataagcaagcgtaaaaatctgaatgtagtggggttccctaatccctgtgcattccaacttatgagattcatggcgagtcgcagtggtgcatagcatccaccgcgacagaaccagactgttgtaaggctgaatccgtagtaaaaccagaaaaaccaaagcagaagaggggtcagcagagactagtgtgacagactgaccattattttaagaacgacagcgtttaaggaatttgcgaagagattcagattcaatttttcgtttagaagtgttgttatgtccga

SEQ ID NO: 268798 - DNA, 1061 bp, Cannabis indica
aggagtttcagcactaaagaaagagagaaagagatccaggttcagatattgataatgctctgttacagaaaggaatcaagggctagatatctgaacggaaggagtcatgttattccgctgcacccaatgtaaggtttcctaaactttatatgtgtttatttcataatcgttttagaaagttcatatttaaggtgttaatcaacatacttgtgagtagatctaagatcttggtaaaataatttccaacaggatcggcctaagatcaagttagcgaggtgcccgtcttgttatgggaagactccatcccattagcattagcgaggctgacaatcttggcgagccaaaagataacattcaaatgagcctggaagattaagaactgtggtcgttacaagacatgcattgacgaccccagaagaaaaatggccccagctcgctattgagatcaatagaactaagcttctctcgagacatttccagatacaacaattgaagacgtgcttaatacacgattgttttgacccagtaaaagtgagaaaatcacagctatatgattttccaatcataaaccgtatttacactacctgatatgtaatcaaatcccataattttagtgatgattgttgtaaacgtattacggtcaactttataattaattgtccactatgtaattataaatagtggcagataagataaaaaaaatggacgaaaaaactcatttaaaagaggccctgaaaaacaatcagaaatctgaataatattgactcatggactatgcagaattttaactgcaaaatcacgtaaaaaaccctgtgttcatatcttcattttttacagcttttattttttctgcatggaattattaccgtgaggctcaaatttggttaacgaaaatctgtgttaaaagtttggtgctttcattgagagcctctgtaaaaaaactcaaaaaaattggaagagcaaaaaattaattaaaagttgggtatactctattttgtatctagagctttaatctaaatatgaaaattaaaatattttttagcatgataaaaatcttttaa

SEQ ID NO: 268799 - DNA, 1127 bp, Cannabis indica
ctctcggtcattacaaaatagattccccgataaagaggaaatcgaaatagagccaaacagttggtgggtgaaagcccactttgccacattattggcaacaaagttacaatacctactaacattagaaaagatacaacaaataaaagagggagatgacttgatacaaaatgagacatagttctcaagagtcgtgcatcgattacttgtctcgagtcactctcgataattacgtacttataccctaaatctaaagccagcgaaacagccaaacagcaggctgcagcttcttcacataacacatccaagaagtccaaccgagaagtatcaacccgaaccaccttgcccagatgattcctcgctacaactgcaatgcacatagtctctaagcccactcttacatcacaattcagtttgatccaatcctgaggaggaggattccaaatctcccttgtgaccggagtaggcgtaggcaagaaagaatcatgtaactctacaaaagaaataaaaatattattgctgacctcgcttttagccaacgaaagtgagtcttatttagtaagcgataagtgatttataacaattgatatattggaaagcaatgtaaagacacgagaattttatagaggttcaaccccgagcagttcggtaatggcctaatcctcgttatttgtattgactcaagaataaggagaaatgttccttttcttatagctcttacaataatatctctggatacgaattcttagataatatcgctagggtaaaatctctcctcctttgcccagtgagcatgcatcactatttatagggctatgaacttggagaggaagtatttctcttctcgttacaatggatataagcagaaagattgcatgataaatgcagaatacactgatcgtgggatttggacagcttgccatatctctgtgatctgatccccaagttatagggatttctttgatgactcacgatgcgaaagctgaattcactaagtgttgatcgctctgcgcggattgctaatcgctttgctccaggcatgcctatgaggcatcttgttcggactataccctccgagcggatactcaaagttgattccacgtgtcaccatcatgtgatgccacatcaga

SEQ ID NO: 268800 - DNA, 953 bp, Cannabis indica
atgaattacaggacaacacaaccccatctagcagaaaatatagatataaaaaaaacctaaatgacagcataataatagagaaagaaagagagagtagccaggcttttaagctccatttaatcattaaaaaaaaaggatgatatgttgcccatttaacacatcatattcccagttcttacatcattttgaatatctagaaagtgaacatctactacaattatgttaacactggttatacaaaaataaagtatgtagaaaaaatattaaggtccatagattacaagctagtgccccttgatattcctaagtttgaaacttaaaatttaagcaaaaccatgatatttgtttattttagtagacaaaaattctccccaaaaaactaatgatagaatgcaaaactacaaaaaaattacaaaacacgccaagttctcttgtgggctacaatctaaaaattgaattagagaaacacaattcatttcaaagaaacaaacagaagattagttcttcaatccagtgtataagactctactgtgccctgcaaattagcaacagtagttctgttatgcaacttactatttcaaattttatgcaaaaccatggaaatagggccctgactactctgagcagaatagaaaaaaaagaatatatagaatttgtcatcccaaactatgacccttgtaaagttttgtccataaacctttttgttgcaaaagttttccttgaattatgaaaacaattgcttattacactctgctaatttcattaaacaatttattgatatagcgtgacgttaatccaatgcacttcaagaatgcacacaaataaaaacataaatagcagtctagtgatgaataaagggaatatttctatgcattcttagagctaataaagggaatatttctatgcattcttagagctaatatttgtatgcataatatcaataaacaggcttt

SEQ ID NO: 268801 - DNA, 639 bp, Cannabis indica
tgggaggcttgcaaaaaattactccggtacttgaaaggaactatcaaagatggactatggataagaccttcctcaatcatgactcttcatgcttattcagacgctgactgggccaattgtgtcgatgaccgacggtctactagtggatatttagtgttccttggagacaacctaatcagctggtctgccaagaaacaacaagtagttgcccgttccagcactgaaagcgagttccgagcacttgcaaacactgctgctgaactcaaatggattcggtctcttctacaagaacttcaagtatcaattgctcaagttcctgtcatatgggttgacaaccaaagtgccacggcactcgcagcaaatcctgtctttcatgcacgctctaaacatatcgagattgatcttcattttgtccgtgaccaaattctcgacaaccaactttcggttcgctatgtaccctcaatcgatcaagctgcagacgttttaactaaggcactgtccaccgacaggtttctctacttaaaatccaaactaaaaatggtttccacaccatttagtttgaggggggatgttaatatagctgtataatgtctgttttagttgttagtttttcctattttcctgtaaacagttttaact

SEQ ID NO: 268802 - DNA, 825 bp, Cannabis indica
gacagaacaagaatagtaaacttgaaggagaagacgtgcacatgcaatagatttcaaaaagatgaaatgccatgtaaccatgcagtcgccgtcatgaaggacttgaacataaacacatacaactactgtgcacaatactacacatcaaaagcatggctgcaaacatatgaagaaacagtatacccagttggaaacgttagagaatgggaactaccagatttttttgaagacatcatagtgttgcctccaaaagaaagaatcaagtctggaaggccgaggaaaagaagaatggcagcagcttgggaaacaaagaaacaaaacaagtgtggcaagtgtggacaaaagggacataacaaaaagacctgcagaagaattacagcatagaagtacaaacaactatacatcaaccaaaaaacaactatactaaaacatttagaaaaacatactgaatattactattggttgttacgtttttttttactgaaaatttttatgtggagatatattgataatagagaattgatattattatcattaatatacaaagaacatcaaatattatagttaataattaaatgagtgcaagaaagttgaaattaatatgaaccaaacaaaattacataagtgattaaaatgcaaggttagtcgtttgtaagatggttgtaataaggttttaatgatatgctttcgtgggttaaactgaataaaaaaataaaaatcaaaactagtaacaaaataaaccaattcaataaaaaaaacacatgatagaaacaataactgtctatgattgtcaacataatctgataatagaaaaaacaaaagcta

SEQ ID NO: 268803 - DNA, 659 bp, Cannabis indica
aaaaaattatataataataaaattatattatatacaattaccagtatatttattttattgtaataacaacgaataaatatattatatcattaaatataaggcaaatactatttttgaccatttattttgttaaatgataaaattgaccctaaattttctaaaataacagtaaaataggattctaggctcaatttttaagaatttaattttttaatataactaactttaagataatttttaacacgaatagatatagaaaatgcaaccaattttatcataacatttctagatcagattattattaaactttattttgacaaaaaatgagttcagagtcctatttgtacaattttaaaaaatacagggttcattttgtcatttaacaaaacaaaaaatctaattagtaaattttgcaaaatacaatatccaaaataatatttatccttaaatatatacattgtatatgttatataaagttaatagtataatgtatacataccaccattaaacacctaataaaaactaggataaataccattttagatcctgtgttttgaaaaagttaccaattagaccctctgttttttaaatgtaacaaaatagaccatgcattttctaaaatggtacaaataggattctgaattgattttttgtcaaaa

SEQ ID NO: 268804 - DNA, 584 bp, Cannabis indica
gaattggattgttacattcccgctgataataatcaagccacaaaccctgaaagggggatgtgtgcctggtcgggtgctcatgcccaacaaggagcattgttgcctttgcacccgtactttaagaatgtgtcagacttcttccgcctttgtccaacgcagttcactcccaagagcattaagtatttgtctgccttgttcgttctctatgcctcccaaaagtgggatacgccttctccccatgaggttagctggttttttgatttgaagtccacccctaagcaaggcaggtcggggtacttctatttctctcaaccagacttcaagtggatagcatgggcaccacccatactcagtttcagtagatccctacatatcaccgccctcccctcactcttactcttagggatagagctcaagagcttgcttagctgttgtgggataaccggaatatcatccagttgacctccgaggacaactttgtgaagtacgggctctattcgaaggatttcattcctaaaccagtgaaggggaggaagaggaaatctggcactggccgggctaagagagctcattcaacttaagcg

SEQ ID NO: 268805 - DNA, 875 bp, Cannabis indica
tatccggatccctatctaggtccaagtctgtgtttgggatcgtgtcccatatttcggtctaggtccgggtctcagttccgatctggatacacgaccgtgtctgcggccgagttccagtctcattttgggtttgaggctaggtctgtgttcggttctacgtctgggtctgggtccttgtcaaagtcctagccttgttctagggtactcgttcggcgattcttgttcaggttataattttgggtcccaggtctagatctgggttcgggtttggttcttcgtcatggttctggtcctagtctgtgtcccaaatctagacaccgactactggtctgttccaagccccatttaccgaatcccgagtaaagatttggatcacattcacgggtctcggtctggttctggttcaggtcctaggtccaatttatgagtttgggttcaggatcgagactggggtgcggtcctaggtcccgaccctagttctgtgtccctagtctggttccatgtttgggtctgagttcaggctaacgttagtgtcccgagtacagattcgggttgggatccgggtccggctcccaattctggtctaggtctgatttggagtctgggtcctagtctggttacgaatctggatataggtccaatttcagtaatgattcaaagtcgaagtcgtagttcaagtcctggtcaacttcccagttttggttccaattttgggtcacatggtacgggttcgggtgacttttgggtttgggactgtgttcaggtctgagtgtggtccttgttagggttccggtctagggttggctcccaaatccagacacccactacgggttttgtgaaggttccattttctgtgccgggtcacgagctgggtc

SEQ ID NO: 268806 - DNA, 649 bp, Cannabis indica
acagccgataacgctggtggtaaggctagccgatactaggggtgtacgttggtcggtttgatcagtttatgttacattttatttaacccaatgtacagatcatgttacaaaaatctaagtgctacccgcccaattaagaaaaaaaagtttcaactcgcccaatgaattcgtcggtttactcgggttaacccgtccaaaccgagcactaatgtttatttttttcttaaattcaattgttatattttagttattgtgataatgaaataaatataaatattgactttaaaatttaaattattcgtcataaaaaatatattgtagtttgaactttctattttttataaatatgtatataaattatataatatatagattatatataataaaaatatatatataaaagctctcttaatcgggttggtcgggttagttcgggttgattggacggattgatattattttcaacccgcccaatctataaagattgggcgggttatatttttattgggtttttcagtttgtatttttcatcgggttatctcagttttgtttgggcgggtcgttcaggttgggcggtttgcaaaaatttatgtacatccctaggcgatacgctacctgcccaaccttctcgagtatctgaaatggccca

SEQ ID NO: 268807 - DNA, 1560 bp, Cannabis indica
gagttccttctatagtgatttcgtctccttcattattcttcatactcaacctatagtgatggagtactatgcctacatatagcaaatcaagtactcaatcatattgggtaagacagtggtaaccaaacccgaaggagagaaagagatccatgcccagattttgataatactctgcgatagaaggaacaagggttagagatctgagcggaaggagtcatttaatttcgctgcaacaaatgtaaggttttttaaactcttatgtgtttaattttattgttttagcgatattcatgtttaggatgttaattcaacatacttgttagtaaatttagatcttggtaaaatattcccaacagttagtggtagtatttgcgaaggtgctctccgttccagtgtcttggtaggagaagagctctatgtctttattgtaatttcccagtttgtaggctcccttactagttatttttgtaacttgatatgggtcttcccagttgggtccaaaaactcttgctattggatctttggtattcaggaacactcataggagcactaggtctcctacaaagaatttcctatccttgacttgtttgttgaagtgcctcgtgaccttttgctagtaggcttgtagctttaggttggcttgatctcttctttcttctattttctcaagggattttgccagcaagatgttgtttctatcctggtcataggttgtcctcccgtaagacagcgacaccagctctacatgtaatattgcctcatagccataagctagaacgaatggagtttacccgatgattgtattctcgatggtcttgtgcgaccataggagttctttaaggtgtctttaagggtcttgttgacagcttctaccagcccatttgcttgaggatgggccccgacagagaagcttttgatgatgtcatgtctattccagaaatcagtgaacatgtcattgtcaaactgcttcccattgtttaacacaatcttttgtggaagtccgaatcgacatatgatgttcttaacagcaaagtcaatgacttttttagaggcgattgttgctaggggttcaacttgtacccacttggtaagggagtctacaacaactatgataaactgcacccctctttttccatttgagagttgaccaataaggtttatcccccaaactaagaagggccaaggacactgcatcatcatgagctcattaggtggagctctagggattttttagaacctctggcacttgtcacattttttgacatagtccattgaatcctcgatcatttttagccaaaagtacctttatcagagtatctttttggataggcttttccctcgacatggttaccgcagaagccttcatgcacttctatcattagtcgctcaacctcagccttggtgacacaccttaagggcagcattgagaagctctgtctgtacattactccatctaggattagatacctagcagcctttcttcttatcttctttgcttcattcttgttttcaggcaaggctccagtttggaggtaagctgcaataggtgtcatctatgtt

SEQ ID NO: 268808 - DNA, 519 bp, Cannabis indica
tcggacaaaacacatcgagttggacttggattttgtcaaagagaaggtgcagagtcatcagattgctgtcaagcatgttccaaccatcgatcaactcgcagatggctttaccaaagccattttgactcagaatttctctggttttcgttccaaactcaccattgttgatacaccaatgctgagtttgcgggggagtgttaagagtattcaattagtctaatagttagttacagttaattctgtttttactgttgcttcaactggtgtattctgttatggttattatcaattcggttacaactgatcttgatcagttgaactctatcttcttgtataaatactgtactaactaataatcaatataatgaactctttcactcaatctttcaatctctttcttctacctttctctgttctttgttcttgttaagtttcatgttcaacaatgtcaaggagattcaactctcctaacagtccgtagtcagtattagcaatagtgaacttacataatatgccgcc

SEQ ID NO: 268809 - DNA, 599 bp, Cannabis indica
taattaaaggagaagatgacttggtacaaatctattaaaaaattacacacatatataatcatgtacttataatagacttggtacaaatgatctaaaccactcatatatgataacttattacttggttttaactgaaagttcaacagtttacttgatagacttagtaacgcgtgcattggaagattttagcaggtggctcatgtactaatccaaatttactgcatgaaaaattttgaatcacataatttgttaatccacaagaaaaagtaactctatacattcaaaattgattttttcattttgtaatctttttagtgcattgcagggattagggagttttgacaggccaaaacatctaatatacaatataatagcactaatatacaatataatagcactaattcattgccaaataccaaaatatttcatatttagctcataatttatctcaccaaaaacttttggttagtaaaacttacaacatgaaaattcggagtccaactcataatattttgagtgtgatgttcccaattggattaagagcatattatctgcaaaataaacaaaaaaattaaaaatccaacaataaaatatttagt

SEQ ID NO: 268810 - DNA, 720 bp, Cannabis indica
aggcttggtttttatttattcatcatcattttcatttttttatttaggaaaatggccctaaggccgagacaatggtttgccccttgtggcactttttgtaaagaaaaatatgcaaggttgtacggccagctttccttttattttatcttttattgaatgtctcgtacttttatatttgaacttaatatatttgcttgtttgtattttttattcacaacttaaacaattatattttaatcaaatttaaaatactttaagcatttccattgctcgtattttcttctgatattatttaagtagttagcaatctactatgtgcgcgaacagttattatctgctatgcttttaatttgcgagcagttatcgattttgtcgcataaacagttataattaattttaagcaaacttaaatacacttttaatgattcatcactttgtatatttttgattgctcatatgaatagttaggccttctattcatatattaggtttaagtatttttttcaaggcatcttggtgtctcgtttaacactttcctacaaaatgtgagtcgttagtattcagcttcgcatgtaacttaatgttgttcttatgagttatttctcatttacaactactacttttgattttcttttctcatgggaaaggttctttaatcaaaaacattaaatattttaaaaattctaaagtagtgggtttgcaatatatcatgtatttcta

SEQ ID NO: 268811 - DNA, 687 bp, Cannabis indica
agaggattactgagcttctaaaagttaacaaggacaagcttgtgctcaaaaaagcaaatgtacatgaactattgtaagaaaagttgataaaaaggttatgaaccatgtcaactacatgccctatgtttttggagtctacaatgattcattggacaccaattacacacaattgttagattcattttttcttctaaataacgattattggagattagctcttttttttagttaatatggttagttaaatgcatctgattatacaatatcataaatatattctttaggtttaagattcgctttcgattacattacccttagtaatttctttttttttatgtttatggtctattcataccataatgattataaatataacttgctattgactcagggtgtaaaatcattttaactcatttttattttgcctttgatatcagaataaaaaattatgtgggtggcaagttatccttatagaaagtgtaaattttttagaaattataatatattaaatataattaactatataactaaccatacgtgcatttgcacgtaactatatatctttatatattaaaagtgcctatctaacggcatttcttggtttaacagaatatacttagaatattctgttaaatttaacgatgttaataggtttgatctcccgttaacaaataaacccaataatta

SEQ ID NO: 268812 - DNA, 492 bp, Cannabis indica
catccacttcataaaaacaggtccacccaaaattacttcttcaggcaaatgaaggaccaaatgaatcattatgtcaaaaaatgttggaggaaatatccactctattttacacaatattaaaataaggtcttgttgagcaacgtccatgtctttaatatttatagtcctagaataaatttgcctgaaaaagttgtacaattcaaaaatggtggtcgatatagatttcgggagaaacttacaaacaccaacagaaagcaatctttacattattacatggcagtcgtgtgacttcaacctgataacatttgttaaatttttgtttactttctttttcaaattcgaacaaaagccatctagaaatttcacatctctaataaatttacaaaattagagcctatcatcaggtttaagaatgtaatgagcaagcgctttcaacaatttccccctctcatcgtcataaatccacaatcattctctgactcctaacttctt

SEQ ID NO: 268813 - DNA, 1397 bp, Cannabis indica
tcagaattcttttcttttgccacctagactcaccacaagtgggacaccatattgcatccacaaacatcttacggtataggatgcaatcgttaggacatgcatgtattttttcatattgcatgcctaacgaagaaagtgtcttcttcgcctcatagaaagacgaaggcaccacattaccttccggtaataactctactaggaaagctagtaaatccgtaaaactcttatcactccacccgtgtttggcttttatattgtataatctaataagtgtcggcaacttagtaaacctattacagttagggtaaataggcttctcggcatcctctacaaaactttgaaatttcaaaggatcgacatttaattcatattgtgcatctccaatcatttctggaatgtgatcatcctcatagtccaaattaacacccttaattaaccttgttagacttagacgttccctcgccaggaactctattcttttccccgtggtaaacccaaactttataactcttgtctattctgttcctaaataaatgctcttgtatcggacattctcaaaaattaaaaacatgaaaaaattactaataaacacataaaacaatacaataataacaaaattaaattaacaatataaaattatccacccattcgatcgcagtacatgtattcgcagaatctacgtcactacagatgaatatttaagatattcaaactcttctaccatgcatatatattccatccatccgactgcagtacaattaatcgcagaacctacttcactaaggatgaatatctaacatattcaaactccactaaacaaaaaattataaagttttgaagattatacctttctccaataaagatagctacaatttcgcaatcttcattcaacacaaagaacccaaaacccatgaaacatttaaataattaaagtaatcaaatatgtataaactaataaatatacacaaatatatatatatatattaccgataatttattaacttcacaaagtatattaataatcaaccaagtctaataaagctacaaatcaacatagtcaaacaagatcaccaccaatgtcctaatataattgaaattaataatgttaaacacctcaataaaaaaaagttttcaaacggtatcaccacaaataaatacctacacaaaattatcaattaacaattaattaaaggtttaaatctaactaattaaacttaaacttattgcataaaaaataattaaacatttaactaaacttttgttttacctaataataatttataattatacataaactaaattaaaaaaactaattattttttacaataccaaattaaacaaataaacgttttgcataaactaaaatttttcctattcaaaaaacttttctccaaata

SEQ ID NO: 268814 - DNA, 957 bp, Cannabis indica
tccatagccttaagccaatgtttaaattgtgaagcctcgaaataagagcgaggttcgacatgtgaatatgctgcaagaacaacaaccctaaattgtgggctgagtttggtgtaggaaataaatttttcaattggaaaggcagtggatgttgtatggcaaacataatctttaaggtgtgtaggtttgatgatagttctgccccttttcgactgtggtagtggatgggtatctgatgtaggaatttctttattctgatgactgtaattaggaatgtttgctgctagtgttttttgttaagcagaatgggatgttgtagagttggtgtcatcagtaagaaatgtaggaatgaggggagcatttgagatattactcaatgtgttatcaacaacagtaggggctgttgtgagattggtggcatcagatgtgatgctagaaggagtttcagcacgctgaattgctgctggtgtggtggatagaccagaattctggtttttttttttgttgtttactggtgcaatttggggatatacaccagttggtgttgggtgtgtgttgacccgagagatgggttgaaaagcaggtagagatggatcttgaaaaaaagtattgatgttagaatgagagatgttggcagtgaggggaaaaatagtctcataaaaaatgacatctcgagattggtagatttgctttgtttcaatatcaaatagagtataggctttcataccttgggggtagccaatgaagattgaagcacgacttcgaggtgaaaatttgtgcctagtagatggtagagtagaagcataagctaggcatccaaaacaccttaagtattcataatgagggggttttttgtgaagtgtctcatatgaagtgctaccttgaagtaaaatagagggagttctattcatcaagtatgtggcggtatgaataagatattgtgacagttagtagtcctgt

SEQ ID NO: 268815 - DNA, 507 bp, Cannabis indica
tcatgaaatattagatttttcatgagatgcaaagcactttgagtgtcacaataatctgtgatatcctcaaatttgaaacccaactcttctgttaaccccttaagccatatagcctctttgatggcttctgtagtagccatgtataacaaggctactactttctataggttagatttccagctgatgcagcccccaagagcagtgaacacaaaccctgttaggctccttctagtgtctaggtttgctgcaaaatctgagtccacaaaaccagtaatttcttccttgaacttgttctctttactgaacacaatcccaatgtctaaagtaccttttaggttcctcattgttcatttcagtgcatcccaatgttcagggccagggtctggaatgtaccaactgaccacactcattgcatgagctaactcgatcttgaacacaccataaagtacattaaactcccaacacaacttgcgtagggaacattgctcatcttggctctttctacat

SEQ ID NO: 268816 - DNA, 1510 bp, Cannabis indica
taatattggggtccacaaataaataatttcataagtaatcatacaaataacagatattagtgctaattgcctttactaatccaaattactaaagcggtcattacaattatccccccgttaaaaggattttgtcctcgaaatctaacctgaatagctctggatgttgagtcctcatatcagactccaactcccaggtggcttcctccaccttactgttcttccaaagcactttaaccaaaataatggttttgttccgaagaaccttttcttttctatcaaggatcatgttgttcttcgtaggataagtctgattgcagttcaagggcttcataactcaagatatgagtcaggtctgacacgtatttcctcaacatagaattatgaaatatgtcatggatagccgacaatgctggtggtaagtctagctaatacgctacctgcccgaccttctcgagtatctgaaatggcccaatgaacctaggactcaacttacccttcttcccaaagaacctaatacccttcattggggaaacccgcaggaaaacatgttcccctgcctgaaatgtaacatctctgcacttcagatcagcataacttttctgcctactttgagaagcaagcattcgagccttaatcttgtcaatagcctcattggtcctctgaactaattctggacccaagtacttcctttctccaatttcgtcccaatgaataggggagcgacatttcttaccatataacatctcatagggagccatccctatagtactctggtagctattgttgtaggagaactcaattaaaggcaagtacttactccatgaaccctcaaagtccatgacacaggctcgcggtaaattttccagtatctgaagtgttctctctgactgaccatcagtctgagggtgaaaggtcgtgctaaacttcaacttagtacccatagccttttgaagactcacccaaaattttgatgtaaactttggattcttgtctgaaacaatagatttaggggctttatggagacgaactatctccattacatacagttcagcgtactaatccactgaatatgtaactttcactggtagaaagtgagctaattttgtgaatctatccactatgacccataccgaatcatacattcatgtggttctaggtaatccagttacaaagcccattagcaatgtcctcccactttcactcaggaaggagtaaaggttgcaataatcctgccggcctttgatgttcagccttgatttgctggcaggttaagcatttagatacatagtccaccaaatctcttttcatccactactacaaaaagtataattttcgtcagtttttaagtgtcatttaaagaatttacgtcggttttttaaaccgacgtatataccgtagtagcaaatagtattagcgtcatttttaaaacgacgcaaaaaacaattttctacatttacaaaccgacgcaaaatatttactttttattttatcttctgcgtcggtttagaaa

SEQ ID NO: 268817 - DNA, 821 bp, Cannabis indica
ccggaaaaaaatccaagccctcctggatatgaactcgccaacaaaaaccaaagaggtgcaaagcctaactagtcgaatcgccgcacttagcagattcgtgtgaaaatcaacggataaatgtgtcccattcttcaacatcctgcgaggaaacaaaaagttcgaatggatggaagaatgtgaaagagcttttcaagatctaaaaggacatctctcaaaatctcccatcctttctaaatttctggacggtgacgaactggggatatacctagcagtaacggagcatgccgtgagtgtcgtactgatcagagaagaagacgacgtgcaacatccagtctattacatcagtaaaagactcatccaggccgaagactgatattcgttgatagaaaagctcgcctactggctcattctcgcaatagagaaagctaagaccttacttttaagctcatcctgtttgggtgtacaccgaccaaccactacgacaaatactgcaaaagccagatgcctctagacagttactcaagtgggcggtagaattgggtcagtacgaaatcaacttccaacccagaacagctatcaagggccaagccttggccgactttgtggtggaatgcacaggcaaaactgaaagcataccagaaagcgatctcgagtcaataccacaaccaagtaatactgaaaataaaccgacctggaagctatatgtggatgggttggcaacagatcaattatccggcacaggaattgcccttgtcacacctgggggcaacacctgcatgcagcggtcaaattcggattcaaagcctctaacaacgaggccg

SEQ ID NO: 268818 - DNA, 808 bp, Cannabis indica
caaaaataccctcccgtcaatctaaaacatcagattaacggaaaacaaggtgacctccgggatcacctagaccaaaagaaacacgtgcccgcggtctccacgggaacactaaatgaaggaatcatggctgagcttgccatactccggaaagacattgctcgagtctcccagagacaaaaaggtgatgactccgactctgactgtgaagaccgggagccatgagccaggcacatcctggaggcggagctccccaaaaattttaagatgcccgaaatggcagcttataccgggaactcggaccctagcgatcacctgtcacggttcaaccgagtaatgacggtcatgagggtcagcaatgacgccaaatgtttgtgcttccctctaacgttaagcgggtctgcggaagagtggttcaagaaagtggaaccaggatccgtggactgctggaataagctgcaaaccagcttccggagacagtttgtcgccgcaaggaaggttaatctggaggttagcgccttgactaacatcaagtagctacctacggaaacattgaagaatttcataaagaggtttaaggaaaaagcctaaaaaaccatgaaagttgatgacggacaacagcttgctcttcttcaagcaaggatccgtacaggaactccgttctggaacaagttacagcaagaaggagcctccaaccttcaagatttccagaaaagagtccaaaaatacatcaacctagaagaggcgcaaataatggcttatgggggatactaccctaccgggatagtggggtatgtacccggagctcagc

SEQ ID NO: 268819 - DNA, 594 bp, Cannabis indica
gtaaaaaaaaagtatagtaataatatactagtaaactttgtattagtaaaaatactttaaactgtattttgaaattcgggatcccgacccatatggttataaagttataatactataaaattaatctttatgtttagtaaattttgaatacgggcgttacataagaataaataaagcgtaatttattaattacggagattatattggaatatgtgggtatcggagataccataacttgattaaaatatttttggggctggcaattgtggaacttgacggggagatcagaaatgtcactacaataaaagatgaattgaattgaatttcataccggtctagtttagaattttgtttaagttatcgatttagtggattaattagggaatgactaaaatacccctagaattctctaaagtttaagtgtgaagggaaggggtagaatagtctttttgtaaagtaaatcttttgtcttttagtgcctttttctaggctgagatattactaataataagtttatattttatttaagtcttatgtgttgataaatgatgatacaacttagaaaatttatgaaaaagtcaacgcaagttcctt

SEQ ID NO: 268820 - DNA, 1044 bp, Cannabis indica
aataggcattaggcacgtgcgacaagtgtgaaaataataataatttaatgaaataaggaaagcaaatccttacaaaaataaataaataaataaataaataaggaaagcaaactatattataaatttataactataccagccactcactcactcactcacagtgtagactcgtttcaactcgactcagtaaactcagttcaatcgttcatccatggcgaccgcgatagccgcctccacaacctcatgctttctctccaaagcttctccttttctcccaaagaatgcttcctacagaaccagcctctatttcaccagaaggcttgcttcgactcctaagaggtccttcacttgtcgagctattcataagccgcagattctcaccaaggaggaaggtcaacctgaaactctagactacagagtcttctttgtcgacgattctggaaaaaaggtccgacctttatattttaattttgatttctgtaattttcttggtggttgtttggtttccgagaaatttaaaacattgggaaagaaatattcacgtttgaataaaatttactattgggtttgataatttttgcttaagagttgaattaaaaggccaacattgtttactcaataactataaatcattgagatttgttgagaagaaatgtatgtaaaggataaagcataaaactttattaggtttaattagatattttttgcttggttgagaaagagttgttgagtaaactgctagcaaaataaaagaggaacgatattaccgaatgaagaattctgggttgagtcgcggactaagtcgctctctttaagacgttcgcggcactgcccaggagtgtgcaagcagtcggaaattgccggtcgtccccaggataaaacagcccagtcgttgtactgtatcggaaccccactgtactgtagagcaccgtcgaatacacccaaaaatttgatatcgcagatggaattttaattttatgaaaaactgtatttttctgatacgaaaaagagatgttttcttcccatcagttcaatcgcattata

SEQ ID NO: 268821 - DNA, 888 bp, Cannabis indica
tgtcaaaaatgttgtggttttctgtgcttttttcctgtttgtgtatgtccattattgtatcaaagctctcaatgactccatttgtgttgtgattggtagttctctagctgctaagtttgttgcgtttagagattcggcaatgttagaagtcatagttgaatttgaattagtcaagaaatgtgataagtgtcaaaggttttcatatatacctcgcgtaccgccaacagaacttagaatgatgacctcgccctacccatttgctatatgggggatcgacctaattgcggcattacccactgggcgaggaggagctaagtatgtggtggtagcagttgacttcttcactaaatggatagaggccgagcccctcgtctccataacctgcaagaaagtccttgactttgtcgtcaagaacattatctgtaggtttggaattcctatgaagatagtatccgataatgggactcaatttgaaggcgactcgttcacttaattctgcgagaggaataaaattatcaaaagcttctcgtcagtatccaggcctcatgcaaatggacaagtggaagccgttaataaaaccctaaaggatactatcaagaataagttagacactgccaaaggcagatgggttaacgagctacctcaggtgctctgggcccacagaactaccgagaaaacagccacgggacacactcctttctcgctagcatttggctcggaagcaatgctgcctgttaaagtgaacatatcgactcacagaagagagttttataatcaagaagaaaaccaggaactattaaaattgtccttggatctacttaaggaaaaacgatctgagtcgcaaatcaccaacgccgcataccaacaccgagtcacaagatacttcaa

SEQ ID NO: 268822 - DNA, 2090 bp, Cannabis indica
taattgtgaataaacatatgatctggatgtaactgattttgtgtataaatgtaataaacatattaaaccattagcatgtaaaatgaatgcaaacataaatcacttcaattttcgtatattgattactaatcagattgtaaagggttttatttagggcacaaaacccaacacctaattcttctccatcaagaggttttgagagtataggaggttctaggagttgcatttttagctcttgaaaggcttttttgcattcttctgtccattaaaattgcttatttcctcgtaggatgttgaggaatgggacacacttgtctgttgactttgaaaaaaatctgctgagtgcggcaattcgaccagtcaaactttgaactttcttggtttttgttggaaatttcatatccaggagagcttgaattttcttttgattgtcttccattcctcgggcattgatgacaaagcctagaaacttacccgagctgactctaaaggagcactttaggggattgaatttcatgttgtacctcatgaggactttgaagcattcgtccaggtcatctatatgcccctcagctttcctggatttgacaagcatgtcatccacatacacttccatatttcttccgatctggtctttgaacattatatttaccaatctttggtatgaagctccggcattcttgagaccaaatagcatgactttataacagtacagaccaatatctatttggaaacttgtatgttcttcgtccagtggatgcatcttgatttgattttaccccgaaaaagcatccacaaagcttaaaatctcgtgccttgctgttgaatccacaagttgatctatcctcggaagtggaaagcagtctttggggcacgccttattgaggtcggtgaaatcgatacacactcgccattttttgtttggcttgggtactagtacgggattagccacccaagtcgggtagaaaacttcaattattaaattgttgttatgcaacttttctacctcttcttttagtgctatggatcgctccttatccaacattcttcttttttgttgaacaggacgaatattaggatcaatatttagggcgtgtgaaattatagaaggattgattccgattatgtcctcatgtgaccatgcaaaaatgtctaggtttgctcttaaaaattttatcaatgctgattttacttcgagtagcaacccttttccaattttgagtttcctggtcggaacatttgggtcgattcaaatctcttcttgttcttccactggcccaacatttgtatttggttccccaagtccgggatccacatcttcatccccaccttgggcagttctctatttggcaatgtctttttcctttcctgaactatgactagaggattcttcctttcgagccttagttagggcaaggttataacattcctgtgcaacttaaggcacgaatgaaatatcgacgtaacagcttttaggtcgtataaggctggtcggcccaacatgacattaaaggctgatggaacatccaatatcaaaagtgtgccattaaagttatgctcttcggagctttcccaacagtgagggtagccgaatttgccctagagttgcaacactctggccggagaaaccgtatacgggctgaagacagggggttttatcttttagttggagccccattttttcatatggtgttttgaacaggatatttgcagactaccacataaacacttgaacctaaattcaatgtttatgaataattgtcttttcttaagaaattgttatgattttgtttaataaaagatcttgtgatctgataggagtggagaggtaatttatttatccagttcaaagatcttttacaatgaactctagatcatattcagaatttactaccaccgaatctctataaaacatatttttaataagacatagatataatatttgttgacttcacttttagccaatgacaatgagtcttaattgtaagcgacatgtaaagcccgcttagttaatttggaaattagctgttatttatgttaatcagggaattatttatagctatttaaataatttattatggaattcagat

SEQ ID NO: 268823 - DNA, 1046 bp, Cannabis indica
cgacccctcttccgtcgaaaaggtttggtcagggagttataacagttcgaccccacttccgtcaaaaaggtttggtcgaggccctttttttttgaaatgatgggtttgcattgtactatgtatttccagatcaattccagttaatcatacacatatgcccctcaagtaattttaaagggtttacactttataattacttgtttgaaagaaatgactattttattcacaactggaattcaaaatgtttcatcagtaatgtgattttacaatcattaatttccccagctcaattgtttattctattgatcttccaggagcatctggttttgataaaatgaatttttatgtccagggtcaatccccaacatactcccacaattgtttcaatattcagggtcaatccctgacatataccggggttcaggtaattagttgtgtctttgactgctactggttgacgcccagctttcctcgcggtagcttgatatggcaaccacagtgggctgatatctactcacatcacaattctttttacacaattgctttaccggagtaactgccctttgaattcttgtgacccgcttcctctcgagataaccaaagtgtgccttcttctcatgaaagaggattataatcttcagtcgctcgagttattgggcagatcaaactgatcataggcatcttcctgcccctttatatatcgttgaaggtgcccttgcgatatgagaccttctatctcatctttcaactgacgaaactcttccatggtatgaccaatatcaccatgatattcacaccgcttatttggatccctcttgtgcctcatgtttcataggtcttggctcgccaaaacaacttcttgtacatgtgcgaggtagcttttttctcgagtttaattaactcggtatatttggcataaagagggatatatacctgctgggcttcttatccttgagtagccttttagaatcgtcttttttctttgatcccgaggcctccaaatcaggttttccaacaatatcatgccccggttgtctcctgggttt

SEQ ID NO: 268824 - DNA, 1316 bp, Cannabis indica
ggcgtctcctcctcatcaagtgtgatatggcatctatgtgctgcatgaaaataagagaagattaatcaaagtcgtaaatgaagtcgcgacacgtcacgaacaatgtcgtgagaagaatctaactagtgtcgtgacactatcgtgacaatgtcgcgacatgtcaataaacaaaacaaaataaaaatgtcacaatgtcgcgataatgtcgtgacaatgtcgcgacatgtcgacaaacaaaacagaagcataaaaatttctgtgtcagcaacaatgtcgcgataatgtcgtgacattgtcgctaacacattgacaataaagacagattgcagaaaaacatcaaaatactaattaataattaaatacttacaccatcgtccagccaatcccccattagaaacaattttgtgaagaacttgacatcaacaacaccggtgtgcacattcctaggtcggggtattgggaatgtctccaatcaaccacctcttgaacgtacgtagcaatctacggtctgctggtctttccggatctacgttctctggaacaactcgcctctttttctttcgcagtgtagtccttcaagtacgtaggcggcttcctcttcctcacaaacggcacattttgggggtccaggtagaagtaggacttcgtcctgtgattgtgtatcaccaatggccgtgataattgcttccaatggagttgacggtgcctcgttatcatctgcttcccaatcttctgggaagacatcttcgttatcactctccattcgttcctcattttgcggtgcaggtgtgggctctccttttaccattgccatcaactcgtccatcttagccagtagagtctccttcagatctttctgactctccgtgaaggaccgcctcatactgagatggctatttactaaccccgtctgtgccaacatgacggcttcctgctgggcctcaagcttctccagccgggcctgaatgctatccaacctctttgcaaggtcattgtccacggttgtactggttggagcagaaggagcggctgaagtagatggctcgtgtacttcaggtgccggtggtggtggaactaaatttgcctttgtcacggcctcgttgatggtcttggcttgagtttcaaacacagactcctgtgtaccatcaacgtccaccgtttgttccacatccatctcaaagcaaagaggggctttaccctcattaatactcttgaagtatgcctcttcactgggccggggaaacaagcacttcttcaccaccaactgcaaaacaaaaaagaaaacacagaataaataaaaactgtgaaaagaattt

SEQ ID NO: 268825 - DNA, 544 bp, Cannabis indica
ggtaaaatatttccaacaatggtgacgcgctttgcgcatcgggtggtggaggagatggcaacgggctttgcacagtgagggttggatcggggtgatcatcggggttgctccctctctcgtgttctcggacaagtcgtgtccggcaacaaaatccatggattttgacgggttcggttgagtcgtcgtctccgtttgtggattttcagtgtgtactcttttctcttttattctatttcatattaggttttaattttaaaggattttatatatttattcatccatgtgaatacattttttgcatcgcttggtctattttgttgagaaaaatgagatgaaatctgatatgagcaagttgaagaccagctgagtttttttattgtgaagaagatcattactgtcaagaagaacatcactgtgctgaggttggagacattttttgtttagagattatgttgtaatatattttttttcttgaagaacaagatctgtaatattcttattacatattttttgtttagagattattattattacatatttgttt

SEQ ID NO: 268826 - DNA, 667 bp, Cannabis indica
ctaaattaatacatgttgtttatctaatgaagtattgttgaccttattttaaggcacgttgtttacctaaattaacacttattgtttatctaatgaaatattgtttaccttatattaaggcacgttgtttaaaattttgaataaattattatttgttattttaaatgacattgcaaattgttgataatgtaatgattatgaacatcaaagtgccaagaaactaatattttttttttaaaaaaaagtgtttaaatcttattattatacttttctttctaaaacaaaataaatgatgtttggaaagttatttgtattttttcttatccatttttttctaaaaggtttattaggtttttttttttttaacaatatgcatatattttggctttatcttctgtaatattcactaattgtcctaaaactttataaaatatcatgattttttttactaacaactcatatacatatatttattttaatctttatgtatttattgattttttcataaaagttaagctatttataattatttgtgcaatattcatataataaaaaggtgagcaatatgccttaatttgggtaaaacagcgtgtctatataaggcatgttgtttactgtactttaagcacgttgtgtatctaataaagcatgttgttgacctttgatt

SEQ ID NO: 268827 - DNA, 612 bp, Cannabis indica
ctctatgtgattatctttattttaaatgccatgaatatattttatgaatgtgaaatcaggggttaaccctatttgtaaaaatctcggattgtgtgactaggattaccggcactcggtcaggagcacccagggatttcgaatctctgcctttgcgggacaacaggtaagacagtagttagcacgtagagtatgcacggtggtgattatattgaaattaatatatgtgagtaattgtaaccgggattagggttattaccctaatatgaacggttaatagcctagggttattaccctattgatataagttgaatagatactatgtcatgctaagtgtatgattatattgagatttaaggattatgtgatcaaggcataatcaggttggactaggtaatcaaaacatagaagaaccattctaaggccttattgtaaatagacgtgtgagagcaacacgtaggtttacgccacgtaaacataaataggcatgtgagcacaacatgcaggtttgtgtcacacagacagattttaatggcattgttgtttgtattatatgatgagcatattgttgatatgttttacactatcttgctgggcttggctcacgggtgctct

SEQ ID NO: 268828 - DNA, 571 bp, Cannabis indica
tgtgaatgtaatatgagttatcggtgtaataaaaatattttcaggtttggcgaccttggagactcgattgggggcaagaaatatcataaccggtttaattgatagaatttatggaaatattatgataagttaataatatagatattggggtaattaggagtatgtgagatttaacttagcgccctagaagtattgatttcttagtgattaaaaaatgataagataattataaataataaagtttttattattatattattaatattatattattattatattattttattatataaaacttatcagttttactgataagtatatatatatattatacgttatacatttctaacgaaaacgaaaccctcctccttcgtcaacaaattctctctccttttatatctatattcttcgattttcaatccaaaatttagcgatctaagctccggtagtggcaggatagaaaatcctcctggcagaaaagcttaaggtaagatttaattccgttttaagtgtaaaacaattagtttcgtatagagtttttgcgaattagaatagttatgaaggttct

SEQ ID NO: 268829 - DNA, 658 bp, Cannabis indica
tttttatcaaggatctgaactggctgttcttcgtaggacaagtctgactgcagttcaaggacttcgtaactcaagacatgagtcgagtctgaaatatatttcctcaacattgaaatatgaaatacattatggacagccgataatgttggtggtaaggctagccgatacgctacctgcctaaccttctcgagtatctgaaatggcccaatgaacttagggcttaacttgcccctctttccaaagcgtctaatacctttcaccagagaaatccccaggaaaacatgttctcctgcctgaaatgtaacatctctgcgctttggatcagcataacttttctgcctgctttatgaagtaagcattcgagccttgatcttgtctattgcttcattggtcttttgaactaactctggacccaaatacttccttgttccaattttttcccaatgaattggggagcgatattttctaccatacatcatctcataaggagccatccctattgtattttggtagttattgttataggataattcaatcaaaggcaagtacttactccatgaaccctcaaagtccatgacacaagctcaaagtaaatcttcaagtatctaaatggttctctctgactacccatctgtaatgaccgctctagtaatgtgga

SEQ ID NO: 268830 - DNA, 735 bp, Cannabis indica
ccagtattagcactgaaaaaaatagaggatttattcaaatttacctgctgctctaaaagctatttgaaagcaatggagaagctccatcaacattattggattcctcctcagtagcacggcaataataaatagctatcatcagacaaaaaaatatgtgggtaataacaggagctccacgacgagctactttacaacccctaagtttccctcgcctctcaaaatctaaaattagtgttgataggccctccgcacacaaaagaaaaaaaataaggtgataaaatatcatcttgccttaatcctcgctttggcacaatggacccaattcctttccacccgaaagaatatggtaagagaccgagctgacacaacacataaccaactggatccacttatcactaaaccccatcgtcttcattgttgcctgaagaaatccccacttaattctatcatacgtcttgctcatgtcaagcttgatagccataactccctctttacccgagcttttccgtttcagataatgcataatctcgaaggatattaaaatattatccataataagcctaccaggaatgaaagcactttgagattctaaaatgacatgatgaaggacacctttgaattggttagctaacaccttcgagactattttgtagatcacattacaaagagcaataggccgaaaatcattcatagattcaggcttagactttttaggaataaggacaatatgggtgt

SEQ ID NO: 268831 - DNA, 848 bp, Cannabis indica
atagtactttatttacctcgcaatgttcggatgctagggctgtggatcatcttttgcagtttatccctaaccgtctctgtgattctgctatacaacaacttgatgaatcttttcatagtgatgaggttaaggatgctcttttccaaatggctggggataaagccccgggtttggatggagttaatgccaagttttaccaaaaaaattggtctacgtttggccctgacttatgtagtgctgttctttctattcttaataatcaagctgatatttcttccattaatgaaactgttattgttgttatccctaagaagaagaatgcttctcaaattcgagattatcggccaataagtttgtgttctactatttataaaattgtttccaaagttttagctaatagacttaagaatgtacttaatgatatcatttctccaaatcaaagtgcttttattaaaaatagggtcatttttgataatgtcttcattgctaatgagatggtcaatgctattactcatagaaagttaggtaaagttgaatgggcagctcttaagctagatatggaaaaagcgtttgatcatgttgagtggggttttgttaaggctattatgcagcacctttgttttcctgttaggtttgttaatctcattcttagttgcctttcttctgtttctttccgtctccttattaatggcaccccccctaagaaattctcttcctctaggggcattaggcagggagacccccctgtccccctacatttttcttcttgtctcggaagctttatctgctgccattagattgcatgagcatgataattcttcccagggaatttctatatgtcgttctgc

SEQ ID NO: 268832 - DNA, 523 bp, Cannabis indica
catgtcacaaaggtgctagacaccactggtgcctaatagcaatgctcatcttcatgtcatcaccattatcttttctagttaatgaaagtttttgaggttttttaagcaaaaaaaaaataaattcttcaagttagttatattaagaaaaaattaaaaaattgaactcatgacacttttaaaaaatgcaagatctaatttgtcatttaacaaaacaaaaaatttattaggtaacttttgcaaaatacaaaatctaaaataatattaactcataatttaagaagtttttacactacatactgaaattttaatttttttacttttttactgtaggatggattttttttttcaaaaatactgtgcaagttttatattgtgcactgttaacttttcacagttgttttacggttgtcttttagttgtttcactattgttttaattgttttgttttgttgttttacgattattttataaaaagaaagtatttttataaaaaaaaaattctatgtgacagtaaaattataaa

SEQ ID NO: 268833 - DNA, 729 bp, Cannabis indica
tagactatgtcttatttaagaattttctataagcaagggcttaattgtgaagtaaagaagttttggggtcaatttgctaattaagagactttgtatggtctaattaataaataatataaattgtaattttatttgataattaattataattattaaataaatagttttggcatttataggattgaattggaaagtatggtattattaaatgaagaataagtggttgaaaaaaatggtaaattggtaactagagattggtccttttatgtggctgaccctagtgttgagttttgcctaatattttattcttttttaatttatataattcaaccctaagccctagttgaaacactataaaagaaacatgatgctctcatctcatcctcttgtcaacttgactattcaacctaccaaatctagttttcattctctgacaactagtagatgagagactttcttccatagtcacttcagcctcctacattgttcttcaccatattcgaacccttagtgaaaaagtgtcatacccacacatagcaagtcaagtactctatcatagcgagtaagacggtggtaccaaactcgaaggtgagaaagagatccaggttcagattgataattttctacgacagaaaagaatcaagggctagagatctggaacagaatgagttattatattccgctgcaatcaatgtaacgttttcttaaactcttatgtgtttatttcat

SEQ ID NO: 268834 - DNA, 769 bp, Cannabis indica
gtctggctgatgttctagggcttcataactcaagatatgagtcggctctaaaaatatatttttcttaacatttgaaaacatggaatacgttgtgcactgctgacaatgctggtgtcaaggctagacgataagccactaatccaactttttttgtgaatttttaaaaggttttcgtaattctacggcacaacttttcccttcttcctgaaacacttcaccccctttcattggggatactcataggaaggcatgatccctacttgaaattctatcttttttgcaattcctatctacataacttttctgcctgctctaagaagtaaccattcttgccttgatcttctctatagcctcactggtttgttgaactgagtctggacctaaatattttctttctccctctcatcccagtgaattggagatcgacacttcctaccatacaacatctaatagagagccatcctattgtactatagtaatttttttttgtatgaaaagtctatcaatggcagatacttgctctaagagccttcaaaatccaccacacgtgctcataaaatgtcctccaatatctggattgtcctctcagactagccatctatctgagggtggaatggtatgctgaactttagcttcgtacccatggccctatggagactttcccaaaacatggaggtgaacttcggatccctatccaaaacaatgaattttggagcttcacgaagtcgtacaattttctttacatacaactctgcatactgatctattg

SEQ ID NO: 268835 - DNA, 1375 bp, Cannabis indica
tcatagtatgtaagactgtgaagaatacaatcaacatgaaggagaatcaggcttagatctttgtgatactctgctacagaaaggatacaagggttagagatgagcggaaggagtcatttaattccattgcacccactgtaaggtttctcataaattttatttgtttatacaacatacatggtagtaaatctagatcctggtaaaataattccaagacttccgtcatgaatctgctgatgtatgctcggagaggctcacctagtctttgcttgacttttactaggtctcctagatgcaacagaagttggcgagaacaggagaattgtgcacggaatcccaaggaaaaggccttccatgagttgaactttctagaggccagcttgaaataccattgctgggcagcttccgagagggtggcaggaaaaattctgcaacacacctcccttcgtaccccttgtagatccatttgcatctcaaaatacttgaggtgggaaagaggttcttctcttccagtgtacattttccaggttggcattttaaacttgttgggtaacgtcaggagattgatctcgggagagaaaggggttccacatgctcggtccaactcgagatcattgtttctctatccggtcatgccttggaacatactcttttgttcatctagctgtgcctacacagatggactaacatgttcggcattttgcccgatttgagtcatgtcagtatctttctgagcgacaatttgagcatgtgtttcgggctgtacgatcgtcgtgccaagctgatcgtctactcctctccttctgttctgatcatttctaagatcatgagtcgtccccaacctattgaatgcagaagcgcctggctgtctcagtgattgatttgattggttgacaagtagaatggcaccgtttgcctggttagaactatcagctatgacttctcttgatgaattactagacaaggtctacccacctactgcttggcccacaggcggaaccggtgatcgaagatttggtggctgaccatttattgtctgggaagtattcatcgttggatcttcgtctctttcaccaagggggatgacattcgggggttgctgcccgaaagtttggtaggcttttcgtatcagcatagtagcttgctgactacgattgtcaatctcaacatgatgagcccttaacgcttcaatctctttgtctctccactcagcaaacataacctctgctcttcgaacgcgagatttaccggagcgcggagttcctcctgatcatggtgtagggtgttggtatgaccctgcatgagtccaagagcaacaggtgttagcccaagatatgtttccaagaggggggtgaattggaaatttaaactaatt

SEQ ID NO: 268836 - DNA, 538 bp, Cannabis indica
gttttttcttaggattggagataggtcgttcttcctccgaaatatctgtctcccaacgtccttttacccttcaacttttaactgacacacgttttttaggagcatctcctgctcccaccccaatggaatccaacattcggctctcatccgatgttggaaaaccattagacaatcccaaaatatatcgcagcctcattagtaaacttctttacttaactattacacggcgtgatatctcatttaccgtaaataaactaagtcaatttctttccaatccgagagttccccacctcactgctgctcacagaatattacaatatttcaagggtacctctggacaaggactattcttttactcagcatcttttactaacctatatgctcatgctgttggaaattattttaccaggatcttagatccactcacaagtatgttgattaacaccctaaatatgaacttttctaaaacgatgatataaacacatataaagtttagtaaaccttacattgggtgcatcagaataatatgactccttcc

SEQ ID NO: 268837 - DNA, 651 bp, Cannabis indica
ttattaaaaatatataaaaattattaatagcatatttaattgataaaaatattttattattttatttatatatttcgttgttgtatattaatttctatatatattttatttgatttatttatttaaattagaatatttagtgtctagcttttctagtttgggaaagtaagacaaatatgataattttttaatgataaattcaaatcttctagagctatttctttccaatcaagtttcatatattattatgatcttatattgatatttaagtgatttgatcagatattgaaggttgaaattcgaaaagtaagtttttttttttctataaaaagaaacttatacttactactcacattaaaaaattatattaggaaagtttgttatgaattgtggacatgtctaatccatgtatgagttgtccaatatgagcatatatattatttataaatactttatattggttgctaggttttttatttctttcatctctttatattttattcatattttgtaagaaagtgtctttattttgtagagaaaagtgatttcaactctacctctgtgactgtgtttatgtcttttgtattgtcttgatcgagtctgtaactaggtgtcaactaccgtgttaaaagattattagttcaaatcata

SEQ ID NO: 268838 - DNA, 548 bp, Cannabis indica
agttaggccaacaatgaagactcgaaatttataactacaatatcaataatagaaaacaatataggttcaatatgaattcatacacatttagaaattatcatacatttagcaagtaaaaaagacatgtgaaaatacaaaacaaacacatcttaaataatttctaaggattccaacaaactgatacagtgtcccgtttaggcgagagttaaagatatcactcattgaatagagtagtcaactcatcttaaatggatacaattctagcaacctttttttcaatcaagactagaatccggtgttgtccagtttcggcgagatttaaggccattctatcttatgagcttccaccattgtttcataccttgcaagaaaataagttttcagcgactacattttttgtgaccaaatcaaattcgtcactaatagttagattttgcgactaatttttagtcgcaaatattttttgttcatgagacaatatttatttagaaccaaaaaaatgcaatgaccaattttttagtcactatttgttatatttagtgctaaaa

SEQ ID NO: 268839 - DNA, 982 bp, Cannabis indica
attaacataaataactgctaatttccaaattaactaagcgggctttacataactaatgtcactatcgaacaacaaacaaccacagtcaatcaaaatatgggttcagtagtcaattcatgagccattcctccatcagtcaatttgtcagccattcttcaagcagtcaattcatcctctagcagtcaattcgtcagctattcctccaacagtcaattcgttagccatccctccagcagtcaacttgactaacctgactgttcccgaaggctctctaaactaacaatcccttactagagcaaacaatgcaataattgatttaacaccttctattgtgaatgcaggagtgaatggtccacctacccaagaggagttgattgaacaaataattgcacgaaaactggaaggcatggagggcatgatccaaagaatcccaggagtaccaactccaataaaaaaagcctacctagcagctttacagattgaccctttgtagatgtaatcgccttggtcaaaatgccaaagaagtttatgttcccactaatgaaaatgtatgatggaacgattgatcccaatgaccacatagctagctacaagcaaatgatgttcactaccgcaataccttccgagttacgcggggtgtgtatgtgtaaagggtttgggtctagtctagttggcccaacccttcattggtatacaaacttgtctaataattctattgcttctttttctcaattaactggtatttttgtagagcaatttgctagtagcaggaaactggagaagctatcagatgacctctatagaattagacaagaagggatgaatcgctaagagactatgtagcaaggctcaatgccgagaaagtgtcaattacggcctgcaacgtggacacagtcgtcacagccttccaaaaaagccttctggtagaatctgacctatataaagaattaactaactacccttgcaggactatggaggatgt

SEQ ID NO: 268840 - DNA, 491 bp, Cannabis indica
cattttggaggttgggaagaggtatggcacgaatcatgggatccagtttcccagaacgcttagctggacgagcaagggtgatattaggaagaaagaagttagttcgatattttctagacgggtatgagtttcacttatgttcagagtaattatttaacataaatgcttgtgataaatgctaaatacttttactctgatattttttggaccataaacagaatcttgaagtggtgaaggggctacttccacggacagaagaggaggcatttgtgaggaccatctcttacgatggtgtggaaaacctggttgatgatggtgtggatgacacagaggctgaggcagatactcaggtaccagacactcaggtaccagacactcaggtaccagacactcaggtaccaatttttggaactttttttttatgattgtataacttgattgttttattgtttttgttctgtgatatttgttacattgttgaattatcgtat

SEQ ID NO: 268841 - DNA, 669 bp, Cannabis indica
ttttcttcagattgcttttttttttcagaaaaactgagccttccactttctctctctgtagccgaccctacctctctctctttttctcttcacaatttcaagccttagtgatagagtagtgcccacacacagcaagtggtagctcaatcatagattggaagactgtgaaggatcacacacaaagagaaggacattcgggctcagatcttgataatactctgagacagaaaggatacaagggttagagatctgagtggagggagacattattccgctgcccccaatgtaaggttttcttaactttatatgtatttaattatcgttttagaaagttcatatttagggtgttaaacaacatacttctgagtagatctaagatcttgataaaataaattccatcagatacatgatctaggtaatcaaaatatggctcctttcctgaagttgaagaactgtgtagattattttaattaatttgtcttccctactcaaatccacttttcatgtgttctcaatcactctttaataaaattgttaccttcaaaatgtttttttaatttgtagttggtcactttattcttttccattgattgtaaatcaaacaaaataaggaggcaatttgttcatatgtggttaatttagttcaaattatgtattgtataatgattt

SEQ ID NO: 268842 - DNA, 724 bp, Cannabis indica
aatcacgtaatacgcctatgttagttagggtgttacagatgtggtatctaataatttgttagcacttttctaaattatttatcaaattaacatttgtgggaatttatattgaaatgcaccaataacgatatgccaccttctatggtgattgacatcttaatgtgtctcttaacatttttcttattaatatgtacgcatctttattacttttttattagaattttaatttttttaattatatataagtttgcaagaacatctctaatgagacatgtaaaaaaaatgtaacatatttggcaaaaaaaaatactttatgatatatttgtatcaatttttagcattatacttcaatacacaattgcaaaacttgatgtaaaatttatttatttatttgttttttttttttttttggttctgaattgtctttgtactaatttttttggtaatttttttaatacataccgattgatgtggtatccaataattagttagcagttttctaaatcatttatttaaattaaaattttgagacttggtattaaaatgcaccaataattgtatggtaccttttgtcgtgcttgccatcttaatgtctcttatcatttttattaggctaattagtaatttttctcccagaacattgacatgtagtaaatcgtgccccctcaattgttttggccgttaaaaattccccccgaactattgaaattgttaaatttaagga

SEQ ID NO: 268843 - DNA, 641 bp, Cannabis indica
gctcctaaactctcagatcttagacccacgagttcagatctattcatcatttcttttctatttctattcttttagtttattgattttcttattttggttttttcttttgttttgttctggatctaagattgtttatgcattttattgcttgtaatattacaagctcctgaaatttttttggttttgtgaataagggttaggaaggggtagtggtggtgtctgtcaagaagaaagagaaagagaaagagagaaaaaaaaaagatttttattttattttataaattgttttttatttttaaattatttttaaaatgttttaaaattaatattacgttgaccattaaaaatttgccacgtgtacaagtgtgtacacgtggacagtccaccgtgacacttaactgtgatttttggacggatgggtacaaagcaaaatggaatgggagttcagtaggttttgccaccaaaattttaatttttgtggttaagtgttacaaaacataaagtttaggtagtttagccgccaatatttcttaacattattattgttccattgttcttcttcatctttttttttgcttcttccatttttgttctagtttcttcttcttctttctttttttttctcttgcttttgttagtaa

SEQ ID NO: 268844 - DNA, 1252 bp, Cannabis indica
ttagtcgtctttatgattatgttctctgcttaattagtttatatatattcataaatatagggagcaaatgataataataatgatatgcataaaagagctgcatagctcaataccatcaaacttatgtgtatcattaaccaatgagatttaagagcgggtacattttttaagtttgggatagttacgctatagataatgatattgaaaatcaaatttttaagaccaccgagcctcgaagcgttatctcggagagtgttttttatttacgttcacgctttttggaaagagctgctaaatctagttttagtttaggtgaaggaagtatgtactttgctccttcggtaggagtgttttttattttctgcatttaagaaattatatcccatttttttttttatgtatgacattgtatattgtagttgtaaattaataagcatgctgccggcttttggtaaattctcaaatactttaccgtgtcgaaaataaattttaaaatagtctgttgcaagcttgtaaaataaaacaaccatgtgtgagaccgactgaatgtttgaatcctattttcgactgcttaattttagtcatctgatgcctctggaatttgtccatttgtgaaggcaggtgcagaaagctattgcctttgctaaattagctcaccatggccaattacgcaaaactggagacccatatttgactcattgcattcatactggaagaatcttggctatgttggtccctgccactggcaaaagggtacctagttttctcattctcattactcttaattttagtttatcaatgagcaaagtgatgtattgttattcttatttcctttgaaaagagactaaggtaaaatgttcaatgtgacttttcaaatatgtggcagaggaaagccgtggttactgttaatgtaattagtagaagtagctaatcaatattttagttgctaaacagaattatcagatcttatggagccaaagggctacccaaaatctcatcttatcccaaagattttccacctgcactgtccttcgatgattctcatattcctttccagccatagcgctcccataacatagttgataaagcaagccaccataatgatatatttggtacattgtgcacaattcaattcttgaaagaactattaaaaggtagtttattgataagagcaagaaaaaaatgcaaaatctcaagttattcgagaagctgggtaaactccctgagtaatattatctctaaatatttcaca

SEQ ID NO: 268845 - DNA, 245 bp, Cannabis indica
tgtaaatgtaaatgtaatttttttgtatttttttgttgaaacagttatcatctactaaatgtcatttgatggttataattactaggtaacatagagaaaagatcaagagcagtattgggcaagagaagaagaatcttatagattcatcacttcaatgactttgtggaagcattccaatcctttcatgtggaacaaagaataaaagatgagcttctgctctatatgttcctgttggaaattatttt

SEQ ID NO: 268846 - DNA, 740 bp, Cannabis indica
gcttacccggtgtgcacctaagcggttcgctgcttgtgcatccttgaactccatctaccaagtccaggatctcagccactccctcactgtggtaagtgttttgtagtttgcttttccccttattgttttcttttctggagattcttacttatacttgcattattttttagcttgctgctgaagccggccgtctctccaagaacataatcaaccatggcttcgtcctgtctgattttggggacatggacgaagtcaggaagattcttcaggatcttactgctgagaggcggctttatcaggaggctgctgagcgccgggaggccgctgccaaagctaatgaggaagaggctaagcggagggaagcgcaggcggaggcaatgatccgggaggaggccctgcagagagataggctggaggccggcaccaggaggagctgaggacggaaggtgaagccactgcaaaggccaggcgggagcttcgggaggccagggaagccttggatgagatggctgccaaggtgaggtccttagaggaaactcaccaggccaacttagaatccagggccactctggccgcggagctgaaggagctcagggacttcaaggaacaagcctcaaagaaggcaaaaagggatgagcttctttcccccgtctcctgcagccggtgcaccaagcgttttgacgataacgtcttcaaggcttgctctacaaacgaccaaaacatcaagcttaccttctacc

SEQ ID NO: 268847 - DNA, 919 bp, Cannabis indica
accattgtggtgttgctggtcacgtcatgtcgaagggttatagattgcacgggtatccccctggccacaaattgtatggaaagtttccgaatcagaatgctgaatcgactggaaatagcaatgttaagccatctgctgccaatgttgaaggtaattctggaggaaatgaaagtaacagtggagatgctatgcaaggagatcaagatctggtgtcaagcttgagtgttatgcagtgtcaaaagctaatggccttactgtctcaaagaacttcagagctccattcagcaccaaagcaggaaactccactcgtctctcatttctctggtgagaattctttcctttctaaaactagatggattattgataccggtgctacgcaccatgtctgttgtgacagaaaattatttcataaccttcatgttgataattctattactcatgtcaggttaccccatggtggtagtatcaaagttgaaggtattggtgatgttaacatttttcctaatttgcctctgcataatgtcctttatgttcctgcatttcaacataatttgttgtctgtttccacactaacagatactgctgcttattcctttttctttcatgataaaaaatgtgacattcaggacaattcgaagaggcaaatgattgggatgggtgaaaagattggcaagctttattacattcattgtgatcccaaaaacagtgtaccttttatcttttccttgtctgattctagaataagtgatcaaattgtttggcactatagaatggggcatcctagttgtatcaaaaaccattctgtgaataaaactttgcaattttacaatgattccattcctgattttcattgttctgtgtgccattatgctaaacaaaaaaggcttccctttgtttctcataataatattgcagctca

SEQ ID NO: 268848 - DNA, 1084 bp, Cannabis indica
attatactaggaatggatttcttgtccaagcattcagacagtattgattgtaagaggaagatggtaatcttctaacgagaaggcgaagaaccgtttgtttttgtcgaatcggttcagggatctcggatccaggtaatttcagtattaacagctagggaattgttacgagatggatgtctagggtttctggccgtggtattagataccactcggcctgactctgttcagccagaagacatcaaggtggttcgggaatttttagatgtttttcctgatgaacttctaggtttaccaccgcagagagaaattgattttgtcattaatttggcacctagagcgtggtttccaaggccccttacagaatggctccagcagatcttaaagaactaaaaattcaactcctgggattgcttgacatagggttttcatggcctagtgtgtcacccttgggagctctggtactatttgttaagaagaaagatgggtctttgcaaatgtgcattgactattgggaattgaataagctaacaatcaagaataagtatcctttacctaggattgacgatctcttcgatcaacttcagggaaaaatggtcttttcaaagattgatctctgatcgggctatcatcagctgagaattcgagaggaggacatcccaaagacagctttccgcactaggtatggacattttgaatttctggttatgtcttttggactgactaatgctcccgcaactttcatggatctaatgaatagggtattcaaggatttcctctatatttgtgttattgtatctatcgacaacatccttgtgtactctcagtcagaagaggagcatgagcaacatctctggatggttctgtaacgactttgagaacataagttatatgccaaattcaagaactgcgaattttggctatctcaggtgtcctttcttgggcacattattagcaaagacgggatcaaggtggatccaggaaagatagaatccgtcagggattagccaagaccgaaaatagttatagaagttaggagtttcttaggtctggctggttattatcgtcggttcgtagaagggttttc

SEQ ID NO: 268849 - DNA, 535 bp, Cannabis indica
agaacactgataccacgtacaaatctcttgtgtcaagttatttaattttctgcaattatttttatattctgtctgttctgttttgtcgctgcaaaactggtctctgcagtatcagaattatattctgcttctgcagacgtatacagttttatattttcgtgtatattattgacatttgcaaaaactcaatttttcacttctcttcatctttacaattctctattttatgtatatttatgctatagagttgtaatattatttaatcattattttgtccttgtattattcttgtcagagagttgtatttctcggttaattttattgaagcacaataatttccaacatctctctttacgcagttcgtgaggggcaaaagtttgattccacttgagttgtgacttcgacaattgacacctcgtttagattgagtcgtgtttcatacttatcttaagagcagtagtgttcatctaatccaatccacattatttcgctcatagtgcatctgatctgcataagtacggattttatattttag

SEQ ID NO: 268850 - DNA, 650 bp, Cannabis indica
agttagagagcaaactatttggatttttttttttggccacacatccaatatattatttttttggcattgatgtgactaataggtatgggtaaatctcactttcttttggctctgatatgaataggtatgaaagagtacataacactctataatatctatctatgacaaaatatatcctaagcaagtaaaatctcttatatgtacatatataccatgtagcaccatagtactttgacacgacctctcaaacaacactttatggcatctcacacgccacctatcacacaataagtgtctttacctacttatcttaataaataaatataaagagactaatttatatatatggtttcttcaaacgtctactggacaaaaggaataagaagcacacatcattttaactttagagcaacctacaagctagatgatgtcagctaccaaaaaaaaaaaggataagctgaactagacagacggacacaagccttatttataacatatatatatatagtatgttctatttatgctatttgtgtgtgtatgtctacctacttattacattcgtaaatatattatgtctgactatctccttccattatttacacacatgtctatctccattaattacagatatattatgtctgtctatctcc

SEQ ID NO: 268851 - DNA, 1206 bp, Cannabis indica
tgggggttttggacggacgttccatctgaaggagcctgtggttggcctggtctaggttcgacatatgctcgttgaatggtttcttcgagcttgatgaaactatctgctcggtcgaggaaatcactcatagagtccacaggaccacttttcttgatgtctttccatagttctccaagaatctcgatgccccccaatatagcagctgccttcccttcttcggtcaatcgtgccacttttgtggcctcagtcatgaatctgcttatataagcttgaagagactcttttagtcttttctttacttcgacaaggttttttaaatgcagtgggagttagggagaagaagagaattgtgcatgaaactccgaggagaaggctttctaagagttgagccttcctggtgttaacttgaagtaccattgttgcgcggcttctgagagtggtaggaaaaactcttgaacgcacatctcctcgtaccccttgcaaatctatttgcttcgttagttgctatatgagtttttatgttgaattccgtaaaatacaaaaaaaaaaaattgttttaaagtgtaaaaaactctaaataattaaatactaactataatagagagtatgcttggaacaataataataaaagtaactctttattttaacattttaactatttcagctaaaaaaattgagaatatcagagaaaaacaaaatgtgttaaattcaattaattagttagacactattataagacaccaattttacaacaattcgggtcctaaaaaaaaaatatgcctgcaaatgtttgaatcctaattttagtaataattaattatttttattttttaaaaaacaaatgaaatacctactataactacacttgataattgatataagaaaatttaaattataagttccggtactaaaaattaaaatgttagtagcatagaaatggtattaaaatgttagttttttggtaaatggcagacctagaggttgtgtggtgccgtcgaggggcttaaggcaggggtgtcctctctcccctacttatttctattttgttgctgaggcgctatctaccatgcttcaacaggctgaggctgctggtgatttgatgggttttcggttgctcccgggctgggccgtcgggtggtctcatcttttctttgtctgatgatagtttaattttgggtagagctaatagaagggaggccgagtctc

SEQ ID NO: 268852 - DNA, 718 bp, Cannabis indica
atatcttaaattgttctagacactcatatttggtcttaagtaaataggtccaaacacatctactgaaatcatcaataatagataagaagtagtgtttacctgaatgtgttaagattctacttggcacccaaaggtcagcatgcacatactctatgactgcctttgtgttgtgagtcgctgctgtaaacttgatcttgtgttgcttgccataaacacaagtatcacagaatggcaatacacatgtctgaagcttttcaaatatgattcccttcttgtgcaattcaatcacgccttattcactcatatgttcgagcctttgatgccatagctgcatatcactttctaaaccttgtactgtatctacctcagtcacaggtacagtttcacccttgagtacatacaacccatatactctctttcctttcatcacaagtattgaaccttttgtgatccttaggctcacaattaaagacttatagccataaccttcatcttccaatgttccaagtgatatcagattcctcctcaattctggaatgtgcctcacattatgcagaatcttcacttcaccattgaactgccttaaagccaccgcaccaatcccaacaaccctgcaagaaacatcattacccattagtactctaccaccattattggtttcttaaaaatcaaagaaagattcttagttgggacacatatgataagtgcatcctgaatc

SEQ ID NO: 268853 - DNA, 614 bp, Cannabis indica
tcgatagcatatgaaagccttatggcttcatatgacacttctacagtgcaccccttaaaaaagggtgtacccccttcatattatcagtatctaggtgtactcccttaattgtagttatttaagacatcttgtaaatttttgagaaattccataataatttatgatgttgaaaattcaaacaatttatttcacatgtgtataaaacaaaacatgcacgcaagcaatagactgtttgtaatccaaatcctgaaaatttatataatgtcctaaataactaggatgtgtaccgtcttacagaaatattggaattacaacaattcacattctaaaaacacaatggggatggggatggggatgcaccgttgtacccctttttgggggtgcactttagaatttcctactattatataagaaacaaacttctatcaatattattattttatagaagaaaaaaatctcaaggagcaataagttatctgactatcctcaagaaaaagcaaatatacaaactaaagcaaaaagaagaaacaaaatgaaactgaagagttttccagccaagagttttttttttaacagaatctactttagcagccttgtgctgcttccgaatccac

SEQ ID NO: 268854 - DNA, 755 bp, Cannabis indica
ctaggtccaatttcagttatgattccaagtccaagtcctagttcctgtcccggtcaacttcgagttttgggtccaatttttggtcacaggatactagttcgggtccacttttcggttaaggactgggttcaggttcggttgtaggttcgggtccttgtcagggttcaggtttagggttgggtcccaaatcaagacacagactacgggttttgtccaagccctaggtccaaatctggatcccagtctcgagtcctagtctggttccatttttggtgccgggtcatttgagctcagtcctaagttcaagttcgggtcagggtcgggtactaggtcccggtcctagttctgtttcccaggtccctatccttattttgggtccaggtcccggttagtgtgggggtttgggtccagtcttggttcgggtatgagtcctagtcttggttcgggtttgggtttaggtcctggtcctcgtcctagtactacttcggttctagttcaatttgcgattctgagttcgagtttgggttggagttctagtcctggtctaagtttgcttttgggtccggatttcagtctaggtccagatcaggcttcgggtgtgggatcgtgtcttgggtcttggtctaggtatggtccgagtcccaacttccaatcccgatctgagtctcgattcagttctggatctaagtcctctgttcttatcctggtccgggttcgagtttgggtcaaggtccgggtctagctttgggtatgat

SEQ ID NO: 268855 - DNA, 507 bp, Cannabis indica
agttttggtggttaagtgttactaaaccgtaaagtttaggtggtttagccgccaatatcccttttttttttaatattcaagtaagttttacctatttaagatatcctacaaaattttgagaaattcaaagtaatttacaatatagaaaataatgtttaaacagtctattttacacacgtataaaataaaaaataaaatagttatgtgtgtaacacactgtttgaacataaatttcggcatgttaaacttttccaaatttcttaaaattttgcaggttgtgttaaataactataatttactgtgagaaaaaatttgactaaaaaattattccggataataaaacagataaaaatgtatcggtagatcacttttgaggatgtgtattatagaatttccttattatatattattattcaaccatttcattttattaaattcctttaccttgtgaccatgcttctgtgggtaaaactttatttattttagaatttttacacaaaataattt

SEQ ID NO: 268856 - DNA, 1142 bp, Cannabis indica
tgggctagacttcattaccccttgttgggctcactttctaggcttttggcgggcatcttctcttttttggccttggacaaggccaagttgtaatagtgacaggcagactgctggtctcccctcacacatgccaccccatgccttgttggaaatttaaggcataagtggtagatagatgttaccgccttcaggtcgttgagggccggtcaacctatcatggcgttgaaagtcgagggaacgtcaatcatgacgaactgtgccatcagtgttctggtagttggattttctccaactgtgaggggtaatatgatattcccgacaggtgcaatgccttggccaaagaagccatacatcacttggatggaaggtgccaagtcggtgagttggagccccatcttttcatatgttgatttgaaaagaatgttagaggaggctccatcgtccaccatacatctatcacttggatggaaggtgccaagtcggtgagttggagccctaacttttcatatgttgatttgaaaagaatgtaagaggaggctccatcgtccaccatacatctttctacgatcatgttcccgatttgtacagtaatgactaagggtcattgtgagggaaactgacatgagcagtatctttttcggtgaaggagatcgtgggctctatgggcttttgctgcttaaagctcctgtcttcgatagctaggatattacttttgggctcgtgacggagtgtccgggcatagcgctccctagccttgctagtctcacctgtagtgtggggtctgccaataatgacccctaggtgacctgccacaggcggtggcattggatctccattctgggcaccatgtacctgagtttggtcgtcttgtacataatgacgcaggtggggattgttacgccttgtaaggtatccaatctccctcttcagactttgacactcattggtgtcatggccgaagtcgttgtgatatctgtagaactttgacatgtccgtcttgcccatctcttttttgacaaagaagggctttcggtatgggacggtgttggaaataattttaccaggatctagatttactaccaagtatgtttgattaacatcataatatgaattctaaaacaatgaaataaacacataagagt

SEQ ID NO: 268857 - DNA, 500 bp, Cannabis indica
cttgaattcagctcactagttttcagtactttgaatcatgaagatatagagcaacctaatccaagcctcaggagctgaaattacacaaatctgcaactcaaaagccaacatgggcacctagggtttcactcagcgcccaggttgacatcctcaactagggtttcagtttctgagaccgtcttggtgaaaaatggtcaaaacatgcattgagacatcaactagacagaccacaaatatatttgaggcatcagaattaaaatcggagtaagttgacttttgagcactaggggcgcggggccactaacacctagcgcccaggttgacaatctgtcaacctaggcaccttccaagtatcaaatcagatatataacttatgcatcttcttcatcttcatcaaaaacggagaaataggtccatcggaggaaaaccaacaattctgggtacaaataacagggcccagcacccaagttgacacttggggctggccctgcgcccaggtt

SEQ ID NO: 268858 - DNA, 1186 bp, Cannabis indica
cgtgtaggttgggataatgggcttgctcaagtgatgattgactacttctcaactttatttcaagcttctaattcgacttgtcaagaagtggttgatagtgtcaatagctcggttcctagctttgttcatgaggagttgcgtatggctgtttctgaaaaggaggttaaaaaggcgattttttagatgcatccaaacaaaagtcctggcccggatggcatgacacctgctttttaccagaaatgttggagcattgtgggtcgtgatgttgtaagggctgttcagagattcttttcgacaggggagtttgaaccgggttgtagcaaagctaatattgtgttgattcctaaaaagaaaaatcagaaggatatgactcaacttaggcctatcgccttgtgtaatgtggtgtacaagacaatcacgaaggtgatggtaaaccgtatgaagccttacatggatgttatcgtagctgacactcaaagtgcttttatcccgggaagccttatttcggacaacattctaatttcgtttgaggtgcttcactacctaaagcggaagagaaaaggaaaagaaggttttatggctttaaagttagacatgagtaaagcctatgataggattgaatggcctttcttagaagcgatgttacgaaagttgggttttgatcaatggtggatttcgttgttaatgaagtgtgtaacctcagctgaatatctggtggtccatgagaacaaggagatggggccgattataccttcccggggaattcgacaaggggatccgttatccccgtatctgtttatcctttgcgccgagggcctctcggctttgctgaaaaagtatgaaagggctggcctcattcatggatgtaaagtggctaatggagcacctcgtatttcccatatgctttttgcggacgatagttatttgtattgcaaggctaccatcttggaagctactagaataaaagatatcctccaaaagtttgaagcagcttcaggccaaaaggtgaacttttcgaagtcgtccatttttatagcactaacactacccagggagtttgtgatagtatatgtaacactttaggcatggctattgcggatgaaggaagtctgtatttgggacttccaagtactctaagctgaaacaagtctacggtgttgggatatctcaaggaacgggttcgaaa

SEQ ID NO: 268859 - DNA, 968 bp, Cannabis indica
aaatggcccaaagaatcgtaattacttcctcaaactcgacttttgataacttgttgttgaattccattagaatatcaaacatggactgacctttgctatctttgatgtgtttgtagaaaggcagcagcttccacacctgtttcgccttattacaagaccacaaagcatgagttaaggattctatatacctaccacacatatcacaagtagtgtcaatcttcattcccctgtgagtcaaattaagtttagctgggagccaattatgacatagcttccaaccaaacaacttgatccgagggggaaggttaagttgccaccattttttccaccactcatgtgtttgttccatgttcgaacaacgggtaggactgaggtgtaattcccgagctactctatatccacttctaaccacatactcaccgtttgatgtgaacggccatatgagagaatcctccatatatatgttcacgggggtgcccaaaatccaagggacatccttgtaatgaaagtatgtatgtatagcctctttatcccattcaccatcttcatttaacaacttgttgattgtagagttaggagccaacctcagatgccgatataaaattgttccattgtgcctaggaatccatttatcttcccaaatgcgagtgtgtcgaccatttccaattctccaacgagccccctcttgaattatttgtcttccccaaattattcctttccatatgctagatgctccttgagggcatttggccgtgaggaaatttgactccgggtagtagcaattttttaacaccttagttaagagagtattcagtttgtgtattagccgccacccttgtttggctagcaaggcttggttgaactccattagacttcggaatcctaaacccccctcttctttcggtctacaaagtttatcccaagtacttcaatgtatctttttattttcttttgtatcaccccaccaa

SEQ ID NO: 268860 - DNA, 840 bp, Cannabis indica
aatgtgaaaataactctaatttctataattattagataacatccattttttatttaatgcgggtcgagaataatgatcgggtcagatgtgccatttatatgctgcgagaagatgcctgaattttgtgggagatcgtgtctcagggtcatgacctgagtaacatgacctgggatgctttccgaacattatttttttgagaagtattataatgagtctatacgggcagcaaaagcagaagagtttatatgattgactcagggtagtatgactgtgatagagtatgcccccaagtttgatcaaatggcaaaatttgcttcaaatgaagtagctactaaggctgctagaaaagaaaaatttattcggggattggatgaacacattacacgagatgtaatagttgcggccaaacaacctggatttgttcggacttatgcacagatagttgaattggccctagttattgagggtgtagaagacaagatacgaaagaaaaatattgcaagaagagattcatggaagcagacatctggtgctgccttaggtaagggtaatgaccctggtgatcgcaagaaaagatctaatgaaccatcagctacaggcctaaaaaaaagattccaaaataaccaaggttttcgtcgtggtggaaacaaaaaactaacaaacttttctagaatgtccaaggtgcaagaggcgccacgaaggcgaatgtcaggccaaggcctgctttcaatgtggggtagtgggtcacttgaagaggaatttcccacaactactacgaccagaacagaagaaggatgatacacctgcttctgctcaactgtttgccctaactcaggccga

SEQ ID NO: 268861 - DNA, 539 bp, Cannabis indica
gctaagtcctagatctaaataccgactacgggtccagtccaagcatcgagtcctggatcttaagtcccgaggtgggtcctaggtccaggtttgggtctgatgccgagtctcggatcgcgatccaagttctgacgcccaagttctggtcctagtttaggggcctaatttccaggtctgggtcccccctcgatgttcgggtcctaggtcccggtccgagtccaagttcgtgtttcggtttgggttcgggtctggtccgagtccaggtcctggttagggttcaagtctcaggttctagcaccaattctgggtctaggtccgggtctcggtcatggtctaggtcccagtcttgctttaggtcccaagttacaagtaccggtctgggtgcaagtctcggtatgggttcttgtctgagtatgggtttaggtttgggtcctgttactgtctcatgtctgggttctagtccagacctggtctgattccaattctgggtccgagatcgggtatggatcctggtctgagtttgagtctaggtctggatc

SEQ ID NO: 268862 - DNA, 611 bp, Cannabis indica
gtctttggcttttggggtttttgggtttgaggtttagggtttggggttttatgactagggtctagagtttaagatcttggacctagtatttggggtttgaggtttcaagtcgggggtttgttgtttgggttttagggtttggggttctagggtttgggtttagggtttgggatttgaagtttggtgtttttgtgtttggggttttcaggttagctgtttttgggattagggtttggggtttagggttttaggttttggggtttagggttttggcgtttgaggttttgtggttttgggaatcattatgggaatgggctagagaatgcgaattggaatggcaatggtcatgggtcggggaatgggaataggaatggggattgggaataggaataggaatgggaatgggccggggaatggcaatggcaatgggttggggactaagaatgggaatggaaataggaacgggaatgtgaatgggaatgggtcaaggaatgggattaggaatgggtcggggaatgggaatggcaatgctaattgcaatgggactgtgaatggggatgggaatgggaataggaatgggccagagaatgggaatgggaatgggaatgtga

SEQ ID NO: 268863 - DNA, 1105 bp, Cannabis indica
catccatcaagcacgagactttctgttcaggccagccaactcacttgaacacaaaaacgaagtaagaatagcatagaacatactatatatatgcgaatgtatgtatgtgtgatatatatgcatgcttgttgtgattcgtacactaccaacactagtacggtagcggtatagagtgcattggtaaagtgtacgatgtctgaagagtacattacggtattaccaacactagtacgagtaggtacaaggtgtatgtggtacaacacttaatagtactcgtggtacggttcataccctacctacactagtacgatggtggtactgagtgcatgtggtataatggtacatggtcgtatcttagttaagaacgttcttactcatttgttaatccttgtaaacaggtgtatgggcacctagatacaagtcgatattatgcgatatgtcatatgctttccttactgagtctgtcgactcacaattctacttttgtgtgtagataaaggaaaggcgaaggccgaacaggagtgagcctcgagctagggtgatgttgtacatgtcatggcggcgcgacttggactgttcggtctcggaacatctggagtttttcttttgtagtcgttgtgtgacctaacttttctgtttaaaatattttgtaaaatgtttaacaatgggatcccgacacttgtaattatttatataaagtttcatagttaattctaaaagttttaatttgacacaattttcaagaaaattttttgattagcaaagatagaacttagattgaaaaattactgtagtgtgccttagtattagggcgttacaataatttttcttggattttaattttttaaagaattttgtgtttgttgagagtatatcgatatttttgttgataatttttcttgtattttattttttttgaaggattttgagtttgtcgattgtatatcgatattttattaataattttgcttatgttttgattttctaaggattttgagtttgtcaattgtacattgacatttcatttattgtttatcaataattttgtgattttttttttttatgaatttttagtttatcgatagtttttctatggtctgtcgat

SEQ ID NO: 268864 - DNA, 1161 bp, Cannabis indica
ccttccgaggtggaggaagaggaggaggatgcaccctaaaactttgagggatataacaaggttggggagccggtagacacggatggcgacgtcctggttgagggtgtggattacgtcactgaggagcttggtgccacagttcctcaaaggaggcaaagtgccttgggtgctaggtgggtgagccctccgtccaaggtcactgaagcacgtttacaggatcttgactagggcagctatttgagcgagctggactgttatgttcccgcctcgaacaatcgagcctccaaccctcagagcgggatgtgcgcctggtcgagtgctcatgctaaataaggggcacttctgcctttgcacccgtactttaggaaggtggcagacttcttccgtctctgttcgacccaattcactcccaagggcatcaagtacctgtttgccctgtttgttctctacgccacccagaagtgggatatgccttctccccatgagattagctggttttttgatttgaagtatactctcaagcaaggcagatcaggatacttctacttttctcagccagacttcaagtggttgacgggcaccggcgataaggccattagaaaaattgggaattttgttgacgagtactacatggtggatggcatgggcaccacttatactttgttttagtagattcctgtatatcaccgtccacccctcatgcttggtctcagagatagagctcaaagactcactcagttgccaggtgctgcccaaaatatcactttgttgaccttagaggacaactttgtggagtacgggctctacccgaagcatttcattcctcaacctgtgaaggagaaaaagaggaaatctagtgctggctgggctgacggagctcatcaggagaatgaactcattcaactaaagtgtgaggctaagttgaagggaggtgcgggggctaagcagtatgcttaggaccatcttgagcaagaagatgaggctgaggaagagcaagtgaccccactcaaaaggaagaagaaacttccggctgagcccaggcctatcaaacatacaattcagatcagggagcccaatctacctactcaaccatccaatcctgtagtaggaaaggagaaagccattatggaggagcaaagagactcgtctgatgatgatgag

SEQ ID NO: 268865 - DNA, 573 bp, Cannabis indica
atgcgctataatcattgcaaatattcttctttagttacacattttgctcctttatctaatttattaacaaaactctaaaaatattcaaatacatattataatattaggataagtctaatagtaaattattaagaatttattatatactttgggttaataagacaattaatgggattataattctactaacctatttcatcaaaaaatttaatttttattataagtagataaataagcgtaatttgtcaattacagagatttatttgaaatgtgttataatgtaagttattggtgaactaaaaatattttcaagttcagcgatcttagcgacccgattggaggcttaagatgtcataacagttttagttagtaatattgattgaataattgagataagtcgattttaaaaatattggggtatttttaaggtgctaggagttgaccaaataccctaaaattaaagatttcttagtggttgtaaagggaaaaatctacaatgatcggaatggaagaatcggggacattgacaacctatagaacaaaggaaaaaggatcgttgatcaagttagtaaa

SEQ ID NO: 268866 - DNA, 646 bp, Cannabis indica
ttttagttcatttatcaccatcacatattattgattgatgtcacaccatgtttaaaattttaaaaccctacattcaaaaaaaaaaaattaaaacccacttaatgattaattagtctttaagttttgtttagtttgattaggatatcaaaatctggcaataaataatatgaaaacatcagcacagtacagtctattctcaaaaaataaaataaaagataaactactacagcagcataccatttcatttttttttttactattttgatttaatgccaacgtccaaaattaagatatatctaattgtgctctaatcaatactagtttagtatgtaacgcactataacccaaactttggcgctagacaattttcaattttttaattcgattagttaacttttaacttaataaatatcgtgtacttaaaatttattaaaaagagagataaatatcttgtttattattattattattattattattattattattattattattattattattatttattttatatcaagttttaactatgtaaatcgaatagtgaaacaaaaaaaaaaaaacactttgtaaatcaaattggttgagggagagagaaattcatgttattgcattataaataggggaaacttacaaaaatact

SEQ ID NO: 268867 - DNA, 671 bp, Cannabis indica
ttaagaagaaaaaatatttaaaaagttagaagtatcataatacttcaacaccaacaaatattataataattcaacaatatcaaacatcgagtgtacacttgcataagttctccaagaagaatacaataataccaaaatatagtatattgcatgtatttctatgcatgtacttaaaaattaatcaataagattacaatatgatttttattcatgaactcaacaaaatgatgccatcgaacacattatataaagccagtaataaagataaaaatatgtagtgacaaaataaaagggtaagaagtagtaatctaattgttaatctaacaaattcatatataattagtgcaggagagctaagtcaatctttctagtaggtggaaacatggcctaccaacaccgagagatgtgtttatacctacagtttcggcaatagatcctgtgagctcatattcataggcaatgttttcttataatagatattacaagttcatcattatagaaccatacccttttattaattcttttgattatctatagatatatgatttttttaataaacggaataaaaggagaaacattacaaaataattaataggcataaccataaataaataatactaatatgctcatgatatgttcattcaacatagtatatagcttaattccatgtt

SEQ ID NO: 268868 - DNA, 597 bp, Cannabis indica
atttaataaattgttaaacatgttttctatttttattaggaattccttcacctaatgaattttactaccaaatgaatccaactatttatctaaaaaaactacttaaaaacaacatcatccacaatgcaaaatcaacttatggaaaatttaataaatttttaaacatgtcttctatttttattggaaattcatttacctaatgaattcaactatttttccttaaaaataaataaatagataaactgatttttttttaaaaaaaaagggttgggctcgactcgaggtcgggcctgacccgctagactgaagaaagtagtcgggccgggtcgggccaggccaaagtgatatcaggccaggcttggtctatggcaggtcaggctcgacccgacccaattgacattcctatttttgttgggtcgcattccaatgaagatagtagaataatctgtacgagttgttcatatttgcaatcctttggtatgaattctctactagcctcataattgacataattttttccttctttccattgtccattactctttaaaagaacgagtatagattctataatctgcaattttttttatagtattttaa

SEQ ID NO: 268869 - DNA, 1197 bp, Cannabis indica
aattattcaaaggaagaagaagagaaatttggaagaggaacttggagtattgtgacaagctccaaatgggttgttatttctatctctcttttcttttaaactttgtaatttttgcacaattatgagttaatttttattttgctagaattattttgttgacttaaattgtaatttggtattttgttgctatgtttagtaaattggttttgttcattcaagtgtgtttattgtgcaattgcttacttttgcttgatcaccattagtaagtagtagctaatcttgattttggaaaaaatagggttagtggaattgcttgaatgatgcatgaatatcactttggaaaaatgtgatttgtaaatggcataggaatatgttatttaccatgtatgacttgaaggaattgtgcttaaattggtattcttaaaattaattgggcataggaatatgttaattaattagagaattaaaccataaacactttggaaaaaggattatgacattttaaattcctagttgacattatcaatttacaacaatactcattagcaccattatatcaactttgcatttttaggccaatttaataattctagcttgttttcttcgtagtttgtgtttgttaatttttttacatattctcatcactttattttatttttgttgaaaccaatttgtgagtaattagttttataaattaatttccaattttcaatccctgtggagacgatactcgatttatcactttattacttgttacgattgcgtatacttgcgtacacaattttcacaacaatattcaatcaaaatctagagcgtggaagtgaaagggccgctgatgaagatggcggtgatattcagatgtgggtcaagaagaaggatatatcaaatcgtctattggtttggacagaatccttgattgcgtggtgagtcttttgattttgaattaaaatttcctttctttttagatgtccatatgagttatgttgttaatttattctgattttatttctgagttagtgaaaggcgcctagattttagtacttttgtttgaatgtttgcacagtgtgatgaagtgttttgagttaaaattttaattttagtttaattttgagtgatttcgttaagtttgatgtgggtgattttagcttttgtttttgttctataatgttgagttgttataataggatatattgtaaa

SEQ ID NO: 268870 - DNA, 995 bp, Cannabis indica
gaattttttttaaaaaatattaagagtaatttttaaaaattatttaaatttatttttttaataatgagatatacttatcatcttatggggtccaaatagaactccccttatataaaagtcaataaatcataataattagtgacactaaagtaaataaataagtatattctaaaatactttacaaattaatcacacatgctatacaatcgactaaagttgtgactgaaaaatattatgaagtctttgttatcgctaaatattaggcactaaaagtattaattacaaaaattaaaattagttatataacaaatattatcactagaagataacttttattattataagattggtttgatttgataggtttattttattttaatcaattagaaaagaatattaaaaaactttatcgctttaatattaatcaccatatttttgtcaaatttaatttctcttccattgatcttataattgataagactacaaataaatctatgtcaatctttatttttttttctctcataattaatattataattgatgattatatcttgcctttcttttctttctatcgacatccatagttaggtcccatagcttaattagtatatcaaagaagaagtttgtaaatctatgtaaataacaaaataaaaaatagaaatgcaagtatataaatatctattctatataaagtgtgccaatataactaaatttcttggtttatgagaaattcatgggtgactttttatttatatttaataaaataataaaatattatttatatataataaaataaaaataaaacaaatctcattaatatttgaactgatatttgtaatttgtttctgatttaatttttatatatatatctattttatataaaatatagctatataacagaattcttggtttttgagtgactttattccaattactatttaacaattttgaatgcctaagctaacgtaacgtctgttaagttttaattttttctt

SEQ ID NO: 268871 - DNA, 1114 bp, Cannabis indica
tagggaattaaaccccattattatttttctaaataatatgtgacagttttacaaagaataaaacttaaatacaaaatttattcctaatatatatacatactaaaatttattcctaatatatatactaagatttattctaaatatataggggtatttatactatatactatttttttcaaaattatcatatttatactagtacacggtatttttgtaaaaataatgtatccattttatactgtatactatgtaatgtgtaaaacgattttatttatattgtattttgtcatttatcatgtcaagggcttttcttatcaatttgaaaaaaatatacatattggttttctcacatcagtaacaattttgaaactttttacttttttaaaaaaaaaaataaaaaagttagaaatattaagtataacaccaatctctatatttttcttttccattcttcttcttcttcttctcattttttatttttcttcctcctcttcagctctttcccattatttagcagttttttttttcttttatttaaatgataattaaaagctaaattttttcaagtttccacttttattgcttacattttcatagatagcctagcttttcttcttcttcttcttcttcttttttattttcgatttttgtttcaattcttcttcttcctcctcttttttttcactggttttgttaataaactagcaatgggtaagaaaaaattacaaagaaaacccccatagccctatctctatagctttgaaaagaaaattaattgttcattctctggaaaagagaaaatcaaaagtatttaaaattgatcattgaagattaagactctgatttcgaacttgataattaagagtttgagatacacaaagtttcgaaagatattttatgatatttttcagttgttttagggttttttttccttcttttgttttcgattttctggtttctttttctctagtctatgtcttctgctcattttattttttagtgaaaattacaccaaatatgggtattctatataaaaaactttgataaatatgacttttttaactttaccaatccttatgtggtatttgtccaatttaaagttttttatggtatt

SEQ ID NO: 268872 - DNA, 748 bp, Cannabis indica
tctgcttattgttccatgtgaaaaaagaccctgaagatttcaggtctaccattttgcacttctccatactatcccgaaatctctgtgatggtacattctgagctcttttcccaatcctttcatttgcattcaaaatctcattgaaatcacccattagtaaccatggatcatccactttgcttgctacttcctctaattcctcccataattcttctctctttttcacatcattaaatgcatagactaatgacacaaagaatttccccacttgttgctgagattctacatagcaatgtataagttgactcgagcaatatcgaatatccacagagtaaacactaggctgccaagcaacaattattcttcctttatccaaccaaggattattattagtaaagcagaaaccagaaaaagtctagtatataaagttctcatatttttattttgtacctttgtttcaaggaggctaacaaacccagcacctttcgagaagatcaattgcttaatctcattatgcttctgctggccattaatcccccttacattccaacataagaatctatccatttgaggttgagggatctccctcccctcctgtgttaaacttgattgtctcttcaacctctagattagcaaacatgttcttcacaatagtctcctctgtttcattgctcatcatcactttcttacccttatttactctttgaaacccctcctcatgaacttgctgctctttttctggtttctt

SEQ ID NO: 268873 - DNA, 1028 bp, Cannabis indica
caccaaatacattctctgtattaaatacatccataaataacaaagactcgtggactaaggctcattaacgcccgaaccatgtaaaaactcttctctaattttcttacagctctataatcttataatattttattggttgccgaaaacttcggtcaacaagtaaaaatgtcaattttgatctttaataattttaactatttaaataatttatattaaacttgcaaaatataaaaataagaaaaatgataaaataataatgaaaaatcaatttgttgaaatagatatgttttgtattctaaaattgatataataaaaaagtaacaaaacaattttttttaaaaaaattatgataaaaaatgctcaaatgtatagtaatgtaagtgtgtcaccttttacaaataaattttttaacttttgaacaaattaaaattaaagagaaaacatttcagttgtaataaaatattttttacttgaacaaataacaatataaaaatcaagaatattaaaataaactgttaaactaaattaatttcctaaatatatgtaaaattaaaaaatagtataaacaatttaattattaaaagataaataacttattgaataagacattaatcaatcactcataaaataaaaaatatttcttagacaaaaaaaaaaagtaaaataataaaaatactatttataacctacatggataatacttaaaatgtctctaaacaatgtgagacttttagcttctatatgtaatttatttttcaaataaaataagagaatgtgtcacaaaataggaagaaaaaaaaatagaatgctacctaaacttttattgtgcattcctttatatatataatttgatttagtttcccattcttttagttatactttttgtataaatagaagttcaccctattcgaataaatgagaaattctcatttagtttctctttctctcttcttcttcttcttttttcttccttatatatttatattattctatattattttagataatgcttcagtagaggtattaaa

SEQ ID NO: 268874 - DNA, 521 bp, Cannabis indica
gcataaaacccaacaattccaagtatcaaatcgatgatctaactttttttatcttctttgtcttcataaaaaatggggatataggtcctttcgtagaagaaagaacattttttgggtgtcgacaacagggcctagcgcccaggttgacacctggggctgaccctgcgcccaggttaaaattttgtcaacctggcaattttaattagagtttttcaagaatactcatgagcatcatcttcaattttagaaaatattgagattcaactatttctgaggaccaaataaaacttttgaagggccaaaagggggaccaagcgccgaggttgacacctggggctaggtccagtgcccaggttgacatattgtcaacatattgtcaacttgggctagtttcgatcaagtttaccaaaaagtgtttcgggtattttttctgtcattagaaacaacaaagatttaagtaaacttggggagaaaattataattccgagaccttggaaacagggcccagcacccaggttgac

SEQ ID NO: 268875 - DNA, 1290 bp, Cannabis indica
ggcaaagcatatttgaggcaaaagagttattgaattctggtgtatgtcgttcaataggtttgggtttttcaatctctattcttaatgatccctggctttctgatggtaatccttttgtaatgtctgatcatctagcgttgttcaaccaatctgttagcaacctccttaaaactgattcaaaaacttgggatgaagatgttatcaaggacttattcgacactagagatcaaaatctcatcctttctatttagctaagtgacaatactatggatgataactggtgttggaagttcgagaatcatgggagatacactgttagtagtgcgtataaacatatacaagtgttgaagggagcttggcctgctattcaaccctccagtttatggcgcacaatctggaagttaaaatacctctgaaagtctgcaattttttgtggagggctgcctcgggtgttttgccaacttgctatcagctgcagaagagacatgtgtctttgaacattgtttgccctgtttgtaatttggaagatgagactatctataatgttcaagttgattgttcttttactagatcatgttggaataggtctgtggtggatattggtaatacaatggttgctgattttttcagttggcttcaggagattgaaagtcgtgggaagatagaagaaatggaagagttggctatggtggcttgggcgatttggagggctagaaatgaagtcgtctggcagcagaagagttcgaatgctgctagcattgtagcatctgctagatctttcctggatcaatataagaccgctcaagaaaggagaggaaactctctttctcatttgtttgaagatgggtataaagctgagcattggttgaatagtagaaataagatcaaggttaacgtggatggagcattgttcgctaatgaaggacgttttggtatgggctgcctagccagggagtcagggactatgaaggtcgtatggttgaagctttctccttgggaaagcttgctctggttcaacctgaagtgatggagattattggtataaaggaggctttgagttggatcaaacgtcatgatcggcaaaatgttgtcattgagactgacaatttattacgtttccaggctattcaaagtaacattcctatggccatctcaatttaatttattggtgcttgatgttcgtaatttattattgtctttgaattatgtggatttatgttttgtgaaatgatctgcaaacaaagaatcaatagttgtttaaatcttatttttttagtaaataagtaattt

SEQ ID NO: 268876 - DNA, 781 bp, Cannabis indica
ttctcaagaacctcatctctagttgcttcatcatttaacttaaccatagtgagccccttagtcattctagcaacttgaacaatgcctaagtgcccccaaattctacgaataaaccttcaaagaccacagctgggatatttgctcccaacaccatacaaataactgctgatttccagctttcctcttccaatttcacctcttctaaatctatgtgggctatttttctacactccttaatcactagttcagtaaaagataattttgtatcagagtttagaaccttacctcctgaaaattgttgccaatggttctgcaatgctgattgtagattatcaacctcatcagcccagcttttccttgatgattacagcgaatcctcttcttcccgaactgtgttctggtctggatgtaaatgaaccagcagagggtgctggctattgatagaactagcaacgctctccctctccagaccccgacgttgctccggtgaacctgcatcaatcgccaccttcgttccaggccaacgacctggttttttcttcctcgccatggaggaacgagagaacctaggacagaggcgtttttatgatattgaaaatattttttttgattattttcaaatcttttatcttattagatatttaatttaatttgataaaataattcaaatagacctagatattttaaagtagtttcatttttttaaattataaatttttatgagatatttaaggttgtttttaacaaccctaaattttcaaaatttagttggttagtttaa

SEQ ID NO: 268877 - DNA, 1087 bp, Cannabis indica
agctcctctgccttggcctgtaacgcccctgatgcctcctctccgcctgagcctcctgctgctaggcttcctcccggaatgccttcctctcagccgccagatctctcagactcttcatggcctcgtccatgcccccaaactcggacatgacgtacccatgatcaattaaagtctttgagaggcgaccagtctctgcagcgatctggcaaaataagaaaaaaagagttaagtatgagagatcggatgccacagagtaagacccaaaaaaaaaccattaacaaagacgtaccgcggtcatggcaatatcctgaatctgatagatggagttcgtggaagcacaggttgcgtatcttttggccgggagttgggtcagattggagacaaaatggcttgtcaactcggaggcgaaaggagcaagggtaggaccgacgaagcggttgaaccaatccatcagagggtccatgttcaggtcccaagcgttcttgaaggcctcctcgcgcaaggaatttcgctgagcctcccgtaaggccttttttagggcttccaccttggcattcccccttgtgtactcggccatggggtagttattcttggcgatccgaagttgctgcctttcctcatctgcgggaatgggagtgaggatgatgtcaggaggtacagcgtcttcctctacctcagggaatccccgagtcagagctgacagccggagtgtctgccctcctaggccttttggaagactcagcctccaccatcttgcccttgcgcttttggtccagcgtggccaaaatctcactttcctcctcctcctcgacctcaccgtcttcatcgataagacgatttggcctaaggggatactggaagaagacctcctcggggtcactgtctgagcaggcgccggaggaagggcagagtcagggctgtaggtctgggcaagagtcgccaaaagatcttccattggcttggctgcttcaaaaagacaaacaaactaagtgtcagaatgatcatgagaaggtatgcacacgaaaacaaagcagtaaaactagtcctaccctgtctgtctaacccagccctagcaaagtcttgcact

SEQ ID NO: 268878 - DNA, 498 bp, Cannabis indica
acaacagcaacaccaaaacatccgaaaaacaaccattaaatatggtgagatgaagcagaaatattaaaactattaatattggggttgtcatagtttttctaatattgtttttgggttgttctactgttgttttgtatgtttaacaaatgttagttttaaattacacaagttaaaccaatcattgaatatttgtttgaaggtaactagattgaaagaattatggacagtaatagtcttaccttccattgaaatgatgaaatctagaagaccagaaaaaaaaatgaggatggaagctggctggaaaaataaacaacataacaaatacaaaaatagagagagcgagcacaaaaaaagagcatacaggagaagacatcaaaaatgaaaagaagcagaacaactaaaaaacaacactgaaacaataaaggaaaaccgagcatatattggagcatataatactgaataaaataacctacacacaaatttcattattttcctatt

SEQ ID NO: 268879 - DNA, 604 bp, Cannabis indica
tgatcctcatcattgtagaataatgggggctcttgcctttccttagcccttaattccctttgttggattgcactagccaaccccttgcttgctcttgaggagggattagatgaagaagccatggaatgaagatctcactttttgtttgattgttggaagatgaaagttagggtttgagagtgagacttcgagagaaaagaaagaaggtggcttctgttttaaggtagaaaattagaatggggggttaaaattcggtggtaggcttttaaaggggaaaagtcgcaggtgaaaagacgaaaaggggcctgattttggttcctgcgccattcggaattccggatggtttgggcacagacaaccggaattccggttggtgcagtaaaccagccaaatgtccccaaaaaagtcctaaaaattccaatttcaacccaaatgaccccaaaccaattctaatacctttaatgtgataaaacaaaattgctcaaacaagaaaaactgaaaaataatgaataatgacgattttcggtaagcttttcgaaaattgccaagaaaactagaaccttaccgaaaatgaattttatgcaacgaaattgaaaaattcttt

SEQ ID NO: 268880 - DNA, 769 bp, Cannabis indica
ccaaaacacgaggtattttcacgttgctgctagcttaagaaggaaaaataatttcattcatgaattaaaagatgaggccggttcttgggttcagtgggggtcgggtctgtctcaggttatggtagactactatactgatatttttcattctatggggtcaaattgtgctgaggttcttgacgttatacaaccatcaataacatatgaggataatgttgctcttttacagccagttttggaggaggaggttaggcatgctgtcttccaaatgcacccagacaagtcacctgggcctgatggattgacgtctgctttctatcagaagtgttggcatatcgtgggtaaggatgttgttaagatgattcaggatttcttttgatctaagttcatgccttggggtctaaatgctactaatcttgttctcattttgaagaagaagtctccttctattatgggcgatctcgaggcttatttctctttgcaatgtatcttataaaatcatttcaaaagtcatggctaatcggctcaaaatcttactatcaaagatcatctcagagtttcagagtgcgtttattcctggcaggctcattacagataatgttcttgtttcatttgagatattacattatcttagacgtaagaaacaggggaagaatggttgtaatgctctaaaacttgatatgagtaagacctacgataggatggaatggtctttcttacaagctattttattacggatgggctttgtgaaagcttgggttgacatgat

SEQ ID NO: 268881 - DNA, 987 bp, Cannabis indica
gatgcccaattttcttttagggcaaatgggagattgctagggtctatgccctgacaagcctgtaaagacatttctgattatgactaaaaattgaatattttgatatatccatgaatgttacgttattaatatttaatattgaatcattatatataaatatcaaaaagttttttattcatacatgacattgtgacttgtattgtacagagaattgagatcacttagctatgaataaaatagtcatgaatataataaagtttaggaatctttaatcaatggttgctagtgcggttcactaatgcgtattatttagtgcaagtaatctcgattcagattattgatgtagcatcacatctaagtgaaggtgtagtatataatacagattatatatgacaaggatcgatatgtaattaaggtttcttaatcaaacatgtcatttactataaagacctaatttatatcataatgatgatcaattgtagatcgacataaatcctaagtaatcatgaactcatgaactcatgttcatgttattagtttctttgattcactcgttaaagtttcttagaaaagatgattcttacaacttctattttaggagtatataatgtggatggctgggaacatgatctataattatgaaattctgactatcctaacgggtcgattgttggttccctttatgtgttaattctggaactgaaaagttgtactcaaatttagattggatctaaattatactttaactagtgaattaatggaactaaaggataaaaaagtaattagaagggtaaaacggtaatttgaccagaactaattacaaaccgacacaaggatgactaatcaatggaattgattatatcaatgaacactgtagtaaaccagtaatatatatataatactacagttcaatttcatatttatagtggagtaatcatgtaattataaataagattatttagttgatgtgattcaataaataaatct

SEQ ID NO: 268882 - DNA, 923 bp, Cannabis indica
cttccataaaccagtcaaaaaaattgtttgctgtggaatggccaacacctaacgcagatcggagccaacatgaatgagcaaaggggcattgaaccaaaacatggaaaattgactcgtccccatagctgcacaacacacaatgtaactccaccggaacatgtttactataaagttgagtacgcgtaggcaaacaacccgaaagagctttccaaacaaaatgtaaaaccttaggaggggctttaatcttccacaacatcttccaaacatcatcctccatagaggagttccaactaccattgaccgactgtagatgattataggaacttttgacagtgaaaaaaccagttggatccttgttccaaaaccaactatcactcgcaagattaacactcaaaggcacctgtttgatgagctcaacatcacgggaatcaaacaagtcctcaataagctccaagtcccattgtctactacctggcttcatgagttgagacactttacaattggtcagtgccggatgattagagaccacacacgggttatcctcagacaaaagccaaggcgtgttaagcacctcagtagatgaaccaggtcctattctcttacgagcaccatctttgagcagcgtttgtgactcaaagacactacgccatataaagctcggattgccacccaactcggcctccaagaatgtacagttatatttcctaaactataactgttttaattttgaaaggtatataccatacatttattttttaaaattaattatttgaacaccaaaaactaacaacaatgaaaaaaaaaataaaaaataaagatcggtttaagcgggttatcccgaccaaactgacaaaaattaattgggcgggttacacttttttattttttttctattggatgggttaaaagttagtatatttgtc

SEQ ID NO: 268883 - DNA, 590 bp, Cannabis indica
acccggtctgttgagcaggattctcgttcacccactgaggtaatttttacgatcaagttttagactttcttaattcaggaaataataagtccatatcatgaaaagttaagatgaaaaactctgcatatgcaaaacgagcatccttttcggtgtaaattgttgatgatatacttacacaggagtttgaagttgatgcgatcatctttttttaattttttttccgttgcacaggctacaagagttttcgagagtcaattggcagagtcgatcctagaaggcaacggtcagcttgcattccaaaagctagccaccacaactctcgaaaagctcatgccaagaatcgaaggaaaaggagaattcggtcaggcgaggtggcggatagtttacgcaccacaaatccctagtttgctttcaaataacggcgcaattgatccccttaaatctcttgccagtagtatctcattcggtacagaaatcgaagtgcagctcgggaaacgtcttcaggtaattttacaactgattaactaaccattcatgacatgacttttcctttacttaccaaaaatatcaactctttttcttctggtagg

SEQ ID NO: 268884 - DNA, 1050 bp, Cannabis indica
tcaatataattttgatcttctgtaacataggtgcattccaatgctcagaatcgtcgcccccttcattcaacggagaaaagaagaccctttcaccttgagcacatttatactgatcaagcatgatttcgctgatgcaacatatttgatgcagcccaactctttgttgccaacaaaatcattccgtgcacgccaaatagtccaactcatcatagccgcttcctccatctcgctagcacgtcccctgccaaataactgcagcagctagctgctaaatgttgcagacccgcccccaacatccaccaagctgcgattccaggcagctgtagcaaactcacattccaccaaggcgtgatgcccagcttctgcaacaacattgcataaaggataggcagtattaacagggacatgacgtttttgaagctaaaaacacgtcagaagaacaccagatgcaactctccataagaaattactgacctttggaggaacatttaaccaccataaagtcttccaaaaacctgtattgccgtccatactccaagctccttttgtttcctgcaagaatttataggcacttttaattgaatactggccacaagtctcaaacatctttttttttttttttaaatttttttgaaagaaaataagtgatgcttttattagttgtttttttatttgtttaaaatttacttatctgtttttataagaaaaaaagggtttaattatctgttttataaatgtatttttgattgttaatagaacaaaatttcaccgaggatgacataatcatctacggacttcaacttggtattgatgttgttaataagaagtgttggtttcatgctcttcaatatagttcaaaatcactaagcatgtaaatgttagttgatataatattaatttagtcatgtaatatgttgatatgttcttttactgtttaagaaaaagataagtattgtgacaaagattgaagctatttatgatatttttttttgtaacgaattataatcatggtgtacagagttgcaaccattttgttgctgagattatgat

SEQ ID NO: 268885 - DNA, 800 bp, Cannabis indica
gctgctttgacatgtactatctcaccctagctcaggttcactcttgttcagctttcgcctttcctttacctacacatggaagcagaactgtgagtcaacagactcagtaagaaatgcatataacatatcatataatttccgacctgtaaataggcgcccatacacctacttacaaggcttaacagatgagcaagaacgttcaatactagggtacagccactataccccatacacaacgtacctcactgtacgagtgttggtagggtttgtttcgtaccttgagtaccactgagtgatataccacacacctcagcactttctcgtacttatgttggtatcactgtactgtactctcaaacaacattaactataccaacgcactctgtatcataaccgtacaggtgttggtagtacaattaacaacttaagcatgcatatacacataacatatacatacactcagatattcatatcatacattatattcagttcttatcttatttctgaatttaagtgttatggccgacctgaacggaagtctcgtgctagatggatgccctaatcacattttgaaaccgggtaagttacatgattaaaacctaatcccgggaaacccaaaaccttaaccctaggttctgttatactttctataggttattctaactctggaaatggggaaacacccaaccaaggcaccgcaaagacgaaaattgagaaaatgaaaggcccggggaaccctgtcaaaatcgactagccagtttttgaggctttgcaaaacggctagctggtttgcacaagag

SEQ ID NO: 268886 - DNA, 1123 bp, Cannabis indica
ctatggatccttctactgaagacgaaaattgtgttgttaatgatgttgttgctacttttacttcggatactttaccctcacttactcctactacttatcaacaaacctaacgatagagttaggtggtcaatgattatgaattgcttatgctaaaagtttgttgattgggccaatattagacgttccaagcgcttactggccattttcagtcccttatggcaggctttatttttcttttggaattaattactactcaagtacgtgattcgtgtttgctagggtttttatggtaagcttatagttgataaaattggtaaaagtgttgggaatattttaccaggatctagatttactaacaagtatgttgaattaacatcctaaatatgcattctctaaaacaataaaataaacacataagggtttaagaaaaccttacattggttgcaacggaatataaatactccttccgtttaagatctctagcccttgattcttttctgtagcagagcattatcaagatctgaacctggatctctttctctccttcgggtttggttaccaccgtcttactcactatgattgagtacttgacttgctatgtgtgggcatggcactcattcacgataggttttgaatgtgaagaacaatgaaggaggctgaaatcactacggaaggaactctgtcatctattagttgtctgacatagaaaactagatttgatttggttgaaggcatcaagtggatgagtaagagcatcatgttccctttatagtgtttcaactagggctgagggctaacttatatggattaaaaaagaataaaatattaggcaaaaatagcatatggtcgtacatttaaagtgaaccactttctagttacaattttaccactttatttcaaccacttattcttctttcaataatactatattttcaaactcaatcctataaatgccaaaactatttatttaataattataattaattatcaaataaaattaccgtttatataatttattaattagaccatacaaagactcttatttaacaaattgactccaaaacttcttttcttcacaattaagcccttgcttagtaaaaattcttaaataagacatagtcta

SEQ ID NO: 268887 - DNA, 742 bp, Cannabis indica
agtcttttattgtctttatcttaaatggttttaaacggactagtaagtatgatgtctcgggaaattggggcgttacatgcgctaagggtggatgacgtatctgctggagtctagagcttgctgccttgggttgatgaataggcaaaggcggcactgggaatcgctggtgggctggagatccagttagcttctaaaccacgtctctaaagtcattcttattgatgttgtaggcgggaggttgatgttggtgctattgggggtggagattattttgggtctggttttgtggcggagatggtggtggtggaggagtaggggaaggggcttgagactgtggtgtattgaaattaggatcgtgaaaggtttgctttttaaggatgggttttgagattttatgagaaagcttgttaaggtgtttgggataatgatctctagtagcagcactagcactgttactgataatgtcgataggaagaagaatggcagaagaagaagaaagaaaaagaaaaagaaaaagagaaaaaagaaaaaagaagaaaagaagaaaaaggcaaaaaaagtagaaaaaaattaatttttttaatcttaattttttaattttttttaaatatttatagtttttttaaaaaactaatattacgtggaccacttaaaattttccacgtgtacaagtgtgtacacgtgaacagtctaacgtgacacttaactgtgattttcggacggaggtgtgcagagcaaaaca

SEQ ID NO: 268888 - DNA, 907 bp, Cannabis indica
acgatgtacaacatgatcaaaaccagcatacactaggacaaaaacatcatcatttctttgtttaaacccaagattcaacagtataaggtttagaagaccataccatagcactaataatagtgaatgagctcttgaaagacgaggtgatgatttaacactcttatttcttttggttaaaacttttggaatagcagtaaagtctccaatatctgatttatccaatgatgcactattacataggacaacattgtccaacaaataactaccatcactagatctcttccctgttaagactgagcacccatcaaatgaaactaaacaatgagttttagaaaaacttacagtgtaatttgcatcacaaagttgaccgatgcttatcagatttgccttgagtcctttcacatacagtacttcagtaagaggtgcagctctactcatcaccaagtctccttttccaataatatggcccttatttccatcaccaaaagtgacaactccctcctttgcttctttgtaattgactaacaatttcttgttgcccgtcatgtgtcgagagcaaccactatccaagtaccactgtccttccagaaatgcagacagtgaaacttgagctaccaacccaacattcgattcacgatcagccctcctccactcacattgagatccttcctttcgagttttattgggtttttgaaaactcttaggtcgattgatcatagctttcaaagcttatagcatatgggtcgaatatgacccctcctgttacagaagtgacacaatgggatgaatctctccatctgagatatattctccgtggcaattcttcttccttctaacttcaccttggtagctccagatggaacatggaattttctagtggggtttgaggattcaggtgtcgagggaa

SEQ ID NO: 268889 - DNA, 705 bp, Cannabis indica
aaaaaaatacacaaaataaatttaaaattatttgataccaattttattgttcaattgatatttatataattatttaaccgccgctcgcgaagcgcggcctgtttcctagttttaagaaaattctacatgcacccttatctatttcagtatctaaaaaataattataatttgtatcagtacacccattttaataacgtgtattgtagatacaccttaaccttaagattttaatgtcatgactcataataaaaaaaataaaatttatgtacttaattttactattatattaaaaaaaaaatctcttttttcaaaaatatatttatatttatcattactttattctttaactaaaaatcaaatatcttttcgtaaataaataatgtttactcataatgtttatttttaatatagttatattttaaatagttttatttttcttataatattacttcttaacatttattttattattttttttttcaaaactttatttttcaccatatttcattttattttatttgtacataaaggaaagtgatattacatattctcatactttctcagtttgtgttttgttgtgttatttattttttaagtgtatagatttttgaagacattacagattattggaggatcaataattatcaaagataagtttttacttcattattttaatggctatataagaagtatatatatatatat

SEQ ID NO: 268890 - DNA, 954 bp, Cannabis indica
gtccgagggctatcgcctccctcttcagcacttattttgtaaattttcttagtttttattggcctcgcgccgtaccaactgattcctcaagcataccgcctgctttcaggcttatttatcttgtacgctgcccggagctggggttcgcccagtccagctaaaattttatattttttacgaaattgtttctgtccccaagaagggggacaaatttaaagatggattttatggacttcggtcccatcctttgaatgagggcccggtccctttttaactaccagaagcatgtgaaggagtaccgccactgcttcttcttttcctctggcttccaggccatggaccgcccggagcttcttacggagtgggttaggatccctccttacctgcagaccgcgcctactcaagtattcctccaacgggctaagactttctctacttatgacaggaaggccctcaacgttggggacttagtcacgatagagaactgtcaaaaagccaagctgatatccgagagtcagttggtggatgacttcaatctttccaaggtcatctgcccgaatgtaaggactccagttgcggaaagggcactccgggtggacataatcacctcggcggaggaccagtaccagaagtacctcttcaagagggaacaggagctggcttacatcaaggctcagactgcaggcgggaggacccttcgtctggaagctgccctggagcggaggccctccaggcctaagccttcggctccggttcctaacactggtgctctagatgccagtacttcacgttctggtaagtctcctttagttatttgccatgtcccctctgttcgagagtatacccaatgtaggcccataggatttgataagcgcctttataagtttaggatgccttccaccgggtgggggaatcatgccaaagaatactatttttcccacttgggccatttct

SEQ ID NO: 268891 - DNA, 972 bp, Cannabis indica
ttataaaatcacacacgtggcgtccctatagtttagggtgttacatcgcatgtatcttggtatatgcgagtcttaaacccgatcttcggtcctgcttcatgcaaactatacgaatgcgactagactctgtcaaggtcatatcatcccgctgagtctagtttaggcgaggtttacaatcaagaggtctcctgctgacatctcagccctcctcgaggagagtgagtccacatgtcatttttatgggagcctggtctcgagtttttaggtgaaaaattatcactataacacatgcccctagtttcacggctgacagtcatgtcatgagggaaattataagcaagagccaggcgaaaggttgtcatgattgtagggattatcttcgtacttaaacttaatgatatcattctgaagtagtcaagtcctgataggtagttcagaaagccaaccgttcctactcggatagtctgccttttagcctgctcgggtaattagaggttatacatgtagatgtgttacttgaagtctgtttaagatattcgtctccgcccagatgtaaggaatgccagacacatgtcactcgtgtattcttccacatcataatgcaaaaaataagataacagtaagaattattttgaaataaaaatattaatacaaatttggtttaaattttcttgacatatatatatatcttactattattaaagtgtcataagggtgtgatattttatgactattttgccctccattgaatagaaagtttccaaatgtatccttttgttattttcttgacaatttatttcaaaataattatttattttttgtttcactctcattggtgaaaaaaaattataatttaccctactatctattataaaataatgtaattttatttttgtgtttcatgtatataaaatagtataatataattttttttgtctttttatgatttatttatgttcattaagttttata

SEQ ID NO: 268892 - DNA, 1183 bp, Cannabis indica
taataagcaagaaccagagcaaagcttttattataaaaagttacagaatttgttgactgactcttttgtggaaagctgtgagttttaagtgttttggaacacaatagttgagaaagtgtttctttccatagttgtatggtggtgagatttggactatgatgagagctatcaatcaaactgtgactgtgataatgtatattcatagtggtcctccaaactagtataattcttggttttcattattctaatttgtgattcttgtacaagtaaccactatcctttttaaaacttttttacaggtaccaagtttagagagagaactaagagaatacaaaggaggtgtaatctacaagcattgtaattcttcagtttcaaatcaaagaaagtacatccaaacttgtttatgaatattgaaatttcccaaaaaatgaaactattgtctcttttttttttttttttttttttttttgatgaaatatcaacttcattaaattaacattctgagtacaaaacatccagaatagcaactggagcattagacacagaaatactacgaccatataaggatcgtgacatcctagcaacaacatgtgctaagcggtttgctgatcgtttcacaaaaggaatttttattaaaggcatagaaagtaaaaaagaatgacagtgttgagccagattcccaaagatggagcagagggatgagtgattacgaattgctaggatggagactaaactgtcagattggacttcaacatgttgccaaccttgtcgtttgatccagcttaaagcctttttgatacccattatcttaacaacctctggtccaaaagcaccatgaaagcagtgggctttagcttcaatgagagaacctgagtcgtttctggcaaccataccatagccatactggttatcactagcaaagatcgcagcatcaacattaatcttgattgtatttgtttcaggtttagtccaaagctcagctccatcaccataactactagagttgatagaggatagagagatgttatcccgagctttacgccaatgatcaagagcaatgcgagccgaagtaagaacatttgcaacagtgagtaccttgtctttccaaaccagtgaatttctactttccataacgacaaccaaccataacaagtgagcagacttggtcaacatcaagagagtg

SEQ ID NO: 268893 - DNA, 660 bp, Cannabis indica
gcaatcacaggaaagcaggttcttaatcaactcattttttgaatatcaagaatcttcaataaaataattcattcatctttggatgataaagatagttaaatcatgcgtgacactaaaaaaaaatcaaatacgacagtaccaacactacaagaagaaggaattaaataatgacatataacaattttttttttctcacaatggtacacataagaaataatacttaaacttgaatgacaaacaatcaaacaagggaattaaattaaaagagtattagtatatttacaaaagaaaattgatatgtcaagtatatgttgtgcttttgacagcaattgtccatccaaagcaaccctatctcagaataattatcaacatattggcaacacatgtatttcttggcactgaaaaatcaagtgaacacatttatttatttcttgtaaccaaaataattagaaaagaaacattcaataatgaatggttcctgaaatgcactaatcatgaagatgagataatttgtcttatctatgaaactagttttcttcccttcaaccacaattggaaataacaagttaatcatttatataaagtccataatctaatcataatatatatttacttaaacgacattataccttttcacacatgaagaaatagcttaatgta

SEQ ID NO: 268894 - DNA, 1132 bp, Cannabis indica
agcttcttcttgagtaacacatctgggcaatggcattgagaatcctcttctatacataattccctctactatcatctataccgtgcaactttcctttctcattttttgagcttccttccgattatttgggagtctcccagagtcgaggtaggctgctattgatgtcatccagtttggagaagtatcaatgatttcgatttcttctgtgccgatgatgctaggttgttcgaggaactggataggaaccgagttccccttatcacttacattgatgcttgccaatcgagctaacgcgtatgcagttgtgttttcttccctttgaatttgtctcaggccgtagcttttgaattgtgcgagcagatcatgtattttgctcagatatgctatcatcttctctccccgagcttcatattctccggatacatggttttccactagctgtgaatcactgcagatttcaatgtgttcggccttcatctcctgggctagctttagcccaacaattagagctttgtactcagcttcgttgttagatgctttgaatccaaacttgactgcagcgtgcaggcgttgcccccaaggcgtgatgtcacgggctcaccttttcaggcagcggaacacccgtgcggcaccttgacttctctaagccaaggtcagccttccaaccatccgagtaacaatgggctcatttttcgcgcgaccgtgtgcctcgggcacactcccgtctctcgaacaactcccgccgagtcatgctcgcaagcatccatgagtgcattcatgtaccgagactctctagccaagatactcgcactgtccataggttcccaccatggtcagacaaatcccaacaccgacgctcaccttgtcactcgtgaccaaggtagcatgtgtggcgagatgccaacaccaagccaacgtgccaacgcctctatcatgccccattcgatactgtccgaatagtctccctcgtcgcccaaggactcccatacgtccatggaccaatcctcaaggcgccatgcctccacgcatgttggcaggccctcaagacaagccaccaaaccagttgcatacattagacctttgcccctttccaacatggtgcatccgtcccatgcgcgtatgcaaactagcc

SEQ ID NO: 268895 - DNA, 1843 bp, Cannabis indica
attccacatcgattttatctaatagcaatgatattcagtaaaaaaaaagtgaaaaaaaaaaaagataaataataaggatggaaagaaatagacaataaaccaaaacaaacaacttttttaagtggcagcttagccatcctcttcaagcaaaagtttaaaaattatactatatagtatacatttttaaataaaaattaagaaaattgaccattacttttcaaaggaaaataatcaagatttatttaaaatcacatttgattaagaggaatgaaaatataaaaataaaaataaaaataaatataaaaatagaaattaaatttaaaatgcaacaaaaaaaattgataaaattaataaaaaaattttcatcttgcattagaatgatcattcctttaatttcaaaatagaataatcattttactaaaataatagaaaagttattccattagaatgaaattccaatacttcaaaatgcaaccaaacaaagaaataaaataaaaattattttcattctatttcattacctctaatcaaacgtcacctaagttccatatggtttctaacttttaaaaaattattttatatagcaaatgacacaataaataaaaaaaacaaacaaaatccacataatttaaaacattaagtggaaggaaatgatgaatttaagttgttctggatatttttaacatggaagcatatgtatttattgcaagtatttactcaggtaaagtcgaactcataaaaattgtagttaaatacgttaaatttaaatttttacttttatttggcaatatcaaatttttaaaagaaaattaaaactaaaagcaataaaaacagagaacaagtaaattaatatgtgaagtaacaatggttagagttagggttattgattccaattgtatctatgcaataccatttactcgggtaatttatagtcggttaagatatataaatctcaattacatacaaattttttattttcgtgataaatttaaacatgcaaaaggcataccacataggtactctcgtcatatgttgaaatatattttcattttactatagcataattgacactcacttcttagatctcgtattaaaatcacaaatatttaattgatggtcaggcaattaaaagaattaagaacgaatgaaatagaacacataaaaaattaggggaagaatcaaatcatattacaactataaaaatattaacaatatccatcaataccctaataactttttagctactcttgttcatcgtaataatttgacacgtatcaattaagaacataagaaaaaaaatagagaagaataaattattgaaaaactccgttgaaaagtcttttcagtcactttgtttctatcaaacttgtactctctaattgcttgacaaaaagtttgaaacttccctcctttttatagtaaaaaaaagataaaaaaaaaatatctggttttgctaattcaggtgggcgggccgcgacactgggcccttagtgtcgcggcccgtgtgttaacttttgatctttccttgattttttctgatacacgagcctcgacactaactgggagtgtcaaggcattagaccctaaatttttagcagcaagcttctgacgcctctttgcctcaacactaagctccagtgttgaggcgcacccatatcttggtcaaaaacgatcccctcttctaaattttggccttttaatgccctaacatggaactatagtgttgaggtgctactccattatttttaatttttttgcctttaagagctccaaacgtatgggaacttttggatttttttattgaatgaatttcttggtgcttgattaaagcacaaatttgtac

SEQ ID NO: 268896 - DNA, 916 bp, Cannabis indica
aaactttttataacagggatttccagaagacactttttatgccattataatgtccatttttagtgttttattttagtcaaatttttaatattactagggtttttaataattaattaatatattagtattaaattagtttataaaatcacacacgtggcgtccctatagattaggctgttacatcacaccaccaaatagctcatgattttcagggagttgggtgggagtttgtttacttgttctaatatttcctcacaagcgaaacgtgttggaggaggtcttctctcaatttatctgttgaattgagtatcctttctcaatcgatggttatttggcaaaaatcttctatgaactacgtaagatgtcttaccaattactcgaatggaagaggtatcttcattacaagtggggcaagctttgtatccctgaccactccaaccggtcaaataactacgagctagaaaatcattaacattccataaaagagttgcgtgcaacttgaacacaatgtttgtttgaatatctctcgtatctacctcgttaacccacaactccttcaacttatccaccaagggtcgtaaaaatacatctatgtccatacccagtgatttttctccaggaataagaatggtcaacataaaattgttatctttcatacataacaaaggtggaagattgtagttcgccaaaactattggccacatactgtaagcttggctcatgttgccaaatggattaaagccatcagcagctaaacctagacaaacattttgaggttcactagcaaaatcgatgtttggcatcaaagtccttccacgctctaccatccatagggtgtcgcatcataccatcatcttttgatttaccagtgtggtgccataccatgtatttgttggaagttattttaccaggaact

SEQ ID NO: 268897 - DNA, 870 bp, Cannabis indica
attaattttaatttgaatatttagtaaaattctttttagcaattaatatttataaataattttagttttatatttaagtccctattgtaatatttttaacatttaaaccatttaactatattatttacataaaattttatttttttaacaaaatttagactaccaccccttctaagataaatttttaaatacttaattaattttttaaaaaattacatctaattattcttttgtaacaacctacttgacccatcttcctcctttataattttttttaaaattagggttttagtttgtcccaatttaacattatgtgaacttttcaattcgatacaattttctacatctatgccacacccatttctctattcaaccagctacagttagatttctttttagtttttaataatttgcttgctatttttctacttttatgcttatttgtgaaaaagaatcaacaatttcaattaattggtaatctactttaataatatttttttacaatctttcgattgatgaagataataacaacgaagagcgaaaatagttaacaattattaattttatagttgttattatatatttttttcttgatttttcattttttaaaaggaaaaaaaaaactaaataacttgaacaaattttagacggacacactaatttgacacttaaaagtgttaaaaaataagattgagcgtaaaattatctctacttagaggtcattcatactattttttattaattaaggttatgtgtgtaataactttaaattataaggagttttgttgtaattattttaattatttaaattaaaaaaaataattattaaaagattttacttattaacaaattgcataaaattaattaata

SEQ ID NO: 268898 - DNA, 715 bp, Cannabis indica
gcatctcaaaatacttcagatgttataagagatcctctttccctgtatacattttccaatttggcattttccatttcgggggaagctcaaggacttcaatctctggggagaagggagatccacgtgctcggtcaagtttgagatcagtgtgttttgggttggttagtccttgtaccatgtttttaagttgatccaattgtgcttgcatatatggatgaacttgttcgacttgttgaccggcctgtgtcacattaggatctctttgaactggatcttgaatacggatacttgactggacaattggtggaatatattgttcgtctagaccctttcttcggttaaaataagtcatgaggtcatgtgcggcactcaacctatcaaatactaaagtaccagagggtcttggtgtctgacttgtttggcctataggttggccaacaatttcagtaggggtgaagttgttgtatctaactccaaccaagttacaatcaggcaggatctggtaatctaccgtttggcccacaggttaaacctctggccgtggattggacggttgattgttgtgagtttctacgttatgcccagctgcatacccttctgaactgcccaaggggatactagacgtagttgctggttgttgattggtgacttggtaggaccgtcttatcagtacagtgtcctgccttgtgcgtttatcgatggctgcttgctaagc

SEQ ID NO: 268899 - DNA, 598 bp, Cannabis indica
aaaaaatatgttagctaccaataagagtctcatacttgtactgtggtttagggcaaagataatgtcgtcatatctttagagcaaaaacctaacactcatgacctagagcttgtactgtggtttttgctctaaagatatgacgacattatctctacgggaaaaaatgtgcaatttatactgatcataagagtctcaaatactttttcccccagaaagatttgaacatgaggtagaggaggtggctggaattggttaaagattacgactgtgagattctgtatcaccccgagaaagctaatgttgtggctgatgctttaagtagaaaaggtcccggacaagtttgtaccacggtgttgatagcccctcaactagcctctcagatggttagtgcagggattgagtttgtggttgggaagttgcaaaatttgacacttcaatctgatctgttagagagagttagaaaggcacaactagaagatcctgagctagttaaggttcgatacgaggtaatggcttgtcggcctagagacttttcagtctcgaacaatggaatgttgttgtacaagactcgagtttgtgttcctaatgttgatgagct

SEQ ID NO: 268900 - DNA, 1046 bp, Cannabis indica
ttgatacccataatctcaacaaccttcggtgtaaagacacctttaagaatatgagctttagcgtcaatgagaattcctgagtcgtttctgggacccatatcatagccatattggttatcactagcaaaaatcgcagcatcaacattaatcttgattgtatttgtttctggtttagtccaaagctcagctccatcatcgtaactaccatagtaggtatgagatagagaagtgttatcctgagctttacgccaatgatcaagagctatgcgagctgatgttaggacatttgcaacagtgagtaccttatctttccaaactattgagtttcttgctttccataaggaccacccaaccataaccagtgaacagactcggtcagcatcaagagagtgaaaaagaccatccaaccagctagcaaaagagagatcaagagagaccccggctggtagacccatatggttccaacaagaagaagcaaaagtgcaagaaagaaggatgtgtgaggttgtttcaggagcggctcggcagacagggcaaagagaggggacatcaacatgctttgttctgagatttacacaagtcggcagagtcccagaagcagcacgccagagaaaattacgaaccttttggtgggatctttaattgccataagttttgccaaaagcttgaattgttgctaccagttatgggatcttttgaagcctaaagaatgtgataagcacttttgacagagaagtggcagagctttcattagaccaagaccagaaatcagaagatgccgagaaacttaaagggatactaaagattaagttggcatccctatcattgaacatatctcgaaccaactcaatatcccaacttctttcatcaatcgaaaaaagggagctaacatcatgaccaataagacccacatgggaagaagttatgtaaggattaccggggtcagggagccaaggatggtgcagaatactagttgaggagccagtaccaatagttcttctaaccccctggcggaccaaatccatagaactccagatactacgcca

SEQ ID NO: 268901 - DNA, 932 bp, Cannabis indica
gcgtcagtgatatgaaaatgcctatttatggcataaatcgaaaccattgtggggttacttcctgccaatgtatcgagcgtaggtacaagtgttagtgacatatgataagtactaggcataggtacacgctcgtctgattaggcgatgcgatatattagtgccaggttgtggcatgggctcacttgattaggtgatgcaattatataccgggcgtatgtacgggcttgtctgattaggtgatgcgatatattggtgtcaggttgtggcatcggctcacacctgattaggttatgtaattatatgatatatgggtcccggttcttggcacgggctcacctgattaggtgatacagttatggaatatatgggtgcatggctatggcacgggatttcttgattaggcaatgcaataaaggattattagattaaagcatcgatttgccaaattaggcattgtgttgtaatgaagattgttactttatgaggtaatatatataaattatatttttcaatgaatatgattcttattattggtataatagttttgtattaccaaatatttgtaaactgatgcttattcatgggagatgtcagtagtgatttaagtttcatcttatgaacaatgcatcatggtttgattctgattgtgtataaatgataatatttgaataataaactatatgattattattattgttttttttattgagttgcttgtgactcacaggtgctatgtggtgcagtaagggcaaggaaaagttagagctgccatgagggcacccccctctccagcaatgtacacattgacctcacccggcctatgtcccgggttgctgggagttgttttgtgctttatctattgtgtattttatttttatgtgtttgaggcatcgtcgtatatagttcttttgtaaaacttttataatagggat

SEQ ID NO: 268902 - DNA, 1100 bp, Cannabis indica
gtttttggaagctacccaaacaatggagtgcaacaatgtgataatgacagaaagtgacaatcactcagtattttcacatgtgcagcaacctgacaacaacacaacaacaacaattaaacaaattttatctgcttcaatgggaggatctggtttaaaagaggttattttagttgatattgggactttgactgcagaaacaaccataaagcaacaagaaaacatccaaaagcaaatctccaaagatgttaaatattgaaaaatctataattatttgctcagcaattgatattgttttggttgaaaacaacaaaaacaaaactacacaatgtctacaaaagaatcattaagttgttttcatgttatatgttgtgaagtttcttttgtgttgtttttgtaacatcttatttcaacttgaaaataaaatcaagttattttcatattgttgtaaagttagttataaattgttatacactacactagttgttcaacaattaaaggaatagattttttacatgttaaaataaaaatttatcttatctcttacattcagatatgaaaaataataagagaatacacattatgttgattttgaatcaagtgagggcattaataaaactagattgtaaatatgaagtaaaattgtttatatttaaaaataacattttttgttgttttacagttgttttaaagttgaaaacatgttgtttaattttgttattttttaaacatgttgatttcacgttgtttgtacgaacagaatcatataaatacttaatgtataaattaaaaatataataatagttatttttcactgtactaaaatatattaaaaaaatttaaaaaattataatgttcaatatcatgtgcaagatacatgtaaaattaactacaaagcaatgtttcttaaaaaatgttgttctccaatgcataaccaaatccaaacgcacttttcaatcactaatccatgcacaatagcttgaaccttcttggaagatcagaatattttcttgtacactttcaatgtatgtaactcacttcattttatcaaaggaatagaagtagatgacaagcctattctgatcaacatttaagtacatcat

SEQ ID NO: 268903 - DNA, 652 bp, Cannabis indica
ttttttaatctttctttaaagttactcgtaacctccttaccccaaacggccaacttatccccacaaaactaaattttcttcataacatcatgaggctcacaaatctcccaactatcttttacaatctaataacaaagaggctcccttaatcacacattttcaaaccgaaaccgcttcacaaaatggtgacccgcagctggaaccatgaccataagaatcggagcatggtctgaagttgagatttcaagattatggagcttttccatagtgaacatatttaaccaagcgagattagcaatccctctatacaaccacacttcaatccaatgattagttccccacccacactcccaagtaaacggatgcccacataattccttatcttgaagaccactatcaatcaaggattgctgaaaaccttggactaaaaagtcagggtacctattaccaccccttttatcttcatgagataaaacattattaagatcacccatcacacaccatggtaaattagaattattagcaagagtacgtaacagattccaagtagaagcacgcctactcctattcggttccccatacacaccagtaaaatgctattcctgcacaccttcagaagaaactctcagatctatatatacatcagaaaacc

SEQ ID NO: 268904 - DNA, 820 bp, Cannabis indica
tattaaataaaaagaaaaaaaaaggatatagtgacacttcatgtgtgtggctgttactttttcagtctgacaaatttctctctatatgcctatagtgacacgcataaaatgaatgcaaaaggtttcagtgacacgtgtgaagtgtcactaaaaattgtttttccagtcaccctcattagtgacgcgcgttgaagtgtcactatacacttttagagttactcaatgtgtgtcactaaaacccaattttctagtagtgatttgtcaagacaaaagttatcaggacaaaagataccaatcttatcctaaagacataggtaggtgcctagcattgtccctatccctatgaaaattgtctttttgggttaattaattcaattaggtcaatatctaatttgaaaagtagttttatatatttcaaggtttttgagatattctctcaagtagttgagagaccccctcataaatatcagtaactgaattctgttatagatatttatttaattagataattaaatagatttaactgctataaatagaatcctgatttgaaaaattagatatacactttacacagtaaatttcaaaatctatagagagaaaaagcaaattgattttctctcagttgttcttgctcatgtgttgagaactcaacatcaaacaaaggttatacactttatcctaatagctcacaatatttattttgtgaggtggatcgatttagaatacactagtgtgagtctaaattgcaatttcctcatcatctagattaaggaatataacttacgagaagttttgatgataccctgataggcttcaaggg

SEQ ID NO: 268905 - DNA, 1071 bp, Cannabis indica
ctaaccttgacacgggtacaaaccaatacccataacgagattggatcccacggaccccaaacccagaaccgaatacagacccgaacctagacctagactcaggacctaaactcggaccggaacccacaccagaacctcgtctgggacctagaatttgattagaaccaagatcacgatccagactcaaactcgaaaagggactaggactcagaccaggacctggaacaagactaaaacctgaacccatactgtgacctagacttggacccaaactcgggatccaaacccgaacctaaacttggacctagactgggacctaggatccgatcctagaagggggacctaggccctaaactcgatcctggaaccaaacttggactaaggatccgaacctagatgggggactttgacccaaaactgggccccaaaactgggaccgagatccaaaacttgaccccagactcgagacacgggacacaaccttggacccgaaacgcaagacctaagtaccgggacacaaccccaaacctggacctaaatacattcatatgacgcggcccaagaccttggacctaaactggaataagaccgagatctgaatatagacttgaggtttcggcctaacccgtagtaagtgtttgaatcgaagacccagacccggatctgtacccagacccatacctggacccaaactgagatccaaacacgatctcggacccagaataggaattagaccaggtctaggactagaacccagacctgggtagtagcaggacccaaacctaaaccaaaactcagactagaacccataccgagactaggacttggatcgagacctgtgactttggacctaaacaaaatctgggacccggagcgagacctagacccagacccaaaaattggggctggacgcaggacctaagaaccagactcgaacctgggatttgaaactcagacccacactaggaatgggacccaaacgcaaactgggacctgaactcagaccaggactcaagaccataacccgaactgaaacacaaacttggacccggatcgggacctcggacctag

SEQ ID NO: 268906 - DNA, 1037 bp, Cannabis indica
aattatgagtctaggagccatctcaaaaaacaaaaaacaaaccaatattacagccaaaatttaaaaaatagtcgacataatatcgacatgctatcgacatgatatcgacattatcaaacagtgaacaccgacatgatttcatcgacaacccgtcgacatattgtcgacaacctatcgatactaacacacatctgtcatacaacaacaataacaacaattatcgacaatgtatcgagatactatcgacaagaagtcgatattccaaataagtaaccactcgaactaagcaatccacactatctacataatgtcgacaacatgtccacatactatcgacaagatcgacattaacaaatatttaaaaattcacatcctacctcgataacatgtcaacatactgtcgacacatcatcgacatttaagggcgaaaataaactcaaccctctgtcgacatcctatggacatacacatgaaatcctatcgacatacaaaaacatcaatacaatacaaacatacactaattctatcgacatacaaacgatatcctatcgacatacaacaacagcaatacaacacaaacaccaaaaccatggacatcctatcgatattctatcgacatatcatcgataaccctgtaacaatcacatataccatggaaacaccaacatctacaacctaaagagcataaaatctacaaaaattccactaatctcaataacatgcaataattggcatccaaatctatgaaaaatatatatattttttttaaaaaaaaaacacttacctttgaatgcaattcgtggtggtggcaatagcctctgttcggtgtcgacgaccacgggtagtggtggtggcgacagttcgtggtggttggtggtagttcgtggtggtttcgacaggcacgggtcgaattcgctacccaccgagagagagagaaagagaaagggtcgtggtcgtggtggtgcgacgggtggtcgttgggtcgtcgtcgtggggcagaggcgaagtcgaagagggaacgacagagagggagagag

SEQ ID NO: 268907 - DNA, 731 bp, Cannabis indica
atactggtagagttagtggttttaaagtggtttttacttttttcttaagttcactactccaccccgagagtaatcaccatctcttaattagattttctagcattaacgcaagtccaaaaacctaatttcgtatagcctaagggttttaaaatacaacccttatcaactaacatatagttcctctcatctatttcaagatatgttgaattctcttccaaagttccttttctggatttgatttaatacttactcaagctcccactcaacaacagatgtctaatctaatgcatacaagagaatacataagatttcttactattgatgtttagggaattcttctctttgcctttgtcttttctggagtagttagaaacaactcttaagataaatgaactccatgtctggaagtcaagtgacttccattagagttagccatttgaaaaatgttatagctacttgcgacagagtaagtaaattaccaagtataccactagccataggctttgatgttctcatcaaacccttgatactaggaatgagaagttttcttaagtccattgaatagactgagcatggtttcccatcttatcctcgtattcagaaaactttaggttgctccatgggaatggctaaaccatagttctctaggctttgagtctgagttccttattaggactgttcattgcttatttgaacaaacaatgaattgtcatcattagtatcatctaagt

SEQ ID NO: 268908 - DNA, 571 bp, Cannabis indica
tatatatatatatattttttacgcaattacaaatataatcttaataatatttatttgctcttttaagcataatcaatttcatccaacccgagaaaaaaaatcatccaactcctaaaaaagaatactatagagttatgtaaaaaattaatgggggccaaaatataaattatgaaaaaaaaaaacatagaaaaatacaacaaagaagaataaaaacaaagggttttttttttaatatttggagggcacgaccaccctttaaagagtggttccgtccctgacaacagaaattccttgcgccaccccaattacgaatacttgacaatggggctgaggcagatgttaaatcatataacggatgagggcgggagaggcactacttgccaattacctgtctaatttttatctctatatatttagtattcactacaaaatttttacttttagtcataataaaatttataactaaaagtaaaaaattataactaattataaattattatttttattgtgactaaaagatctatatagccaaaaatattatttataaaaattataatttattataactaaa

SEQ ID NO: 268909 - DNA, 943 bp, Cannabis indica
atgatttgattgtagatatctcttgtcttttatcctttctccctaatgtaactatcacacatgtcaaacgtactgccaatatggctgctcacggtttggcaaagtttgcgttaggggtggatgagacttgtttgtagtttgaggatatccctctaccaatttactctgttattgtaaatgaatgttatttttaatttatgataacaagtattttcactcaaaaaaaatatcacaattaacaaaaaataatataactacttttaaaaataaataaattaacaaaaatattaattttttaaatatctctcattaattaattactcacaattttttttttctttttcaaactataatcagtatatatatcatatattcctctaattcttttcactgctatacatatatatagggcaagactatggtaggacctagcaaaagttccctactggtagggtactttttttaaccattcattttagatcgtgtggttattatgatataagatgtatactcttacgataagactgcttgtatacaattaaaactttatacattataataatatttaatatttattttaaaaaataaaataatattaataatttataaaaaaaaatattaatttttgatttaaattattattatttttttattacaattaaaattttaaatataaaataaatagtaattaaaaaaaaactaaacacatataatacacatatatttcaaaacttaatagactaaatgtatattccatttttatatatatatattttctacatacaatttaaaataaaattaaatattttatatataattttttttcctttgtaatttgtttatttgtttattttatttttatttttaattttaatttgtttagtactacataaaaataagtcaaatatagttatgtgtaaaaaaaatagtttttttttttatt

SEQ ID NO: 268910 - DNA, 680 bp, Cannabis indica
tttatcttgtggtgatttttacctttgagtcttggataaaattctaggttgattcttgtgtttgaaacctagtatttcttggtatttttactgctggaattgtttggtttggtttgagatcaagctcaagttttgagcttgagttcttgttggagaagtttgatttttgtgttgttgaataatctgaaattaggggttttcatgttggaattgttgttttagctctctgttgtgatgattcttatctgtaagaagttaattttgggtatggtttgattaaggttcgaatatatggtaaagtgggcatgtttagaccttaaaatctggttttctgggtttttcgaacccagtggccgcggccagatttatggtcgccgcggccataaaacctggcagagagccatctttttttctgattttgttttggccataacttttgactcgggactccgttttggacgttctttatatcgttggaaagctcgttccgagctctttatgattatctgtattttgaatgccaactttatattttgtgaaagtgaaattagggattaaccctatttgtgaaatcccgggttgtgtgactaggattaccggcacctgatcaggagcacccaggggtttggaatctctgttattgcgggacaacaggtaagacagtagtttgcacgtagagt

SEQ ID NO: 268911 - DNA, 798 bp, Cannabis indica
ttagttttagtgttattttctatttagtaatctaacttttaagtcttgtaaatattgatattgttgggtgtgttttttcaattaattgtgcttattttgttgaaaaaggaagaattaaattgataggaaaaagaaaaggaagcaaggaagaaaaggaacacaagctgaaattggggcagattgctgaagcaatgctgaagcgaattcagcatcctggcagtgacgtggaaacacgagtttcacttatccacctcagcaaattcggtccagtcactcaaattacaccagccagctgacgtggaagaaaggggactaaccctagtgggccaaagtggaaaagtttgggcttctattttggggtatgaagttggtaccctaaaaacccaacatctaaaagaagaggaaaaccaagtacaccattatcatcttgaatgtacagtacgtgagcagctgccatttttctggtgaggagctttaatttacagcaggaagtacaacaaagaagaaagaagaggggaccaagccttagtgtttgacttttctttaccctttctcattagttttctttctttactctcttttattgttgtttgtacttagtatcaaaaactttgtgagattgtaaacttgggcagcagccatggatgagtatttttcagcttggattttattttcttacttgaatatgagctaaacttttgaggcttgaatggctatgaacttctaagttgggtatgattaatttttaagcttactttagcatttgttttgcctttgttcattcaagtgagtttcatt

SEQ ID NO: 268912 - DNA, 831 bp, Cannabis indica
ggagctgggttctcccgtcgacgacccatttccttcaaccgcacgtcgctgccggtccacactagccgccactgcttcaggcggagttcgaacgggctggagcaccatctgcgagatctgactcgccattacttccaggtgtttggtcatggcggaatcgatgtgcttggctactgactgttcaatcaaaatttgcagaccctcgtgcagcttagctacctcatcgttgagcttcaacacatccgatcggagatccgaaacttccatacccactttctcttcaatcatttctgccattgcatcttttttgggtcccatgaaacgagtgctctgataccaatttgataggatttattctatcaaagtgatatcaacagtaagaataatgagaagaggagaagaattggagtaaaattgcagtagtattctattaaccagggaattcgagagcttggactctcctttacagtaagcaaacaaacataattctcataccccccaatagacaaataattcttatttatacttagtcccaaggacttacaatgcactacaccacactagaatatttcccccataacagaattagagggctgtatcccctacaccactccccacattacttttcttgtttctcctagcataaacgtaagtcaacggaggcctatcatgtagcttagctttacaactctgatcaaaaggactttaataggcttgaaatgtgaggtttaggtttgggtttggtaaaggatgatatttcttaggctcatgacctaattacctcaatttatcaaggactttttttttcctcaagcgctcacccaaaatttc

SEQ ID NO: 268913 - DNA, 845 bp, Cannabis indica
tttaattcaacagttcgtgttcatttctacacaaacaaccattataatcatggaaaacaacatatatacaactgtttcgagataaaaaactgtagattctaattttatgcattaatattttttgagctgtaatttattcttaattattttttcagatcaactaaattctatatcattaattatttggctgatttcctcaatctaaaaaatacttttaattatgaagaggatcataagaaatttttgtaccttgaatttcttctctaattcgattatgggtaagatttgaagtttatacgatctccttctcttcaaattttctgcccagtacgatttcagtttttgtttgtaggttatttttgtgttttttataacaatggaggtcaaaatctctctgttttttctattcactttctgtatttagattttttgggatttgattgctttttctttgagatctacattatgatttgagttgatttccccgggttttgaaagaaaatagtggagatttggtggattggggtgtttcgactgggtcacgaaaaaggaggagtttcctctattttttgtggttaggctggtatttttgtaaataaaaacttttattttctatttatgtttatttttactttctagggtataaatgtaaaatgctgcccttattagcttattatagaaaaaaatcttttctttttctctctattttatactattcataatagtttttttaaaaaaaaataaagaaagaaagaaaaagaggaaattacactcattatgggattttaaaagttgtttacttaaatatggcacttctaagtttgatcaatttatatggtattttt

SEQ ID NO: 268914 - DNA, 632 bp, Cannabis indica
tattttgaaaaatataaggtccagtttgtaattaaataaaatagatggttcaattagtaatttttgcaaagcacaaggtccaaaatagtatttaccctttatttttatttgataggtattttttaagaatatagattagaagaaatttttttaaaaaaatagtacaattaaagctatagattttatataaaataaaatttattaaaataatatactttaaaaatttttagagtgtaaataaaatttctctttatatactattaaaaggataaaataaaagaaattaaattggtgtaaataaaattctcttttagaattgctgcaccaaaaataaatattttatattaataattggtgtaaattttacactaaattaatataatcatattggagatgatctaattaaataccaattaaacatctcctaaaatactattatccttgaagaaatatcacgtgttggcttaattacactaataaatgaagcccttccaaattataagaacatcattatcattaagtctatgaaaaaagtatatatgtattaaaagtccataatattgggattagctaattaaaatgttattttcttggaaaaattaatggtaactaagatatgtaattattaatac

SEQ ID NO: 268915 - DNA, 545 bp, Cannabis indica
gtatctacacattatttttatgaaaatttaatgcctttttgatacccataacataattggtcacttaattttgtatcacactttataatagcatatacatcatgtgcccacaataggattttaatccaacaatctcctacttgggcaatatatatgttacctgataaatgtataatctcatgggctcaaaatttgctattatgtaaagatatttacaacaatctcgtccatcaactatacccatataagatcaaagcgattttcgtcatatcaatcatgactaaacccatcaatggtcacatatatacaaatatagccgaatgacatagatcaatcatagatgtgtagcatggaaattacatgcaatgtgaaccaaacatgtctatttccaactggtcctccttaaaccaaaatgatgtcagacttaaacataacaaaacagggtgaatgaactaaaaactttagttctgatcagaaaataaccaaatacataaatgtcttaaacaaacataaagcaaagaaaatacaagctcccactaaatcat

SEQ ID NO: 268916 - DNA, 520 bp, Cannabis indica
ttatgcatgactaggaaagtgatcaaggcatttgttttggatcgattgtgcctttcaagccatccctgtaattttatcctagttactctttttgagtcttaacctattctttatttctacacatgctgagcctagatgagataaaccctgaatatccaaaaatttaaccctaataataccataagtagatctttagtttgggagaatttggatgagaagtttgttgtatgtgtgtggaaaaagtgtgaaaattgagagaatatgaaaaaacaaaattagttgacagcaacttgaaaaaaaagaaaaaaaaaaagaaaaaaagaaaaaatttgacatcctgtaacgccctaacaattacacacgttacccaaggtgattaagaaactctaatcccctaaacgggattactagaaagataaacacaggtaaattaaactttaatcgaaaacagattgaaaataaaacttgtaataagcttaactttacaataaaaaatctcatgtttcgggatcccaaaaaa

SEQ ID NO: 268917 - DNA, 744 bp, Cannabis indica
aagtaagaaaatcatcatggctggaaacgaaacaaatggaggtgctaacaacgagtccatcaacatcggagttatgaacgtgccattatcttgagctaggacgccacctgtggatgtcgttcatggcggagtagggagaggtaacattagacctctcaatctattccctgaaacaactgaccctcaagtcggggaaacgtccacgccaccagcaacaatgcaatttccgcctgtcactccagcggtggtatccgagggaatcgtccaactcaccaccgaccaatatactgcgattcaggatcaactacgcgcgctgcaggccgaggtggatggacagaacagggcccgacgcccccctcgagcccctactactcgcacagataaccctcaggtaacgaactctagacgtcgtaataatcgtgttcgcagggaacgaagaaccaatcctgaaggtctggacctaaaccagccaacctcgagagaccaatctgcgaggtatcctaatcaggaaacacaggttgatgaagaccctgagcgacgtaatcctcgcagccgaccttcaagagacaatgacgcagaatccgcctcttcatcctcgcatggtcgtacacctagcagatacacgaggtccggttctgtggagacgcaacagggaggatgataccaagtccataggggcgatctgcgtgatcacctcaacgcggttttcagagcgcgctcccgcgcccctcgcgatgaggaaac

SEQ ID NO: 268918 - DNA, 527 bp, Cannabis indica
aaaaaaaaaaattaataaaatacttttgtaatttatataatgtacatgctattccataataaatagttaaaatattcaaaagttaacataatcaatggctaataaaatgtcactatcatatgaggacaaatgaagtgttctttttgtagaattttcttataactataatataaaaataatatcaatgaaatgtagaaataatataatggaaggaaatatcattaaaataaaataagatctactaattacctagagaaaaccaaaaattaatgaacatagaagagaagagaaataaaataagaaggtaaactctttttccaccctaaacaaagttagttaaatataagcaacttttatacaattagagctatataatatgattttttgaattgtatataaatatttttcttacctaataaaaaatttaaaaaaagtaagaaatttaaggagagaagaaataatactatttagagagattttagagtgtcatgtcaccgttttatgtctctcatttatatataaatatt

SEQ ID NO: 268919 - DNA, 941 bp, Cannabis indica
tcccatatggtccttggatgaaaggtgccaagcttccttctacgggctatgataagtatcgaaccgatttttctaaaggaactgcctagcctttattaacttgcctggctcgtaccacacttacttcaaccattccccgcctaaactgtacagcatcccctcacccgagtttgtttttgggtttagaatccccctcaactttgccttcctctcgtccaaatgccactctgcctgctgttgtcttctctaatcccagaacacacacaacaccacaaacttcctccttgcatccatcctcattaataactacagccaatgtttctaatcctcatgtcgacaagtctctcactgccattaatttgtcaaatattttcacaccagatgtaggatctgccactagaccatccctacccgtggctatttatccaccaactctgacacccaataatacttcctctactcatccatacattatatcacctttctctcagcccatatattgtcccacacccgctgccacttcaaccatttctgcctctcaatctttgggtttcactgctgctaataacaaagaaaacattccacctgcttctactaccaagagacaaagtgattcactctccatgaggcagcttctcaaaagatgtcgtaatcaaaactcccccttgtgattgggagaaaattttggccaaaatgtttcctatgatgatatggattcggatggcttcattgacaattccgcggagattgctttgcaatcccgcaattcattatgaaaatcttaagttggaatgcacggggattggggaacccgactgcattcaggcatcttcgattgcttgtcaaacaacaatcgccccatattttgtttcttatggaaacaaaacttccaccaaacttccacaaaacttccaacaatcgacaaactttgaactttaata

SEQ ID NO: 268920 - DNA, 1015 bp, Cannabis indica
cctaagaggaagcttttcgggcaatgttttacaagaaatattataatgagtccattcgagcagcaaaagcgggagagtttatatgactgacttagggcagtatgacggtgataaaggatgccaccaagttcgatcgattggcaaaatttacttcagaagaagtggctactaaggccattagaaaggctaaatttatttgggggttggatgagcacattgcacgagacgtgattgtcgctgctaaagaacctgggcttgcttagacttatgcacagatagtcgagttggctcttgttgctgagggtgctgaagactagatacgaaaaagaaatattgcaaggagagactcgtggaaacaatctggtgatgattcgggtagaggaagtgacctaggtgatcgtaagaaaagacctaatgatttagcagctaaaggatcaaataaaatgttttagagtaatcaaggtttttgtcgtggtggaaacgagaattggcgaatccacccagaatgtctaagaaactatctatatggagcaaccagaaggttataagcttccagggcaggaagagaaggtttgcaaactcaataggtccatttatggacttaagcaagcatctcgttcttggaacaaaaggtttgatgaaataatcaagacctacgactttcatcaaaacgatgatgaaccttgtgtttaccaactcaaggataatcaagtggtagtattcctggtcctttatgttgacattttgattattggtaacaatatgaagaaaatgactaacatcaaggaagggcttgacattcaatttgaaatgaaagatttgggtgaagctgcttatgttcttagtattcaaaacatcaaaaattggaagaacagatcccttagtctctctcaaacagcttacattaataaggtgctagagagattctcaatgacaaataacaaaggggcagtgacgccttctagacctagtatttatctatctaagaaacagtgccctactgatcctcaagaga

SEQ ID NO: 268921 - DNA, 740 bp, Cannabis indica
ccagagttagaactaaaggtacttcctaatcatctatggtatgaatttttgggagaagacaagaagcttccagtgatagtgtcagcttcactttcagatgtggagactgacaagttgcttagagtactccgggcacataataaagccattgcatggacattgggtgacgttaagggaatcagtccctctacagttatgcatcgaattttaatggaggagggcgccaaaccaactattgatgcacaacgaagacttaatctaccaatgaaagaagtggccagaaaagaggtggtaaagtgattagatgctggtgcagcttatccaatttcaaatagcaagtgggtcagctcagtacaagtggtaccaaagaaaggaaggatgacggtgataaagaatgataagaatgaattaatccctactaaaacagttactgggtggaggatctgcatagactacaaaaagctcaacaaggcaaccagtaaggaccattttcccttgccctttattgatcagatgttagaccggttggctgggcaggagtattactgtttcttggatggctattttgggtatcatcaaatagccatagcacctgaggatcaagagaagactgcatttatatgtccatatgacacttttgctttcaggagaatgccctttggattatgtaatgcaccttcaacattccagaggtgtatgatggtcatattttcaaatctaatagagaagtgcatcgaggt

SEQ ID NO: 268922 - DNA, 598 bp, Cannabis indica
cctctctccactaatgttgacaaatttctctttggaatcaataggtctttttcggttatcacaacgtggcttaggtacatgggtaggtgacaagtcatttaagctacgttataccataagcacaattaaccaagcaagcacccgcattcatctttttttcatatatcccaaagacaatagtaagagattgcatattttttcctatgtgctacctcatatttttttcataattttttcaagaagacattatcacatattttctttcttttttcttcttctattttttcactagaggcacaacacacaatactttatcatatattttctctttttcaatctcttactaatacactttatttccccacttacaacaatttatcccccccaaacttgcttaaaggctcatggcataataaggtatgtttagagtgaaaagagttaaggataatgagtttagcttaggtaagggggtagaaatttttagaataggttaaggctcaactttgggtatactagggtaaaatttttgggtaggctcgaaaggctcaatcgatccaaagaaaacttgcctaaatcattttccaaacaaaaatcatca

SEQ ID NO: 268923 - DNA, 690 bp, Cannabis indica
tttatttttatgaaaattgagcttaggatattatttgtacaattttttaaaaaaaatacaaaattcaatttattacgagtaatgcaagatacacatattacacacaatgatgtgtaataaatattagtcatttatatttttaagtgagactataatacttttaattgtatagttgagattaattacacatcattatgtataagaagtgtgtgtaatttaagtgtgtcccaatcattttctctaatttttacaaaataaataattcaaaataatatttactaaaataataaagaaaaaaaagagaaatgatttcttacaagtaatctacataattcttgtttgggttagtttctataagttcaatttttaacttttacatttaaaaaagttcttcgcgggtatttggataaaaaaaaaagaaaagaaatttaatttaaaaatccttttaaaagaagctattttaaaaattaaaataatttacataggtttttttttactcacaatttttttaatgatatccaaacaatttgaaaaatacttttcatttaaaaaaaaaatcatataataattatctaaacggtaaaaataagacaaaaatttatatttatcttatacttctagctataaacaaaagtagaaacttagtcaaacgggaccataattttactaaatttatcatttaacaaaaca

SEQ ID NO: 268924 - DNA, 804 bp, Cannabis indica
gatgagtgataatctgaaattaattgtgaagtatttatgcatgaaatgacaagattacccttgtgagggtgtatgtgtgtatttaagccttaggggtaaaatggtcatttgaccatatttgatttacattgaattaaatggacttttgagggaaatagattgattttctggttgtttcattctctcaccctctccctctcccccttttaccctcttgtttttcaaagcttgatttatgaggaatttggtttgattggaagctaaatcttgggagaaaatctttgttcttgctttgttgtgattttgaggtaattttccatgatcttgaccttatttttagttgctgaattatatgattgaaagtatgaatttgatgataatgatgataggttgcatgttcttagattttgtagtaattttgatgaattaagtgagaaatttcatggattgattaggattcatgtttgtgagcttggattgtaattacagggtacttttctagtttgaaattcatgttatattgttatgtgattgcttgaaattagttgagtttgaaggattcttagctcaagttcttgagcttgtgtatagctagtgtaaagcatgaattttgtgtttattgcaatctgtaagtgtgagtttaatattgggatttagtgtttgaaacatggattttaactccttgttgtttgctagcgaccttacttgttaatcttgatgtttggttgagaaattggagtgaaaagattggttttggttgctgaaaatcgtgatgttcttggctggtttctgggttctgcaccc

SEQ ID NO: 268925 - DNA, 837 bp, Cannabis indica
ttatttaatttatcatataagataatttaaatacaatatttcaaattaaaaatttaaagttatcttttaatttaaaatatggcgaatgttaaaatatatgatcttataattaaataatatataaatattaaataaattaacaaattttcaaaatcgaaccataattaaaaaataaaataattaattttttaatttaaacctcaaaatatcagaaattaatagtaatctattaaaaattaaatattattaatttaaaatctatatttaagtttaaatgtattaaaaataatattttattttgattttagggtttgaaataggaaaaattcaaaaaaaaaaaaatggaaaaaatcccaaaaatttcgaaaatgtggtggatgatgcacctgctgcgcacgaggaggctgcatgcagcctcctacgccgcgaagaggggattagcagggagggcgtgcggctaaactcggcgtgtgcagggtctggacatgcaacttgtagcctccaggtgtgcgtgtcccctgcctgaacgagtgctgtccgagcacgagcgcgcactaggtctccttgtccgggtgcctactgcatgcgatgcaccccactcgacacctcttggtcccgaaacttcaaaaagtcatatcttttcaaatttttatcggaatcaagttccgtaaaaatcaaaattgcttaattttttacaaggaatccaaataaaatattttcagaacaaaaataaaattgtttttatggaaatatttcgtaaatcacgtacattcatcaaataacacatagaccaatatgaaaacatccaaatcaacacacaaacaatattcatcgttt

SEQ ID NO: 268926 - DNA, 957 bp, Cannabis indica
aaagggttttatttagggcacaaaacccaacaactactacgctagagaacagatccttaagttcttgatcagtctcaatgaatcttattggggaatacgggctcagatcatcctctttgatccgcttccaccactatccaaggttttctccatggttgttcaacaagaacgccaacgttgtcttggaaataccggcattgttgctgctgcccctaccaaaacaaaaccgaatcagccttctcggaacaagaggcctcaccctacatgttccaactgtcttaaaccaggccacttggttgagaagtgctatttcctccatggtttcccacctgaatatggtgataaaaagaaaaatactcctactgctcgggcaaaccaagtttcggccagtcctgaagcccctgttgccggctcttctcaacttcaactcagctagcaattaatgtctctactcaaccaacaaatccaaagcactccatccaccagtgacaatcttcctgtggtctcatacgtctttggatctttccctgacttctacgattgggatagctaagaaagttggccaactgtttttctttgaacaagagcgacgttttctcacttccaatatttctatctttgcaaactcttcttgtactttgaaggacccttggcatcttcgccttggccacccttctatgaacattactagtatacttaataaaagtttgcaattttgtgaaaaacctttggattatatgtgctctatatgtcattttgctaaacagaaacggcttccttttatttttaacaataattttgccaatgctccttttgatttaattcaccttgatatatggggaccttttcatatcattggcattgaaggttatcgatatttcttaactattgttgatgatttttctcgttatacttgggtttacatgctaaactctaaatctgatgtctcttttatta

SEQ ID NO: 268927 - DNA, 522 bp, Cannabis indica
taaaatatataaaaaaataaatttccctactggccatcaagtgggcatatatactattatatataaatgcacactctggatcacttcttattacagctatgccttaatttacaaaagcctaaaagaaaacacagaagatagaaaaacaaaatgggaggtcacatgggcattcccatatgggacccctaaacaaacaacacattcattccctgctaccacatgaagaccatgactagcacactgtgactaccacattagtacttgaaatctcttacttttcaagaaaatttgatgggttggtactctgctgcctaatatgatcatttgttggtaaaggtcaaagctaaagaatttaggagttcaatgtttaaacacataatttatgcaacttattttgagttctagccaactttgactgggggctgccccaacatataatcatcacttctctttttcattttgtgatactgctctttttttagcaatacagccttaaacacacgactaaaactaaggcaatga

SEQ ID NO: 268928 - DNA, 516 bp, Cannabis indica
attctcaccacctacctgattccgatttctttgtttttctgcttctttgttcttttttctatctttcatattcaaatggccaagacaaagaacctagggcaatgaaaaaggatggagaatccgatcctgctccctcgaatgctcctcatgctggtgcaactgcatcaaacccaagagatttattacttcctcagcgtgaatctcagcctgtgaagcccaagccgaaacgaatccccaaacaagttgctcgaaaatctgggcgaccccacagaccgtgcacttcatcgtcttcatcatcgaaggggtctcctcctagtgcaactacattgcctcctgctgcatcagtgaagggtgttgctgcatcaacaccaacaggtccctcctctcgcacccgtgcctagcaagcgtctctcgagaaggaacttcgcactaaatgaagccaacagaccagcttctcctgccaagaagctgaaattgaatccccccttggcttcttcaagttctgaagaggaagaa

SEQ ID NO: 268929 - DNA, 507 bp, Cannabis indica
attttaagtagtacgtgaaaagacagggccaaggatataaccagcccagtcttcccaatcacccaaacaaccaggggttacaacctattcctattgagggagaggacatcttggttatttctggagggccacatatcccaggggaaagtaataatgcccagaaaagatatgtgaaagagataaagaatgagcagtcggcctttgccctagaaccttccaagaaggtgaaaaccgaggagcctcccattacattcacggaggaagatgagaaaaatgtcagatatccttacgtcgatccattggtgataaccattcaactcaccaataaaaggatcaagagagtattaatagacaatgggagttcggtaaatatcctttacaatgagacactaaagaaaatggggctcgaaaaagccaaattaaggccatatatggtgaacctttacgaattcactgaagacagcgtcactaaccttggcataactgagcttgcattaactttaggtg

SEQ ID NO: 268930 - DNA, 513 bp, Cannabis indica
taagtttagagtatacctcttgaagcgtatcaaggtatccttgaaactttccgtatattgtatctcttaatctagatgatgaggaaattgcaattggactcacaccagtatcttccaaatcatttcaccacacacaaggaatagtgtgggtaattaggataaagtgtataacatttgttcttgttgagttctcaacacatgagcaagaaaaattgagagaaaaacaatttctttttctatctataaatttctaaaattaagttcaggaagagtaatctgatttctcaaatcatgcttctatttatagtagttaaattcctttaattaaatcatattgaattgtttaaataaagaaatatctataaccaaattcggttaatgatatttatgagataatctcttaacgacttgagagaagatctcaacaaccttaaaatatctataagcacttttccaaatagatatttacctaattgaattaattaaataattaattaattcaaaaaaaaaaaa

SEQ ID NO: 268931 - DNA, 516 bp, Cannabis indica
taaaacaattaaattaaacacataagggtttagaaaacctaacattgatttcagcggaatataatgactcatttcgctcagatctttaactcttgttcctttctgtcacaaagtattatcaagatctgagcctggatttgtttctctccttcgagtttggttaccattgtcatactcactatgattgagcacttaacttgctatgtgtgggcatgacactctatcactaagggtcgagtatgaagaacaatgaaggaggcttgaaaactctatagaaggtgtctctcatctactagttgtcagagaatgaaaactagattcaatttggttgaagggaatagttcagttggtaagcgcttacggttgaattatatggattaaaaagaataaaatattgcgagaaaatcaacactaaggccggccatataatggacaagtttctagttacaattttgccactttatttcaagcacttattcttctttcaataataccatattttccaattcaatccta

SEQ ID NO: 268932 - DNA, 643 bp, Cannabis indica
ataaaatagattacattgaaatggagtttatttagggcataaaacctaacaggttttttctgggtttggaacccaggggccgcgacccgcctctgtgttatggcctgggatttgaacccaggtgctgcggcaccatgtggagagtgtcgcagcccgcccccttgtttttgggcagatttgaatgtgattgtatttgaatactcataactttgtgattcggactccattttgggagttctatatatcgttgaaagctcgttcagagctctatatgcatatctgtgaattaaatgccaatgttatattatgtgaaagtggaattagggtttaatcctatatttgtgaatctcggaatttgtgactaggattaccggcacttggtcaggggcacccggggatttgaaatcttcacatttgcgggacatcaggtaagacagtagtttagcacgtagagttgtgtgcggtggggcttatattgaaaatgatatatgtgagtaattaaaaactgggattagggttattaccctaatataagcggttaatggcctagggttattaccctagtgattaataatgtgtaaatgctatgccatgttaattatatgtgtatattaagatttagggttatgcgatcaaggcataa

SEQ ID NO: 268933 - DNA, 438 bp, Cannabis indica
aattttccgttttttttttgaaaaatgacactgcgagtaacaacaagtcattttttttaactgaagggatgcctcacacgacgaaaaacgacatggaaaatgacacctcgtgtggaacaaacgatggttgccacaaaaataaaaaacgacacgtcatttgggttcttcttcaacctccaactgggtcaaatttgacccattttcagccacgtgggtccaatggacctgacccaaattcgatcggaattttttattctgacgaccaaaatagcccaaatcaattctaaatgaatttaaatgcataaattaagacattcaaatatatttcatgcattgaaaatacgtaaaacaaagactttaaaattactaaaaaaatttaggtccgaatgaatttcccaatttttttttgagattactttgtttttctgaagagttttt

SEQ ID NO: 268934 - DNA, 551 bp, Cannabis indica
ttaaaataaatttacaacattccactaaggtcaaactattttactatctaaaaacaaaactaaggcttcaccgacgttttagaccgtttttttgtccatagcccctcgtaaaatacatactagaaccgatttagctcaacatgcttcttcaatgttctctgtctattgcatgcaggggaaagcaagggagtgagctaaaaattctataagaaaatacttaacatacaatagcacttaaaacattatacatactattgacctcaaaaagtgatcaaccgacagcgggatcgtacagatctgatgcttgccacgtttttgcacaattaagaatgaaaataaatagacaacaagatttgttatagaggttcgcccccttgtgatagcgggtaatgacatactctccttttagttgtatttataccaagggaactaatatccagatcactatatgtgggatctgctgtagtacccttaggattacaaggtatgattcaatattggcaaaactcaagtgttagacaacactagggtaggcgtgagagagagagaga

SEQ ID NO: 268935 - DNA, 688 bp, Cannabis indica
aaaacctatattttttttggtgtgataacgtttttgcatcataataagaacaagaaatcaatacaacttttattcttagtctactctctctatgtcattattaacctcctaattatatctctagatttctcatgtgtcaagtttgttctttcgattcttagcttagcttgcatttatacatgcatttcttttatatttggaatataattttactttctaaattagagtaagaatagtttaaaataaatattattttcatattactaactagtaactaattataactagttactagttatataatttgtaactaaatagtttcttataactagttactatttatataatttgtagctaactagtaactaatttaccttaattaaattactaattagtaactaattatagtataataaataattaatcagtaaccagtcttaattctactcaaatttcaatagtataacgactataattaaacattttaaaaaaaattaaactattaataacaacaaaaaacaatcctaaacatgataaaaccatcacatcaacatttaataatacaaacattactacccattcgactgcaatacatatatttgtagaacttacttcagtgtgaatgaatatttaagatattcaaattcatgtaacatgcaaattattcgacccatccgaccgcagtaca

SEQ ID NO: 268936 - DNA, 889 bp, Cannabis indica
tgagttgtttttatgttggtaaacagtggcttgatgtagtttccaatcaacttcgctgtagcttgtctttcgtctgcaaatcttatgtttagatcacaagtgtgtatcacatttctgtcatattttcgaattatgaatgacttcattggtccgtttctagatgtggttagtgcccacttgcgttttggatccaagcaacaaattttttatgtttttacgcatgactttttcactttgaattgtaagttgtttctaattgcatagaaaccaagcacactttggagtgtttctttatctttgtatatttgtgcttcttctattttaggatgttgcggatctgtgattagtagttcgtcataatctatgatttctggctgcctatttttgttgttttccagttgctcaaccatttcctctgccataagttttgcatagtccatgaactcaaaattttctcccccatcttccagtattgtagcatcaattgtatgttgttgatttgttgagtcttctgtcgttgctgcattgtattccattgtttcaaatgcgtttgtctgtgcaactaatgcgttactattttccaagaacgatgattgaaaattgttggtgggttgttgatgacattcacacacaatggatatgttgtgaagtcgggttccttcagttttagttgtatgtagaaatgtaggctttgatcatcctttatcctcaacggttggtatctttctttcacttgacatttcagttgtagaacagtattttcttggttgcattccaggacctctttcagctttcgttgtaattcttcatacttacagttgattgaaatgtaatgtccactagcttcataattttcataattcatttgatcatcaaattgtccattgca

SEQ ID NO: 268937 - DNA, 1471 bp, Cannabis indica
cgctttgaacttttttatttatataaatgcctcttcaataaaaataataatttattttttggttgttttacctagtttgtttatagttgtattatagttgttatgaagttattttttagttattttttattgttttataacttatttatagctatcgtgaggttgatttttcgttgttttttagttatttcttactttttgctgagtaaaatgtatttgtataattataaaattttacaagcgtatttttataaataaaaaattttagatcataaaattataaataaaatataaaaaaaaatatttttgaaaagtccccaaccatttatttatttatttacaaatatcttatcttatatcaagctgattcttgtttgtttaaggggtttttacatcatattgattttttttttctttttcactgtagggcgcaattattttcaaaaaattatatatttttttaaaaaatattgtgtactgtgtcaaatttttactttgttctacggttgttttttaattattcactattttttttaaattgttttattttgttgttttacaattattttataaaaatatattatttttgtaaaaattccgtgtatagtaaaattgtaaattttaacccaaaatctaatattttttgtaaaaactccaataataaattattgagtatattttctaaaaaaaactactactctcacatatggttttacaaataacatgatttacatggttctacaattatagtttagctcaattattttaatttatatttaagtagaaatgaaatatctcttaagatatatgaaaactagaaagtataaaaaaaaataagtaaatgtatgaagatttattattttattaaaacttattatgacttattcataatatatataatatatataatgaatattacccagtaatgggtaataaacaaatttaactgtaaatattaattttaaaaatattaaaccattagatcttggtccgatagcgaataataaaaaagaaatttgaatttctatgcttaatttagctacttaattaaaaaatattaaaaattacctcttttttacactatataaaaaatatgtttatatgtaaaatatttaagtcgaattcaacttttttatcacctttttgccaaaaaaaaaattttttagctgatggaccaatctcagtccatataatgtaaaaattaaaaaaaattctaattaaatagaaaaattaatcataaaaactcaaaattttctaatattacctatacctacatatgacaaaaataaactaaagggagtatttcaattttgtactatttttttttaaacaattcaaataatttttgttactttacttttttttttgaaaccactaatttttgttattaaaactttaaaaattattactaatacataataattaatgtaaatatatttagccaccataagttatatatatatatatattt

SEQ ID NO: 268938 - DNA, 780 bp, Cannabis indica
tagtatgcacgtagagttaagcacagtggcgatcatattgtatgttgtgattgtgattaattcagaatcgggattagggttattaccctaaaatgagaggttatttagtccagggttattaccctagtagttaacaaatgtttaatgttatgccatgttgaatatgttggaataaagagttatgcgtataaggcataattaagctaaactcggtaaactagtaccttgagtttaattttaatgcaatcttgggtttttaccttagaacattaagaaggtaagaaagcgttaatacatggtaatgttattaatccagtgaaaatctgagttaggattattaccctaagattttatatgatgtggtaaatattgaatacatgcgggtatgttaagaattatgtgtgtaagacataactaggttagacctgctatatatcaccaggataaaccacggaatgaacgtaatgtatagattacaaatatatatgggtagggttatgcgagtaaggcataaccagattaggctcggtaaccagaaccgaggtaaaccctactaaggccttattgtatatagacgtgtgagagcaacacgtaggtctacgccacgtagacataaataggcatgtgagcgtaacatgcaggtctatagcaaatagacaaatagtgcagtggcacaattaattatgtgttatacatattgagattaaaggttatgcgttcaaggcataatcaagttggactcggtaaccagacttagtaaatagtttttttaatcaatac

SEQ ID NO: 268939 - DNA, 1082 bp, Cannabis indica
aagtggttgaattgaaaaaaatatcatttttgagacaataagataaataattgaaaaaaagggcaaaattgtaaagtggggctcatatccatggccaaccacttaatggacgatttaccattttattttttctttattttaatgccaaataattctaacctaatcctaggtggaaacctataaataggtagtgatggcctcaaaggaaaagatgatgcaaacactttccttcagtcaaaatttgagccatcttctctaccaatttcgaatccttctatctatctttctctcttcaatttcgaaccctatggtgatagagtaagtgcccacacacatgtggtcctcaatcatagtgtgtaagactgtgagaatccaaattcaagagaaggagaattaggctcagatcttggtgatactctgttacagaaaggatacaagggttagagatctgagcggaaggagtcatttaatttcgctgcacccactgtaaggtttcttaaactttatatgtgtttaatttacaatgttttagaaatttatatttaggatgttaaacaacatacatggtagtaaatctagatcctggtaaaacatattccaacaattatctcaaataatttaagatttattaccaataaataaaatgccaataaataatcccctaagtatatttcggccctgaacccggttcgattcgaaatacccggttctaactatactgcaccaacttttcagaacacacttgaaaaaggacgacacatgcatactatataataatatagtccatgagcacttaaataaattaaattcacagttttacccctctcgggtcaaaattactaaaataccctggctcacaaacggggtcttaacatgtcatatctaatattaattcacatataataaattatattagaatataattccatattaatatacaattaactagttagggttttgctaatccattctcttaatcctaggctattacagactccttctggatgacaagttagacttctgagaacgcccttccggatgacatctcacttttcatatatgaattacttccaaagtggaca

SEQ ID NO: 268940 - DNA, 1093 bp, Cannabis indica
gtttctcgaattagggttttggcacgttatttacctggttttaatatctgattagggcatccatccagcacgagacattctcttcaggtcggccaactcacttgaattcggaaaagaggtaagaacagcgtataatatgtgatatatatgcgaatgtaagtatgtgtgaaatgtatatgcatgcatgttatggttggtacactaccaacacttgtacggaaatggtacagagtgcattggtatcttgtttaaagagtacattacggtgtcaccagcacaagtacggggaggtacatggtgtttgtggtatctcacttagtggtactgtaggtacaaaataaaccctaccaacactcgtacagtctgtcgactcacagttctactttcatgtgtaggtaaaggatagatgaaggctgaacatgagtgagcttgagctaggatgacgttgtacatgtcatggcggcgcgacctagagtgttcggtcttgggacatctggggttattattttgtagtcgttgtgcgacctcacttttataatctaaatattttgtaaaaagtttatcaacgggatcctgacacttgtaaatattcttataaagtttataaagtttcataattaatctgaaaagttttaacttgacacgattttcataaaaattctttgattagttagatagcattgcaattgaaaaatcattgtaacgtgccttagcattaaaatgttaccgtaatgatagtcatagacaaaagataagagacagaagagtcaccacaacatgggtaacgaagtaggtatttccaggggcggagggatttggccatctaaagaggccatggcccccccaagaatttacatattctattatatatatatatgatttttttttaattaatatgtattcactatataggctggtggcccccttaagtcatggtcaaatatttttatttttaaagaaaaagatagcaaaaatataccaacacgtcaatgacatcaattactatgtatgtatatatatatatattctataaaatcaaatcaacttcttcttttttttaaacgtaattattttttctatcatagcaattagc

SEQ ID NO: 268941 - DNA, 742 bp, Cannabis indica
catgtaggcacatgtgtaaatataattcgtgaagacatcagtcttgtacttgtggttgacgttcatagtaatgtggtggtagcatgcaccgtggtgtgcatcaagaaacacgagctccaaagcatggacaatgctttgatgcctgttcgatatgaaggctaagttctcaacaccaccaatcgcttctttcaattttctcataaaatagatccaagagttgtggttgtcgctgtcaactatcgcaaaagctatcggaaaaatgtggctgccagaatccagtgccactgcacacaatatattcccaccatacgtagtcttcaagaaagacccatcaacgcatacaacaggtcggtaaaacctaaacccacgcctacaaggtccaagtgagaagtaacaacacttgaagcgaccatcctctaccacaaaatctgcgatgatacttggatttctaagctttagcatgtgcgagaaactatgtaattgttgagaatattttactaggatctagattttctaacaagtatgtttaattaatatcttaaatatgaatatctataatacaataaaattaaacacataagagtttagaaaaccttacattgatgcaacagaataatatgactccttccttccgctcagatctctaacccttgttcctttctgtcgcagagtattatcaagatttgagcctgtatctccttctctccttcaggttggttaccatcatcttccgcactatgat

SEQ ID NO: 268942 - DNA, 1098 bp, Cannabis indica
tcggttcgggtcttctaggccggcgggagctggaggatctgttgtcctagcgaaaggtacatcaacattcttggcagaggtagaagcaatcgcctcgggttcaccataagccacttgagaaacgcagtactcgagatacatgtctttggcctcgcccaggtaatcaaaatttgcctgaggattagccttccaaaagtcataaaaaatctcgagattggttgtctctaaggcatgtactttctcttcctgccttgtcacctcagatttgtacttctaaacctcagcttcaacctcctcctcttcctccacctaggagggactgctaggacaaacatcgtcctgctccacaatctcttggacctcagcgtccccttcatgatcctcctcctcctagacgaatggatcttgttcggggcagggtaaagtggcatgccgagccacttgaggatcaaatgcgtcgatcacgcgcattgtctttttggtgcgagccatcatcctatggctggacagaagacttaagctagaatacctgtcactcgaagaagttggactagaacgaaggcgagggtgatcctcgtgcaagagttgaagtaaatcctggtcgatttggtgttcgcttccccaaaactcacctaggttcatctacaaaagacaacacacaagatgagtgtttggttgggatatcgaacattaaacaggcaaatatgttgaccaggagtactcaacagattaaagaataataatattaaacgaaaagtcaaaactcaggaagtttgaaatcttcgcaagctagggcgaaaaatttcatgaagcttagaataagcaagatgaaagacaagcattatgcagttcaagaagcaagcagtacgggcgatgaaattgcatgaaccgtaacaaaggaaaatcacagagtttcaaaacttagggtttccaacatatcttctacagcaaaatcgaaggtgcattcaaaaagcaaatgtgcaaagcaaacataaaggaaatcgagaacttactcaaagatcgaacgtctgggtacaggttacgccaagccaaatgagcagttttgatgaaagcgcttcagcaaacttgaagccaaaa

SEQ ID NO: 268943 - DNA, 652 bp, Cannabis indica
taattgagaatatattgttactcgggttgtaattttatatgtaaagaataaaatgttttattatataataaatgctatatctatatatggaatttctttgtaattgattattttattctttttctgatgtgaactcattaatctctccagctaggttgtgtgatgatcagtaaccttgggtttagttgataaaagacctgctatgactaccactgcaagtggcaatccttggcatctgtcaacgatctcgcgagacaacttctccaagtgacgtggacaatttccatcaagttcatttcgaaaagccttattacaaaagagttcccatgctttctctggtggaaggggttgtaaattatggatatgaacattcgatgatgttttgcaaaaatttgcaacttccacatttctttgtgataactactctcccatttctttcattatcatcagataaagcattttgcatgtcaccccaaaaaagagtattccaagaagcagtgaatggcaaagatggcaagaagtggctgcaggccattgatgaggaaaaacaatcactgatcaagaacaagaaatggagaatagttagaagaccacatggatagaggttaatcagatgcaaatggatctttagggtcaaagatggcatccctgg

SEQ ID NO: 268944 - DNA, 997 bp, Cannabis indica
tagatgagatatttttttcttgattccaaaagtgttctatcatcttattctgtataagatggtctcattgcctatgttgtcttaacataaccgaagatgataattccacttatgttcttagacaaaagtcaaggtaccttgtcgtagtaggagggtttcaaggaactcaccctgtcataacttggaagacaccggtaattaaaatccattattagtttaaacaagtaatggtgtaacaccctaatgctaaggcacgctacagtgctttttcaattacagtgcaatcttcgctaatcaaagaattttcttgaaaaacgtgtcaaattaaaacttttatattaaatattaaactttatattatatcaaaatatttacaagtgtcgggatcctgttttcaaacttctaaaacataatataccaaaatacatattattcagatcgcccagcgactacaaaatacaattcccagatgtcccgagactgaacactccaggtcgcgctgctttgacatgtacaacttcatccgagctcaggttcactcctgttcaacttttgccattcctttacctacacatggaagcagaattgtgagtcaatagagtttgtaagaaaagcatataacgtatcatgtaacttccgacttgtatttgggcgcccatacacctatttacaaggctcaacagatgcgtaaaaacgttccataccaaggtatagccactataccacatacactacgtacctcactgtgcgagtgttggtagggtttgtttcacaccctgagtaccactgagtgatataccacacacactcaataccttcccatacctgtgttggtatcactgtaatgtactctccattaacattcactataccaatgcactttataccttaactgtacaagtgttggtagtgccactaacaatttaagcatgcatatacacataacatatacatacactcagatattgatatcacacattatattcagttcttacat

SEQ ID NO: 268945 - DNA, 456 bp, Cannabis indica
catttatgtatgccgagaatggtaatcccctcgactgatcaagttctaggtgcgaaggttttgggccagctatgccttgaatcatgtccctaagttggtcaaactgtgcttgcacagaaggatctgttctgactggccctcctaggagaggttgcaggttttgaagagacaagggctggctggccataccctgggagagtgcacggtgaaggttagccagatttgggtgttggctttagccagccaggcccacacttggcttttgtccttggccaggcagacctgcattcggcagggcctagccgcccatagctcctccatggctgaccagacctgtaaagggtagggtatggccgcctgtgattcttccatggctagtcagacctgtagaaggcagggtttggctaaccaagactcctcggttgactgatgtaggttgtgtgtgttgggttttat

SEQ ID NO: 268946 - DNA, 1481 bp, Cannabis indica
tgttttgttttgttgttttacggctgttttataaaaagacattatttttgtaaaaattccgtgtgacagtaaaattgtaaacttttgccaaaaaccctattggaatggctccattatttagaggaatttacacttactatgggattttaaaggttcttatgataaatatgacacatttaagtttaaccaatttatatggtatttttttgtttttaggtctttttatggcatttgatatgccatatatacgtaattaggttttcaaatcccatacttaatgtttttatttgttttggaagttttatttgtcactgatgccagaaacgtcaccggagtttgctgctggtgccagaaaagttgccggagtagtggtcggtgccggaaaaatcgtcggagtttctgtcagcgccggaaaattcgtcggaattggcattgtcgccggaaaaatcactgaaaaaataccaagaaatcggtttcttgatgaagaaaccggtttcttgaagaagaaacaggtttcttggtgatttttccgttgacaatgccaattctgacgacttttctgacgctagcagctactccgacgactttttcggcactgacaacaaacttcggaaaagtcatcagaattggcatagtcgcctgaaaaattaccaagaaactggtttcttgatgaagaaacaaaccagtttcttggtgatttttccagtgatttttctgacgataatgacaattctaacaatttttctggcgtcggtagcaactctgacgactaatacactggtagctactccggtgactttttcagtaccgacagtaaactctgggaaatttgtcagaattggcgttgtcgccggaaaaatcaacaagaaactacaagaaactagtttcttttcttcattaagaaaccaatatcttggtaattttttttatgatttttctggtaataatgtcaattctgatgacttttttagtgccagtagcaactccggtgacttttccagtgccggtagcaactccagcgactatgccaattttgataacttatttcagttaactttattgtttagcatttatatttcgttatgatttttcatagtgtcaaatctggtttcacagggttcaaaagttcgaaactggttttacaggttttaaggatttgtaatgatgttgctatattttatgatgttattgtatattttttattttaagtttcattttattattttatttctaggtttgaaactgattttcattcttatattttgttttagaatattattattgtgcattgtgcgctgttttgtttatatttatgagtattttttttgtgttttttttctctatttggttgattgatgaaactggtttcaattattttcactgtatatcatttttgttttgtttcataatctttattattgttgtgtaacgaaactagttccttgatgaagaaaccactttcttggtgaagaaaccggttt

SEQ ID NO: 268947 - DNA, 844 bp, Cannabis indica
gacgtggacctcagacccaaacttagacccaaacctcggtcctggtttaggttcgggttcgggtttgggatttagatcccagtttaggacatgagttcgggtccaggtcgggaatttggggtttgggtttgggtttggatcgaggattcgggtcgaggtccgagttcgggtttaggtcttggtctagggtcaaggtttgggtcagggttcaagttcgggatttagatccgagtgtggggttcggggtccaggtcctagtctcaatttgggatctgggtctcggtcacgatcctagtttggagtctaggtcccggtcccggtccagggtccgggtcttggtcgaggttcaagttcgggtttgggttcgggtttgagtcaaggttcgagtcagggtcagggtctgagttcggggttcaggtccaggactaggtccgattctgggttcgagtccgatgtctcggtctggaatttgggtccaggtcgggatcgtgggtcgcgcgtcgggtcgtggggtccgtgtccgagtcgtggggtgggggctgagagtcggggttatggttaatccaaaattctttgtaaatattataatacaagctaatacaagtcatttgttatgtattaaataataggactcacatattaaaatttatggttgtaataattaatacaatacaaatataatattatttgttatttaatacaatacgacttttacacgtacgacttttgccgtgtaaaaatattttgataaataaagttggtttttgtatttttatttttatgtaaaaagttctatattttatctgaagatattttgataaatttgatttatatttatcctttt

SEQ ID NO: 268948 - DNA, 1350 bp, Cannabis indica
ctgaatgtgggggacttagtcacaactgcaaactgcaggagggctaagctcatcacagagagccaatcagtgtatgatttcaacttatccaaggttctttttccaacattcgcagtccagactctgaaaaggcactctgggcggacattattgcctcagcggaagaccggtaccagaaatacctctttaggagggagcaagagttggcttatattaaggctcaggccactactaggagggccctccggatagaagctgggaaagagcaggcgccttcccggcctaaactgctgttcccagttcccaacattagggctcctggcgccagcaccttcggatccggtaagtctcccttagttgttcatcatgtcccttctactcaatatttttcttcgatgtaggcctgtagagtttgatgaacgtctccttagatttagaatgcccctacccgatggggcgatcatgccaaaggtttttatttttacaacttaggtcattttttaggccggtcccggatggggtctggacctcctacacctatccttctggatcattcagcctacctgtcttccagctggtttctcccctcaaacaaatttcttggggatgacgacgccagcctttcagtgcaggactttgctagggctgaattagattgtctgggtaggattagttttactgctttgttcttgtgcgcgcagtttctcgttaacgtgctgatacttatttctttttcttgaagcagctaggccaatggacgaacttttggctaccctttctcagacttacagtcccgacccgatccagcctcaaacacaagacttggaggtgacctccgagaatccttcatttagcctccctttaagccaaatcattcttattgaagaagacggggaggtcgaggaggaagaggagggcgagattctcaaccctctggaccggaagcgtaaaggcaagatggtggaggtcgaggctgccaagaagcccaggagagccgacactccggcccctagctctaatttggggatcccacctgaggcggaggagtacactgttcctcccgagtattatcctgacccccattcctgatgatgaggaaagacgcaactccggattgccaagcacaattatgctatggcagaatacacgaaggggaacgcggaggtggaggccttgaaaaaggtcctaagggaagctcaggacagttcctctcgcagtgagtactctgggaattcctgggatttaaatatgtatcctttgacagactgcttcaaccacttcatcgggcctacccttgctccttttgcctcagaactaacaagccacttcgtctccaacctgacccaactt

SEQ ID NO: 268949 - DNA, 566 bp, Cannabis indica
atgaaagcttcaaagagcgacccaaactttgctaggttgtttgctgcagcgggtatagaacaagccagaccttcgatcgaggaaggagagattattgaaggggactttgaagtccaagaagtggaagaccagggcaaggttcgtcgcgctacccctcccgaggctgagggagaagaggaggaggaggagacagtttgggtgctgccattcagtggtttcaacgaggagggagagcctgtctccgaggatggagaagtcttcgaagctggctgggactacgttgaggaggaatatactaaggctcatcccataaacagtaggggtccaagaggtgctctttgggtttctccaccatccgtcttgacgtttaagagattgactaatctctacaaaagggtcttctaggaaaggttgaggctttactccctgctcccgggcaactagcccagatcttggagatggattttgtgcgtggtcaggacctaactctaagcatggtgtaatgttgccattgtatacatacttaagaaaattgtgaactatatcacattagtccaacccagctc

SEQ ID NO: 268950 - DNA, 544 bp, Cannabis indica
actcgccattctaggtcgaatactcgcacttgtcacttccttgaaaattctcttttatattaattaaataatacattttggtgttgcgaaattcactcgacaacactacgtgtatacaataagaacaagtaaataaagagacagtatttttatagaggttcgacccctttagttagcaggtaatgacctactctccttttggttgtattgataccaaagataatacaactcagatcacaagtgttgtggattctaaagtgactctcttaagattacaatgatgagaatcaagaagcaaatcacaagagagatgagagagacttagtctcttctacaatgtttgaggcgtagaagagagagagagaactaaagttctttagagcttcacagtttaaagacttaaagtgttctagacttagggcttgagacatagcactttagacctagagatattaggtttaggttagtgctctttatataggagagcttacaagaaatggtaggttgatatctcttcaaaagaggagataccacctatttgtta

SEQ ID NO: 268951 - DNA, 655 bp, Cannabis indica
taaaataatttccaacagcctccgcactctcgatcaggacggatacctgggcgagctggactactgcattactgcccacaacaatcgtgccacaaaccctgataaggggatgtgtgcctggtcgggggctcatggccagcaaggggcgctgatgcccttgcacaagtacttccgggatgtggcagagttcttctgtctctgcccagcgcagattactcccaagggcattaagtatttatccgctctttttgtcctctacgcttcttacggatgggatgctccttctccccacgaggtcgctcggttcttcgacctgaagtctacccccaagcaaggcaggtcggggtatttttacttctctcagctatgcttcaagtggttgagcaagacggaccacaagtccatcactcagactcggtttcagcagatttcgacatatcaccgtcctcccctcactcttactcttagggatagggctcaaaaacttgcccagttgcccgcagaagatagggatatcatccagttgacctccgatgaaaatctggtgcagtacgggctttacccagaagacttctcttctaagtccgtgatggggaagaaggggaaatctgctgctgcgcggcctgaacgagctcatccggagaatgagttgatt

SEQ ID NO: 268952 - DNA, 532 bp, Cannabis indica
aaaaaaataaataatctaacaacaaaaactcattagaaatacttgaacatgttaggtcttttttttggcaatttagttgtcaaaatattttttttaactaatatgcattttattgagcatttaaattgtttttattacattgattgtgtgtattttattgttcttttctatcttaggaaataatcatttttcagctagacttttctttgtttagaaacttcttatagaaagttgtctaattttgggaaacttgactttccctttttctaattgatgatttcaatttttcctttattagaacaaatcaaattatctttatttggcaggtttgaagtctaaataaataaactaaaaagatccagtagagtaaaaaaaattaatattatgcttcaattaccatttagtagaataaataaacataccagtaggggcattatgcccaatacgtcatcacaccaatccacctaatagatgcagaaatcttgtacttcgattcccaaggaaagccaatttatgcttttgaatcctccga

SEQ ID NO: 268953 - DNA, 644 bp, Cannabis indica
agagtccaatattcttgacaaaaaaccaatatttctatacactctcacgattgtctatctgcctctcctctgttttcctttaatatttttactcgatccttctttttagctaaataacaccctcctatttaacttgacatatactagtaaaatttaatataaatttttataaataaaattggatattaaattacattaatcatgtcaactataaaagtggttgtaatatactaataatactatcatacctatttcatttcataaaattgaatatgccaatattaatttctgaagatcgaaattatctttaattataattaattaaggtaactagatctatatttaaggaactttatgatattcttattattataataaataataattatataagtattatttaccttccttgatcgtcacttccatgtttaccacgttgtatatttttttaaaaaatatattataagtaactagtagtagtacaatgttataccacttctacaagtaaattaattttttttttattctctattattttgttataggttttatacttaaataataccaattttatggagaaagaagtagaaggaatgaaaaatgtcaagaactaattactaatatgttttttgttttcaaatttc

SEQ ID NO: 268954 - DNA, 1357 bp, Cannabis indica
cggctgtctgcctcaacaagtctttttacaatagactgggtgttgtacattatttctcttctctgatttagtacgacactcacagcatgttccgtgatagctaagtatattcctagttccttgccgtcaagaggttttgcaagtacgagaggtttttgcaagttgtgcctttagctgttggaaagcttttttcacactcctctgtccactcaaactacttgtttcctagcaggatgttgaagaatgggacacacttgtctgttgatttttgaaacgaatctgctaagcccagcgatccgaccagttaagcttttgcacttctttggtttttgttggcgagttcatgtccaggaggccttgaatcttttatggattagcttcaattcctcgggcattgactatgaagcctagaaactttctcgagctgactccgaaggaacactttaaggggtttagtttcatgttgtatttttgaggactttgaagcattcgtcaaggacgtctatgtgccccccagcctttctagatttgatgagcatatcatccacgtatacatccatatttcgcccgatctgatctttaaacatttgtttacaaatctttggtacgtagctccagcgttttttagactaaacggcatgactttgtagcaatatagacccatatatgttaggaaacttgtttgttctttgtttggtggatgcattttgatttgattgtagcctgagtaagcgtccatgtagcttaatattttgtgccttgctattgcatctacgagctgatcgattctttgaagtggaaaacagtgtttagggcatgccttgttgaggtctgtgaaatcaatacaaactcgccatttcttagtcagcttgggcagtagtacgggatttgcaacccaatctgagtagaaagcttcaattatgaagttgttgttgcgcagcttttcaacttcatcctttagggctactcctcgttctttgtccaacagccattgcttttgttgaactggaaggaagttgggaccgattttcagaacatgtgaaatgatagaaggatcgattctgaccatatccgcatgtgacaaggcaaaaacgtctaggtttgctcttagaaattttatcaattctgattttactttgagcaacaaaccttttttgatctttagctttctggtcgggatatcttgattgattttgatctcttctaattcttctacaggtcaaacattgctgcttgggtccccaagtcgaggatccacatcttcatccccgccttgggaagttccttacttgggaatgttttttcccttgtctgtgctttggctggaagatacgtccttcttagccttggccactgc

SEQ ID NO: 268955 - DNA, 1027 bp, Cannabis indica
tgcttaattgtcaatgacagtaattgtaatgatcatctctattatgcattaaccatattgaagcaaacaacaaaagaaaaactttagcggactctagtaacacataatcacacctttattgggcttttacacccaataaacccaagataaagttgtaatttaaatattaattaaggttatttataaaatatcttagagcatcttcaatagaggtgtaaataagtggtgaaaattaaatatagtttatttaacaaaaagtatgctctaatggtgtgccaaaagatgatgtaaatttagcacataataaattttgtgctaaatttggcacaacatttgctataatgtaaaatttacaccacaataaatgtactattttttcatttacatttatgatatttttattattttattagtatatttaactatcacattaaattatgaaacatttatatttttttattgtctaacatattaaaataataataaaattaattataaagttattagattttatttttttaataaaacattaattagatattaaagtttacatcaaaattttgtaattgtatattgaagcacaaagttaaaatttggtgtaaatttactacaaaattactattagtgttaaatatagtacaatttttacatctctcattaaaaatggtcttatctactgtctatctttaatagtgtgatattttttgtcactagttttagtggctcattcatgtgataaatgttgatacccaccatgctttactattaagaatacaaaatgtatgttgtttgaccctttggttattaaagtttttacctcttcatcaatgaaattattcttcttattttcaaaaaaaaaaatgatcaaaaggtaatgtgtttagaaaaatcggatacttgttgagcttttcttgctattgtacttctagaaaatcatcttgtcctctaaaaacaaaaacaaaattgtttttttggttcttgtatgaaattaagacaacaacttgtatgaaacaaaaacaaatgaaga

SEQ ID NO: 268956 - DNA, 877 bp, Cannabis indica
aaagactccccaagatcccaacgtcaccttcgaggccgaactcatcgagtcgaggataagagccatagcggactatgtaggatgtattttaaggacttgtggcattgatcaaaaatgaaaatgtcgtgttagatctgtcgcccctggtgaatttagctgctatccaccaaaacgacttactcgcgaggtacgcgagggagccaatggtgaaaccaatggcgaagcaagtactagtggctcgactaggatacgcgcttggagcctcgagcacatcagggttggagcaattctccccctgcgagattattttaaggagttcattaaccaccttggaatagccccattccaattggttcccatttcctacagaatccttgcaagtctaagggttctgtataaaattttaggatgggagtgccccactcccttggaaatagtctatctttattcggtcaaggcagttgtgcaaaaggcttttactatcttaggactcatacaagcgatcgtaggatcatcgttgggttaccaaacaacaccccttttaaggaagacttcttctagacaagtggcctctccccaattagcacaactgcttttcacataatatgtaagtagctatttgttgcaaactgggttttaaattactccttgcttttaattattgcctcgttgacttataattttttttttcttttgacagcggtcttgaaaagaccaactctaactcctgagatggccgagcgacgtaggcttctgctgggtcttccttttggtcttcggttagcggagtttttcttaaagaggccagtctgagatctgttggcctcctcgctgaaaacgagtatacttatgattataagtatcccaagtatacgtc

SEQ ID NO: 268957 - DNA, 890 bp, Cannabis indica
ctgtctgtagtagcttctctggatggagtggacatggatataaagcctgtcctacatgcaacgaggatactagtgccatgcgaatgattggtaagacatcttgtgttggccatagacgtttttcaacatccaatcatcgtatgagaaaggaccgtaaatttgatgaaaatgttgagaagagacttcctccaagatgatttacttgttctgaaatattagaacaagtaaatgctctatcacaacgagctccaaggaaacaaaaacgaggtgacactaaaactaactggaggaaaaaaagtatattttatgaactctagtattggagtacaaatgagttgaaacacaacatagatgttattcatgttgagaaaaatatttgtgatagtatccttggcaccctctttgataatgcaagtctaaagacactactaatgcaagacaagatttaaaaaatatgagagttcgtcaaaccttatggatttttgaagatgctcacaaaaggttgctgaaatcccatgccccttatgtgttgactgctgattacaagcaagtgttttgtaaatttctgaaggaagttaaattgccagatgaattttttttgaacttgaagaagaaagtaactgataataatattgttggattaaaatctcatgattgtcatgtcataatgcaaaggttacctccagtttgtattgacaagttttcttcgaaggaagtatcaagcatcataatagaattgtgtaattttttcagaattttatgctctaggacattgaatgcaaaagacatggagaaggcccaaggaaacctcattcacattttgtgcaaaatggagaggatttatcctccaatattttttgatatcatgatacatttggtgatacatttgc

SEQ ID NO: 268958 - DNA, 731 bp, Cannabis indica
ataaccaccctcgagtcattctccacaatcgcaaacttggatccgatatctaaagcaacagacacagctaagcagcaggcactactagaaaaaatatatttagtaacacttttttttaacttaataaaattaaaaggtaacacttttacaagtgttgcctcctagagtgttgccaaaaatttaagtataaaacaacacttttataagtgttaccatatgttataaacttaagacacatattacaacactagtaataaaaacgttgtcatatccttttttttattttaataattataaaaaaatgaaattaaaatattagcaattttttttaaaataaatattttgctaaattttatagaattttatactccattaaaattcaatattttgtaagaaaatgagaaaagactaaaaattaaaaattgtattatattgaatttctgaatgtaattaattacaatttatttttatacaatcaatcacatataatgtactgataataagaaaatctaattaataagaaagtggaaaaattttaataatgaagtacaacaaaaatatctatttcacttttgacttaatttagttctttcggaaagctagatataatccatataatttgttcatatgctccgaagattgattagctgcttcatcaatggatatcctataaagaaaacacaaaaataaattattagtatgaaataatatatactttatatataataccc

SEQ ID NO: 268959 - DNA, 1233 bp, Cannabis indica
ctgagaaggcgtccatgaaactaagtaactcgtgtcgagctgtcgcatccaccatcatgcttatgtgtggtaatgggaatgaatccttgggccacgccttatttagatcagtgaagtcgatacagacacgtcacttaccatttttcttttttaccataacaatgttagccaaccagtcggggtagtctacttctctcactgatcctatgtctatcatcttttggatctcttcgttaattactcaatggcattacggacaaaactttctccttttttacttgaaaggaggatgattagggtctacctgcaacttatgaacaataatgttaggatcaatacctttcatgtcctcataagaccatgcgaagatgtggtggtacttctttaggaaatcgatgagccgaacatagaactcaggtgttagctttgatactatctggacagtatgttccggaaagtctttactaatacacatatcatcgagatcttccatttcaggcgctgtaggtgcccttgacgatgtgggtgttgtaattgctatgttgaggcttgtttatctttcaatgttgtttgataacaatctcgcaccatcttttgggctcccctgatctccttcactccccacttagttggaaaatgaattacctgatggtatgttgatggtacagctttcatagcatggatccaaggacgacctaggatggcgttgttgactgagggtgagtcgattaccaagaatctagtctaaaggatgactcctttcgcatatacgtgcaatgttacctcaccgatagaatgcttctgttcaccatggaaccccacaaacacagttgacttacggatgatggtggattcatcaatctccattaccctgatagcatgcaaaaacaatatgttagcataacttccattgtctattaatatacatttagttaaacaatttgaaataagcaaagaaatagctaaagcattgtgatgggaattgagcaaatctgaggcttcatcctcctcaaagcttatggtttgtccagtgtaactcactgctggatttcgtggccttctgtccgttcctaccacttctctcgcatgccccttagctgttgagtacatcatcctgctaactttggaccctccatatattacactacaagttctagtgtgttgtggaggttctggtggtgtaataggtctagtgtcccctccagctatgatactcttgttggaaatatttta

SEQ ID NO: 268960 - DNA, 807 bp, Cannabis indica
aagtcgagctaatgcatcaacaaatgtgttttcttcccttgaaatttgcttgagagcatagcttttgaattgtgcaatcagtgtattttgctcagatatgctatcatcttttccctccgagcctcgtactccccagatacatgatttaccaccaactgtgagtcactgtagatctcaatgtgttcgactttcatctcctgagcaagtcttaggccgccgataagagcttcatattcagcttcattattggatgccttaaatctgaatttgaccacagcgtgtaggtgttgcccccaggtgtcacaagggtgattcctgtgctagacagttgatctgtagctgacctgtccacatgtagcctccaagttggcttgtcttcgctattgctcagctgaggtacttcgattagctctgggttactttctaaaatgctctcttctttacccgtacattcaaccacaaaatttgccaaggcttgacctttaatcgctatttggggctgaaaggtaatttcatactggcctaactccactgcccatttgagcaactgtccagaggcgtccgatttttacaatacttgacgtaatggttggttagtgtatacccgaacaggatgagcttgaaagtagggccttagctttcttgttgctaggaataggcaataggtgagcttttctatcaatgggtaccgaccttcagcttcaatgagtctgttgttgatgtagtagaccgggtgttggatattgttctttaccctgatcagtacgacacttattgcatatttcgtgacaaccaggtatattccta

SEQ ID NO: 268961 - DNA, 627 bp, Cannabis indica
ctcaatgcgaaggcgagtgattagactttccaaagaaaattcttttattttgtgcctgagaatatttttagaatctttccaacgaggaggcaattggtcaataataacaacaatttagaattattcatctaaagacataccttcaaaaattatttcacgaacaattttttgaagttcatgaaactgagcctctattgacttattgtaagtcatctggaatttgaggtagtggctaacagcgtacttcttagtttcagcttcatcagtgtcgtatttcttttgaagtgcatctcgaatctccttagtaatcttgtcaaaattatagtagtcatacaaatcatcagataaaaccattcagaatataatttttgcacaaaaaatcattctcgagccagcttgctaaatcagcagtttgcttctgcttttcatcatccttaccagtatcacaaacaacaggtttatttgtcgtcaaaacataagaaacctttttcatagtaagaaaataatattttatgttccatcttttaaaatggtttccctcaaaacgaaaaaggtgtgtttaaatcaacaacaccagaattctcatcggtagtcatacctgtagaattatttcgtgagcaattttct

SEQ ID NO: 268962 - DNA, 639 bp, Cannabis indica
tttttttcttatatttaggagggatgatttgaacttgagagttcctttttttataagaagaatgtgaaaccgactacttgtattattatttattaaagggtaatgttatggtatcagagcttatggcttatgtttcatagttttagtttggtgacatttacattaaaccaaagtaaataaaagagaaggtatttgaatcttggtatgaactaaaacttcaagaaaatcaagaatcagacttacgaagatcaagaaaatatgtccactgcaaaaatggatatagaaaagttcagtgggaataatgacttctttctatggaaggaaaatatgaaagctcatcttggaaacataggattggatgaagcattgaaaggagaagataaaatgtcagtaacattggagaaatccaagaaggatgagattctgaaaaaggctagaaataccatagtgttgagccttgaagatgagagcttgagaaatgacgaccggccctaaaaaccaacacaagtgtttccagcatgctttttcctcactcgcacacttcctggaaaaacttctcaggaggtcactcatcctgaaattccccaggtcaagcacactcaatcgtggagttctttcaagatagactactgaaaaaca

SEQ ID NO: 268963 - DNA, 905 bp, Cannabis indica
tttgttgtagggaagttggctaatattaccctacaatctactcctttagagcgaatcagataagcacaattgcaagatccagagtttgtgaaatctcgagatagggtttcggctaagaagactggtgactttacagtggatgacacgagaacgctacgatttatgaatcgtgtttatgtgcctatggatgatgatataaaaagagagatcataaatgagtctcatacgactccttactcagttcatccatggtcaacgaagatttaccaagacgtcaaggccatgttctggtggccaggcatgaagaatgacattgctgagtatgttgctaagtgtcttacttgtcaacaagtgaaagctgaacatcagaggcctgtaaggttgctgcagccattgaatattccagagtggaaatgggaagacattgctatggacttcgtggtagtattgcctagaaccacgagacaggtacgactctgtgtgggtcataatggacaggtttacaaagtcaacgcacttcttacctgcttggacgaacttctctattgatcagtatgctgagttaaatgttagagaaattgttcgtcttcaaggtgtcccaaagtctattgtttcgtatagagatcctaaattcacatcaagattctgggagagtctacatcaagctatgggtactctaaagtttagcacaacatttcatcctcagacggatggacagtccgagaggactatttagatcttaaaagacatgctttgggcatgtgttttgactttgaaggatcatgggtaaagtactttcccctgatcgagttctcgtacaacaaacaagtaacaagcaacaatcagggtggcccctcatgaacttttatatggaagaaagtgtagatcacctattcactgggatg

SEQ ID NO: 268964 - DNA, 585 bp, Cannabis indica
tttcatctcgttccttgcttcctattttcgtacaaacaccggagctctttcattgaactcattgatgttttttatagggcgaccctgtaagtcatcccacagcttgcctccagctgtcgagaggtcagtcgtaatccctgcttgaagagcagtaagttgtatattgtcgttcaagtttctaactctagcagcgactgtactaaattgactcaagtatgccttgagtgactcgcctggctgctgcttcacattagtgagggaagacgcttcaggttgcctatctctcgctacttgaaactgtttcatgaaatccttagacagctgttcccaagagataatcgagtgatgggtgaatttattgaaccagctgctcgctgccccagtcagcgaggtggggaataaaatacaacgtaagttattcgtgacattgctggctctcattattgtattaaagttgttgaggtaagtgactggatctgtagtcccatcatatgacgagacgtgagggtttttaaattttctagggaaattcagcgctcataatgtttgaatggaaaggttagagctcctcatctgagtcgtaat

SEQ ID NO: 268965 - DNA, 661 bp, Cannabis indica
gaatagatgcattaaataaaaataatagcaaaaatttaagtaaaaaatctttaaaaaaattaaaaaaaccataaaaatctaaaaaaaatagaaatattagcatcttgaatggatagactgccacatcatttgccctaacagtaacattatataaatatatagatagattgataggattctataaataaaatcaagaattaagtagggctgtgttcattgatcactgtttttagatccaactaggtccaatcaaattatacattggatgttggatttctccaaccgatctaattttatactgtaggctcaaccgaaccaaactgatccaataaatcattggattgaatcgattccatccaatagatgaattcttgtattggatcagatccatccaatattttttagaccaaattgtgtccatccaatattttcaattcaatattaattggattgattgaatccatccaatccaatccttaaaagagtaaaacttgatttttcacctaaacggctaatatattagttaaaaatattacaacccaacataaatccaacctaaatataacataagtctaacataaattcatcctaaattgtaacctaatgactttaaaaaaaaaattaaaaatgacttaaagaaaacattatgactaatatagca

SEQ ID NO: 268966 - DNA, 395 bp, Cannabis indica
tttatccaactaattgtatcattcatgtgtgtacacaactttgttcatactaaaatttaaaatttcaagtagatatgaacataacacattaatgacaatataaattatcataattctcgatgcatatgaagtacttcaggacttttctactaatgaacaaactttatacatttgatatttctcaatatacaaaaaaaaaaaattaaattcttcaatcatttataatataatcaaaaactacttcaaaagtactatcagaacgtataatttttgtaatttatattgcatagacaatatgtgtttttctatataataatttacttacatgtctttatttcatacaaagatttttgttcatatagtgcgaccgactttgaatttatatcacttaagac

SEQ ID NO: 268967 - DNA, 1044 bp, Cannabis indica
aaaacttggacattttttcatggtggcacggacatatggttgaatttgaccgctccgtgatgatccatgcactcaacatcgatcgaagcatctaacctgttcagcaaaaaaggaagttgttgcacaagaagcgtgcccaagcgctccaagatgaggtcgcgaggatatgagcccatgacttcatagcggaggcattctatccattatgggtctccaatctagtactggtggccaaacccaactagaagtaaagagtatgcattgacttcaccaacctgaacaaagcatgaccaaaggactacttttctcttcccaaaattgaccaccttgtagatgcctcagctagccatgaaatcttgagtttcatggacacgtactcaggttacaatcaaataaagatgcatccaccagatcatgagcacactagcttcatgacagatctaagcctgtactgctacaatgtcatgcccttcgggctaaaaaatgtaggggcaacatatcaaaggctagtgaacatgatgttcaaagatcttatcgactgcaacatggaggtgtatgtggatgacctgcttgtcaagtctaaaaaggctacggggcacgtggaggacttagacaaatgcttttatatccttgcagctacaacatcaagctcaacaacctcaaatgctcttttggtgtaggctcaggaaaaatccttggcttcatagtcaactctaggggaataaaagcaaacccaaacaagatccaagcacttttggacatgaagtcgcccacaactgtcaaggaagtacaatgtaacaccctaactagcctagacgttttaacgtgattttaaacttgctatgcagctcttgctaatcaacgaggttaatgaaaatcgtgattaattaaaagtttgcttatttaattaaaacttataatattacgtacaaaatattacagtatcccgtttacaaaatattttacaaaagtatgctattcatttacaaaatatttgtcgcccagcgactaacaacaaaagccctgatgtcccgaggatcgtac

SEQ ID NO: 268968 - DNA, 702 bp, Cannabis indica
atgccaaggtaccataccaatggtggaggagatggttgtgtccaaaaaggatattcataaatataatattccattaccatgagctctttgacttgaggaatgcaaaaatgctcttgttgaattttttcaaaaactgggcagttttgttgtgaaaatgctacagcattatgagcagcaacaaatgttgataaacttgaaatgcttgcttcctcctccttttcttcattactttggattgaagtgagctcttgtaattgctcaaaattttcccaaagtatctccaactcatcaccattcatcaaaataatattttcactttcttcttccttctttgaattctccatatcactacccaaagtttcatagggtttatcacacaactcattgaccaaaagctcaatttgtttctccaattttctcaatgatgaagcttggctttgaattaacgcatcatttttagccatgaactccatcatcaacacttccatgagctttgttggaccatttgatgaggctcttcttctatgttgaactcttgaaaatcccccaatttctcatcatttggtccttgagtgtaagtgtcaaaatttagctccaaattgttgtagttgccctcccaaacatggtcattgtttggacaattacaacaccactcattgtactccgtcatgtcttccaacatccaataggcttcatcgattg

SEQ ID NO: 268969 - DNA, 982 bp, Cannabis indica
tatttccgctgaaattacaacagttatctatattcgatattttcacacttgttttatgtgacacgctatattctaatacaaaggaaatcactttgcaaggaaaaacatttattttattttgcactaccaggtgtggctgaagtaattgtcatctcagttagatcaaaatgcaacatgggatcagatggtgtttcagtttaactgtcttgttattgtctaaggctattttaaacacttttacacttctttctcattttagttagttgttgaggattgtaaaaaaaaagtgttatgtttgataaatggagtttatgtggctcttcagtttcataacttaaaaactgtttttaattttttaaaactcaaaacagtttttaaaaactaatagggactgtttggcaaaaattttaaaaacagttttttaaaatctttaaaattaaattttaaaaactagaaaagagaaaacatcaaaatgttgttttcaatttttaaaaataatttatttttatctaacatattatattttatatttttgcttgcatactcggatcctagacccggaaccattcccgaacccgaacccgaacccgaaccccaaatgaattcatgtcatggtatggtattaaaatattaatttttttagtaagaaaaaaatctgaaaatagttttaaaaaaatttgtgtcaaacaccattaaatttttaaaatgacaaaaaactattttctattctcactttcaaaaacacaattttaaaaactgaaaactgaaaacacagccaaacagactctttgttttcttcaaatttaataaagtacatagtgcataactttattagagtctcttattcttttctacattatttctttaatgagaatgatatttctattgagttcatatctattatgtatggcgtgttagataaattaataataaatccaagatttatttgtatataatatagaacacgataataatatatgat

SEQ ID NO: 268970 - DNA, 527 bp, Cannabis indica
atattttgaatcaaaattttcaatggctagttgttgaagctcctcctcaaaagtccacaaaacaacaaaaatgatttactagactgaatattttgtcatccatcttaaaacaacccactaagctattaaaaaatggcttttttttttgtcttatcattatttttataccaatatgaaaagaaacattgatgaagatagccaggttcacatcagtggcaaataagaatatgataaaatatttcaaaatggaacagctaaattcagcagaaaaaagctataaaaaaaaagtccaagaatatggcataattaaaaaatttgattacctatttgtgggaccttatagaagaaacaaactaagtttggtcactattgaaaggttagttcgatctcttattatagcaaagaaatatataactctatatttatctgtgcttcaatgatttttcaagtattatctaattggatatatttctagcatatcatatatataactctatcaaaaataaacccaacaatgcccaactcaa

SEQ ID NO: 268971 - DNA, 709 bp, Cannabis indica
ttttggttggacttaattgggctttttcatgcggaatcccaattaaagagatgttttcaaatttgttgtctctggtcacagctattaacaaaggaagggtgttctttaatgagctgggtatactacttgaggatatcatagttttgttgtctaaactttcgagagcatttttgtcctatgtggctcaggatgcgaattctgcagcacatggtttagcaaaacatgcccttgagaaacacgatgagctatcctggttcaaggaggtgccgccgccaattatggattgctgctttgttaatcatgtgtgattttaatcactgcgtcaaaaaataataaatatattaaaaattaataaaagtaaaatttgatacaatattattattatttaatttttagtaaataaatcaaaaatataatttatttcatatattaatttaaaaaataaataaatactctctgcgaaacaagagttgtttaccagttaaataataaaattaagttatttaatatatttttttttttcaaatttatgatttgagttgctcggtgatttttatgtgggttgttatgtgatttttaactgcaatttaaattgttcccttaattgctatgtgaatttttatgtaaatttctataaaaatataaacaaaacaaactaatttgaggtctaaaaataaaaaatccaaaaaacttagaggaaattacactc

SEQ ID NO: 268972 - DNA, 695 bp, Cannabis indica
aaaaattaggataacaatatatatacatattttatatatgtacaatagaatctaagtgagatattgtggtgaaccattgcttgcccgattgaggggaatcatctcttttttaattcaaagttaaaccaacaaagttaaaaatatcattaaaagtatctacaatctacataatttttatttttaatatatataataggggatttactttatatactatttttttaacttttttttttctttttatttttacagtttgtgtagcaccgatggttacgataattttaatgtgggttgctatgtggatttgtgttgcgatttaggtttttcagttagtttctatatgggttgttatgtgaatttccataaaaatatatatatatataaaaaaaaaaactgatttgaagtgttaaaatgaaaaaactcctatataataatattagaaaattaataaaaaaatattatgttaagttatagtatattcttctcaacactacaaaaaattttacttttagtagtcataacaaaatttgtgactaaaagtaaaaaagttgtcactaattataaattgtcatttctacgttgtgactaaaaagtctgtggctaaaagtattagtcataaaatcacaatttgttgtgactaaatgtgtttttagtcataatacttgttatgactaaattaaattagtgacaacttg

SEQ ID NO: 268973 - DNA, 692 bp, Cannabis indica
atcacaatttggaaatgtgtttagaattagacataaactcactctagatgtatgatgatacaatgaataacctagagtgattagtaagcacagttagaataaataattacgaattttggctaaaagtgtgtgaaaagtattttattagattttaaactttggagctcttaaaatcacttgaatatgtttggcatatagaataaatgcttagtcaacctgaattttgagtaaagaatgagtttttatagtgaatgaacaaaaactaatcgtttatagttgttagcacacttttcaaaaaggaatcctgagaaaaacggtctgccatttttgtgaaaaatgatctgccatttttgtgaaaaacgatctgctatttttgtgaaaaatggtctgccgtttaaaagcggtagactgaaaacaggacaggggcaaaatctcattttttcagctctaaaatgcgcataactttccactcgttaatttgatttcagaatttcagtttttttctcttaattaaatgatatgtgatcttaaaaattaattttagaaattttatatataatttttatgaaataacttgttgcactagttagtgggctgaaattcgtacttagaacattttaagtatggacttgaaaattactgtacaagactaggaaatataaataaaccttcatggagtcttatcttgagtt

SEQ ID NO: 268974 - DNA, 633 bp, Cannabis indica
aaattttcatgattttcccacctgcattatcaaaagataattcttgtacattaacccgctcaaaaatcacacattaatcatctactgatattgaaaacagaatcaacaaataacaccgacgcattaaaggattgcattgaagaagaaaaagaccctgtatctttacaaattataattaaacttgactgaatgtgagtgaagatcaattcaaaacatctttatagaatgtgtgtaggtttggaaaagttggtcattctttgtctggataattgaacttgactgaatgtgagtaaagatcaatctgtccgcccctgtaacttccacgtttctttttggttttttcaagtcgaaaaacactaaagagaatataaaaagaagactatgagactacagacttcaagaaggctacagaatataaaactcagtgattactggaatatcatctaatgggcttctgaagcaaattaaacaaatacccaagcattagaatcaaacccaaaaaaaaaaaacaaaacaaaaaaacatgtagtctttattataatatttgatgtgttgttaaattatatttaaacaagcttcaattgtgagtgtgagaagtgagtgttgggttttatgtcctaaataaaacccatt

SEQ ID NO: 268975 - DNA, 905 bp, Cannabis indica
ataatatatatgttacctcataaagcaaccatcttcataacatcacgttgcctaatcacgcaagtcgatgctttaatctgatattcttgtattgcatcgcctaatcaggcaagcccatgccatacccaagcacccatatgtcgcataactgcatcacctaatcaggtgagtctatgccaaaaacttgcacccatatatcatataattgcatcacgtaatcaagtgagcccgtgccacaatttagcaccaatatatcacattgtctaattagacgagctcatacctacgcccggtacttatcatatgtcactgacgccggtacttacacctagtatgttgccaggaaaattgcatcacctaatcaggtgagcccgtacctacactcggtactcatcatatagtttggagaaagaccggctatacgtagatcgagaaagaccgtctacatgtagagagccttggcctctacacaaacctcattcccctcatcagaagatcccatttcctacagctgagaccttattcccagcctcaaggaattcctcgataccagagagaggttggcacaaaagtcttctggtgcaagtttgggtcttgagttggctgtattctctgatagaaaccacgccaacttccctcccggatccatccaaaatcatgccaactttcttccgggattccttcttagcctgaggaggacctctaagatcgctcacaagatttatgtctattcctgtggagacaaagaaaaaaggtcaatggagaaacaaaaaatgtataaaattaataatatgtatgatccaactcagatcaccatttacaagggataatactcacactaaagaatcacttatgataattgcccataacaatcaacagggttcccttggtttggattggtcgga

SEQ ID NO: 268976 - DNA, 916 bp, Cannabis indica
cccatgataatattgtcattatacatcattaattgtatcgcaagatatgccgccaacatgtcgtgaaatatcgctaaacactaggccacgtatctgtaattctattttgcgatgattcatgacatatttgcgatacatgttacgatattcattcttttttttattattatttttaacgaaatttcttacaattttgcagatggctcctgaacttaaacgtccaatttctcagcattttataggacgtcttacctatcagggtacaaataggtttagagatatcaaagtcaagtttacagagcttgagttgattgatacaattaaggctagccctttctgacacctctgggaagctggagagttgactttctctgacgctttggtccacagcctcctcttatggaagatgaaagttgataatgaaaaggaagatgaggtttggtttcatgtaggcaaaaatgacatgagatttgggcggataaaatttggagttattaccggcttacctatgggtagtgcccctataaagaaagaaatagaagccaagtccaaagaccatctagtcaggacgtattttgaagggaaaagttatgtgcagttggattcattattgctccaactacagaggtacgaagtaaaagatgatgcctacaagcttagactgattgctttcattgaaggtgtattagtatcaaaagaggaaaatgtccaagtttggcctgacatgttaaaatttattaacaatcttgaattcttcttcaagtatctgtggggtgagcatgcttttcgtaagttgatgcagacattgaataagaatatgcaacattacaaggataatgttgacaagaagaatgggaagaaggttgcttaggaggcaaaatacaccattagtggctatgtacctgtcattcagtac

SEQ ID NO: 268977 - DNA, 689 bp, Cannabis indica
ttggtagtatatcttaatttcatcaattttattttggcaattgttaaaaaaaatatgtttaaacaaggacatgcatagcatggtatatgttcacttattgaaactaagatcatcagtcgtcctgtctaaatgtaagcccatgtgattcgctgaaattatctactaataagcaaaatttggaagaaaaataaaataataattaaaaaaaataatgaaaaacaaagaagaatgattaatattatatgtatgctcgtatagacttcgacactattatataattactaataaacaaataagaagaaaaattagaaaaaaaaaagtaaaaagaaattgaaaaaacgcatgagaaaaaagacggtaaaaatgtagaaaatacttagaaagatattttaaaagagaaaatagagtaaaaaattgagagaaattttttgagaaaagggagaaaaggtgaggtttaaaaaaaggacaaaaatattaataattggtacaaacaaaaaaaatacacaactccaaacttgacaaaaaaaacacaaattactaagataatcttatttagtttgagaaaatacaaaatagcaaaggattataggaaaagctcacctaagctgtgtgcaacaagtgaaaaaacaatcttacaaaattatgtattactggaaagaaaaagttaaaattctaattaaagtgaataa

SEQ ID NO: 268978 - DNA, 1389 bp, Cannabis indica
gcataactttttttgcctactttgggaagcaatcattcgagccttggtcttgtctatagcgtcattggtcctctgaactaattccggacctaagtacttcctttttccaatttcgtcccaatgaattggggagtgacatttcctaccatacaacatctgatagggacccatccctattgtactttggtaactgttgttgtaggagaatttaattaaaggcaagtacttactccatgaaccctcaaagtccatgacacaggctcgcagtaaatcctctattatctgaatagtcctttctgattgcccatcagtctaaggttggaaacctgtgctaaacttcaactttgtacccatagccctctgaagactcacccaaaatttcaatgtaaactttggatctatgtctgaaacaatggatttaggagctcctggagacgaactatctcctttacatacaattcagcgtactgatccactgtataggtaattttcactggcaaaaaatgagctgattttgtgaatcggtccactatgacccatactgaatcatacattcctatggttctaggcaaacaaaccacgaaatccattgcaatgtcctcccacttccactcaggatgggctaatggttgcaataaccctgccggcctttgatgctcaactttgatttgctggtaggttaagcacttggacacataatctaccatctctcttcatcccataccagtagaagtagggttttaaatcatggtacatttttgtggttcccagatgcagtgaataaggtatagtgtgggcttcgtcgaggatttctttcttaagctcattaatattaggaacaaaaacccgagctttgtacaataacatttaattatttgagattgaaaagtctttaggtcgaccggccatcacctcatctcgaatcttgttcaactaaggatcttctaactgtgcttttctgattctctctagcaaatcagattggagtgtcaagttatgcaactttccaactacaaactcaattcctgcattaaccatctctgaggccagttgaggagctatcataatagtggtgaaaacctgcctgtgacctctcctactcctctctgaggccagttgaggagctatcataacagtggtgaaaacctacccgggacctctcctactcagtgcatctgccacaatattggctttcccggggtgatacaaaatctcgcagtcgtaatctttaaccaattctagccaccttttatgccacatatttagatctttctgggagaaaaagtatttgagacttttatgatcagtataaatctcgtatttttcaccataaagatagtgtcgccatatttttagagcaaataccacagcaacaagctctaaatcatg

SEQ ID NO: 268979 - DNA, 635 bp, Cannabis indica
aaaagccctttaatttaatgagatcatgtcaactaagagaagattaagagtaagtttacttctctgttaatactaagtactgtcccacaagttagtgagctaaacttgaaacttataaatcttaatatgctatgtaaatcactttaacatgactaaattaaacttatactatttgattagtgtattatctttatgtagatgagatttcctgcttgatttgcatgttttgatcaaaagttgatttttctcgagagatgactttgattttggctttgacttaaattttcgagttatcttttgactttgagcttttgaaatccacttttggataggatcttgaatttttaatctcttgatgaaacttttgctcttataaagtatgaaatagttgatatacttattgaatctatttctttgattatgtttgacttttccgagcaaatattaatactttgtgaatttctagcaaaatgatcaaaaattgattagtaacaaatattaatcaaaacttatttatcatcaaaataagtgagtaattgactttttgtcaacacaatatagagaactttctctaatgcttcatccaaataagaacaactaaatatgagctgatgatgctttcaagtttattttag

SEQ ID NO: 268980 - DNA, 518 bp, Cannabis indica
aagttaattatgttgctaattcaattttaattaggttagactaatataattaacagaaatttacacataccaacgaaattttaagaaaaatatcacaactaacgttcatgtttttaattgtgtaatatacttttggttttgtaattttttggcaagtatatgcgtaggtgcgctatttatttatttattatttttttatgtatacgctaactttttcttttgcctatctcttctatatattttttttttattcaaacacatatacattgaagtcacaaatttttttttctttttattaatagcaatctaattcattttaaaatgatgttatacttatcaaatattattcctctctctctcttctttttttaaaatagtttttaaaatcttttctaactatatatacagataatcatttagtctcaaaaattataccatcataatctatattctttaatgtaatcattttaatatgtgagacgcatattactttttactgttactataaagatatagaa

SEQ ID NO: 268981 - DNA, 698 bp, Cannabis indica
tttttattgtgcgtataaaaaaaaaataattacgtgaaaatatttaaactttaattttgatatggtaaactatttaaaattttataagtgattatatataactataacatacacgattacgaaaattattttgatgccaaaataaataaatatgatctagattaatttttataaatctattctatataaagtgtgtctatataactgaaattcttggtttatgagaaatttatggatgactttattatttttatttaataaaataataaaatattatttatatatcataaaataataataaaacaaatcctattaatatttgaactgatatttaacatatttcaactctatatataatcacaactataactctaaaaattaaaaatatatatataaaaatattaggttttcttccattatttattgtattccttttcctattacaatttggacattaatcacatctaatattccaatccgcacttctcttttttcttcttcacaacttaataacaaattatataagtaataataagaataaaaaagaagcgtgacttttatcgaagttcacaaaaccaagcatcaatagcgaaaaaaacccaacaaaatttacagctaataaatgattctaagtgctcggcatatgtattagtttgcaggagtaaagttctttaaagttacgtaataatttacatata

SEQ ID NO: 268982 - DNA, 610 bp, Cannabis indica
gttcaacatggatttatgtaaagttggttctgttcctattcaaaaaggggacaagttcattaagcaacaatgtcctaagaacgacttcgaaatagaagcaatggagaacatcatgttgacaatcttcgagttgttggttattcagattcagattttggtggttgtgtagatgatttaaagtcaacttctggctatattttcaccttggcaggtgctgctatttcttggaagagtgtcaaacagactttgatcacatcatctactatgtatgctgagtttgttgcatgttatggggcatctttgcaagctttgtggctgaagaattttatttcggagatacgagtggttgattctatttccacacctatgctaatctattgtgataataatgctgctgttttcttttcaaagaataacaagattagtagtgcttctaaacatatggaaataaagtatctcactgtcagagacttggtcaagaaaggagacattgtcattgaaaattgcaagaccgagtcgatgttagctgatcctctaaccaaagggttaagtgccgtgctgtttaataaacatgttgttgttgggttttatgccctaaataaaactcttt

SEQ ID NO: 268983 - DNA, 1156 bp, Cannabis indica
ttctactttcgtgataaattaaaatatgtaacaggcatataacacaaaaaccctataagctatccaaaccacatatgtactcacgtcctatatcaaaatttgttcctattttactataggataattgatactcacttctcagatctcgtatcaacaattaattgatggccaaacagttaaaagaaataaatacgaatgaaatagaacatataaaaaattaggggagtattcaaatcatattaaaaccataaatatatgtcaaataatatccatcaacacactaataactgtttagctactcatgttcattgtaaacaatcgacacaaattaaataagagcataagaagaaaatagaagagaagaaatgtttgaaaagccttctaggtcatttcttttctctgatttttgtactccctaattgcttgttttaaaatatgaaagttcacctctttttatagccgaaaaaagataaaaagatatgaaaatatcaatttttgaatttttaagggagcaggcctcgacactcaattcttatgccgcaaccgtgtgtacgaataagatatttcccaagttttttgaagacacgggtcaagacactagatttctgtgccgaggcataacacccctaaatttgggtagtgggctctttacgagtttcttcctcaacactaagatctagtgtcgaggcacaaccacgccttagcccaatttgacttctcttccaatttttagccccttagagcatctccaaggatacactaaatttagtgttacactatcactaaatttggcgtcaaaaagtattttcactccaaccacaacaccaaaaattacactaaaaaatattctttattattatattaatttttaataaaataaaataaaaattaatatcatattaattaacaaaaattgccacaattgttatatttaaaagagtcacacgatagaaaatttgaattttattttcgacatgttaaatttttctaaatttttggaatttttgcaagatgtcttaaataactataatgtacacgactaaaaaaaaaactacataaatctcttgaatatcgaaacaggtaggagtatatcagtgcggcagttttaaagaagtacagttttcggcgtattaaatttttctaattttttcaaaat

SEQ ID NO: 268984 - DNA, 801 bp, Cannabis indica
atatatcccttcggggatatttacttatgttattatataatatcttcgcagtacacaggtactcgcgtttttggtttatttatcatctcgattgtggtttaattacagcttggtgtaataaatactaaggtagaaaaattttaaaacctcgaaaaaattcataactctttgatagattaagcaatagtacaaagtgagtgggttatataccccctatacttagaatatttatgtagataaattgactaagtataaatacatagcgagtacaaacgatacaatgcgagtactattgataataaaagtttaacctttcaccattccaagctcttcaaattacagttccatcgagttctgcaagtcagtatgttgtgttaccaattttttctgcgatgaggtatggtccttcccaattgtctccgacaaccccatgtgttgggtttttcgtgtttggcattacttttcagagaaccaaatttcctactcgcagaattctctccttgaccttagagttgaaataccacgcggttcgctgctgataagtcgcatttttcaggtgagtctgatcgagcttttcttctaaaaggtcgaggtgaagtgattgtttctcttcattttgtacaacgttaaaaacatctcttcgtagggaacctgccccaacctcgactggtatcatggcctcgcatccataggagagcgagaaaggagtgtcaccagtcgtggatcgaggggtcgtgttgtatgaccataaaacctgtgaaagctcttctggccatatcctcttacgctcttcgagttttc

SEQ ID NO: 268985 - DNA, 603 bp, Cannabis indica
ttgttaaatttaaggacttttgtctaatttcatttaattttactgtttctgtgattgtttatgtactaaatcatgttccccagactttgatatctaccaaatcaagtccctcaaactttggtatgtactaaatcatacatcttgaactttcattcatgttaaaattttttactaaaataaagtccttaaatttaacaatctcaataattcaggaaaaatttttaacgtccaaaaaaattcaggggcacgatttagtacatgtcaaagttcagggaaaaaattactaattagccaatttttaaattcttatctttaatataaaaatattaattgtatatttaatcatttttaaatatatatacatgtgtatattaaattgaatcgaaccaatttcttttacatatcaattaacatctaatttgcacaagtacgaatttatgatttttcaatccaatctaattcaatccgcaagtgcagatattcgcactttgcgaattggattagatcgtgcatattaaattggattaagtattttagcaatacccctatgtataagaactcccttacgagtattttagcaatatgatagtcttgattagaaat

SEQ ID NO: 268986 - DNA, 699 bp, Cannabis indica
caacctgggccatttaaaatggatttttttttaggaattcttttgagcatcttctctgtcttcagaaaatattgagattcaactatttctagggaccaaatagaatctctaaagggctaaaatagggatctagcgccgaggttgacacttggggctgggccctacgcttaggtttacatattgtcaacctgggctattttcgatccagttcaacaaagtgtttcgggcatttttatcaataataaaaaagatttaagtaaactcggggagaaaaccacaatctcgagtccctagaaacagggcccagcgtccaggttaacctaaggttgggcccagtgcctaggttgattatcaacctcggatgccgccttcaattgctcgaatgccaaaactaatgtgacctttgaatcatgcatggtcaaaaacagggtaagagacatcgtcctcaagttcagaagccttggaagtatcaaaaacaaaatctcaggagctcgagagaaagggcccagcaccacggttgacaaaaggcctggtgcgctgggttctgcttatccgaatctgatgtcatttcgaccgtctgtctagtttttcacaattacaatgatccttgaagtcagagaaatcaaattcacaagtttgtatttcttatttccagcacacctggaaatgaagagtttcgagtctctcatttctgcaaaa

SEQ ID NO: 268987 - DNA, 810 bp, Cannabis indica
acacattgtcataagatgaaatctaaatcactactggcatctgtcatgaataagcatcagtatacagatatctggtaatataaaacaattatactaataataagaatcatattcatttggaaatataaattatatatatatatatatgttacctcataaataaccatcttattatatcacattgcctaatcaggcaagtcgatgcgttagcctgataatcatgtattgtattgcctaatcaagcaagcccgtgccatagcctagcacccatatattgcacaactgcatcacctaattaggtgagttcgtgccaaaaatctgcacccatatatcatataattgcatcacctaattaggtgagcccgtgccacaatatggcaccaatatatcgcatcgcctaatcagacgagtccgtacctacgccagttacataattgcattacctaatcaggcgagtttgtgccacaacttagcaccaatatatcgcattgtctaatcagacaagctcatacctacgcccggtactcatatatcactaacgcccatacctacacctgatacatcgccaggaagaaacccaacaatggtttcgatttatgccataaccaagcattttcatatcactaatccccgtacctacgcacaatatatcgccaagtatatcgcatcacctaatcaagtgagctcgtacctacgctcagtactcatcatatgtccctaacgcctgtacctacactcagtacgtcaccaggtatatcgcatcacctaatcaggtgagcccatatattatgtccacagtatcatcacatt

SEQ ID NO: 268988 - DNA, 523 bp, Cannabis indica
ttttttcaaaaacaaaaattctatttttatttttgtgattaaaaaatttaaaaacaaaagtactaccaaacaccaccatgaaaatgaaatgaacatgtcatagcataacgcattcaaaaaacacaagcagaatttaacagcacttttgaaatatgctagcttcagcatcatatccaaagcagcctattcaatgtctacaacagggttctttaaaaggacagcaactgcagtgcaaggcgttctctttatttgattttagtttttgtttagaaaactgcaatgtgttcttagtttagtcttttttagagattctctcaactcaaggaaaacacaaacgaatgattactatgcagcttaaattatattcagaaattttttattttaccaaaaagttcaaaaaatcaggtaccattggaatggtgcaactccgaggaacaaattgaattttaatatacagtatgacatttgacatatatattttttaggacaagaatataatgcaatttcaaaaataatatatgaa

SEQ ID NO: 268989 - DNA, 905 bp, Cannabis indica
atattattattattttattattaaattttacatttaactttgtattattattattattattttatattttttaataaattattaaataagcattaaataatatattaaattttgtatcaagattacaattatgtattggagtacagtaataaaaattgatgtaaaaatattacaaaactactttttgtacaaaatatagctcaacttttacatctctctcattgaagatggttaaggtctcttcaacttaattttaatgaaataaatttttaaaataaccaaaatgccctctttaatatttatttttttttttttgtaaaatttaaaaataaccaattaataagcttaataaatattaaaacaaaaaaataagattatttttacaaagaactctactttcacaatacatggggcatcttcttttccttgagaattgctcaaggaatctttcacatgatattctccttcaccatgaaagctctgattttttcttcatatctccttaaggtaatgtatttcttccagtttctttctttttgggttaggatgcatagtaatttcatcttccttaaaaattaaatggttattcaaattttatggttttaatagatgattatttaactgggttaaggtgtgaaggaacacatcacatagcaacaatggaggactctaattttattaaatatcataagacaaaagttatcaattaatattgttgattgtgacatgtgcaatcattttctatcctcttggcttgctgctgctatagatgttatttttggggtaactataagctacaatataaaaatatttatatatataaatatagatgattggccctattgaatcttgaactagaagtaaatatttttgttcatagattaagctttctctaatatatatat

SEQ ID NO: 268990 - DNA, 892 bp, Cannabis indica
aggtgagcccatgccacaatctgacactaatatatcgcatcgtctagtcagacgagcccgtacctaccctggtacttatcatatgtcactaacgcccgtatttacgcccagtatgtcaccaggaaaattgcatcacctaaatatgtgagcccgtacctacgctcggtactcatcatatatcactgatgcccgtacttacgcctagtacgctgccagaaaatttgcatcacctaatcaggtgagcccgtgcctacactcggtactcatcatatatcactgacgcccatacttacacccagtacgttgccaggaaaattgcatcacctaatcaggtgagcccgtacctacgttcggtactcatcatatatcagtgaggctcgtactgctggaatttattttaccaggatctagatttactaacaagtatgtttgattaacaacctaatatgaattctaaaacaatgaaaataaacacatataaagtttagaaaaccttacagtgggtgaagcggaatattatgactccttccattcagatctctagcccttgattccttttgtagcagagcgtaatcaagatctaaatctggatcttcttttctccttctttgatacagaatttccatagtcttacataatatgattgaggtaccacttgatgcgtgtgggcactgctcattcactcatgggaatttcgaaaatagagaagaaagaaagagagagtgacggttttatagtgtttgagaaaataatcagtaaagtctatctcaaacctgaagcctttaccttctatttatagaataccacatagagttaaagttgaattatttggcatttaaaaatgaaaaataaaatgtgaaatagaagcaaaggtggccggccatgtattgag

SEQ ID NO: 268991 - DNA, 456 bp, Cannabis indica
tatcatccacataaagcaataaccaaataggtgtcttgttgtagtaaacacagggatcatactcacttcttgagtatccaatttgtaacatgaattcatggaatcttaggttccattgtcttggtgcctacttcaggccatatagagaattctgaagtaaacacacttggtcaacctccttgctcttgaatccctcatgttcttccatgtagattttctcttcaaggtttccatgtaaaaatgctgtctttacatccatttgatccatttcaaagtcaaactttgccacctttgccataatgattctaatagaagtttgtttcaccacaggaaagaagatatcattgtagtcaataccttctctttgattaaaccccttagcaactaatcttgctttgtaccttacttcttcaccaggcaacccttcttgtgtctaaaaatccatttgcagcctat

SEQ ID NO: 268992 - DNA, 759 bp, Cannabis indica
cataaatagaataaatgttagtaaatggtgggatattcattacacctgattttactaactttatttagaacttgtgtgaatttcattccaacaagtcaaaatcggtgcacttattctatcatattagctagaaatcatacaagtgaactaattttgtagatatggactcatatttttatcttatttattaacaattactcacataaattatatttctacaaaagtaaggatttatatgtttcaaagtcatttaaatcttaagtagagaaataatacattttgcatattaagatagtgagatcaaatataaaatagagaatactatattaaaattcgtgagaatggattaaaccccagtccatttgcaaagtttctttaaagtatgagttcattgcctaatacatatgcatagtacacctaaattatagtgtgtgatagatttaagaaactaagaattgttggacatggggtggagcctgcatagcaaactccaaactttcataaatctttatcgattgatactcttcaaggggagtgtacatatcaagtcgtgttctaactaaagttatttctcaaatatattttgaattgtgataaggttgaaaaccgacttgatgaaatgtacacattttataaatacccatatatagttagagtacaattgtcaaagaaaagatttggacccaaaatcataaatgagcatttcatctaaaaagctataaggtttaagggttacgatattttattatccatctcaca

SEQ ID NO: 268993 - DNA, 524 bp, Cannabis indica
gatgttaattctgagtacacgttggaaaaagaaggaccaacttttgctttcgtggcttcggtcttccatgtccgaagtgattcttgcttccgttgcaaatcatacctcttcccatgctctttggcgtgctttggagcaaaagttctccagtcaaaccaaagctcgactcctccagttaaaaggccagttctctcatgttcataaagcaaatctttcaattgcagagtatatcgaaaaagtccaaaccattgctgatgcacttactgtggccggagctcccattcaagatcaagatcttgttcttcaagttctaaatgggttagggcctgaatttgattctgttgtatccggtattacctcacgaagtgacaatctcaccattgatgaggttcaagctcttttactctctcatgaaagccgattggaacaccatcaacacatgaatgatctgtctgtgaaaatgcaggccaatcttgcatttggctcaggcagatcaggaggttctagaccatattcctccaaca

SEQ ID NO: 268994 - DNA, 526 bp, Cannabis indica
gagatgcatattaatgtgtttttaatatgttaaatgtttaatttaattaattctcagattgtatttcaacaacattttcgttttataattaaaatattcatgtgggtttgaagtagatagttcttatttattgatcatgctcatggcaaacttttctaaattgtttaatccagctgagctcgctactatagtgttgatttctaatcctgttactggtttgtcggcgcaaggagtagtaagttgaagcacattgtataaatatttattttgcctaatttgattaatgatcataattttcaatcattaacctcacaactttaccttcttcttctattttgtgcatctcattctcactactggcactaccaactcactgttttatcgtcctcctccataggaggcaactttatcgatttcggcaccaataacttcatcggaagggatgcgcacgagtcgatcaccttgcctatggccgagatttcgacacacgacgcccaccgaccgattgtcaaacggaagaatccca

SEQ ID NO: 268995 - DNA, 576 bp, Cannabis indica
cgagtataggttgatattattgtaaatagtaccgtcgtaagaacattctagacttagtactgtgggacacgggataggattgtaattgggtgtatatgtacctagttatactccgatttatgtttatgttataattatacttttcttactaagtctttcaactcatagatattgtttatatgtgcaggtaagggcaaagctaatgctgaatagcgtgagcacgagtggatgcagattgtacatatcaggacagttaggcttcgagttttcgatcttcgtgatagtaggatttattttgatagtcgctaggcgacatcttttgcaactaaatattttgtaaagcagttgtaactttaaaaatgggattcgggattatttaaagtatttataaattcaagtttaaagtttaattatgaagttttaaatcattcacatttttcataaactctttgattagtaaaagtgtgcataatattaagaaatcacgataacacgcctaatctagtagggtattacattacacatgtcagcaccatattattgttgaaaatataggtggaacaccaataactttag

SEQ ID NO: 268996 - DNA, 782 bp, Cannabis indica
gttagaagcccgtgaacgtgaggatgaagggcaggctgggtttgatgctacggttcatcatggttcacattcggccagtgtgcaggctgaggctttgggtgtgcaatctaccacggttggcacacgagtggagggggttagtaagaataatagtgaggtggggaaggtgatgtcaacatgtgaaatgggagtgacaaatgaggcattggcggataagaatattggtaagggtaagtataatggtgccggtggtgagtgttcaatgatgcatgctttacccgattgtggcaagggtaagtgtttgatggagggggagtgttctatggatgtggctagtgatgtagtagctgggaaagtgtccgagagtggtgtggggatagtgaaaaattataatatgcatggattaaatagtgttgataagggtaagggtgtaatggacatttcatctcaagtggaaatttcatttacccaagctctacaagaaacttttgaaccacttatccatgcacaaaaggccaagacttggaaacgtctaaattcctctcgtggtcgtgggtctaaaggtaagccgagttccattcccattagtccaaagttatcacatgtgttagttgctaatgctaaaaataaggtgagtccgaaagtgggaggtggtggtaaaaggaaaatggatgttgatgttcactatgagaatgtgaagaaggggcggttggaagagcagtctaaggtggtccctgagaaagattgtagtgtattggtgaagcctgcggagcaggctcgcc

SEQ ID NO: 268997 - DNA, 1401 bp, Cannabis indica
ttatttcttagtgggaaatattttagagaaattaaaatatcgagattgagcggggttatggaatttgaccattttacccctagctttagaaacacctaagttataacctaaagggtaaatttgtaatttaaaataagggttgggtggctgcctaggtgtgtggcacgtggcctatagcttcagccaagggaaattggttttccctaattgttttatttcattttgtaacatttaaaaaaaaaaaataaaaaaaaaaaaaaaaaaaaaagaggaaatacccaaaaaatcaagaagctctctccttccttctctctctcttcgaaaccaactgaatcaagggggttttgttgctgaatttctgtgttttcagctagggattcaagcaagattcaagtggaggtaaaccctagatcattagttttatatttttagctttttctttagtttgtgtatgtgaaattgtaaattaggggctgttacggttagagttgtttggatttcgaattttagggttagtttggattgattttagctcctagcagctggttttagtgtttgatgttggttttatgcaagtttaagctttgagttcaaagctttgatcattaatggcaagttgagtttcaatggtttgttctgtgatttcctggctggaatatattgtgtatacccttattaggtactctggaaggtttcattgcatttggtggagaattgagcaaagagtgaaaagctttggggaaactgatgcaaaccggctatcaaaaaccggctagccggttttggcagggttccccgggcctttcattttctcaattttcatctttgcgttgccttggttgggtgtttccccatttccagagatagaataacctatagaaagtataacagaacctagggtttttgttttgggtttcccgggattagggttttaagcatgcaacttacccggttttaaaatgtgattagggcatccatctagcacaagatttccgttcaggtcggccagcacaattgaattcggaaataaggtaagaactgaatataatgtgtgatatgattatctgagtgtatgtacatgttatgtgtatatgcatgcttaagctgttaaatgcactaccaacacttgtacggttatggtatggagtgcattggtatagtaaatattatttgtgagtacagcacagtgataacaacacaagttcgggaaagtactaaggtgtgtggtatatcactcagtggtactcagggtacgaaacaaaccctaccaacactcgtacagtaaggtacgtagtgtatgtggtatagtggctgcaccctagtattgaatgttcatgctcatctgttaagccttgtaaataggtgtatgggcggctaattacaagtcggaaattatatgat

SEQ ID NO: 268998 - DNA, 724 bp, Cannabis indica
agtttgctgaatgtgagaaccttagttccaatgtcagtaaggttgtcacttgtgtgcaccttttccaattccagaacactatcctcaatcttctctcgaatccaatacaatctaatatcaatgtgcttgctcttctcatggtatacaggattcttgcacatgtgaattgatgacaaactaacagaatagattgttcctttgtctttgagtagatgcagctcttgaaatattcgttgtaaccaaatagcttccttgaaagcttcagtggtggcattgaattcagattcagtggttgacaatgccaccactggttgttgttgtgatttttaacatatgcagcttttgttaaccatgaacacataggcaatagtagatcttctattgtccctatttgatgcataatcagcatcaacatagccttctaacctcacatctggtgtgtctctttgataaatcagaccatatttgactgtacctttcaagtatctaatcagccactttactgcattccaatgctctaacccagggtttgccatgaacctgctcaaaacacttagagaatgtgatatatcaagtctaatactgaccatgatatacattagacatccaacagccatagcatagggtatacctctcatattttgcctctcagtttcagttttagggcagtactcattagaaaatttgaagtgccctacaaatggtactgcagtggccttggatg

SEQ ID NO: 268999 - DNA, 873 bp, Cannabis indica
agaggtagattctcatgagtgcaacccctaaccaagtaatactgtgcctgagacagtaattatttcatctttctcatcatcagaatctgaggaagatgatgatgctgctgatgatgatcgagaagaagatgatgaagatgatgatcatgatgatggagatggagatggagatgatgatgatgatgatgacgatgatgatgaaggagatggagaagttgatgatgatggagatccacctgatgatcagaacatttttgaaatcatggattgggctaaggagactttagggcatttggatgatattggaggcctaccaacaaaccctataccattgtgttagcgtagatttttgttaactaaatttgagcccaaccgtgataatctcacacaaataaaataaaaagtatgaacacccaaggattttccgtggttttgcagttaaaattcttcatagtccacgagtcaatcttattcagatttttaattattttttagggcccctcttgtatgagttttttcgtccctctttttatcttgctgggcactatttacaattacatagtgggcagttcattacaaagttgactgtattatttttacaatgaatttaagtgtgacaactcatataactatatttatattagggtaaattacggtaaaaccccaaaattttcattttgctttcacttaacccctaaaacctaaatttatgtggcataacccccaaaactgttgtactgttagcaaaaatacaccttcgtccccttaaccccgttattctcctacctggctcaatccatccaatgccaggtagactcatgcttcctatataattaattatttaatgacgtggaaaataaaataaaggtcatg

SEQ ID NO: 269000 - DNA, 590 bp, Cannabis indica
ttttgtttttatttttctactaacgcttttgtccataatcacctccctgtggaatcgaccgcccaatctatactacaaccaccgctagtggaagtcacatttgggcgttaaacagatacaaaagatcatcatcacttgtccttacacttgctttgcatacagtgtatgagttataatatattctcccttctcctggtataatattcataatcatttcattcatttcatggaccattttatttttttggtgttaatattgctctttctttcaaatatgtaggatcgttgtagttttgtaaaagcgatgggtagatagcatttcactggatcttgatatatcataaggaagtttaattaattctctgtcaatgtcatcatataatgaaccatctcctctctgcaacaaccatttatcaaaagtagctattttagtagcctcagatccacttaaacttccattatatagtctcatattttggttgagctcatatattttaaaaaatggccacaagtatgatgagttaagagaagtaccaacgatgtcagctcttgtactttttggaacagctggtaatatttgtcgaaaatca

SEQ ID NO: 269001 - DNA, 1208 bp, Cannabis indica
caggcaaatgatggcagtgagaagctaaagtagtctgaaaaccaagcttgaagatcaaaccagttcctgttacaccattcttttggtcaagggctgcatcaacaaaaagagaaggagtatcaggggagaggggaggagggtgttgttgctgagtagtacgagagataggtgcagcctccgaatccagatgatccccctggtagttacactgagcagcactataatcctgtaaataattaacaacaaattcttccacattgataggaacaccagatttattaaaaagaattgagtttctagaattccaaatctgccagacaaaagcaatgaaaattgggaaatcctgtttagaaatgttatgcagtgcctaaaggaaaaaatccttaatatcacttcgatgataagctaaataaaactgtttgaatcttgaagatttccaaatagtctttgctctgggacaaccaataagggcatgggtaacagactcagtggtgttgccacagaaagaacagtcggggtggggaagaattcttttgaggaataaattgaaagtacaaggcaaaatatggtgaaaagctttccaaatgaaatgtttaattttgggagggacagagagagaccaaagctttttccaccaatgaagataagggttgggggtcgaagaggagggaacattcgcagatgccagggaagaggcaaggtggtaagcagatttgacagttatagtgccagaggagtgaaatccccaaatgagggaatcagaggaaattgggtcaagggggattttgaggatactgtctacttgataagtaggaaagaaatgcttaagtttagggatattccaagtggaatcctgattaatgaagaaagaacaaaagcttgggactggtccaaaggatgtaagagagtgggactgtgaacactagggatccaacagcaaagaaagaaaaatgaagaaaagaaaactacatggctaattcccattttatcataaaattgagcaaaaatgatattttaaattaccttgtccatgatcacttttgtacccgatacactttgccaattgtaacatctttcttcagtctgtagtttcaaacaaagaagcagagaaggcaccaaaccaaagtttgactttctttgtagaaagttcacccaacgtaaatactagaaaagtacatcaacacaaaccaatcacataccttttctta

SEQ ID NO: 269002 - DNA, 875 bp, Cannabis indica
tgtaaaaaaaaaaatcaatttaagaaaagttttgccaccaaaaaaatataaaagttaactggataaaaattaaaatataagagaattttacggctaattgggatgtctttgtctaatttttattagaagatctttagttgattgtcattgataggtgtgatctgttatatgtttattcaggatgaaaatttagtatacattattcacattcttttgacgcttcacaactggcaacttataagtattttagttgaattaaaaatattattcggttttttttttcttccgatttatttgtaaataacttagttaatttattattgttaattttattggataaacaatatatgcatgtaataaattatgttcaatttacatattaataaaaaaaaattcatttaccttccaaaaagaaaaatcagtaagataacaaataataaaagaaagaaaatccatcaaattttgatatggcattgtgaatctcactttagataattatgattgggtataaatttggtgaaaataacaaattgacggcatcaaatcaatatatttattaaagaattttcaaagttgtttacattgtggcaaaaaagtcatgcaataatggatttaattttgcaccccacaagtttgacaaaaagtatccttaaatagtctaagaattaatgacaatctaaccaacactccttacattataaagtttatatatatatatatatatatatattttaaaatttttattttaagtttataagaaatcattaattaaaacccatttctttgttgttattattggtgtgcttaattattctacaaaaatgatgtgataattatataagacactattttttgtaagaaaattatatttttac

SEQ ID NO: 269003 - DNA, 834 bp, Cannabis indica
gtttttcataaatcgagtcttaatttttcaaatagttaaaattggggaaataaattaagcattttttgtattttaagtataatttttttgtattttcatataataaattatgaaaatatgaaatttaaaattgttaaatcctgccaaactaaccattattcggtactactttaaattaatacaaaagttaatatattttttataatacaataaaaaaaatatttggagcataacttaatgtagtatcgtaaattatataaaaaatcataaattaacctaaaaaatatttattaactagtataatgaccgcgcaaagcgcggttatattgcctagtttgtatataatatagaacacaataataatagataataattagctatacgtacttgattgatccatagcaattaccgtaattcgatagtacaatactatcaactaagtcttccttcttagatctctaaatcagaaaaaaatttatttatctaattattaaaagtatacaattgtgataatatgtatttttagagttagggaggggaacttagctacataaccctagttggattgggcatgctcatcaaaaacttcagtaaattagaataacccacacttttgctttaactagactttagacacacaaatgctaagtccattaacaattgatcactaataatatgggctaatacaacaaagaactatccaatcaacctatattttattaaaactaataaaaattaatgtaagtccaaataaaaatttaacacaaaatttataaaatttaatcataaaactaattagttatgagcatgggcggctaataacctgtgcaacct

SEQ ID NO: 269004 - DNA, 864 bp, Cannabis indica
tttttttttacatttatatgggggctttttaatggcatacatatttttgtaaaaaaaatagaaatcccatatttgtaaaacaataataagtttcgccggaaaagtcactagcgccgaaaaaatcgtcgaaaaagtcactggtaccggaaaacgtagtgtcgtgaaaaaaatcgctggaaaagtcactagaaaagtcatcgtcacctaaaaagtcaccgaaaaaatcaccgtcactggaaaagtcaccagaagtagatgtctcaaatataaacaaaaatagagtcagttttataacataacgaataaaaataaataacacaaaataactcaaacctgttataactgaaatataactggttctgtaacataatgaataaaaataaataacacaaaataactgaatccagttataattaaaatagaatcgattctataacagtattataatgaataaaaacaaataatacgaaataactcaaatcggttataactaaaatagagccggttatataaaatgggtatttttggggtaaatatggtatgtgtgtaattatttggtgcgttagagcatgttgaatggattttttgtttgagttattttatttaaatagtttttgtgtgtgactttttatcttagttgctttatgaaaccagtttttttatctcaaaattttaactagttgataaatataaccggttttcttatattatatttgagttattgtgtgttattctttgtgtttatttattttgttatggaaccgattcttttcatatttatgcctcaacattttttgaaattgattctaatttttttttaaaaaaaaataataatcggttttatgatgtgacagtcagtagtcc

SEQ ID NO: 269005 - DNA, 881 bp, Cannabis indica
taatcaatatttaacaccataccataccatgacatgaacccatttgaattcaagttccggttcccggacaaaatgtaaaatataatatgttacataaacaaaattgtttagaaataaataatatatttaatgtttctatttctagtatttaaaactcaattttacaaaaaaaaaaatgtttttaaaaaattttgcttaatggtctctattaatatttaaaaattattttcagttttgaaaaataaaaaacaatttttagttatgaagtcacacagtgtcaaagaatccaatttatgatttaatggtactctttcatgtatgtgtaatatataagaatacacataataacttttctactctatttgttaaaatatatagtgaagattctacattctctaatattatattttatttccatcattgaaatattatgtttactttaaatatattctattagttaaaagactaattaagaattttattcttcaactttaacatgtatcaaattatgattgttagattcaaggatttctctcgaatttcattaaaattttactaaaatgacgattgtgcatatactaaatcatgactccaaaacattgatatctaccaaatcgtgtcccctaaatttcgaaatacaccaaatcgtgcctcctaaactttttagactattaaaaatttctctcaaactattgatcaaattattggacttaaggagtctaattttactaatgaaatagtaattactttggagagagaaataagaaaatagaaataatattataaaagatatttgaagatatctacatggtaaagaagaatttaaagaaaataaaaaacagagataattttccttacttctttggaaaatcaatatttga

SEQ ID NO: 269006 - DNA, 803 bp, Cannabis indica
aagttctagtaatgctacgactggtatggcaaagcctaagataaacattgtctctacttcaaaacccacaaagaagaagaaatgaattaatagcaagaagcctcttaaatctatcaacacagctaatacgggtaagaaggctactaatccaaaggcaaaggagaaaatgaaaggcttttattgcaacaataagggcctctagaaacctcagtgtcctaagtttttggtaaagaaataaaatatttctaattttgttgtgaattcatgtattttagaaaactattatccctttgggttattaattctaaatctactaaccatgtttatgttcttcttatttcagctccaactgcttagacttggattgttatcctagtgagttgagacagatagttggacaaaagggagatgacactagtgattaacctactatgatatttcaagatagaaactttaaaataaaacaaagaaaagttaatctaaccattcatatggaaaataataacttatcggaattatgaggataagataggaatttgcaatatctattcaaaagactcgagcacaattcctagtccttataaaatattttatggtatctctcgtgattacttaatcttaatcaagtattttaaattaatgttaatactagaatgctatgttgatggcttggtctagaagaaacttaatgtttctacactaagataaaatatcacaacaagatgcccctaagcaccaatagtaagaggttaaatgtacacttgtgtatgcataaaacccgacttctactattgagtgggagc

SEQ ID NO: 269007 - DNA, 941 bp, Cannabis indica
acaaaatagaatcttctaaagaaataatcaatctagccatctaggtagggaatggacagtagcattagatgctctgttacaacgacaaattgagaaactagagaaggatttcttaggatttaatgagtacctctgtcatcagtaatatataaaaaaccatttgtatatatggtagacaaattactttttgtttttttttttcaagtgcaaacgtttttatttttagtatataaagaaattacaatttagttttttttataacaatggattatacttataccccaccacacatgttactagtttaatttttgaaaaaaaaaataaaataaaagaataattggtttttgaaacataggaacatttccattaaaaaaatacaaacccaacaaatcaaaagatcaatatgaaattcaaaattaaaagctagagaagagaatcgggcaccaaactttagtagtatccgaaaaaaaacaatacgaacaagatcaatattgaattttagaacacaagtcggttgccataaaagctgtcgaggagtcattgcttggagccctcctccagtgtcttgggtgtcttgtaatagtgacatttcctctactgttagggccacaatgcttgttgcagtcataagtaacgaatgaggtgaagtgctaaagattaaaacatgtctgagtgtgattacaaagctaaagttgggggaagctctagctgtttgtatggcagctgaggggatggcggagcaaggttttgaacgggtcctattctagtgtgataatgatgtggtggttaaggcttttgaagcttctagtgatcatgaggtggacttcaacctgctgcacgctcgacaaaagtttcgtaaatgttgttacaggttcactgaatgggaaattatacacatctctaggaaatgcaactttgtaacaacattgcaaagtgggcga

SEQ ID NO: 269008 - DNA, 936 bp, Cannabis indica
aaaaatctaatagctatgaaattaatatgatcatcctaaattgagtctaaattgagtctactttgatgagaagcaaaaatttttgatctcctttagtgttgatcacggtctgctctagttttagaatttgttgactaggttgttgagttcctctttgaatatcttggcttgctccgtcgtcactaggcaactggaacttgacttgtatagccttagtgtcctcatcattccccccttcttgaaaaaggagttttccgcaaatcatctcatgcatcagaaacgctcaaatctgaaatattaaaagtatcactaacattatactctccaggtaaatcaagtcggtaggcattgtcattgattctttcaagcacttgaaatggtccatatcctcgaggaagaaatttggtacgtctttgggcaaggaaccgttctttccttatgtgtaaccatacccaatcatcggggtcaaaaacctgcttatgatgatcctgttagcttactttatgtattgctcggtccttctctctatgttgagttgtgccctctcatggatttgtttcacagattctactttctttttgccatctaaattcaaatgcttagaaacagataaatgtgataaatctaaaggaggcagaggattaaaaccataaatattttcaaaaggtgaaaatttagtggcagaatgcatggaacgattataagcaaactcaacatgtgaaaaataaagcttcccaagtcttaatatttttacttatgatagctctcaataaagttgataaagttctattaactacttttgtttgactatctaatacaatggtcctaggcataccatgtaatctcacaatctccctaaaaaataaattgcaacatttaaaagcatcatctgttttatgacaagggataaaatgagccatcttagaaaatctgtct

SEQ ID NO: 269009 - DNA, 723 bp, Cannabis indica
agaggatcgatcggagcagtggcatcaaccacaggatcgatggtagtagcagagttagttgctcatgtcctcaccattgttaaaagcttagattgcttggagatttaggttttttttttttttaataccatattaaaagagagaaaatatttgttttattatttataaagacttatttgagtacaagagaagaaaggtgccttatataggcacggtatgaaccaaaactaaagaaaagaataaaccaaataatcctaactaatttatcttaacaaacttaactaacttaacagaacttaatagaagaagagaactttaatctcttaagaaatgatgaagaagcttaggttgtgtttggtatcagttttgtaattagttttttagttttaaaattagaaaaagtgaaaatactttctgaaatcatgttctataaaactgttttcacttttcagtttattaattgaaaatcaacatttaaaaaaaaattaaaaatcactttctaaatatttttaaacaatttctttcataatctgtattttagactctcactccaacctagaccttagaacccatacggaccctggccccaaccccggacccagacccaacccacgatcctagcttcgaactcgaactcatcttaaataaaattaagaaatgaaaattacagaatacacttttgtaatctatttttaaaattaaaatagttatagaacgtatttt

SEQ ID NO: 269010 - DNA, 685 bp, Cannabis indica
attttgggtgatgcttttcagggacttgtgccagtcgtcccacatccttctctttcacagcggtcattatcctgtcttttttcatcctattcttgaagtctttcattaacttcccagcaaggatgagacaatcatgtttgaaggaatctggcacaatgaaacccgtctagtttgaaggaaaacaaacacggttagagtgaacatttgaattaataaaaaataaaacaaaattctaacaaataactgcttacttgtatatctttctaaactttatttttcagagtagggttgacttctttctgatttttatacgacaaccatatcgtctgacggcatctgactcctaaagttgatacgagcttggcatagcttttgtcgcagtattgtcctttatcattaacctcgagggcgaatctttttccttgtttcatgagcttgaatatttcattcattttcttaggccctcgtgtaggtattactgttgtttcatgagcttgaatatttcattcatttaaagttagctatatatataacaagtaatctatatgaaatattaaatgcataaattaattgttaagtattcagcataaacaaacacaatataaagtaagatatgtatcaatttaccaattagacacgttttcttttcttttttgtttatgtttgcctgaatcacaattgaccc

SEQ ID NO: 269011 - DNA, 643 bp, Cannabis indica
ggcataaaacccaacattttgtgcttttagttccttgttgtgatggttataaattgtggaattgaatttggagtttaagcatgcttttgattgagttgatgtaacttttgggcttgagttcgtgtggctagaataggatttctgggtttggaacccaggcgtcgcgaccccactcactgggccccgcggcctgcccttgtgaaatcctgggttttcaacccaggtgctgcggactacaatttgggtgttccgcatatcattggaaagctcgtttcgagctctatatgtttatttgtatttgaatgctaattttataaatatgtggaaatagacttagggattaaccctatttttgaatcccaaaaattgtggctaggattattggcacttggttaggagcacctgagaatttagaatctccacgtattcgggatatcaagtaagacagtagttagcacgtagagttaagcgtggtggcgctcatgttgaatattataattgtgattaattaagaaccaggattagggttattaacttaaagtgagcgactatatagcctaggattattacccaagtgattattgatctttaaatgctatgccatgctttatatattgatttaaagaattatgcgttcaaggca

SEQ ID NO: 269012 - DNA, 335 bp, Cannabis indica
acgggaagcgtggtgaatggtgaaataactcctattactggaattatgctttgtgtgtaagagacttggaataacagttatgcacccaacaagagcatccataatacgactgttccacctggaaccaacgcccagacgaccatcagagacgcaaacgaattgcaaaatctcagtgacacgctccatgcctacttatgaaaagatggggctccaactcaaggatctaactccatgcctccatcctgtctatggtttctccggccaaggagttgaacctctaggacaaatccagctaccctcactgttggacaagctccgacgagcataactatcat

SEQ ID NO: 269013 - DNA, 740 bp, Cannabis indica
gcattgatcaaatacaatgcactctttaacacccctccaactctctcatattacacttttaagttcagtacaaaaaccaatagtggtgataggcttctatatatagtactcggactaacactaagaagcataacagaaaactaacttttaagatgcaataactactataactacctaaacatgtcagcaaaacatgtggacaaatctctctaagtagcttaatcacacaacaaatccaccttgatttagttacagtttgcagtagttgtgacagctgaaattcataagaactatgaattatttcagcaacacttatcaatgtttaggagtttgagacaatgtttaaacttctgtaagatcacactcttggtcagcatatcatcagcattaccttcaatgctgaactttttggcttgaacttgacctttgacaataatgtctcttataaaatggtacttgatgtctagggatggacctacttttattaatgtgggggctatagccttcactaagaaaaatactgccttttttaaaaaattaaatacaattttttttaatttgataattatagatcaaaatagtaaaaaaaaaaaagcccccacagaattaaatagatctagtaagagtaattataatataggtataaatattcttttaatgataaataagcccccacaaagtaaaaattctaggtccgtcactggtctatatgctttcatctttcatggaggatagggttc

SEQ ID NO: 269014 - DNA, 858 bp, Cannabis indica
tggaccaatcctcaaggcgccatgcctccacgcatgttggcaggccctcgagacaagccaccaaactagcagcatacattagacctctgtcccttttcaacatggtgcatccatcccatgcgcatatgcaaactagcccacgaatgactaccctatcatttcgtgttgagactcgtggccaaggagcaccacaaagtctcttggaggtttgggccacgtcctgtgcaagcggcataccggcaagccgatggaaacgtacccgttaacctctgacagcttcttaaacgcactaccgagtcggcgcgataatgtccatgagtactccaactcatggagacatatgagtccctttgtggtcctcatatgcccgtcctactagccccactgaatagtagtagctcacctagcaccaaggtgccagggggtggtggagagctgacaccagggtacccccttatagagcattctgagcttttagccttctaccaagaacatacatgatttttgctttgtagacatatggccaaaccgcataccaaaccacagagtttctccaaactgattacaccattatatttgtagacccaaataaatggtgaataccaagtcccgtcccaattcagacaatattgaagatatttatgaaaatgccactaccgtacaaactaagcatcaacataccaccagcatgcacctcaacatgcgccaccacttggccaacttgtgggcatcacttagcttgtaacgtgccatcgtggcacacacattacactaggcattaacaccaagttatttttatttgctcataatttagtttcttaaatgttaattttttaaattacaaaagtaaatgcaaag

SEQ ID NO: 269015 - DNA, 542 bp, Cannabis indica
caccagttaaaagtttggctaaaggaaagaaatctagccaagattggttcaccaatgcacaatcaattcgaacttccacccactccggcttgccacgactacgctcccaagtatacgggtagctatacaactcaagatcttgtaaaccacagtccaccaaagtttcattaaagccctctaaccacctcggataaggattactgccttttttatcatcttgggaagtaacattgttaagatcacctataatacaccaaggcaaactagagttacttttcaactcccggattaaatcccatgttctttttcgcaagttcctattcggctcaccatacaatcccgtcatccaccaatgaccttgatcacaaccacaaattactacatcaatataggacaccccatactccaatacttggacatcctcctcatctttccacaaaagagcaacaccaccactcttcccttgacaatcgaccgccagagcaccttcaaacccaattgtcgcacgaactttctccgccaaatccttcttagcaagagtt

SEQ ID NO: 269016 - DNA, 730 bp, Cannabis indica
ttattattggttaagaaaaaaaaatttaaccaaatgtaagcataaaaaatcaaatttcccattaattttaagcatgtaatatcaaattttccttataaaatatagttagagatttatttggtgaaatatctcattcaaattaataactaataacttcatggggtctcttatcatgaaaaaagatatatatatggacaaggcaagtcgtgtatttgaatgaataattatattttggtccaaagcgaaattactatttatggtacagaacaacactatctaattaatattcaaccctttatatatactaggttatgatgcaaatatactatgttttataataggttttttattacgagttttaaaagtaaaagatgaaacaaagataaatagtgttttatgaaaaatagattaaacaaaagtaaaacgtattgaaagcaataataataatgtttactgagtttttcagtaactgaataattattgagcttaagaaagtaataaaaacacaaatcgtaagaatatagacaacagattttttacgtagttcaggcgttaattatccttaatttacaagtctattttattaggttctttggccggtgaatgttgatacaaatacaaaaagaatggactttactctgacctagctacatgttcctcttgaagaagaggaagcttagtaggaatattttagagttaatagtagggttataataatgtgtttacaaag

SEQ ID NO: 269017 - DNA, 796 bp, Cannabis indica
aaagatttgttacataaagagtattaacttattacttttccaacattgtaatatttgtggatgaacttgtgtcacgtatagggtctaaatggataattttcccttgcgcaacgatctctagcatccaatgcacactaaaaaattatattgggatgtatgtaagatagtgtaaaaataatttcaagttataatatagaaaacaattttaaagtatctcttaagtagtgtttacccgatattctaagaaaaaaagaacatttggtgttggttattcatcgatgataaccaatgagcctatgcttgtgatgaattctcaaaagactctgccttctctaaattgttgttatcatttactgtgagaagctctaggtcatcaaacttgaaaattcatctcaaatcatttaagcactcctaaatgtgtttgcattaaattgttaaatattgttattttataataattttagtagaatttagtatataaggttaattagattaaagaagattatatatcattctaaaaagcattctccggctaccgatgaagtcacacaacgccacatgttgcaaatcttctccaaatatcgtaatctgggtacgaggtgctatgaattcacgtagtacccaaattgggattatctcatttttatccttaactctcagaaattcttcaaccatctatttaagtgccttcgggattaacgccatgatctttggtgtgaataatagatccgcttcatcaccaccgccttttcgacaaggcatgggaccttttccctttgacacatcacatcttgct

SEQ ID NO: 269018 - DNA, 1848 bp, Cannabis indica
tatcagcacagtggcttgccgattacaattttcaatctcagtataatgagcccttaacgcttccatctctttgtctctccacttggcaaacatgcgtctttgttcttcgaacgcgagatttaccgcagcgcggagctcttcctgatcatgatgtagggtgttggtataaccttgcatgagtccaagagcagcacagaggttttagatctcagtatcatctccaatggtcgttcgaacgttggtagtaggcggaacggctgtgttatgaatgccctggctgggtgctgaactggtattcccagtctcttgcacaccaggcgcgatttcatctacaggagttgtcacaccaagatctaccttcgatggctgttcaagattaacagctagcggaacccttgcgtttcctgggttctgcaatgcaagatccactgcctgtggatttgccggatcaaccaggcccctacgagtctgtaccaccatcgtacttgtggttagattttgaatgaagagcgattcttgattctactcttaatgaacagtgagtcttatttagtaagcgacaagtagtttagaacaattgatttatagtaaaacaatataaagacacaggaattttatagaggttcagcccggagcagttcggtaatagcttaatcctcgttatttttattaactcaagaacaaggagaaagattccttttcttatagctcttacaacagtatctctgaatatgaattcttagataatatctctctaccataatattttcgaccgaccttttgcccagtgaacatgcatcactatttatagggctatgtgcttggagaagaagtatttcccttctcgttacaatggatataagccaaaaaattgcataataaatacagaatacactgatcgtgggatttagacaccttgccatatctctgcaatctgatccccaagttatagggatttctttgatgactcacgatgcgaaagctgaattcgctaagtgttggtcgctctgcgcggattgctgatagctttgcttcaggcgtgcatatgaggcatcctgttcggactgtattcttcgagcaaatactcgaagttggtttcacgtgtcaccatcatgtgatgccacgtcagagtgaaaaaatcagcatcattagattccaaaatagtatgcgcatttaaatcataaaatctatatgctttactattaacagcatatccaataaaaacacattcatatgctctactagccaatttaattctcttaggatcaggaattctaacatatgccaaacaaccccaagttttaaaatatgagatattgggttgtttatttttcaaactttcatatggagaaattttccttttagatttaggaactctattaagcacataacatacagttaataaaatttctccccaccaatgagaagcagcacccgaattcaataaaatagcaacaacagattcagtaagagttctattttttctttcagctttgccattcatttcaggtgaataaggtgcagtcttatcgtgtatgattccatgtgagttataaaattcaataaaagcagtagaatcatattcagtgcctctatcgctacgaaacttcttgatttttctactaagttgattttcaatttcagccacaaaaatcttaaacatatcaagagcttcacttttatttttcattaaatacacataggtaaagtcagaacaatcatcaataaaagtgataaagtagcgtttaccatttctagtcaaagttccatcaagttcacaaatatcagaatggattaaatctagaggctcggtttctttttctaacacagatttatgtggtgttttag

SEQ ID NO: 269019 - DNA, 854 bp, Cannabis indica
taaaatcagtttgttagataaaaaaaaagtgacaaaaattaaaaatctgaaatcaaaataagtcaatttagttaattatttgtcaaagctttttcatgcaataaattatgctagaactcggtaagaaagagatattcattacagagagaacttgcgatttaatatttaattgcggtttttggttaatcatagttcctagtcctaatccaaaaaaacgaaaaacttgtgatgataatttattttttttcggttaatgatatatatatctttttttttgaagaaaagcgtacgtgcgatagattgataaaatactgtcagacctcgcagtcattacaaagtatagtttcgggcaaagaggatagaggcacaaggccgaacctctgatgagaaaacgcccacttagccacgttatgggccataaaattacatcgtctactaacataatcaaacatacaaccaataaagaaaggcgaggtgattttacaaaaggagacgaagttatcaagctcccaccgggactccttcccattaagagcattgatcaccaccctcgaatcactctccagaataagaaacttgacacctcgaacttttgcttcctgaagggccagacagcacgccattgcttccccacagagagcactggaaaaatccatcttagaagtaaccacccagatcaccttgccaacatgatcccttgcaaccacagccgcacacatgctatccaatcccactctgatgtcacagttcagcttcaaccaatcctggtgggggggggggggggcggccgacaacctccgtcggacacgggtatggggcaagggagcaggagagcatgatgatctgcaaaagaa

SEQ ID NO: 269020 - DNA, 113 bp, Cannabis indica
actatattacacacacacatatatatatgtatcatttttttgtatatgcactaggttaaataatttttatatataggctagaaggttcgttagtgatccctcacatattagga

SEQ ID NO: 269021 - DNA, 814 bp, Cannabis indica
atttactattctgactgaagatatagaaagtgtttacatggaaactcagtcgctggccccatataagaagcccgggcctatgaagaaagatgccagcaagagggacatgacaaagttttgtcgattccacggagactacggccacgacactaatgaatgtaacaacttgaagcgggaaattgaattcctgataaggaattacaacccacacctgcagaagtatgtcaagaccgatcagggtcaggggaacgacaataactaggatttactacctccacctgtagatgggcatctgcaaggtattgttggaggcccgcacattgctggagattcgggcaaagctcgggagaggtatgcctgaacagcacagcaccagcaggaagaagttatcctggttgtggaagaaaggaggcccaaagttccacgagcaggagagccgaccataatcttcaatgatgaagacgcagtcaaaattaaatttccacacaacgacccgctggttatggaagtccagatagcccataaaatggtggccagaaccatgatcgacaatggagcctcttccaatatcttgttcaaaactgcttatgaaaagatgggactccaacttaaggatctaaccccatgcctccagcctgtctatggtttctccggtcaaggagtcgcacctctaggaaaattcgtctacccctcagtgttggacaagctccgacaaccatgactgtcatggcacagttcctgatattatatgttcgttcagcttttaacgtaatgctaggtcgtcggccttgtaagacttaaaggctgtcacatc

SEQ ID NO: 269022 - DNA, 544 bp, Cannabis indica
atatatttagttacacttaagcccacaaactggttttttggtgataaaaccctccaagcttaggttctgttttggtctttattatttcgtccatataaagttgttaaataccaaagtagactattgatatgtacaaaaatgtacacaaaagcatattctccttatttttgtgggttgtcaaggcctaattcattgcttaacttactgtctacggatgaaggttgcacaccaaaggtctgccaagtgcaggctggctggccacacagtgcttggaaattggccagcctatgctggccatagggctggccaagggtggccagcaacccctttggagtggtcggttcatcatttcgtcatccctcctaagttctcggatctctcgttggttgaagtattaagtagatggcttggcctccttgttggcgagctttactctcacgcaacattgatattggccacgtggacatgccacctcaagtgggtaaaaatcaagataatatttgccccccaagtccctatgcagacgtctgtacggatagggact

SEQ ID NO: 269023 - DNA, 583 bp, Cannabis indica
caaatcacgctaagtaaatacagcttttattaaaattcactcagctgtgaatatcccgcttttatggggatgcctcactggcaatggaaccgagttaactttgatgtcgagctggtgctcgtcatatgacttcccgaggttgatattgttttaattttgataactatagtttctggtgtcgagatgatctttctcacgtgcatgccatcttacagcgagatagacgcctcgctatccatcaccttgactccccaaactatttatacttagtttgtatatcatgccatatacgctaagtatttttattgttatcgtatctcttctatgagacgaggttaatacctcgtcatgcacacttgcattgtcatggtttctcgtcgatacataagttagcagttagtatatttctgtctcatataagactcttcagccaactgagttaaaaaaaaatctttagaaattgtgtttctaacgagttattccatgccaagtgtacttacgatttgcgtgtttgagttctttattcttttcagtctcgacacgtgtctcttctgatatgctcatcaaattttgggtataacaa

SEQ ID NO: 269024 - DNA, 962 bp, Cannabis indica
tttttttgtgttaatgtttatttttttgatctttgactctgatgttgctttggacctaaacatgtttattgctaacaactctctttaaatgactctgtaacacctaacttaagctcataggcattttgatgtggtctattgagaaatattatcttagtatacttagtcacatgtaatgtataaacatgaagataatgcaaaataatgattttgaacgcacagctacaatcccaattttaaaagtcaagtttgggtcattttttttttatcactagttaatatgtaaataattaattcattttttttcaattatcacataaaactattaagaacaatttaagtttaaaggttgaagattcagtgtgacaattatattggtgaacctttgatgtagttaatttcatgcatacttgtcaactatagctagttatataaggtatgctctgaaaatataattggctatatagaatatataactctattgcctaaattttgtattggatatgttttatcattttgagaatgtttatatataactaaaataatatgttttatattaacacaaaaaaaaataccaaaactcacacctttgatttttaaatttcagctactgcgtagaaggagaagagatggagatgcgagttcgtggctggtgggtcgtcagtggtggggctgctgcgtctggttggagtggtgaccgtgcgtcggttctagtccggtggtgggtgggggtgggtgggggtgctgggtgtgggtttgtgtgggtggggtgtggctggtggggtatcgtggggtggtgcggctgtgagatggagcaagaacggtggggtattattttttaccctaatttgaattttttttaaaaaaaaaaaacatgtagtaaaatgacgtggactgcctaatggcagccacgtcatcactccgttactaaaatgaacggaacactacagaataccttaaat

SEQ ID NO: 269025 - DNA, 720 bp, Cannabis indica
tctaatttgtattgttgcaattgtaaacatgaaacaccaaaggaccaccatttttctcatgaggatggagaatctcatttaaatcacctctcccaaccacggactgaagaaaccataaaccaagcgctccatcaaacaccaaaattgataccgcaagtatagcatctggtttcctatataaactcgtatattgccaccaaaggttcccatgggaccgaatgtgaccacgagaatagcctttcaacaccacctccacatttcccatccaaaacaaacatagacccccactgtgtgtcccaccttttcaaccacaagcttccaaacaaaacccaaccgaacacacatgagttcaagggccgaatgagtaacctaattctcagacaagaacacaatattgggtgaaaactctttaacatgtcaatcaagaatttagaacgtccagcaattcctgaaatcttgaatgttctatgctaaacaactcataatgatcattcttctttagagaattttatttttatggtttagttaaggcacaagttgtggtcagaggcatagcctagtggttttatatttttccttacaaagagaatatcttaagttcgaatctctcttttcctaatataaaaataaaaaaaattaaggcacaaatcgacaaacatatatataattagcgataatagacgagtaattgattacttttaattttttttccatatttat

SEQ ID NO: 269026 - DNA, 799 bp, Cannabis indica
tctctttcttgaacaatctatgtctaaatatatttaatctttcaattttcttatgtttgtcctgtttatatttgcccgtatgatatgccttaatgcccccctaagtgacatgaaaagcagtttttaagtcacttagtcttacaaaattaaataagaggttgcatatatttgttcggtacaaattcttttacaaatataaactttgtttttaactattgataatactttcggaggtggtcagcattccaggtcctaggcactgtggttccgtccattctatttagcttgtaggtctcaaagccgatttcatcctcaatttcatatggcccttttgaatttgacccaagtacccccacttcgggtttttgagtggctggaagactctttctaggactagatcgccaatggtgaatttcctatctttgactttggcgttgaagtgtttagccacctttctgtggtaagctgccatccgtacttgagactcatcctggagttcgtcaatttgatccaatgcttcttgtaataaagctttgtttgttgtcggatcatatgtcacccttctgtgggatgggaacaaggtttccaccaggaccatagcttcacagtcgtacaccactgagaatggtgagtgttcgcttgtggttcttggggggggtccggtatgcccataatactcttggcaattcttcaagccagttgtcttgcagccagcagctttctctttaagggtgacccttttaggattttgttgacggcttctgcttgtccatttgtttgtggccttgccaccgcagag

SEQ ID NO: 269027 - DNA, 1199 bp, Cannabis indica
acttctgtttctttattgatgttgaataaaatggatttcattgaaatgaaattttatttagggcataaaacccaacataatcaagatatgaacttggattctccttctgatgacaattggactacatagtctttctcactatgttgggtattgctttaaaatgtgtgggaagttctcaacactaaggagcacaatttttgatgaaaaaattcaagagaaaatagcctctgcatttttgaaaattaaagagaagaagaagtgagctttttagggttttctatcttagaaaaaatcataatcaatcaaagctttcttctctttctatttataggcttcacttacggtgagatgtggacttaaaataaagacttgggttgaatcaactcttaggacggaattgcatatgggctttagagttagccttatgccactttatttttttaaatgaaacaatatgtcttttcttattttaccatttatctcttacaattatttaaacaccaattttattttaataattattaataattatcaaataaaatacaatttaaatatatttattaattagacccacaaagtgtcttaactaacaaataaatctttatttctcttttcttcttaattatgccattccttagtaaaattcataaataagacagtcattatttagaatcctatttgattaaataaatcaattaactgagactacaaaacaatattatcccagttagtgcggagaccatgggcctatgaaaccaagctcccaataagtagttctagaatttatcgagtaaattctctatcttattaattcctcctgactccactatagattcaaaattgcactcttgattattaaccaagaatagatacactataaattatctattgtttcaatctaaagaatcaaatattctttatagatgatttacatcgtgtatggacagatttactgttttacccttcaatgtattttatcattaaaacacttagctacttgtaaatgatatttcagtaaactaatatacttattgaaatgagcgctctatcatttattgcattaatccaagctttaagaaaactatcatttcacttctcatagaagttatagattctatatctataatcatgtgacagtcagtagtcccgtgatccgtaaggggaaatatcaggtaagctgtgcaatcccacatcgcctg

SEQ ID NO: 269028 - DNA, 833 bp, Cannabis indica
aaaaagagtggccctcgaggttaatgacaaaggacaatactgcggcaaaagctacgccaagctcgtatcaactttaggagttagatgtcgtcagacgatagggttgtctataaaaattggaaagaagtcaaccctacgctgaaaaataaagtttggacagatatataggttagcagttatttgttagaacttttaattcttttttattgattcagatgttaactctaaccgtgtttgtttttcttcaaactagacgggtttcattgtgccggattccttcaaacatgattgcctcatccttgctgggaagttaatgaaaaacttcaagaataggatgacaaaagacattataatgcctgcagtggaagagaaggatgtgggacgactggcacaagtccctgaaaaacatcccgaaattgaccttactgattggtgcaaattcgttgaaagtggactaacccctgaattcgaggtacgctaattatatttgtactaagatcaacttttaaatacaagtacatgtatctaatgtatttttttggcattgtaggaattgagtaaggtgcaacgggaacgttccttgaaatacaatccagacatcgaagtggtcggagtggaatggtgaacgtacaggaagctgtggtaagtaatgcttgaattataataatgtgctttaaaatttaatttgtactcatttaattattataaaataatgtagaaaaaggatctcgacgttcaagatccccccaccaccgtgtttggatcaaatcttggaccaagagaacaaagcttgtcacggattacgacaaggaaattgcagagaagatagtaag

SEQ ID NO: 269029 - DNA, 668 bp, Cannabis indica
tattcccaaagttatttatttcaaagggtaaatagttgtatgtaacgatcaattttaatttgtgatgtgaagaaaaagtacaaagcttcattcatcacccgtagaagattttctttctccctgtaatacaagagatttacaaaaatgggtatattaatatatgagatataaaaaatgaatttaattctaaattttaagaactgttttagatgagaagataacatattcgtaacttcacggattattaattattaaatatatattaataattaattattaataatgattatatgggaaacaattttgtcctgtgatatatgtttacggaatgtattccgtgatgtacggcagtcgttagatgggggacttatttgatctgagggttgaggttgatttagggataattaaggttaaataatggtaacgcactcgacccatctaaccctgagacccatttaatgtaccacggaatacattccgtgaaattacatcacgggaaaaaatcacgtccctacaaattataacatatatatgaggattttttttttatttttacaatttcaaaatagtttttttttatttttttacggaattttacataaaaatctcatagcaactaacgaaacaatttaaatcgtaactaaaaatatccacatagcaactcacat

SEQ ID NO: 269030 - DNA, 759 bp, Cannabis indica
ccaccgcaggggtacggaaccccattcgcttcgcttgtgccttcgactttccctcccggtacggatcccaacgtggtggcttgctttcaggtggctgatcaagacggaagtggcttaatcgacgataaggagttgcagagagctctctcttcgtataatcagagttttagtctcagaacggttcatcttcttatgtatcttttcaccaattccaatagcaagaagatcggtacatctttttctctctctcttaaaattgattgttctggaattcaaattagggtttcagaagtttacgaatcgatgaatttttagggtttttcgtcgttcgttaaaagatctgaaactgagtcgtaactcgggtacgactgagttgactcgctcgtggcgcgttaagcctggtcttcttctttcatgctatgaaatgaccgatatacccttagagttgaaatttatttacatatttaaccctttgttttccgatactttgtggtccctacaaaatcaaaaagtagattaacgacatttacatatttatcacgtgcaggtcacgtgtttatcttaatgttgactttcttgctttattaaaataaaaaatgttgactttcttaattattattttttctcattctaatttttaattttttattaggtccaaaggaatttactgatgttttctacagtcttcagagttggagggtaataataattaattaattaatctaaataaatgattttttaaaaaaatttaatattttt

SEQ ID NO: 269031 - DNA, 620 bp, Cannabis indica
tactagaatggagagcaccttcatatatactaccagtaaccagcttaaagaactctactccaaagtagcggttctacctactcaacattagagtgcaaaaagtgctagcactcacagccctcttgggtgtggtctcccattgttgtttaacagtggcctctgctttactagagagcaggggtagccacttcacatctaaaagctaaatttgtgtaatataggcttgtatattcaatttatgtaagttgcacagcaacaaagaccaattaataaataataacagtatttatattatgtttgttgtgtctatgaaccacttgctcacagattaatattttaaagttaatcttttagttccacatgcgtactatggtaccctcgcaagacagaacccatgcaaagtctgtgaaacttggtgaatagcaagtgacccagagacttatctgcatggtcacttggggggcacccatactatgaaatgcattgaactagcacaaagaacttatgtatagaaattttaacacttagtataagctactaaacctacctctaagtcatgcaggcatatttcagcttggcaaagtaaattcagacccttacttgtcaaggccataagaaga

SEQ ID NO: 269032 - DNA, 1000 bp, Cannabis indica
gcgatttaagttgctctgttagtagttctcaaagtttttatggtaaaaataaaaaaattcattaatttattattgtgtcaaaatcaatattacaaaacaccaattatacaattgttttttttttagaaaaaaaaaaaacatttaatgagatcattcctttaattatatcatataataaaatttagattattatattttcacctgctcacagcataaaagtagtaaaggagaaaacaaagtgacactactcaagctctctctaaataaaataaaataatattagactaataaatatagaaagtttatttatttaattagttgtatctatttattggttaaattatttattaatattagtaggtgctaattaataataaatattaataaattggatcaggagttgcaattggagctggatggcaagctgcagtagcatatgtgaacattgtttgttattatgtatttggagtcccacttggtcttctaatgggctataagctcgacatgggtgttacggttagtaataattaataaatttatttaaccactaattatatttaggaatttttacaccaaatactgaaattttgtacttttttttcatttttattgtgggttggatttttttttttcaaaatattgtatactgttatttttactgttgttccgtactactaatatttttaattattctattttattgttttacggtcattttataaaagacaataacaataaaattatatatttttacccaaaatgtaatattttataaaatcttctgatatttatgccagttttttctaactaataatatttctgaaatttttttaggggatttggtgtgggtatgctctctgggacagtggtacagacgtgcgttctttcttcatggtgtacaaccaattgacaagagtatatatatagttatatatatacatattagtagttttaatagttttggtaaattaacctaattatttataattgttatgtagag

SEQ ID NO: 269033 - DNA, 526 bp, Cannabis indica
tgaatatgaattcttagataaaaaatctctcgaccctttgtttagtgagaatatatcactatttatagggctacaagcttggagaggaagtatttcccttctacttacaattgttataagtagaaggattgcataataaatacagaatgcaccaatcgtgggatttggaaagcttgccatatctctgtaatctgatcccaaagttaaagggatttccttgatgactcacgatgcaaaagctgaattcgctaagtgttggtgttatgtgcggattgctcacggcttcgtttgagaaagtgtgtgagaggccctgttcggcctatgtcttgcgagcaggtacccagagtcgattccacatgtcaccatcgtgtgatgccacgtcagagtggaaaaattgggataacactaagaaatggttatcattattttggacatggtactagggtgagattggatgtagctttaagggatacgttttctatatagacaaatcttattagggagcctttgtgtaattattttcttt

SEQ ID NO: 269034 - DNA, 759 bp, Cannabis indica
aatcatcccacttgaccttccccaagtggtgtgggattgcacagcttatccgatgtttccccttacggatcacgggactactcactgtcacatacattgttaaagtttagtttattctagaaaatatttgatccaaaatgtgttgaaatttgtgtgaaattttcccttgttaaaaatgtaccaaatttaaaatacaatataattaattctctttcgcattactataaatactgcttttttaattttttttttaatattgttataaatattacatatcgatgtccaaattactgaatcaattatcaccattaatgtctggttgtattttcctttattacattgatttagtttcacattcttttagtcatatttttgtataaatagaagttcaccccattgaaataaacaattgagaaattctcattcagtttttctttctctcttcatcttctttttcttttcttcttatatattttatattattttataacatgttaccagcacgagtctctgcccaagccccaaggtaaatattttattaaagttcttggattgtatcaaggtcacgatacactaaatatatatttatatggaacacttcttaatgggtattaattttatatatatatacttatttgactgaattattttaagaacttttttttcttttttatttagatatttacatattatatatgtttttatatgtttattattgaatttatatatattgtaagctcttattatttatctatgata

SEQ ID NO: 269035 - DNA, 808 bp, Cannabis indica
cctagatacaagtcggtatatattatacgtggtatgcaacctggagagttcattcttgggatgacttgggctgtattttgtagtcgctgtgcgacaagtcttaaaagcttattttgaatatgattgtaaagtttaaaaatgggatcgcagttttatgtgaataaatgtatatgtttaaaaaagttaaagttaaatcaaaattttaattcatcacgatttttgagaaaatcctttgattagcaaaggtgtgtactttattagaaattcactgtagcgtgcctaagcattagggcattacaatttttgaattagagctaccaggttgtctatcgaagatcgtcataacatgtacaattatcatcagagataagctagacacagagataaattgggaaaaatagtttgggtaagtataggaattagttggattaaattttataaaaaaattagagggttttttttttttgtagtggagggatttattaagcatggtaattaaaatttttagtacgtgcatgtatcatataggtaatatggacacatgtgtatgttatttacttataatatctattttatataaaatgtgtctatataacagaattcttagtttatgagaaattattagacgattttttttaaaaaaaattctactaaaaaataacagtttttttttcgtaaaaattaaataaaactttttcttttcctacgattaagaatttttttttcttttttttaccctatgattgagaacaataagaagttggaaacgaatttgaccgatcatataatagaaaagagtactcttaga

SEQ ID NO: 269036 - DNA, 500 bp, Cannabis indica
aaactcattttcaccatccttctctactaagcaagttcagagtgaaaagaaaggtttctagcttcaagtttgctgaaggattttcacgagagtcgttcattcagctttgcgtaacctgaactcagaggttcgatccttgagtaagttctcgatttcttttactttgcacatttattttctgaatgcaactttagctatgctatagaaggtatgtagaaaaccctaagtttagaaactctgcaatttttctttgtaacgattcatgtgacttcatcgttcataatgcttgctttttgaactacgtaatgcctgcctttcatcttacttattctaaacttcatgaaatttttgccctaactcaaaaaaatttcaaacttctgagttgtaactttttcgtcgaatatttttattctttaatctgttaagtactccgagtcgacatatttggctatttaatgttcgatatcctgaccaaacactcatctagtgtgttgtctttt

SEQ ID NO: 269037 - DNA, 739 bp, Cannabis indica
tcttattagatttctgatagttttctcagggcatttctggtatgattcttttcgtcgcccttttcatcttacttgccactatttgtgatcacatagttggcagttaattacaatcttgactgtaatctttttacaacgattatcccctgaaatcatgggggtttgattacatatcacgtagtgtaaatgcggttataatttaaaaatcatataattgtgattttccctcttttacagggttaaaatgatcgtgtgttttaacaagtctttaattgttacgtttgagggtgtttcgataggagctttgttccagtgaccgtaatggcgagctggagcctttttccttgtccttccaagatcgacaatgtacgccttgttgcttctttgtttaaaagattatcgcttcgtttgggacaatcgcagttctcgttaacagagagtttctcgaggctcatttgaatgttatatttgaactcgttaggattgtaaatctttctcagaaataggaatgagccttcccatagcgagataggcaccttgcttattgggtctcgagctaatccgattgttatacttagtttgtaagttatatactaagtgtttccgcagtcgatatgtgtcgccttcatcttcccagctgtaacgtacttgatgcctcgctatatgcattcaatgacatatggtttctcgttaatatactaagcaacattttgtaaatcttttcctcgcataagacctt

SEQ ID NO: 269038 - DNA, 680 bp, Cannabis indica
cattcccaatgtctaataaaccgtcgcaccatactaacatactaagttgtgattttactgagccaaacaccgagttccatgttactgggcaccggaaatgcaaaattataaaaatcactaaatgacataaaatgcatttcagaattcaacaataacagtataaataattatttaaatagctataaataattttccataattaaacatgattaactgctaatttccaaattaaactaagcggtctttacaatggctgagctgggcgacttgaggatcgacctcctcagagtcattaatctccacgtgaggctccctaggtgggatctggtcattggcgcaagtctcgagagcatttggtggactttgaggatgagttgtggagctagtttcgaggccttctccttgcacctggggcgcaggagtagctccagttccaactccatcaactggcgtgcccctagttgatcaaccagttgttgggattcctctatcaacacttgtagagcatgttgcaaccatcttgctagtaactttcttaagttgtggctcttaataaaagcaccaaaatgttaactcagaaatctggactagacttctaagccacactatctcattagattggtgagaatgaaatagttgttaaataattataagagagacacaataaatttatagtagtt

SEQ ID NO: 269039 - DNA, 745 bp, Cannabis indica
aactttctcctcctccatcatcaaaagtccgtctctgattttttggccaaggaacatcacttcttttctagcaaatgtgcacttttcccgtttcacatagagggaattctttctcagggcagtgaacactagcttcaagtgttccacatgctcagtaagggtgttgctataaatcactatgtcgtcgagatataccaccacaaacacatcaatgaatgctcgaaatacttcattaatcaaggtgcaaaaagttgcaggggcatttgtgaggccaaaaggcatcaccaagaactgataagagccataccgagtcacacatgtagtttttggctcatccccctcccgaattctcacttggtaataccctgaccttaagtccagcttggtaaagaattgagcatttcccaactgatcaaacaagtcagcaataagtggaatggggtaccggttcttgatagtgatccgattcaaggcacggtagtctatgcacattcttaggctaccgtccttctttttctgaaacaacaccggggcaccaaacggcgctttggaggcttccatgattccagcatcaatcatctccttcaactggattcgaagctcactaagctccaaaggtgacatacgataaggacacatagccggtggcttcgcaccaggctctagttcaatctcatggtccacaccacgtcggaggcggcaacccttttggcaaagcatcaggcatcacatcctcaaactcatt

SEQ ID NO: 269040 - DNA, 1146 bp, Cannabis indica
gccttgatgacaatcaacaccgttgatctatagaatgcgaatcgattgctttcccagccgttcgatggtagctgatcacagctgtttcacatgtgctttggcctataaaagccacccttctcatttcatttggttactttcagcatttcaccaaattttctcaagttttccagagagaaaagaaaccctcaaacaccatagatttcttactcctttttcttcgtcgttgccaatcgactttctaccagcgatcaacaccaacacccagttcccaagctttatgtaagttcttcacatcttgtactttagttttgtttatcgtttacatagcatgttttactgttcatctgctttttctgggttggatgttgagttttctgggaatttctgttttgagtttctgtgtaacgcgttagattcctccttttttgtgtttgaattacttcttttcatcgtattttttgtcgagggcccatctttttctcacgtaatgacactcaagggtttagagtagacttcgtcttctcgatttttacccctttttccttttctttgcttattcgtaatgtcaccatctgtgggattcttgcacccgattcttgtcaaggaaaaccttctgaggctttctttttgacaagtgtccggaaggggcctctttccagcggttaggagacccccattccctttttgacttagggtttggtttggggcctgactgctaaatttttcaatcttttttagaactaagatgtttgcatccggttctaaatcttcaaagaaaggagggaaacgcttggccacactggaggaggtcatgaagggtccggtggcccaggaagggcacatgtctcgtgccaacaggtgggaggcagccgagcttcgctccaccctgatctgccctcactagttggaacatattgtggtggtggaaggcatcaagcccacaacctccgggaccttccaccggccaccccgggacgaggagacgcccaaccaaaactatgggggctttggagcctggagccagacgcacttgatggccggggccatgcttccccttcaagattactttattaattttcttgtatttgtcggccttgcaccataccaactcattcctcaagcttaccgcctgctttcaggctt

SEQ ID NO: 269041 - DNA, 663 bp, Cannabis indica
agttatgaccaaaatacgattttctaatctccctgatatttctagaaacgagaaactgtttcggtaaaaatggtgaaccgtttcttagcacgaaaatctcaaattttacactccctgaaacaccactgaaacctatccaaattatttctaaatttcataggacacacatataccatatatactacagtaccaatgtaacagaaattaaaaacgagcccttaaacataaaatgccattaatgctcgtgcttaagctctaacaagttccaaactcaatttctaactaaaaatcatctcaaattcaacaaataaacatcaaaactagttcagtagctacccaaaaaaaattcatgaagtcaaaatcttcacaactactctaaataaagtcaatatataaaaccaaccgttttcaacttaaaacaaaactaatccttaccttaacctttctctctttaatgatttactatctcgctactactggagcttaaatcgctgacagcccaattgaagaaatgttcacaagaactcctgaaatttgttcaagaaaatgcaaacgtgtagtgatttttaatcttgacctaagaaataccaatatttatattaatacatctaataatccacaagagattactaaaaatattaaaaataacgacgattatgaaga

SEQ ID NO: 269042 - DNA, 844 bp, Cannabis indica
atagggattgcttctgtgattcatgatcaaatgttgaaattgctaagtgttggcatgctgttcgaactgcccactgcccggttaagaaggctacgtccgtgcgaatatatgtggtattatgttcagcatatccctttcgaacagatatgtgaagttgatttcacgtgtcaccattgtctgatgccatgtcagagtacaaaaattgggataacatttgccctccaagtctgtacgggacttccgaagttgcgtgtagacttcatccgagctatgcctttgcatttgaatgggtgacacgtgttaggcgcgtctgtttgtgattcgatgtgaggctaacgaggtgtctcttcagttttctctaacttaattagtgcctcgaaactcaatttttctcatcacgttttgacagttatacttgattacatttgatttcccaatatttgcttttgggagggaatcaaagcgtctaaaggcattttgaaatgattacctttttcaccacattgcctataaataaactttacttttactgatttcttcactaaacaaacttagagcaaaaaagatttttacttcaagtctgtcgtgagattcccaccaaaggcatccgagcagcttcgtctggactgaacttaggcatcaaacagtgagtaagtttttttaatctctttctctttttactttgcatgtttaaaatctaagtttcatacatgcgttctcgacttgttgtagaagatagatggaaactgtaggctcaaaactttgtgattttctctgtaatagtctgtacagcttcatggtttacgacgttttcctttaatcacacattgtttgtctttcacct

SEQ ID NO: 269043 - DNA, 834 bp, Cannabis indica
aaaagtaacatgagatgaataattcataattttatataatcagagatcttgtggctactctctaattaattaaaattatgtatgttatttatattctttatctcaaaataataatttgagatatgaattatttcaccctacataggaaacgtttattgttaggctatttttagcctaagtttcgggtcgatttcataagtgttttcttagttaatgttgccttttggaatagttttacgcttgattttccttgtttcaggtccccgaggcattaaagttcaaattgtatcaattgttgaaaagacgaggtattctggagaaaaatctactgaagctgtcaaattagcttcagtagttgcgactggactcacccatggtcgcgacccttttctatggtcacgacttgggtcgcgactaggaggccaggcagagagcatggatttttcaatttgcctatggtcacgactaggttttatgtagtcgcgaccatgggcgaaacacagaatttttagccagttttaaaattttgccattcagaggtagcaaccctaatttctatttaagggactcgggttttatgatgaggatcatcagagattagtcccgaaaagtgaaagaaggaggagaggaatctattgtgacgatccagagcgcaatcaccaactagttctttcttaactcttgatttttttatgttaatttctgtttaagatttgattatggatgttggatgttaatatgggttttatgaactaaactctcgattggggagacgatgaatgttgattgacgttttcttagttaatgataattgctattctttttgtcttgttt

SEQ ID NO: 269044 - DNA, 510 bp, Cannabis indica
tttatgattggttaatgatattcttcaaaacttattttcttacattatataggacttgctatttaattacaccaataacgatatgacactaaaaaaagtactagaaaccaatagtactcttgaacaatcatctatattttagtcaatattttgtgcaatatgtgcacacaatttttatccaaaaaataggctaattaggatttttaccttttgaactttgacatgtactaaatcatacctcctgaacttttaaagtcgttaaaaatgcctcatgaactattgagattgttgaatttaaggacttttatccaattttagtaaaaaaagtccaacatggatgaaagttcagggggcatgatttagtacatgtcaaagtttgagagacatgtttagtagatatcaaagtctggggagcatgatttagtacataaataatcattgaaataataaaattaaataaaattagacaaaaatccaaaggtaaaaatcctaaattaacaaaaaaaaaaa

SEQ ID NO: 269045 - DNA, 603 bp, Cannabis indica
aatgacccttcttcattgtaccaataactctcataactttcatcattggagttattacattctgaatcatgagccattgaattatctcataaggatctcaccatgtcagttaagcgattgatctctcctcgaagtgattgtagaagtgctagtagttgctcctcttttttagttgggtggtgtgagtttgggaaataaggtgggtattggtgactccaaccctaaagtgatggatcccaatgccagtcgtaatcaaaattttccatattatacaataaatttattacatcataccctctcattaatagaggcgctccagtgacctctgttccacaatcaaccaagctcctggtttcatcattaagtctgttatagaagagccaagtaaaacacccacttgagaaggtgggataacatctctctccaaactcttaaatctcctccaagcataatagaatggctcattgtgttgttggacaaaattctcaaggtatagtatttagatttatcttacaggtcaaactcatcagtaaaatattactagaaattaaaaaaaaaaaaaaaactaaattagtactaaaaaaaatttgaaacaacaaatta

SEQ ID NO: 269046 - DNA, 658 bp, Cannabis indica
atttgttcatattaaatcatgaatataatagtaaattcacatgtagatagagttacgtacgtagaaacaatattttagttttttatgtttcataacagttgcataaatattttgctaactctctgaaacttgacatattaattattacaaattgataacgatataatgaatttttatcatatatatacaagtgtttcatattgtcatacaatacaaagctctttaaagaaacttttataacatgtttagttttattaatgtactaaattagttgatataaatttggtttacagaggtctaacagttgtttcttcacatattactattaaggtacaatcaattattgatcagtgacaaaaaaaatactgacaaatggtttctgtagatacaaatttacattaatatttttagttgcaattaagttgtacgttagttgaataataattttactactacaatatcatagtattataaaaacatggctcgaaattgtcaaatatgcgacctaaacagacaaaacacgattgttgtaattttgtttttattaaatatgtggaattattagttgttttgtagttttatgttagttggttcacaacagatataactgttgcactacagtttctttacagtttttctaataatagactgaccataa

SEQ ID NO: 269047 - DNA, 566 bp, Cannabis indica
acactacaataaaacttatatttggactctaagaaaacactatattgtagagcttgtcacaagcttcaaaatggtatatagaacgtccaaaacaaacacccgagttaaaagttatgacaaaaatacgattcttaatttcctcgaaattccaagaaacgataaactagttgggaaacggttaactgcttcccaacaaaccggttaactagttgcaccaagtggtggatcggttcgcagatgcaggggtcaaaaatcccaaatttcccactcaccaaaacaccatcaaaaccaatccaaatcattctaaacttcacagtccacatatataccataaatacaacaatcctatgcaatagaaattaaaatcaagcccttaaagggaaaatatcgttaacgctcagactttagctttaaaaaattgcaaactaaatttctaactcaaaatcaactcaaattcaacaatcaaacatcgaaactagtcccatacctaccctagaacagctctatgaagtcagaatctccataaccactctaatcacaaatccactatataaaaccaattattt

SEQ ID NO: 269048 - DNA, 694 bp, Cannabis indica
tttgcttgtccttaacaaaacaacacgttttatggaattcaagaaagacatgattgtcattagtaagcttagaaacactaactaaatttttagtaatggaagggacatgtaagacagaattaagatgcaaagaagaggaagtttttgagggaatgaaagctttaccaatgtgagagatgataagtttcttaccatcacccacggctacagtttcttggccagaatagggagtagatgagtcaaggggagcttcattgtaggagatgtgatgagttgcaccagtatcaacataccaaccttgatcatcaccaaaatcagggatggtttgtgccacaaatgcagtagggtcatattcaagaacctgttctgtgagatgagcttgtggagatgggttgccaactacagatttgggagtaatccagttcttatcgaacctgtagtggcaagttggagctgtgtggccataacgcatgcagacttgacacaaagggcgatttgggttttgagatctggtgtactgagatggatgatgattcttgggaggaaatctggaagatgagtcagtagaagagcctcgaccataagtgttattggtgtgagatctgtatccaccagttcttgacccaaaagtaagattagcagccatctttgttgagagatccatcatagtcgtgtggcgctcaagccttgtttc

SEQ ID NO: 269049 - DNA, 642 bp, Cannabis indica
caccggtgttagccttaccatcaaataaagaaaagtttgtggtatactgtgatgcatccagacatggtttggggtgtgtcctgatgcaggacgatacggtcatcacttatgcttctcgtcagctgaaagagtatgagaaacattatccaacacatgatttggaacttgcagcagtagtgtttgcattaaaaatttgatgacactacatttatgggaaatggtgtgaaatttatactcaccacaagagtctcaagtatttctttacttagaaagatctaaatatgagacaaagatggtggttagagttagtcaaggactaggattgcgagattctttatcatattagaaaagccaatatagtggttgatgccttgagtaggaagggccctggacaagtttgtagtaccaagataatttctccccagttaaccactgacatggccaacacaggtattgagtttgtggttggcaaacttagtaacttgacacttcattctgacctaataaaaagaatcaaatgtacccaactggaagatcctgagttaatcaaaactcgagaggaagtcttagctagatatgttaaggacttcacggtttttgatactggtatgctacttataaggctcgagtttgtgttccaaa

SEQ ID NO: 269050 - DNA, 988 bp, Cannabis indica
cttggaagtggaaaacagtcttcagggcatgccttgttgaggtctgtgaaatcaatagagacccgccatttcttgttcggcttcaattatgaagtttttattgtgaagctttgcaacttcttccttcagggctactgctcgttctttgtccaaaagccttcgtttttgtttaactggccggaagttgggatcgatattcaaaacatgtgaaataatagaaggatcaattccaaccatatccgcatgtgaccaggaaaaaacgtctaggtttgctctcagaaattttatcaactctgattttacttcgagcaacaaaccttttccgattttgttttctggtcgagatatctggatcgatctcgatctcttctaattcttctacaggtctgacattgctttttcggtccccaagtcgaggatccacatcttcatccccgccttgggaagttccctacttggaaatgtttttttctcttgtctatgctctgactggaggatacttccttcttagccttggccactgcaaggttatagcattcccaagcaggttgctggtttcctcttagacaccctaccccattctttgttgggaacttcaggcaggagtgaaatattgatgtgatagcctttaagtcatacaaggccggtcagcctagcattacgttaaaagctgaagggacatctaatatcaggaactatgccattacagtcatgcttgtcggagcttgtccaacagtacccggtagacgaatttgtcctagaggtgcgactcctttaacggagaaaccatagacaggctggaggcatggggttagatccttgagttgaagtcacatcttttcataagcagttttgaacaagatgttggaagaggctccattatcgatcatggttctggccaccattttattggctatctggacttccacgactaggggttcattgtgcagaaatctaattttgaaagcgtcttcatcgttgaaggtta

SEQ ID NO: 269051 - DNA, 773 bp, Cannabis indica
tattctcataaaatattttttttgtgtatatcagtctttttatttaggaaactttgcataaaagagaagaaattatgtttatgaaaagtatgtctaagttgctctttttaagtataattgactctaattgtatgttgattgatctgatcagtttttctatatatatagcatattttctaacctttttatggtagaaaataaagtttaaatcgtgatcttagacctatttggaaagtttcctattttaacacaatctgccactacaaattccaatcttgtctctacaaatcagagattattttaggaaagtattgtataactgtgaaaatgtatttgtggttgtctctagagaatctatatgatttataaataggaccgagagagcagtcaaacgttctcactcttctaagtttcattttgcatatttttatctttgtgataagagaatttcttttgtgaaaacctaaagtgtttagctaggttctagaatttgtttattgttcttatattattcttagaataggttgaagaacttcattgaacacaagaagggtctttgggagaagacttgttaaagacttactttgggagaaagtaagcactcacacatcaaaagaccaaagaagtttgctatttggtggtgttcagaattttgattggcaaagtaaattataaaggattacggtaaagttttagagggagtctaaacatgtttaagtcaattgtattttataaatgtttgaaactttactaattgatttcattctctaggc

SEQ ID NO: 269052 - DNA, 833 bp, Cannabis indica
ggacacgaatgtagtcatgcatgcgtgactgatcttgttatttttttttttttaagtggtgagagattgaactaaatatattattttttgtgcccaacttaatagtcattcttctttaagatgaattaattatctttttcaataaaaaaagtaaaaaaataagaaagaaagagaggagtaagttaaaagaagcatttcttagaataaaaaaaaaaaagttaaaagaggcatttttttttagtattttcaattattaatctattcgtatttgtacttaatcttccaagcttaaattttggtggtaaaataaaaccctctaaatgactgaattgttagtaaatttaaggtgtcatctattttttacagttaactgccaacatagactacttatgtgtacactcttgtacacatagcatatttatattagtacacctaatattattatttaaaaattatttctattttttatttaattttatttaattttaaaataaattttgaaataaaaatattaggtgtaccgatataaacataccgcatgtacaagagtgtacacataaacaatccatggtggcagttaactgaattatttttctctgaattttttcgtctctcttttctcctagaattctaactacttaagcttctagttatagggtgataaaataaatcatgtgcaaatacgcttacgacaaattgcataagagaaatttacactcagaatattctaattagattaacaattattacactataaatgtattgggagacccatggtaacaaaaaatgcaaaaaaaaaaaaaattaaaaatgtcagtacatagtatttaaat

SEQ ID NO: 269053 - DNA, 636 bp, Cannabis indica
attcttaactgtagtccaatgttcctctcctggatttatctgatacatgctcacaattcctactgcatagcaaatgtctggtctagtgcataacattgcgtacattagacttccaactactgaagcataaggaacccttctgatgtcctctatctattgaggatcagtgggagactgttccttagatagacggatatcacgtctaaaaggcaccactgcccttttggtatttgtcattgagaatctccctaacactttatcaatgtaagttgtttgagagagagtaagggatgtattcttctggtttctaatgatttgaataccaagaacataagcagcttcacccaaatccttttgaattgagtttcaagccattccttgatgtaattcattttcttgatattgttgcccataatcaaaatgtcatcagcatagaggatcagtaatactaccacttgattatccttgagttggtaaacataaggttcatcatcgttttggtgaaagttgtaggtcttgattatttcatcaaaccttttgttccaagagtgagaagcttgattaagtgcataaattgacctactgggtttgcaaactttctcttcctgccctggaagaacataaccttctggttgc

SEQ ID NO: 269054 - DNA, 558 bp, Cannabis indica
gaatcagagaaagagatccaggttcagatcttgattatactctgcagcagaaataatacaagggttagagatctgaacggaaggagtcatattatttcgctgcacccaatgtaagatttcctaaactttatatgtgtgtatttcatcgtttttagaaagctcatatttagggtgttaatcaacatacttgtgagtagatctaagatcctggtaaaataatttccaacatacttgactttctatgtgtgcgcacaccactctttcactcaaggtttggatgtgaagaacaatgaaggaggtgaaatctctattgaaggaactttatgatctaggttggttgaatagtcaagtttgacattagtttgacaaagcgtcaaaaaaatgaatgagatgagagcatcaggtgcattatatagtgtttcaactagggcttagggttgaattatatggattaaaaaagaataaaatattgggaagaaaataacgtatggccatacacttaaagtgaaccactttctagttacaatgtgaccactttatttcaaccacttattcttc

SEQ ID NO: 269055 - DNA, 505 bp, Cannabis indica
tttttttttaaaaaaatctatatatctatatatatttatcaatcaatcaatatatatatatataaaagagaagtataagacggtaacataacgctttaaaattagtttaaatatatctatctatttctttcttaaatctcttattttttaatattttattagattataaaccaataaattaatatttaactatttttctaattttaataatttttctatgaaatataaaatatctaattgatcaaagtgttcaccaatctcaaatacgactatatatattcacaaccatgtaactatatacgactatgttcttaattatggtcttttttcttagtttgtatcatgtaactatatatgactgtatgtgtttttttatttccttatataatttgttgatgtactaatatattcttaaggtgacataatttaagagttcaaaaaaaaaaaagataaatgtataaacattaatttaatgataaatctatttatatatccatatatatat

SEQ ID NO: 269056 - DNA, 759 bp, Cannabis indica
tcttttacagcctcaagaaggaaaaagaattgaagatgttggagaagactacttgaatgctttaatatcaagatcattttttcaaagaaacataagaaattgttctttttccatgcacgatcatattcatgatcttgctatctatgtatcgggtcagagttgtcgcatatatgacagatgtagaaaagacttgcataagctaagtagcaagactcgccatctatcttacatggaaaacttggaatatatagaagaatttgatagcctaacaacaatgaagaatttgcgcagcctgattgcattaccattacagtcaatgccaccttcatttcttgaaacatttgtgcaagaagttgtgttaaggaatggaggactaagagctctttcttttgttggagagcatattgattcgattagaaatttaaagcatttgaggtacttggatgcatcgaatactatagtcaaagagttacctgcttctatttgtgtgttgcacaatttagaaacactgttgttgaggcgctgctttatcacagagttgccagattcgattggaaatttaaagcatcttaggtacttagatgtatctgacacaaaactcaaagagctacctgattctgtgtgtctgttgtgtaatttggaaacactattgttggaatcttgcaaaaagctcactctgttgcctaccaacatatctgagctaattaaccttcgccatcttaacatcaaacggtcttcactaaaagagatgccgccgag

SEQ ID NO: 269057 - DNA, 1197 bp, Cannabis indica
ggactcttccttgctactaataattgcttattctgctcttgaaggattcctctctcctatgagtttatgaaacagataataaagaatagtcttggataaaggagtgttctctgtctcatcatttcttctgcacaaaaaatagttatgaaactttactctaaagccttttattttcagtagtacacatttgaactaatctatactacattacagtctagagttccacaatcacaatcttaccaatatatacaaacatccttatcataattttacataaatatatataaagattctgttttgagtgtatacttaggaaaattttttatttggtgtgaacaaaagttaatatctttgttgttatgctcaattgcccaatttgagatactcagccaaactttagagttcttgaatgagactttattttcttaacatttgcattttttttttttgaaaataacttttgcatcttattacatggttttaattcaaccaaaaataaagaaaagggttcctcccaaatagaaataaataatccaacatattttcttaaacagaataataaatcaatacagatctacaacaataagaatgatgggcttgaaatctttgttgatatttagttttattgatttaaatgtttgttgtagatgtcatcgggaaagcgcaatgtcgatgaagatgacaagtcagttgctaagcgcacaaaggcctccgacaaagggaaaaaagtagttaccaatgaggtaaatttaacatgtatacgtaaatgtgtgatgtcgcataattattattattgtattgtattgctagatatacttgatctatgtgtaaaaggtataaataatttgatcttttacattattgcaggaacaaagtataaacaactcacttgaacgtgcactgcaacgtctactagaaaaaaaagcatcaataattgcagggaagatcactgcaaaagaaaagattaaggagccaatagtagagagtgacaatgacgaagatcgttgtagggtccaatgtagatgcagtccagaacgattaagagaaattgtgatcggtttgaacgaagcacaaaagaaagttatttcagatataggcttcgggtccctccttaatcatgaaattccgtcagtgcgtagttctctcatatggtacttgtacaaccatatggatcttgaaaaatttgaactagtccaa

SEQ ID NO: 269058 - DNA, 588 bp, Cannabis indica
agaatattgaactctcaatgaaagcaccaaaaatattgattgggaaaatagccaactgactcaaagtctaataaccgctgattaatcaccaataaagagttaagaataataaatatttagaaaggacacagaaaattgtagatgttcgtccccttaatatgttggtaatgacctactcctatttttcttgtattgattgtgagataaagtcacacatatcagtaaggtaaatagagtgaattttagctacaactctgaaagtgtttacagaaaatattttctcgcaaagtgctcttagatgcgtgaatatgatttcaggttccttcccttgtgaatttattcactatttataggggaaggttgttaaaattagccccgtaaaagaagtgattagaaagtaaatattcctatattttagatggcagttacgatttgttgaagctcctactatctcgggtagatctattagctctgcatttgtaggatttagtttgagatatttgtagaagtttgttgaagaagaaatcaaggctcatgtagccttgtctgacattcctggtcaccgtttcttttggccggcatattggc

SEQ ID NO: 269059 - DNA, 1365 bp, Cannabis indica
taatattgaaaatttctacaaaaaaatatattttatttttctttttaatatatttacatttatattttaagaagattttttattttatatttagttttatataaattgtttataataaatctgctaattttaaaatttaatttattattttttaatataataaaaaaatgatgtttaaaaaatatatataaaaattatctaactaatacaattatcatttcctaaaataataaaaaaattaaataattatatgcttgtatatattagtaaaataaaataataataaaaaaaaaacacgtctcacaaaggaaataggaataggaataaatgatatggtattgattctcatacaattgtttactaaattttaaaaattgagaaagtagtgacctttcctaatttattttttttaattttaattttattaattaaaaataaaaataacaaatatgtcctttataaatttataaacaaaaaataattatacattctaacaatgataattttcttaaattaaagcattccaattacattttatagttatataaacaaaataatatagtaaacaacatagtaaaatattatttattattttctattttaaaccaattcatttctcgcatttattattttaattctaattacagtttagcaaatgtgccataaaattgtatctcatgatgtttgtttgggggaaaaaaattgaacttggaaataaacgacccaacaaaataaaagactaccaaaaggcccacattgaaaaggcctattaaaataaatacaccaaggcccaagagtataaaagtaggcccgactcgatatgaccaaactaccaatccaggttgccaatccataagggggcactacggacaaaaaggaggaaaacgataaataacaggagacgagtaaaggaagtgccgacggaaatagaagaagaaacaggaaggaacgagaagccgacgaatcaaagattaactacaagtaaaatagtataccaggaccagaagaggcacccggatacctttccgacggaggaaatatctgaaaacgcctacggagaaagtaactaaaaaacaataaaaggggatcgaggtaacacaaattatggaataaaggcccccggcggatgagaacttggatccccacagacaaggatcccgtcggaagtgggggggaaactaaagcgtaaaatatgaaattaataaattcaggaatgtgatgccgacggacacaacaccgaagctaggaagaataataactctaaaacccactaaaggcacaaacacgtgtagcgagagagttatctactaaaatacaaacacatggcggagggcaaaaagaatgaaagaataagaacacgtgtca

SEQ ID NO: 269060 - DNA, 666 bp, Cannabis indica
agatcctggtaaaataaattccaataaccttagtatctctttgagtgggattttgagaacaagccctgagctgaacgactggggcgtcatgctgctcgtccaaccctctccttctgttcaaatcatctctaagatcatgaaccgttcccaatcgattaaatatagaaacacccggttgtctctatggctggttggtttggccaatcaatttggcgacaccattaacttgagtggaatttttaggtataacttctcttaatgaattgctagatagagtcttcccgcctaccacttggctcacaggtggaaactgtgaccgaggattggacggctgacaatttagagtttgagaggtgttcacagcgggatcttggtttgtcttgcccaggggaatgacggttgtaggctgttgactggtagcctaataggcttttcgaatcaacatagtggccttctggttcggtcgtcaatggctgcttgctgaaccctcattctttccatctctttatccctccaatatgcgcatttcctcttcaattgtgagattcaccgcagcacggagttcctcctgatcaagacgagggtgttagtatgaccttgcatgattcccaaagtagcatggaggttctggatctctgtgtcatctccaatggttgctcgaacatt

SEQ ID NO: 269061 - DNA, 520 bp, Cannabis indica
attattaatttttcattttttttattgtaatcttatattattttttagatgttatttttatatttatataatttttatatgacaccttgaaattgaaaaaaaaaattgcaaaaatgtaataaaaaattattaccataaaaatattaaatatttgccaaaagtaataatttatgtaagtttcgcctatgtaaaaataatgtattggtattggattttggactccctaaaatttaaaggcgactctaaggatgtgacaccattaaatttatatagataaatactattttgaatcctgtgttttacgaaagtgaccaattggatcctctattttgttaaatgacaaaataaactctgtattttctaaaatggtacaaataggatcctgaattgattttttgtcgtaataaaatttaataataaaccgatctaaatgtgttatgacaaaactgtttaaattttttgtatctgttcgtattagcaattgtcttcaagttggttatataaaaaaaaaattgtcaaa

SEQ ID NO: 269062 - DNA, 807 bp, Cannabis indica
gttgcacgtgctgtgtggtttcaaagtgcctggggaattcgtgttgatgacttgcactgggaggaaatgtctcattttggttgctggtgggcccaagtaaaggatgaaaggcttctcttattctcatcctgtctttgtgagatgatttggaagtggagaaacaagatcattttccaagggtgttctttctctttggcgaaattaatttcagacattaatctcagagttaaggagatggagatgcggatggcgcctttgaatcttatggatcggtctgaggacattgacgtggagttggattttcagaatattgatgacttgcagtgtttcttctcggatgcctctatcttgaatggggctgctggtgttgcagctgtcaaggttaatgttgctgatgttggggaatcttgggttgcttctcgcttccatacggtttctggggttctcgaaggggagttgttggctatttacttggctttacaaatggcgtgcgaattgggtgttaaaaagatcaaagtcctgtcggactccaaggtggcgatcatggccttgaaaaatggctgtttgccttatgcttggggcacttatcctgtttttgaatcttgtcgatgtatttgtaagtgttttgatcttgttgtgtttgtgcattgccctcggtctgagaaccgtgtggctgatgctgtagcgggttgggcgagatgtgccatggcctgctctgaaggcctgctaaaggacttagctcctgcagttgccgcaagtctgatgtagttgttttgccttttctttcaataaaatctttacttaaca

SEQ ID NO: 269063 - DNA, 535 bp, Cannabis indica
atgtaaacaatccacaaattgcatcaactccaaagaaagaaaaaacatcactcatgtataaaataaatttacaaacaactacaaaacacgtgtatatcaactcaataatgcccataaaggaactaaacacatactcatttttttatttgttgaacaacttaataacaactaacaaacaattaaatgacaacattacataaatatacaaatcaatattggacaccaacaaattgtgcattctcacacactcaaatcacacacgctatatttataaaaatggtgtgtccatatatgattatctatagttaaagtttaatacatattattttgtgtaaaaagtgtttgatatttttttgtgtgtgtatttagctttactcaaactcatttagtatgatttgatttgatattttatttttaaaatatatttattttgcttgaattggtagaagctattaataagctagttactagatttgttatgtggtaaaaaatatttgaataaaaaattttatttattattatttctactttaaaa

SEQ ID NO: 269064 - DNA, 615 bp, Cannabis indica
gacagttttgatatctttattgagccataggaacttgtcttggaagacaaatcttgagagttcaagataacgtaattttcctttggtctcaattgtattgcatagcaagttatattgcaatgtaatgaatattattgagaatggtgcatagcagtttttgtgctagggcaatagttgattgtatggtgcatagctgtttttgttgttaaagagtttcaattattgtctcttacttgtttaataaagttacacatgttataaatataattaatgatgaaatcgaattttatgtttcgggaaattagaaacataaggtgcttgaataataatgtatttttcggagtgttatacctattacctacaaagacattgtttcaattgaaatgtgtatctaaatcttggaacaacttgattatctgatcgttttctatccattctcaattaaaaaggacaaaactctctatctcagaattcaacttttaagacaagttcccatggctcaacaaatatatcaaaattgtcacatacattcctgttgatgaagaagactttcaattcaaacagaaaatctttgattttcacactgaggatattgtggtattgtcatcgtgttag

SEQ ID NO: 269065 - DNA, 1296 bp, Cannabis indica
cttacctcgattccgaattcaggtgtgccggtcaacttgagtggaacgatctgctcggcaaattacaggctcctaaaccataataatcacaacactaataagtgacaagctaaatcacttcccggggacttaaactagaaactaaaagtttccctatcgataaaaagcatggcaataccccaaacaacacaaaaatgggaagaactagggttcctaattttccccaaccggcagaccggttctacaaccggaattccggttcctacaggccatactgaatcagaattccggttcagtgtaggaaacctaaaaaaattcatttctcatgcaactcaaccccaaatcataccaaaacctccagacctgctatttagaccctaatgaacatattcaaagcaagaaaaccaagcttcatgcataaatacaaaaattgccattaaagctccaagctttgagttcaaaactcaagcttggttaaactccattcacatgcatcaaaacctgcttgaatctactcaaatatgcataaacaagcctctaaaaacaacagcaatcaactacaacaagcacaacaacaaaattcatcattttaccttgaaaaccatagttttgggttcaaaactccacccttagtttaaatgaacaaaaaacaacaagaccatgcttgaatcaacatattaaaacataattaagcttcagaaatcactaacaaactcaaacaacagccacaaccacaaattctcaagcatgcaactatcaaattttctaaaaaattcaagaaacttaaaagaaagctataagaatcttaccaacaacttgtgatcactaaatctagagaaaatagcttgaattaccaaagaaaacaccacctccttgctactcaaagagaggccgaaagagagagagtgcttgagagaaaattttgaattttgtttcttttctaattttccaattttgaataaatgataaaacacataactcttttctttatttcagctaacataaatcaaataaaacacatatttacataacactaagtccactaaaggacaaaagcttatggggcaaaaaatgactattttgcccttcccacactaaaataacataaaaggttattaaggggtattttgggaaaactctaaattcccgactaatcccgacattcccaatgtctaaataaactgtcccactatgctaaaatattagattgtgattctactgagccatacaccgcgttccatgttgccgggcaccgaaaatgcaaaattatgaaatctcactatatgacataaaaat

SEQ ID NO: 269066 - DNA, 597 bp, Cannabis indica
tatcgcgaatgtatgtgtttggccattaaagaagtatgaaccaatgctaccaacactagtacaccagattactgagtgcatgtggtattatggttggttatcctttcaaaataatgaactagtgctaccaacactagtacactagagaactgagtgcatgtggtatttagctagttgtacttatagtatggattgatgctaccaacactagtacgactagagtactgagtgtatgtggtattatggtcaattatactgtggtcaagaacgtttgagactcaattatacatgtttgcatggtttatgacttgttgataggtgtatgggcacttagtcgtaggttacctatatatttatgtttaatgcttttcttactgagtatgtcgactcacagatgctatgttatgtgcaggtaaaggcaaagttattgttgaacgacagtgacttttgagctagatgaagattgtatatatcgagacagttcgacctggaatgttggatcttcgagacaactagggctcaccattatgtagttattgtgcgacatcttttgattatgtaaagttaaaaaatataaatatgggatcccagatttta

SEQ ID NO: 269067 - DNA, 1663 bp, Cannabis indica
aaaccatgccccctgaacttcatccatgttagacttttttactaaaactggacaaaagtccttaaatccaacaatctcaatagttcaggggcatttttaacgaccttaaaagttcaggagcatgatttaggtacatgtcaaagttcggggagcaaaaatcttaattagcctatttattaattccacgattactccactataaatatagaatttcactcttagtaattatagaattatatttattagagtttaactgtagtgtccattgatataatcaattcctttccagtgattaatcctccatgtcttaattcgcaattagttttggtcaaaataccattttacccttctaattacttttatatcctttagttttattaattcactagtgaaagtataattcaagatcccatctgaatttgtgcacaacattccagttttaaaattaacacttaaagggaaccaacattcgatcagttagaaaagtcaagatttcatatttgtacatcatgttcacaaccatccatattattagttcctaaaacagaagttgtaagaatcatcttctctgagaaactttaacgagtgaatcaaagaaactgataacatgaacaaaagttcatgataagtcaagatttaggtcgatctactattgatcatcataatgatatgaattaggtctttatgataaacgacatgttaataaacacagctttattcatataggtcattgtcatatataacctctattatatacagcactttcacttagatgtttcactacatcagtaatccgaacttagattatttgcacagaagaatgggcatcagtgaaccgtggtcttagttctctgttcagctacaagctacaacctcatatataaataagaaactttttgatatttaatataaatttttcaataataaatattatcaatttaacattcacatatatatcaaatgtttactctttatttaataatcagaattatattcacaggttttttaaggtataaactctaatacttttaatggaaaagcattgatatttggatatcagtggtgcccaacacattttagagatgacgtcctacgatttgttagtaatatttcttaaaaactattacattaaattatatgagacttaatacttaattatactaataataatatgtcacttaggaaggtccagggccgtcttaaacattgtggaggccctattttaattttaaaaattaggccccttataaaaaaaatgaatttttacaaaaatactagattttttagtaaaagtttacaattttattatcacacaaatttttttacaaaaatactgtttttttataaaacaaccgtaaaataacaaaatagaacaattaaaccagtgaaacaattaaaaaacaaccgtgaaatacagtacacagtataaactaccaagaccgacccaaacgatttaggagccttgggcgaagtaatagtttctttctaaaaaaagttgatcacattctcaccactagctacccaattgtaattaacgaatattagctatgattatgtaaggaccgctctagtaatgtggattagtaaaggcaattagcactattttttattattttattattatttgtgaattaatttaaattgtggaccccaatatttagaa

SEQ ID NO: 269068 - DNA, 559 bp, Cannabis indica
taattaatcaaagttttgaaaagcaatagacttacaaagcgagaatgccgtccacccacctccattgttgcacatccatggaaaactcaaggttgaagatgatgaatagtagcaatttcggatttgggtgaaaaagggtaatttgtggtgtgatttttgaaggaaaaggaagatttatgagaaaaaaactgtgtttttggtgatatagatggaagaattgaagaaagaataaacaaatttgatgatttatggtagaagagggttgtggtggctgagaaaagggaagaaatcgggtgggttttgattttaaggtccttctagggaaataccctagtgataggaaaattacagaatgatggaatggttttgtacttagtgtaaatcattactagattcatggatgacttgatcgtgatcttcagaaaagctagaactgttaactaaggtttgcttgtttgatagctattctaagtgattaggggtggatcatcctattgtcattaagataagaaagtatttatttcaacaaatactacttttctaagaatatgactaagtc

SEQ ID NO: 269069 - DNA, 1292 bp, Cannabis indica
tatttttattttacaattgagttattgtctagttgtcattgttatttaagtgtttagcttaaaaaaaatatatatttaattttttatggatatacatattttataatttaaaatgtattttattttagatattcttttgtagatttcatttagtcacctgctttattaatttttttttaaaagatttaaaataataaaagtgttggtcatataaataaaaaagtgttggttatatattgctattttattttttttcttctttatttcttgtgattaacacacctcttgattaacaggatgttcgtatatttgaaaaaaaaaaagaatcttcttttgtataaaagtttaaatatgcatgtgtccatataaatgtaaatacgaggtcttttttgtatatttgagaaaaaatctcaaaaaataaccataaataaaatataaataaaaaaaaatcataaaaatattaaaaaaaaatccataaaattttaagaaaaacaaaaaatagttcatttttaagtatcttgtgcaaatttcccaataatatatataaatattaagttgtatatttatatttaactaattttattgtagaaaatgaaatagtttattcttctcaaaaattaagtcaaatatatttatttaacgtgtaaatactatttgatttcctcctcgttctattatatctcttttctggtttgtattcaaaagatttttttaatttagttttatttaagatcatcttgtaaatttttaaaaaattttgagatgcacacggggcggagaattgacggggagtgctccccttgtccccattcccattaagaattttaatccacatccctgcttattctccattagggataggacagggaatcccctaataggggcggagtcggggcgtgaaatcccctaataaaaaataaagtttacaataaaaatttaaatatataaaaatattaaactacataaaattaaaatattacacattaattataattcaataaattaattattatccagaatacaactttaaattcgcaaaaagaatactaatatactaaaaaaaaagcaaacatacattataaattataaaataggttaattaagattttttttccccgaactttgacatgtaccaaatcatgacccctgaacttttttggccgttaaaaattccccttgaactattgagattgttagatttaaggacttttgtctaatttcattcaattttactgttttagtgattgtttatgtactaaaccatgctcaccaaactttgatatctatcaaat

SEQ ID NO: 269070 - DNA, 591 bp, Cannabis indica
ggttgcattgtcctggaggaggctttttccctcttattttcccactgggattacaagttttggcctctgtggtcaaccactgggtgaccacaagaaggaaaatgagaaaaagggtcttggagcaaaattggttcttcatccttttgtatttttttgtttttagataccttctttctttggttagattggtgtaagttgatttcgaggttggctctatatatagagaccaagtagtaagtacaagaagtgataaatgttcttttttgtgtgtttctacaaataagatatttttgcagtctttatttcaaataagtgggttattcaaataaactaatactaaataaattaaatagagaaacggggcttttagctgtatcaccatgtttaagccatattaattctcctatatgattcagaatctacgtggcgtcctggcaaatttagaaccacaaaatgtcaaaacagagtacctgaaaaagatgcatattttatcacgaattttatacaaatggcctcacaaaggtacgcgaagaggcctttattgtgaaacaaacaatagagtattatgctattattagcattattattatt

SEQ ID NO: 269071 - DNA, 618 bp, Cannabis indica
gattccctttccctccatttgtacaagaagtgttggactattatggggtagctcctagccaactcatgccaaatgcttggaggttattgttgggtatagaagtcatagttagagtgaaggggaagagggttgaccttgtagatttcaagtcaagttattatcttaaacaacacgatacagataaaggtcgatatctattcactcttagagcaaacaaaaaagcttgggtaacagagttggttgctagcaacaagaggggttggaggaagaaatattgttttgtcaaaggtgacctgtttggaacgagtgattatgtggttcctacttcatggagaaccttaagtgagtgaggagtgttgatttctttgtcgttttttatttgatacttgatttgtctatgaatactaactatttctctttgtcattgtaggtaaggggctcactcgatgtcctcgcagggggtgttggtctgaagctcgagttaacgacttgctctctattccttccgatcaaagagcccataacaagcttcttgttttggataaatcttgtgttggaaatttgtggagaggtgcgcaacgtcaagaaggtagtattttttcactcaacgttgtcaag

SEQ ID NO: 269072 - DNA, 812 bp, Cannabis indica
atacaggatttacactctaaattttcacttaagcatctcggccagctccattattttttgggaattgaagttaaatccactcccactggtctgcatctctctcaagaacgatacattcgtgatctcttgtctaaagctcaaatggatgaagctaagtctatgcctacaccaatgatcagtagcttgaaattatctgctcatgatggagatcctgtgcctgatccaacactctatcgttcaatcgtaggtgcactccaatatttgaccatcacacgtccagagatctcctatagtgttaataaagtgtgtcaatacatggcacatcctctcaatacacattggcttgctgtcaagcgaattttaagatacttaagtggcactctgtctctcggtttgacattcaagcctctttcagcttttgaaatcacagcctttagtgatgcggattgggctagtgatccagatgatcgaaggtccacttcaggctattcaatcttctttggatccaacttgattgcttggcagtgtaagaaacaacatactgtttctcgttcgagtactgaggctgaataccgcagtgttgctcaagctgtgtccgaactcacatggttgcattctctgttttcagagttacatattcgactacctagacctcccattctgtggtgtgacaatcttagcactgtccttctcactgccaatccagttcttcatgctagaactaagcatattgagctggatttgtattttgttcgtgagaaaatctctcaacaactggttcgagtcaaccatgttcctgcaacagatcagat

SEQ ID NO: 269073 - DNA, 904 bp, Cannabis indica
cgagctgatcgatccttcgaagtggaaaatagtctttggggcatactttgttgaggtttgtgaaatcaatacagactcgccatttcttgtccggcttgggcaccaatacgggatttgcgacccaagctgggtagaaagcttcaattataaaattgttgttgcgtagcttttcaatttcttccttcagggctactgctccttctttatccagtagtcttcgcttttgttggactggccagaagttgggatcaatattcaaaatatgtgaaatgatagaaggatcaattccaaccatatccgcaagtgaccaaacaaaaacgcctaggttttctctccaaaattttatcaatacttcgagcaacaaaccttttccaatctttagctttctggtcgggatatctagatcgatctcgatctcttctaactcttccaaatgtttttccccttgtctgtcctcttgctggaggatacttccttcttagccttggccactgcaaggttgtaacatgcccaagcagactgctggtttcctcttagacaccctacccaattctttgttggaaacttcaggcatgagcagaatattgacatgacagcctttaagtcatacaaggccggcctgcctagaattacgttaaaaattgaaggaacatctaatatcaagaattgtgccatgatagttatgctcgtcggagcctgtccaacagtgaggggtaaacgaatttgtcctagaggtgcaactccttgaccgaagaaacaaaagataggctggagacatggggttagatccttgagttggattcctatcttttcataagcagttttgaacaagatattggaagaggctccgttatcaatcatggttgtggccaccattttttttggctatctgaacttccacgac

SEQ ID NO: 269074 - DNA, 1261 bp, Cannabis indica
ggggtccattgtatctccaaaatgtctcaaataatgacttgtaataatgcttttttgtaattttgtttctactttcttgtttgtttgtttttttttttagatttttattttaaatatctttaataatagtggggaaaaaaacttattatgtcccatattttttgcttcattgtttcaactttttttttttaagtatccttttcttaaatgttaaccaaatgatttttttttatttttttattttttttatttcaatactcaatatttttcaatgtgtgcaatttcttttactttaaaaattattatttttataaattgaaactaggatctgatatttcattttgtgttcttatattttagcttagtttttattctcaattcttaatggcttgttagaggatatcaacttgttaaagaaagattttcttttgtttcttttgttcattgttctatattggttaaattagctagctcattctcttgtaaaatttgctctcttcgatcattgaccatgctaaaacttggtggtggggcttacctaatcagattgtactcgtttttcttatttttattttttttttaaaaaaaaaaagaaaaagaattttcttcaaaaatatgtttagactatgtatattatgtcaaataatcaaaaataatttttcaaactcgaatttagtcaaaatattttaaatatctgcatattaaaaatttataaagcaaagatatataattcataccaaatttgtattcagtaaagtattttttgctaagagttagttttgtcagttaagttagttaagtatttaactaaattttcttgttgtaactgtgtgttagttagcttgattgttggttgttagttgttaaaacttgtgtatataaactctgaaatccttttctctatcagtacaagagattcatttatttcctttgttcacaatggtatcagagccaagctctttctcttctctctttattcctcttagttcctgcaaaatcgttcatggctgctcaaggaggtttttctcacacagccaacaacactcttcctaaaacatctctagactccatttacattctctcattccctttctgttcgaaaagatgagcacaactacctgccatggcgttaccaagtctatgcagcaatcaaaggcagtcgactccagaagcatcttgatccagatctagctccacctaaattctcaccaatgaagatcgaaggctcaattgagtcagtccagaatttgaagactaagga

SEQ ID NO: 269075 - DNA, 596 bp, Cannabis indica
tctatgttgagaaaatacatttctgagcctgctcacgtgcttagttatgagaatcttaagttgcaatcagacatgtcatttgaagaacaactggttcagatccttgagaaaaggataaggccctacgaaacaagactatagctttggtcaaagtactctggagaaacaacaaggtacaggaggctacttgggagttagaatcagacatgagagctcaatatccagagttgttcaggttagatttcaaggacgaaatccttttaaaagggggataattgtaaagaccgcttagctttaatttagaaattagcagataattagggcttaactatggaaattatttattaactttgaattattaatttatgatgatttatttgaattcaggatgcatttttatgtcacatatagaaatttcataattttgcatgttttttgcctaacaacattggaacgcggtgtttggctattagaatcacatcttagtatttctagtatagcaggacaatagtttagacattgggaatgtcgggaataatcgaaattttagaatttctcgaattacccctaagggctttttatgcccttttagtgtg

SEQ ID NO: 269076 - DNA, 1279 bp, Cannabis indica
cctattaatatttatagtagtacgttcctttaagtttttttttttttttttgtttttttttttttttttttttatattttatggccccatttcaaaacgggatcggccctgctcgcaacgaagagcccttattatttggtcgcaactaattgtcatcgcaatgagaataccgtatggttgcggcgagatcattaacagaaacatggattttcgactcgagattgtcgtcgcaactagactatctgtggttgcgataaggtgttccgtaggggacttaacgacagttttgtaatttggctattttgaattgaacgtaaaactaatttctataagaggatttcaaatttttatggtaattatttagaaatagaaccctaaaaataaaagaagaaaacttgggaaacgagtgtggcgatctgatcaagttctccatctagcttctttctattcccttcttatttcttatgttaatttctatttttagtttaaacatagatttgattgttgaagtattatgaattaatttccaatttaagaatataatgaatgttgattgattttattctaatatgttaatatgatttgctttttcttctctctggatctttttgatttgttcatatttgtgttaatacatgttttagattgaccacctttaatatgatttatgatcctaatatgaaatttgaaaagtgaatattatgaatgctttaattgaacaaatatagatttgatgtgaaacgagagtattcacatagcttgtgtgacccttagattatttcttaatgtaaattatatattattctatctcagatatgcaatagatgatatataatttaggacattaatcatctgaaaagagttagggctatttttataatttttcatcacttaaagaaaaaagattaataaatagcattgacaattaggtaattgaaacaactagatttatatccctaatctctcatccattataccttgaagttttcaattatagggaattgttcttgaagttttctgtcaatttttattatttttctttccaatattatttcgattacccaaatataaatataaatctaatttaatggtattcaatttcgattccctataatttgacctcacttgtgtgagtccgcttgatacgtgcacttgagtaagtttataattttcgtaacagtcagtagtcctgtgatccgtaaagggaaataccgggtaagctgtgcaatcccacatcgcctggggaaggccaagtgggatgattctgagactgtgtagg

SEQ ID NO: 269077 - DNA, 1097 bp, Cannabis indica
aagtccactgaataatccttggaataccagaaattttcttttggcagtacttaccgttcatgtatttacaacactcataaaaccaaacttgaaatacatgaggacaaccaatcaaagtgtaaaatacactcagcctttttcctaaactcttcgcctttctaacactttcaacccaactgtcaagcttccccttcaacgataaaatagtcaattcaaaagaactctgtccccaagcaaattcatcatacctaccaccgtctacaacatctaaaatggactgatgaacatttttatgcttagtatcactaagaaaaaaccattcaacaaaataaagaactgccaacaacatctaaaaaatggaccgatgaacatttttatgcttagtaccactaagcaaaaaccattcaacaaaataaagaactgccaacttaacagcatcctcatcagaatcacctcacctctttgtggtaaaacattccctaacagattctttagtaatagaggttgaggttggccaatatttcatacaaagacaattaacatcttgcttaaaatccaacacactacaatcacttttacaatctaaaccagttatcaatgcaaactcctcaatgctaaacctaatcttaacaccacgaatcataacccacaattcagcatcataaggctgctgaacctcccttcctgcaacaataacccgtgaaaaacttgcggttgcactttgaaatcaagaagcttaatgaaatggccaaaacaagttttcaaaaacatttcaagcttcttagaagaaagacaagtcttaatattatttataaccatgtatgaagcagtggagacggcttttgcaagaaacagattcttttggtcatatatgtaataccattcctacaacagttccaacaaaaacatcataaaaataataaaaaaaaaaactaaaaagctaaaatacaatatactacagaagtaacaaaaacaaaaatagtactaaaaaaacacaaaaataaaaatacacaccttatatgaacaacccaaaaaaccaaaaatcaaccacaaaacaacattttaaaaacacccagacataaacagcctaaaagatg

SEQ ID NO: 269078 - DNA, 799 bp, Cannabis indica
aaaaaatgcctggaacactttttcgaaaacatgattggaaatagcctaaattcacaaaatgttaacctaggcgctaggcccaacaccaggtgtcaacatgggcgctaggtcaattttcatgctgccaaatggttccatttgattcctaaaactacttgtatcttaatctttgataaaaacagagaatatgcccagaagtcctcccaaaaaaaactccttggaattggctctggttgtcaaaatatcaacatgggtgctgggcgagcactaggtgtcaacctgggcactgggccctatttctagctcctaggtcggtctgtttcttccttgaaagtacttgtttccttatttttggtgaagacaaagaatgtgaatgagatagatcttcagcttgatgcttggaagtggcccaagttgacaatatgtcaacctgggcgctgggtgcctagggcacctggtgctccgggtgctcaaaaatgaaagtgctctgaatctgatgctgatctctcaaatatattcatgacatgtctaattcatgttccaacacaaagtttgacctatttgcactaagatggtcccagaaaatgaaacccaagttgggttgtcagccttggcactaggtgaaaccctaggcacctaagttgatttttgtggtgttgtttcgtgtatttttagctatcgacccttgcacttggatgcttcacgtcttttgttggtttttatggtccatattagagttataaaagttgaagaaggtttgataaaaaatagttttatccaatatgaaccataagcccaa

SEQ ID NO: 269079 - DNA, 500 bp, Cannabis indica
aaaaaaaacttatatgcactgctgaaacaataaaggtgcgtattggaaagctattatgtaattaaaattgaagaataattataaagtttagtatatttgtttaactaaataattaaaaagtaatcatgtaattaaaggtaattgagggtcttatactccctaatttttatgacctcaatgaaaattgggtgtaaccatttttaaataattaatattattaaattgtgtaattattaacttatttgtcaattacactaaatactaattatacacttgtaattagtaatattattagtgcatcaaactttttatacaggtcagaactagatttgataaaacgcttattgatagggaaatttgattttctatacttaaaaaaccttaatattttattcttaaaccaatacatttcaaactaaaaaatatatgacacttttatctaaaacccaaaaatacccctctcataactcagccccatttttcccaacccgcatatgtat

SEQ ID NO: 269080 - DNA, 586 bp, Cannabis indica
acttatcaaatatttacaagttatctgatccacgtgtcccttttcgactggtccacgtattttgggcgaattcaggggcaacagtaacttttgcaaaatacatggtccaaaatagtatttgcctaattataaatcatcattcctatgttgtgactaataaaaaatttgtggctaaatgtattagtcacaaaaattacaatttgttgtgactaaataagtattgtgactaaactaaattggtgacaacttgtatctaaatactaagttttagttacaagtaattatttgttgtgactaaaagtcacatttaattacaaaaaatttatgttgtgacaagaatttatcactaaaagtaactatttttttgtagtgcttttaataatataaatatatatatatatattatagagttttattttttctaaatattttaaacttaattaataataattattaagtaattaagttattatagatatatattattataccgttagttttcaaattgtatattgttatgaattcaaaatatatataattattgacaaatttatagaaaattcatcatcatatgattttaaaaata

SEQ ID NO: 269081 - DNA, 598 bp, Cannabis indica
tttaattattttatttatgcattagttcaaaaaattaatcataattcttatttcaacaattattcaagaaatggaaaataacttttacttaaaactctcattaactaataatttatggtatcttctttttataactcctattcatatttatattattaatgtatcaaaaaatttatggtgacttctcattttataatataactatcatgcataatatatattattacgtgaacaaaaatttattaatgttttcattttataactcttatttatatttataatacttatatattattaatgtgaacaaatttacaatgtctttccatttataatatctatatatattattatatgtgtatattattattatatatattgtaacattctcttgatattcctatattgatatacactagctatatactctcatgagcaatattgtgaaaccataaattttactatattaaaaaaaattggctagaaattcacatttttttctcagcttttgtaggctctattgtgtgtacttatccaactcactcttcatgataatcaagctaattaagaagttgagatgtcttcctataaagatagtatt

SEQ ID NO: 269082 - DNA, 527 bp, Cannabis indica
cacatgtatggctcactttcttatctgcatcttggctttctttttaccgtaattttgaaaataaaaaatttaaaagatagtatttttgaaataagtaaaaagtataaatgtttattttttcttgtgatgatataaatatttatttttagtagtattaatcccaaatagaaataatccctatataaatatatatagggacacgattttatcccgtgatgtacttttcacgaaatatattttgtgatgtacagaatacattagatgagtctcagggtacgttaccattttttaaccctaattacccttagatcaaccccagctctcagatcaaataactccaccatctaacggctgtcgtacatcacagaatacattctgtgaaagtacatcacgggataaaatcgtatccctatatatatactagaagaaagttacgtgcaatgcacgcatacttagttttattttagatatcatgtttcaaatcttttttaccaatataatttatacaaattaacttacaataaaaa

SEQ ID NO: 269083 - DNA, 829 bp, Cannabis indica
ttagaaatttcagcttggccattgctctgtggatggtagggtagagcagttctatggcgaacgccatatctagagaggagtgcttcaaactgtttattgcagaagggactcccttcatcgcttatgattgcttggggagtagcgaactgagtaaatatattcttttgaacgaaggtaagaactattttaccgtcattggctggagttgctgcagcttcaacccattttgagacatagtctacagccaataagatgtacaaattgttaaaagatgaaggaaaaggacccataaaatctatcccccaaacatcgaacaattccacttccaagattcctgtcaaaggtatttcctttctccttgagatatttcctgttcgctgacaacgatcacatgcctttacaaatccactagcatccttgaaaagagtaggccaaaagaatccgctttgcaacactttagcagcagttcttgtgccactcaaatgtcccccacatgttaaagcaaggcagtggtagaatagagtacatctcctcttcaggcacacatctcctaattatctgatcagcacagtgtttgtagagaattggttcttcccaatagtaatgctttacctcagaaaagaatttctttaatttttttacgagatagctcaggaggagttatgttggcagctaagaagttgacataatcagcataccaaggtaccatcaggttttccctcaaactaaagagttgttcatcaggaaattcttcatttatttgcacctcttttgcattctagctttcttctaattctagtattgacagatgatctgctactaaattttt

SEQ ID NO: 269084 - DNA, 623 bp, Cannabis indica
gagcctatatgtttgcttttgggcttagatgcatataagaagcccatttaatgttagttaatttaatggactaggtttctaaaataaaatatcacatatataaggtagttttatttaggcccaattagtattgggcttattcaatgaataacatttatttatttaatggtgaaattcctctcctttgggccttgtgtgagagttagggggccatagtagtgtgtttgacatatagaacccaaccctccctcaaacaaactacctcaattgttaaggcccatgtaccttatttaaataattgtattaggctaattatattagtttaacataattaaaattgaattagcaacataattagtattaaatatatgaaattattttcattagattattttaaaattaattttagaaaaacacttagtttaatgaaatatattatggattgttatttcaagtaaataattatattttttaatatttaattaattagaaaaatatattttctaattgaattcaaattcagttcctactatcttttttaacaatgttcaggattccacacttgtcattgatcaagaaatgagagagagagagagagagagagagagagagaggaggagaga

SEQ ID NO: 269085 - DNA, 577 bp, Cannabis indica
ttcaaggaaagtagcatttgtagaaatgaacactttatcatccttacaactataaaatagtccacccctagtcttcttagaagttttaacaaacatgcaaacttcagttcacttttctagtttgtcatctttctttcttaagacatgagcagggcaccctcagattttgtaatggcgtaaattgggtatacaaccattccataatcctaaaggtgtcttagggaacaacatttaaaatgtcagtagccatctgaatagcatatccctagaaggacgtaggtagagttgaaaagctaagcatggacctaaccatttccaaaagcgtgcaatttcttgattctgcaactctattttactgtgtatgagtgctaggggcagtcagttgggattcaattctataagtaaacataacatttttttttatttaatttctaattttctttcaaaactattttatatttttattgaatttttaattatttttctttactttttaaaatatgattttataagtataaataaagttgatttttttcttaaaaaaaaaatcttaatttgtttaaattatttattggat

SEQ ID NO: 269086 - DNA, 561 bp, Cannabis indica
tttcttctttttttttttttcataaattttggttaattattattttatttttcttctaaactttacttattagtagataatagtaaactaaatcacatgaacttatatttagacatgacgacttttaatcttagtttcaataagttaacttataccacactatgtccatgtttaaacataactttttattaacgattgtttaaacataattgataaaagtaagatatatgattataactcacagattttaacggggcttatgtacctatgactcgtcctccacgcctagtatatatatatagttatagttatataaaattggcaaaagacaagagtcaacccgaaccgcattgctgaagaaacaaaatggacacttaagactcgaattgatagagtaatgcctaaaaagattaagagcaatgatagagaatggtttcttgcattatagatctcaaacaatcttggctttagattgatatatacttgtacatagatttcggccctaattgggtgtctaaagctcgttttgtacaatacaattaattgatttatcaaaaaaaa

SEQ ID NO: 269087 - DNA, 634 bp, Cannabis indica
tagctcgggaaataaatccagcacaagtactgctacagtaagtactgcctcaactaaagtagataatctgagtggttcaaataccaaaaaaaaagatgactcgaaagaatcatttaaaaataagaagaaatagaaaaagcacaataaatatgtttcgatttatacagtatacactgagttgaatgaaactcgtgaaaacattttcctcacaaatgagcacagggttgcctttcgcaagcatgaaccaatgagacatgcgagaaataaacgagattcaataaaattttgtcgatttcataaagacatagggcatactaccgaagagtgtcgataactgaaagacgagatagagagcctaatcttgcgtggatattttagacaatatgtgaagtgtcaacggaacgaaccaaactagtgcaatcaccccaataacccagataactagagattgcaagctccccctattgagggcgatgatatattggttatctcgggagggccacatctcgttggtgacagtaataacgcccagaaaagatatgtcaatgaaataaagaacgggcaatcagtgtttgctctagaaccactgaaaaaagcaaaaacagaagaacctccgattatattctcggaggaa

SEQ ID NO: 269088 - DNA, 1131 bp, Cannabis indica
gagagaccgagaggaatataaagatttaggtcatggggctttgatagctggggtaatgaatgagggagaggctgaggcaagttgggaaactcctaaaagagctcatcttctcaagaacaagcaagtggttagggaatatggagcaaatcaaaaagctaagaacacctttgaaatgttgcaaaataaggagggtgggacacagggagatgggtctggttcattttttatgaattgctgcaatgtgttgtgttggaatgttagaggcctcaataaagagaagaaacaagaggctgtgcttaaagtttgcaaaaaaaaagaaattggggttggagctttggttgagactaagctgaaaagtgagaaggttcaagaaatgatggctaaaactttctgtggttgggagagctataatagcccaactattgaaggaagattgttaataatttggaagaagacgtttgctagagtgatagttattgctgaaacaagccagtttgttcattgctatgtgaaattggctagtcatacggaggctttttgtgttacttttgtgtatgggatgaatggtttagatgagaggaaattgttatggaagggtctaacaactttgagatacccggtcaagccttggatcctattaggtgactttaattccttaattaattatggggatagagttggaggtaaaccggtttcaaggtctgagattgaagatttcaatggttggcttagcttgggcttggtggatactttgaaaaggcaaggttctttctttacttggtcaaataatcaagggagtaaggatagaatatattcgagaattgatcatgctttcaagaatgaggattggttggacttatttcctaactcgtcagcttcatttagttgggaagaggtttcggatcattgtgctatagttgtgtcttcggctgttatggtggaaataggtgtcaagccgtttagattcttcaactattggacagagcagtgtgatttcaagaagctggttatggatagctggcacaaaccggtcttcactgctggtttattggggatttggactaagttggctcggctgaagcatggtttaaagtcttttaatcatgctaggtggggtaatgtggagttgga

SEQ ID NO: 269089 - DNA, 1446 bp, Cannabis indica
cccttgaactgcaagtgcacatcgagtacaatttcctcggccatgttgatcatactttcatagtctgaatatgcttcgtacatctaagatcaaactaaaagcaattcagatcagagctttgtaaacatcatttagcatatcaaataaacgaaaaaaaaaaattaagaacgagtttacctcaatggtggtaaattctggattatgacgatttgaaattccttcatttctaaatattcgaccaatctcgtaaactctttcaaaccctccaacctgtcatcgagaaagatttacgagaaaattatgacaccagattacggttaaagggtattatgcatattagtatggtttaaatcctcaccagcatcctcttcaagtggagctctgttgctatcctcaaataaaggtctcttcctagcgaattatggtacgtaacaaatggtctcgcttctgctccaccagctgctccctagttgatcaagtcaattaaaaaccaaacttcatatcgaaacaatactcatatgtatgtaaataaagcaacaaaaaacataaaaatttattccttgaaatgaattcaatacaattttataaaataggaaccgaagaaattcccggctggtatttccacagttcaacctccaatcatctttacaataaactcgaaattatctttttttaaatattcaggaataagatataacagtaatcctacagaagaactcagcaacaatagaaatgctaaatgtttggccaatagacaaacctgtagaactggagtttcaacttcaagaaatccgaaagattccactgtcttgcgtaactctgatacaatctaatccaccaaaggaagaaaaaacacacttataagttccccaagtagagaaaaagggaaaatatttctgcagaaaagacatgtagttgaaataactaaaaggtctttaatactcttcagccttacttaccttcgctctcttccggaacacatcggctacttcaggattggaaatcatatcaatataccttcaatagaaaaagcaaagtgcagttaagtatgtagaaaaaatggatcccttcatatcatcaccatgcactataaaacatgttattttccccaagagacgctctcactcaatctcaaaccgtgaaaaaggaacagaaaattcacctttgtcggtaacgcttatccacatgagttagaccatgatatttgtcaggtaaggggagcagagattttgtaagaatagaaaaggagtttacatagacagacagctcccctagaaaaacaaaccaaagaaaagaaaagaaaagtatggttagtttcaaactcagtgacattggtttgtctagacttcttccaaatccaatactaataagctaggattgaatttagcttcaacaattgatatctaattgcaatcagattcataaagattaaatttttaataagtt

SEQ ID NO: 269090 - DNA, 744 bp, Cannabis indica
agtttttacagatggaatttacagcaacagatgttaaggaggctttattcgatattcctggaagcaaagtgcctggaccggatggttttagcagctatttcttccaagataattgggagatcattaaagaggatgttactgaggctatactctcttttctgcattcaggaagacttttgaaagagctgaactctacgtctcttaccctcattcccaaagtgaagtgcccgaagagtgttagtgatttcagaccagttgcttgttgcaacgtcatctacaaagtggcaacaaagatgctatgcaagagattgagaacagtcctaccagaattagtggctcagaatcaaagtggctttatacaagggagatatatagcttataacataatggtttgccaagacttagtgaagcattatagaaggaaaaatgtaaggccgaattgcatgattaagctggatttgaggaaggcatacgacacactggaatgggatttcatagaagaaatgctggttgcaatgaaattcccaccgaaattcatccaaatcttgatgatatgcatccgaactcctaagtttagtttgtttttcaatggatcaatgcatggtttttatgaagcaaaaagaggccttagacagggagacccgatgtctcctcttatctttgttctatgcatggaatacctttccagaatttaacaaaggtaggaaagaaaatagattttaaattccatgacaggtgtttgga

SEQ ID NO: 269091 - DNA, 1444 bp, Cannabis indica
aaaaaaataaaaatagactattagcgacgaaatttggagttcgctgctaatactaccattattagcagcggagatggcccaccgctaataattttgccgcaaatgaacaaaattgttgtagtgtccatggcgacatcggtcaggatgagtgggttgtgccacagtggtcttcttggtagccaatattgttgcgaatacaatgtagctttagatattccttcaacattcaatgaaagaaccaaaatatttaccaagattttgggaaactaattaaaatgagggttaagaaattaaataaactaatataaaatgaagatggagatttttacctagtttcggtgttaattaacccagtccacgagtcacttatatttggccaaatggtcttgatggattacaataaggtttttacaaggtcaagaaccctagcttcttgctatattattttgtctctttctagtttttttaaccttttagattccaccctttgcatgaaggtataaagtagtatttataggctaagaatcggggtcgtgtatacctatgacccgctagggtttttatgtaaactaggtccattattcgggtattacatgaaatacatgactataggctcactagcagaatttcagctcgtgaggtggacgtgttccatactcctggggaccatgcgattcttgacaagtgactgaagcacgccacatatatgtactgtagtgtcaggtttgtgtcgttagacaaaaggagatttcctttaggtggtgtgcgtactcttatgctctgacacaggggatgaaccgtgatttggtgggaccgagtattagagggcagccatatcatcctatactaggcttccaaggcgcctcttggagttctctttctggacgcgtcccaacgctcttttggaagtctttgactgttccatcccatgaaggcaggacgcgttccttgatccggataagcctcgtctgagagtcgagtcctctaggattaaatgcccatccttccatctggatcgggcctatcctcacaaaaaggcctttagctagaccatactgggttaatttataaagtcagaaacaccacttgtcatcctttcggaaacacggataacactaattatcaaccaaaacacaacttaaaattttattgaaaaaatatactaatatactaaataaaatataaataaattataaaatattagatattaaaaaaatgataacaaaaatattaaatgggtccctatcagggtggaaagtattgttcctgttagggcgagaagtgttatccccgtcagcgccccgtttaatacttggtgataaaaaataattcctatcccagacatgttctccatttagataagatatccccgtcccattaggggcgtgtccctgcggtggggataagaaaagaaaaacttacaaaaatattggattttaactta

SEQ ID NO: 269092 - DNA, 627 bp, Cannabis indica
taaataatcaattaaatacactaaattttttcatccacctcaatatctaataaaggagctagaaatccataaaaaaattaactaaaaaaaagtagtaaactaatactgaacgcttagagtattttcttcaaatttctttgtgtgaaattgtactgaattctaaaatcttaagcttatatttataggaaagtaaaaaaactaatgtacaattaaaacttattacaaattgcatgtcaaaaatacaattacacaactttaaaattaggatgccacgtgccacatttggattgactgcctttgatgagttggtgccacgtgtcaccgtgtggttggctaaaaggtgtggcattggacacgtgtcgggtgcagaacaaatgagaggaattactttttggtggcttgaggaccatgaaagaaggagagggtcaggcgcaggggcacgcacacatggccccgaagtggccatggatcccacttgcacgcactccacgtggctttaatgtcggctgaggagtttgggctggttgggcctttgtcttttgtgctctctttttggttgcaaaaaatgccaagtttttatgactttggggccatatttttatcattttttttcatttcattcttttc

SEQ ID NO: 269093 - DNA, 672 bp, Cannabis indica
gcaaagggtcgaaaaacttatctaagaattcatattcagagatactattgtaagagctctaagaaaagggattattttccgtgttcttaagtcaatacaaaccaagaggattaggctattactgaactgctcggggctgaacctctataaaattctcatgtcttttattactttattatattacatacacattatactagttgtcgcttacaatttagactcgctgtcgttggccaaaagcgaggtcaacaccatcattcttaaattttcttatcactagggtatatccctagaaggacttaggcacctgctagtaactaatcacaaaccttatactatcatcaatatgaaaattgaatttctagggaggtaagtttggatataaatgaagttcaacttaatgatctttgaactgcatatttaccaaaattttctccaatcttattagttcgcaagatctttaaccacttaccttaatggttttcaccattgctataaattcataaaatttctcaaacatttcaaatttctttgcataaggtaaaatctagagtggtcatcttaagaatttaacaatcactcatatccacccttgaatgtacatctatatagatgatcttactttcaagtggatattggcatattactctttgcagagaatgatcttgtcaa

SEQ ID NO: 269094 - DNA, 878 bp, Cannabis indica
aaaatcaacttgctctgattctgattatgatgcctcaaatatgttcgtggtgtgtctagtttatgtctttatacaagttttgaccactttgctctaagacggtcccagaaactgaaacactagttaaggatgtgttatggagtgcctagggtacagtgtatacaattctaagttcaattaaatattctttgaactgcatatccatattttctacccctatcaattcacaagatcattaatgttttaccaaattggtgtttagccaatacaaaaaattcttaaaattctcaaacgttccaaattttctagaatataaggtaaagaatatcaagagtcgtggcttgtacattctaaagtgcatagaatattataccagctcaattagttattagactctatttctctttgcagagcatgaacacttagtcattttaacttttagacaagattcgtagacttgtaactcacccaaagtaagtttcttcaaaggacacctttggttagtctttgaattctatcatagtcaatatgatcaagacataaccaagctcaaagaaaccatatgatcacttctaatacaaaaactatagatgttcatatctttgattaacactaccactcaattatactatcgagatctcaagatgtaagtatgggctataccggggtaagttagtaacggacaaactaaagaactcgagtagcattattagcttaagacttaaccatgttaggattcaaatcaaatgaatctatatcaactcaatgttattgactgataatatatataacagtaagattatgacatgtctagtccaatgtaaacctatgattcaatacaagtctactttaccaatatttagaaagaaaaaaaaata

SEQ ID NO: 269095 - DNA, 770 bp, Cannabis indica
atgccttttttcctctaaccattttgtttttgttccgtgcagtcatgtctcagaagatgctcgatgctctgaagagagttggaggaagctcaagctcatctcctccagccaagaaatctaggggcggtgaggcgaccccttccaagaaaaggcaccggctggggaggttattgacctttctgaggatctagctgttgcggacccttctactccgaaagttgctaactccaaagattctcggggaggaagctcggacaggcctgagcggtcaaaaggtggatccgagctggccaagagcggatctgagcagatgcaggctcctactccacccttgcaagtgcatccagaggccaagaaaggcaagctgatgctcgcccattacatgaaccggttggttcctgagataagtaagcagctagccgtccctgacaacgagtcttccctagagcttctgatgggaggattcttgagggaattcataagggtaagtctttcttgacagtttcctttaatcctttttatttggctcagactctaaagtttttctctgtgtaggctggtctgaagttggcttacacctattcccgagctaaatctgttgtctccaaaaatactgctatatccaacaccatgagggcggaggtggactttgctaggaaggatgctgatgatgccagggtggaactcggagttgttcggatggagttgggtgaggtcaacaagaagctttttactgctgagaggaaaatagtcgagttgactaaggacct

SEQ ID NO: 269096 - DNA, 673 bp, Cannabis indica
tcagatctaggttgactcaagaactactctaattgttaaagttgcaggaaggattcttattcagcctctggaaagttctatatagttttttggcattgtaccattaatgaattaactactagtgttacttcctgactaacacaaaagtagttgtcaaaaagtaaagaatccagtatcctaagaggagtaaacatatagagagaaatttcacaatattaaagattttgtgacaaaagaaatataatggtagagaaagttcgtattgtatacaatctgtcagatcctattacagagaaaatactatatactacacttgatctggatattaaggtgttgagattatttgaaatacactttgttttatattagtgcaagtgggagtttgttgggttttgtgccctaaataaaaccaatttcaatataatataatttactaattaataaaagatcaaaaattattttatttgcatggttcacataatttgtttcataattatatatttaatgtagaaatgctattaagttcagaatatatatatttattcacaattatagtgttgtcaacacagtggaatataatcatgattatatgcttaaaagtttaagtcctgtgatttctcagtacgctagatttagactgacatgataatcggcgataaggtatagttacacc

SEQ ID NO: 269097 - DNA, 654 bp, Cannabis indica
agaaagcaaaattaaaggacaaacaatatcttcaatcattgacaatggagtgggattctgaagctaaaatggacgaaaccgaggctattgttggttatgagatgtcattagaaggtctccagccacaccaaaatattcagaatctaagcctaacaaattatgggggtgttaagctctccagttggctctcatcacttactaacctagtggagttgactttagaaggctgtgcaaaatgtgagtatcttgttccattgaatcaattcaagtatctcaagcatttgagacttgagaggtggatatgtttagagtacatatccaacagtaataatgtcagtgaagacttggttggttcaacacaacattactgccatctctagagacacttgagttgtgggatttgcctaatctaaagggatggtggagagagattgaagttgatcattcttcttttgatgcaaatacagatgcaaatgaagataatcactctccttgccttattatctccttctctttcaaaattaaatatacgtgactgtcctaagctgacctgcatgccactttaccacaattggaaacattggaactgagaagactagttgaagccattagaagagacattaagaatgaggatgatgatgagcagtaacgtgg

SEQ ID NO: 269098 - DNA, 1513 bp, Cannabis indica
tggctgaaaccctcttctcttttctccttcatctttttcgaccctagtgaaagagtaagtgcccacacacagcaagcagtaactcaatcatagattggaagactgtgaaggatcaaactcaaagagaaggacattcgggctcagatcttgataatactctgcgacagaaaggatacaagggttagagatctgagtggaaggagacattaattccgctgcatcaatgtaaggttttcttaactttatatgtgtttattttatcgttttagaaagttcatatttagggtgttaaacaacatacttgtgagtagatctaagatcctggtaaaataagttccaacagtatgaccaagatgtttctgactatatgtatacgactttatccaaggtgccagatttcgacttctctatccttggagcggaggcggctgagatggcggaagcttttcatgctatgtcgtctactcagacccaggggtgtggaggaaatattttccccgaggaggcagagactgcggatgctgaggaagtcgctgatggacctgtcagcaaggtcgcagatggttctactgttctaatagctccaaccgcttaatttatcgaagtttttattccttagttattaaacttctttagcggtacatgggtactcgcattttgtacttggacaaaatttcactttgctttctttctatttcgaacagcatataccccgttcgaggatatatatttatttgttttaattttcgcggttacacgtgtactcgctatattctacagacttaatcaaaatctgtttgctattttaaattaaagcctggtgtaatatcttttaaaaaaatgctcatgcgaaaaattgactaagtataaaatggtacaaaaatgtcgagaaatcgagaactcaataagaagtcaataatcttcattaaaactagaaaccaatagtacaaaatggtaggttacagtctataccccctatacttagaacatttatacaaatgaatttactaagtataaacatactgcgagtactattggtaataatacttgagactttcgccattcgccattcgaagcccttcggatcacaatatcatcgagttctgcaagccgataagtcgcatggccaattttctcatcgataaggtatggtccttcccaattgtcaccaaaaactccatgcactgggttttttgtgtttggcatgacttttcgcagaaccaaatcccttactcgcagagttcgctttttgaccttcgattaaaaaaacgagaacatccgctgctgataggccgcattcttcagatgggccgtgtatcacatttttctttttaagtagtatgaagatggagacaattgtttatcttcattttcattaatgttgaaaacaatctcttcgtagggaccctgcccgacttccaccggtaccatgacttcgcacctatacggagagagagaagggggtttcggccagtcgtggatgggggttgtgttatacgaccatagaacttgt

SEQ ID NO: 269099 - DNA, 539 bp, Cannabis indica
actacatataataaattttaaatttctcaataaataattttaaataataatcaataaaattgcgcatttagttttttataaaaaaattaattactaataatatgaaataagataatatatttataattttactatatattagaattatatttttaagtaactataaattataatactaaaaatattaaattagtcgcgcgaagagcggctatattgcctagtatctatctatatctatatatttatataatgctattgttagggagtgattagggtgatgatgtggaggcttaagaattgagtaatccattttttctattttgtgaattttttatgatttttgaattactttaattttaaaaatagattaataaattatttaaagctcaatctattattattacataattttattcaatttttatcaacttagcatttaaaatataataaatttataccttacgaatagaatcttaataaacatttctccttctttttcttaataaccaacgatccaaagtgatcatagaagaagaaaa

SEQ ID NO: 269100 - DNA, 992 bp, Cannabis indica
gcgaacacgaacacaaaccaagacctaggacccgaatcgaaatgagaacgggagcaaagattggcatatagatcataactcacgaccggggcttggaccaaacccgtagtcggtgtctagatcttggaatcgtaccaagacccaaacctggagcaacttctagactaggacccaaacccagactcagactcgtgacctgaaatttgaataagaaccggaatgaagaccttggaacaggaatcggaggttgacccaaaaacggatgtatacgcaaaaccgaacacagacccgaaccccaactaggatcgatagctggacccatacttgcgttaggacctgggaccaagaacccagaacccaggacccataacctgagaccttgaacagaacccagacccatacaagaacccatacccagacccagatccagaccaagacccggaccctaaaatagactgaaaccgggacccagacccaaacccagactcgtacacaaactcggactggaacccgagacttggaccaggaccgagatcaggattgggacccacaccagcacaacgacctagaccagaacatggactggggctaggacccagactgggaattggactaggactgggacccaggagcgagactgggatacgggacccaatactcagacctgagacctgagaaccgaattgtgactcagacccagacaacgccaagacccgagacaaggacaagtaccaaagaaggactgggacctgcactcagactaggatgataaccaagactgggacctaggaccatgaccttaatcggggaccttgacccatgactcaggacccaagtccaaaacttagacccaaacctggacctgagacccgaactaggacccaaatttaggacctagaccgtgacttggaccaggatctagatttggacccaggacccaggaccaaagacacgaggcttggactcgatccatagtcggtgtctaaatctag

SEQ ID NO: 269101 - DNA, 734 bp, Cannabis indica
taaagtgcacacacgtggcgtccctgttggacagggcgttacataatggcaagcagttcgacatccaatccttcacttacttttgtgcgaacctaggtatcatcaaaagtttatccgcagtggaacatcctcaagcgaatggtcaagttgaagcagtcaacaagaccttgaaggatacagtaaagaaaaactcaaagatgccaaaggaaattggccggaagaacttcctaaagttttgtggtcatatcggacaactgagaaaatggcaatcggacagactccatttgctactggatatggatatgaagttatgctccctgtagaactcgagccaccatcccacaaaagactgatgtacaaccaagataccaatcacgtactcctggccgaatcacttgatgaaatcgaagaaaagcgaaccacagcaaacttaaagttgatggcccatcaacaaaaagtagctctatattttaacaaacaagtgaagactcagaaattcttcgtgggagatatggtcctaagaagggtatttttaaacaccaaagacagtacggcacgtgtactcggacctaaataggagggaccatataaagtggtcgaagttctcgaatccagagcatacaaattaggtaaaaattatgaaaaatgcaactcgttctagtaccacgatattggaatggggaacatttaagaaaatactacaaataaagtaccaggtcagacgaccacactaa

SEQ ID NO: 269102 - DNA, 1044 bp, Cannabis indica
aaccaaagctttgaaaatagcacaaattgacaacacaaaaaattcgggaaaccagaccctgatccggttaattggttttacagggccagtaaaatcagttaatcggtttgcaccaggtaacccaaataattcgaaatcatgcccaaatcgtgccgaaatctcaccaaaacttccagaatacctaaaatgacctcccacaacatattccaagtaatagaattcagaaatacatctacaatgaaaatatgccatagatgaaccaagcttgagtgttcaaacttaaacttcagtagctagaactcaaacctaactcaagatgaacctagaaatcgaactacaattcatattgttgacttcgcttttagccaacgacaatgagtctttttgataagcgataaacgatatgtcgtaatgagaatatataataaagcaataacaagacacaaaaattttatagaggttcagccccgagcagttcggtaatagcctaatcctcgttatttgtattgacttaagaacaaggaagaagtttccttttcttatagctcttacaatagtatctctgaatatataattcttagatagccttagcttactgcgtttcggcttataatttctcggtcctttgcccagtgaacattcctcactatttatagggctggaaacttgaggaggaagagtttcctctctcgttacaatgcgcataaacagaaagatcgtgtgatcaatgctgaatgcaaggatcgtgggattgaggctgaatacaccgatagtgggatcgtgtgtgtgccacatccacgtaagttgatccctgagttgtagggattgagctggtgactcatgatgcgttaagctgaattcgctaagtgttgatcattctgcacggctcgttgaatattccatactggatgtgccagcgaggcatcctgctcggcatattgttccgaacagatgctccaagtagagtccacgtgtcaccattctcgtgatgccacgtcagagtgccaaatttgggataacatttgcccccaagtctgtacggga

SEQ ID NO: 269103 - DNA, 616 bp, Cannabis indica
cttcaacttaactttactctcctcgaagaatacatcaaatgattgatgtatactgaatgtgtaatacctcgtgaatcactgagatggattaatcctttcttgttgattaccaaaagagtgaaatgtggatgaaagatctcactcctcataagtaagttttttcaagttatatctcttgtgcaaactaagttaaaatacattcaatttcgttataagcttggctttcttctcctcgttaataacacatcttcttaggaaactcttgacgaagtattattttgttctgagttacccaaggcactatatacatattttctttaaaacactatatacatattttctttacattcattctgttggttgttgtatcattaggacttataattccttcttttttccaaggctctttattgaatatcaggccattcaatatgcgagccgatttatcttgcagaattttatacacgtgtcatatgctgaactccaatattaattgcttgaaatataggtttaacatgtaccattagagatgttctcatggaaggtctttattgcgcaatatctagtttatatatactttttattttgttacgttttgtgaaaaaaaaaaaaaaaa

SEQ ID NO: 269104 - DNA, 516 bp, Cannabis indica
ggttggacaatccgctacttggtcatgtgagggcacataccgaatgtccagagttttgttaatcaccttgtcacgaacaaaatggatgtcaagctcgatgtgctttgtcctagcatggtaaacaggattagaagcaagggaacttgcccccatgttgtcacaccaggttataggcacagcaggtaagggaaacttgacttcatttagaagggattgaatccaagttagctcagcagagacttgtgtaagggcacgatattctaattcagtacttgacctggacaccacagcttgtttcttggatgaccatgacaccaaggtgtctcccagaaaaacacaataaccagcaacagacctcctatcatctgggcaacaagcccaatctgcatctgaaaaactcgtgagagtgagttgatcactgcatttgatgtgtattccatgattaatggttcctttcaagtatctcaaaactctctattagacttctgtaatacgtaggtttttcgagagcttctc

SEQ ID NO: 269105 - DNA, 563 bp, Cannabis indica
ttgttaggtttttcagtttgtatttttttgtcgggttatctcgatttggtttagacgggttgttcgggttggcagtttacaaaaatttacgtacagccctacttctttcgtaaaatttacaaataagatatagtctttatttagaatcctattaaataaaccaattaattaagactacaaaataatattatcccagttaatgtaaggatcatgggcctatgtaaccaagttcttaataagtagttctagaatttacctaaattttctatctttttaatttctcctgactccactatagaatatgagtgcaagtttttggcacaggctcgcctgattaggtgatacagtgatgcgatatatgggagccaggctatggcacgggcttgtctgattaggcaatgcaaaataggattatcagattaaagcatcgacttgcctgattaggcaacgtgatgtaatgaagatagttactttatgaggtaacatatatctataatttatatgattaaatgaatatgaactctattattagtataatggttttgtattaccaaatatctgta

SEQ ID NO: 269106 - DNA, 1291 bp, Cannabis indica
cactttttgcatcatacacgacgggagcaatgacaaatgttgacctcttcttcttcaggctcctctttagttgaagggctgatggtagcatgacttctgggggttgtctcactttagcgggaaccattgaaggattctcacccatgatgagtagattccctgttgctggaattggaatggcccccttctctactagaaactccattcccaataccacatcaaagtcatccatgcaaacagctacaaggtcaagttgcccctcccatccgtcgatcttgacattcactttcctggccactccaatcgtggccatggccttcgaattgactactttcatgcggctcgcatctttctccagttttaggcccaccctcttggcttcgattttggaaataaagttgtgtgttacgccagtgtcaatcaacacgctcttggcctacttgcaatttaaagtggcctccacaaacaatcccttcccaagggttttctttcctcccgcgccatgcttcttaagagcagccatcaatcaaacgatgctcatgtacgtgcagtgttaatcttcatcatcttccccacatccttgctcctcttgagcaatggatgcctttatggcactcaacttggactggtaggggcaagcagtcgccctatgtgggccttgacaaagtcaacacttaaggagcttcttccccgttgcaacatcacttttatagtaggagttagattcaagagtcctcttgtccactcccccacttttactcgaccattgctttcctgacttctttctcgcagcattgtggtgttgatctggggattcgtcttcttcggctatgaattctcagaggtgtaatcagtcagtcgctcggctgcagcttgaacagtggcgagatctgacacccgctgcctttgtagctcttgtttagcccatggcttgagtccttcaaggaagtagaaaagtctatcaacttcgttcatgtctttaatgttgagcatcaacctggagaacttctttacatagtctcggactgtcacaactttcttttaactctctcagctggcgtcaagccaagtaggcgacattctctggcaggaattgggcattcaattctttcttgacgtcttcccaagtctcaatggtgcacttaccactttgaatgtcttcatacttcctcctccaccacaacttggtgtctccgaacaaatacatggtagttgttgctacatttgcttcttcagagtcggtccgcacgaccctaaactattgctcaatgtcaaacagaaagttttggag

SEQ ID NO: 269107 - DNA, 603 bp, Cannabis indica
attgagctattcaattctacatcttgtttcttcaagttaattttatatttacttaatactagaaaatatagctagtgtgtacaagacaccaagtatgtacttattaatatactaggttaattattttgtatattatttttaagttttattgtaattatgtatattattagttgtaaaattaatttttttcaggcattttttcaattttacactttaaaataatttttttttttttttgtatttttatagaattttatatagaaattctcatagtaatacagatcgcaactaaaatccaaataacaactcacatagaaaccaccgcaaacaatccaaatcgtaaatttgaaaaaaaaaaataaaaaaaaaaaataagtaatataagagtaaatttttttttctttttaattattttttattaaagaaatatttaatttaagcaatattatatataataaaaaataatattaaaaatttgatagttaattataaatttaatttaattaattgtattacttttaattttataatacttttattattttagaaatatcaatatacttcaatttaaagcaatttttttttctttttatttattttttc

SEQ ID NO: 269108 - DNA, 701 bp, Cannabis indica
taaagagagaaatacaatgtttccataatttttttaaaaaaagaattgaaataataatacaataaaattcacaattctcttcaacaatgagcatatatacaaatagttgattgaaaagtatatcataaatttccttactgtttatgtaagtgatgaatattggataaactatgttttttggggtagagctctctagagaggacttttatcctctctaaagaactcaatggttgtagtgagaagcttaatcctccacttagcaaaaaaatagtaatttaaaaattaaatgttgaaaaaatttaagtaaatagaagtgattttatgtatataacttatatatgcgtaaatcatagcataaaattagaaaccttacaaattcatggtatacatatatatatttatataataaatacatttgtaagaaaaaatggcaataaaacaatttgaaaatttaaaatttcattttcacaaaaaaaaaaaaaaaaaaaaagaagaagaagaaaaagagattaaaatttgaagaaacaaatacatgagagatgagatttactttaatttaaccaaaattaccatattaattttcttggaggaactcatagcaactttcatctacaaacttaacaaatatatctgcaaagagaaaagtgagagttagtaaaattaacttctattttttgaaacatgacacaaagtgagaagtt

SEQ ID NO: 269109 - DNA, 609 bp, Cannabis indica
taaagtcatctttcttttttctccttaattctctctttcctttaattttttattaatttcatatatatctctctaaaattatttttttcttctcttcttaattctctcatttttaatattttattagtataaatttaaaaattaataattttctattatattaataattatttttaaaaattattattattattagttttgaatcagatattttttagatttatcaattatttttttcataaatttttatgttgtgtgagaactagatacaattatatctattttatcattattaattaatagattttatttgatatatttttttataaaaaaaaatgttatagattcacttatttataaaagtgaatagttaactcatcgtttgatttgttttatatatacaacaaatatactgggtcaagcctagcttcatgttatacatgtaagatatgacaataacaacacccttaaatataataataactacaacaagtgagatacaatgatgagaacgattttgaaaccatatgataagtttttcataaatttatcaatttttataacaattcgaaaggtcaagcctaatatatcatgttatacaggttgtgt

SEQ ID NO: 269110 - DNA, 1275 bp, Cannabis indica
tgggttaagtgggtcctgggcacaggcctagtccgtctatgtttaaggtccgaccttgatttttagcttaattttttttcttcatgtaattttttgatgctgaaaacactaatgaaatgtcattattagaataatttagtatcgaatttcaaatattttaatttaaaataattatattccatataagatagttctgatacaaattattatttcactatgactataatcaaatatcagtttctttatattttagtattataattatttatttttataaaaattgctaatcattctcatacaaaatattttcgatttaaacatatactactgatactgaataacaattctcttacaaaatattttcatcaaaatatgtacttaccccgtatggtgaagtagaatgaggcatattacgaccaaaaaaggttccttgactcccaataagatcatcttgttgatgattgcattttccatcggccgttcggtaccaaatttccttaacatcagactcttttccggtcattttctcgacgtggaagagattgtaacgctggtgtaagtgtctcctaattcccaagtatgctattcctattatcacaggtagtttgtgccatattccaaccctatccaccatgtgtatcacctatacatacataaatatacattattaattaactacttattataacactaattaatttatgataacattttgagaggttttgaagtaattacaaagaagagaaaggtgtcaaaaaatgtcatttttagaaggatgggatgaagttgaggatggatcaaggttgaaagagagaaaaccattattatgtttgattttttatgatgaatttgatagtattttacatatgaaaaaatattaataaggagcataatatagggacattattagcacttagtgacataaatacaaagttttgctacttttttgttggatccgtactattggttcgaaattgaagtgtcaatttcttattaatttgggaattaaaaagtattcttttagtattattaaatcctaaaagaaaatggtttcaaaaaaaaatctttcaagcaaaatatttgaaaatttgaacataaatgaacatgctattggtggttcaaaacaagtaataacttagaataaaaaaattaatgtcttgatttttatattattttttaagtaaattgtatcgatcaagatgataattatcttcaataaaaatgtaaataagtgatgcaaaattagaataaaacttatttattaagaaaaatgtg

SEQ ID NO: 269111 - DNA, 691 bp, Cannabis indica
attgggcacacaacagacgaatgtcgtcagttaaaagatgagatagaaagtttcattgctcggggccacttcaagaagtatgtgaagagatagggcaatgaacacaactagcccagtctgccaaacaacctaaacaatcaggggttacaacctcatcttgttaaagaagaggacatcctggttatttcaggagggccacatatcgcaggggaaagaaacaatgcccaaaagaggtatgtgaaagaggtaaaaaatgagcagtcgatattttctccagaaccttccaagaaggtaaaaactaaagaacctccaatcatattctcagaggaagatgagaagaacgtgagatatcctcacgtggatccattggtgattacaatttagctcaccaataaaaggataaagagggtatcggtagataacgggagattagtgaacgtcctttataaggaaatgctgaaaaagagccagtcaaggcataattgagctcgcattaaccttggacgaggcacccctatctgccacagttatgcaagacttcctagttatcgacctgccatcgacttacaatatattgttgggtcgtccagcattaatcggactaggggcagttagtttgatcaagcacctatccctgaaattttaaaaaccagagggtgtgggagtggtgcgaggtgatcagatgctagct

SEQ ID NO: 269112 - DNA, 639 bp, Cannabis indica
ttagttagttaattagtttatttttttaaaaaaaaatttcatgtgttgataattgagccgatatattgaatgaactgctgttgtttatgtgtgcaatggattgaaatttaaaccgtgtgcttaattcataaactctttggattgaattggatgccttgtgaaaattttcttttatatagatgtaaattattgatttttggatagtatcacttttgttctacttgggtttgtggaatgtttgcttgacatggaatagaacttgcgtgacttactctcttgaagtgaaatccttgatgattgttgcttggaaaataatttaggcaattttctttggaccggttaagcctttcaagcttacctgtaaaagattttccttagtatacccaaagttgagccttagcctgtttcaaaattttaaccgcttaattgagcctaatgtgtttcctttaattattttaattcccaatataccctattatgccatatgtttttaattaagtttgggtggaatgaagtgttatgagtgggtattattttagaagtaggagattgaggaaagttatgtggaagtgtctttatcatctctagaaaaaaaaattgctaattcttctcgaaaagaaataaagaagaaaaagaaaa

SEQ ID NO: 269113 - DNA, 572 bp, Cannabis indica
ggtccaatctgtaacttttgcaaaacacagagtccaaaatggtatttacccatttaataatttcgaaattctatcatattgtattaagtaattttattttttatatatttggattcaatccaatctgcataataatttaaatctaatccaatccgtaaaagtgcatattaaatcggttattttggattggtcactttttaatattgaattacttaaaaaatttaattcttttttcacataacttacaaaaaaataaaataaatttatgttgttttatgtctttattatacccttttcaagcaataatatggtgttgacacgtataaagaaactagctcatgttataaatcaattttcctcaaaaaatacatgtggtagaaatattcaaacttatcattttaaaaataagggcgagctatgaataataactaccgattgataaaatttgtgagatgaacgatcaacttagagggttcatctcgagaaatatagaatacacaacagaatgacaataattggaaatggtagataatgaattatgaaattccgtattttaatattcccagtttgat

SEQ ID NO: 269114 - DNA, 862 bp, Cannabis indica
tatatatgacaataggctataatcatatatttatttttcttttgaatttaaatgatagtcacttacggtactttttaagactcgcaggtccatagtttctctgtaaaatgaaagaagcaaatcataagaaataagatcaagcttttcgaaactttattttggagattaaatattattcaattccactatgacacaagggaacataaaagcttacactttctaagttgtgctcagatgattcttttgccaaaacctgcaaaatgaaaataagccaaattcaataaaagtttagtacccttttcatttgtgaaacgtagagtagagactagacataagatctcaaatttaagaagaaaattaaatgagccccgacctggtttgcaaccatggaaatgctaagaagagctaagagaacaacacacagaaacttagtcatagtgtttgctaaggttttttaggaaagattactaaaaggattggttttaagagggtggctatgaagatttagggggcttagttgaaaagttcaagtccagtactgtcacctataaatagaaaaatgtatggtactgctatagtactactgatgaaggtgtggtaaatagatgtattcatttactacgtacggggggtttcaagaaaaaaaggaaggatgcatgttctatgttgatgttatattcccaaaatgtcccttcttctagtgtttgataatagttgagcacttgagcctttcccacttttagttgttgttacaatagtcacaaatgcaatgttattaaataaatttatggtacctagattatgtaaatatatttattagacaaggtgccacttttaattaatttttcaactgttttgtatc

SEQ ID NO: 269115 - DNA, 1154 bp, Cannabis indica
tccatttggacatctgaaaagtgcttactaagcaccaaccgagcactcacgaagtacaaccatgtctttgccactgggtttatctcacacctatgtagaatgtttggtgacctgtcttggccatcattgttgtggaaccttaaccccgggaatcccactgtctcagccacatccaccaaatcaaacagctcttcctcaataattcagaggcgttgttcctccctataataatccgggacagaaaacataacattgaatgcatcagcagtggcggaaccttctttcctcgcaccttcacctccccatttctgcgctcgggccaattggcgagaaattcacatgccatagtcacattagcccagccccgagcatccacgaaactaccccatctcatcctctcaatttgagcccgaattgcttcgaacctaggttgacgcctcaatggatttttcagggaattcaataccccggtcttcaatgtaaggcctaatttttagcctcatgaaacgattctgagcctcctcattgacaaaccgggttctatcgaaacccgtagttggtgggtttgatgtcgaaccttcttcaacgtgcctcattctttttggtgccattctcttagaaataataatatttttttctctttttttctcttttgcttgaattttttgctgtttttatttttttttttctatttttctgttttttttttctgttcttttcaaaataattctaagaaaaattgggcagcacctccccttaattttctatatcccaaaaatttacaatccacaccaacaaactcaatatcaacaactataccacaatacaattccaataaacccaatatcaacaacaattctatcacaatatgcactattaccacccaaaatttataaacagtaaatcaaattccttaatatggtaggaagtggatacttacaaacccaaagaagcttttactccacctccattgttgaatgtccttgaaaagcttgaggttgaagatgaagaataaaggtattttcggatttggggtaatattgatgatttttggtatgatttttgatggaaagtgaagattgatgagtgaaagtgggttttgggatggattggggatttagaaatttaaagagaagatgagaaaattgaagaat

SEQ ID NO: 269116 - DNA, 558 bp, Cannabis indica
tctccaactacttttggctttgggtgcacaagttgattcatgggcttgttactttttgatactttgttttatggttgatcaatatgtaatgttaggaattttaatatggtctgacatgatattcttctttattctagtttgaataattagcatgccgttacccaatttttattgaaagatcttggacttattgtcattgataggtctagtctgtcatatgttcattcaggataaaaatagtatacttcgcattattttgatgcttcacagttgatggcttatgggtcattgtgttaaagatattgttagggattttgcctagttattgcaaacagcttggctagcctatttttgttgattcttctcaatgagcactatctgtatgtgatgaattatgtctcatttacctattaataaaaattttatttaccttttaaaataattatatattatttttaaaaagtaaaagaaactatttactaatgggttaatgttacattccaagaaatatgcacaaagacaaaagtcaaacgatatagacatatcgagttgttgtct

SEQ ID NO: 269117 - DNA, 702 bp, Cannabis indica
gtgtctccaatgaagggatcaaacatttcgtgaaaaaaggcaagctatgtcctaggtttacaaggccttttgagattctgcagaaggttgaactggtggcatatcgcctggtcttacctccaacactttcagcagttcgctatgtattccatgtcgctatgttacagaaatacatttctaatcctactcatgttttgagttatgaaagtttagaacttcagctagatttatcatatgaagaacaaccagttcaaatcttaaacagaaaggataaagtcctttggaacaagaccatagctttggtcaaggtactctggagaaaccataaggtcgagggctcaatatccagagctgttcaggttagattttgaggacaaaatccttttaacgatgggataattgtaaagaccgcttaattttctttgtttgtaattagcaggtaattagggcttaattatgagtttagattattacttatgatgtatgaatatatggagatttatttcaattcagggtgtatcatgtatattgtatatgagattttgtgtttttcatgttttgtgctcggtaacattggaatgcggcgtttggccaatagaattacattttcatagttttgtggtagcggggcaacttagatagacattgagaatgtcggaattgttcgaggatttaaagatgaccaaaaaacccctaagtgtc

SEQ ID NO: 269118 - DNA, 517 bp, Cannabis indica
aactattgatttcaagaaataataaaacatgtatatattaatttgcttctgacaatactaacatatgtaaaaatctatattctgaaatttaatttcatgtctattcattctcattagggaatgatatttaaatattcttaatctactataaatttatgatatactaaagtatatgtacaattcacatcctattcataattaaatataattttatcttgattataaaatgtatccgtactacaggtacgtcacaactatattattcaattccacacatgatatatagatttcatgcactttgattgtgtgtggtatctcatcttatggttgtttccaattttttctggaaatatttgaatagtaaataatgtcattaattatttaaaattattgcaattacttcaggaaatgacgttggacaagtagaacattattataaatatcttaaaaatttattaattgttcatccataaaaatataaaaaattattcagttttcaaagaatatatgaatatag

SEQ ID NO: 269119 - DNA, 817 bp, Cannabis indica
gagtcaaaaaacaaagtcaagctcccccaaaaaacgaagcaaccacaaactcgaatagaaaaacgcacacttagtttttctagttgtaaaaaataatttaatatcatttaaaagtaattaattatttaaaaatttattatacaggaagagaatcctaatttgtgtaaaaagaagtctaatttttgtaaaaataaaaataaaatttcatcgtaaatattataattaaatggtttaactgttaaattaattatagtagagatttgttaacgcagattttcgttaactagatttgagcctaaatggtgatagacttgcacagaaaatagaaatagtaaagataaaaaagcaagaacacacgaaggtttttacgtggttttgcagttaaaattctgcatagtccacgagtcaatctcattagatttctaataccgttctagggctttttttcttatgaatttttcgtcccttttttagtgtaacatgcctctatttataattacatagtcaggcagtattacatagttgaatgatatcattacaacaatcatcccttgaaatcgtgggatttgattaaataccacgtaaaataaatgaggttaacatttaaaaatcacacagctgtgataggtttgcttttactggatcaaggtaatcgtgtattaaacataatgtaaatcgtaacgttctgggatgtctcggtaggaacacgctatcaataaccttgatagcgagctagagttttttccacatcttctccaaggttaataatgttagccttgtcacttctgcgagcttggtgacaagatgaacttcaaca

SEQ ID NO: 269120 - DNA, 830 bp, Cannabis indica
aacgaggaatttatctctatattatgtaatgtttaaacaatacaagtttgaataaatatatattatgttttttttttgcctaggtaacaaaattagtcatgatagtatgattttttgttagtatatgtgtgacaaactcttttgaaaattggccacaaaaatttacatttgattgtgtaagattctctttattattgctatgaaagatatttggtaaggattaattattaaaagacttctacaaatttggctatgtatatttatcagatgactgatgactcaattaattctgttatatagtttaatattgtgaatttattaaattttttttttatttcaaaatgtcctcattttggtaatactacatgttctcacactttacatataataaagctatttcacactttaactaaatttgatacagattactcttttcttctttgggttttgtaaaaagaagaattcttctttgttcatttgtcttgtctcttgtgtgagattgtacgtactaagtcttaattttatgataaaattttgataattaagtaaatagtatgtttggtactataattaaattatcacaaaaaaaaggtattaatattaatttattgacaagcttagaagagaaaaaatacagtggcgtttggtaacacttttttaatcagttttctatttttaaaagtagaaaagtgaatttttttttcaaaaacatgttctagaaaactgtttttacttttcaattttataattagaaatcaaaattttaaaaacaaaaaaattactttcaatattttttaaacagttttttttcttaatcaattttttagatt

SEQ ID NO: 269121 - DNA, 947 bp, Cannabis indica
aattttggaccttttaacataattcgccacccgttgagcttgggtctagaatgcggtcgaatcttgcgccccggcttgtgtttcttcgatctcatccaagcccatttccactgtggggacctcaccctcacaattttccttccagtagtcaaccttccgattccgaggatgcaaaatttaaagcacaaccatctgaaagaaaaccaaataaacatttaacaacacaaaatcgcacataaatcgcataaaactcgcataacatcgcagaaactgacttaacaaatcgcataaaataacagaaaagcagaaacaagataaatcgcacacatatcgcataaaactcgcataaactcgcataaaataactgttatactaacacaaatattatatatcgcacaaaagttgccacaacatcacataacatcgtttaaaaaatagattaacaaacaaaatcatgcagaaatcgcatacatatcgcattaaaatcgcttaaaatcgtataaaatcacagtttcacaatttaaataccaaaaaaacaaagaaagtaagattgacatacccttttctcaaatagtgcagccacgtcaggttgcttcacatcatgtttcgtaactgaatcgggagtactccaattcaacattcgagggaatctagtccctctgcactgcccatacttcttacccaaatcttgcatcacctcgaaggcccagtattgcagcgccggggcatatccatagacattgtactttgcctccggttgagtaatttttttctccttcttccctttcttcttcatcttatctttagtagagaccttatcaatgtaattcttgttggaagttattttaccaggaacttagatctactcacaagtatgttgatttaacaacctaaatatgaacttctaaaacgatagaaaattaaacacataagagtatcagaaatct

SEQ ID NO: 269122 - DNA, 736 bp, Cannabis indica
tcagaggtctcccagcaatgtacatatcagccgtggggtcttggcttctgggaagcaggatcgaattcctttctatgtttggaaatgtaatctattgtaaaaagattttttttttttataaacaggggatccctatattacaatagtatttaaaatggaagtctttattttgaatttaattaaagatttaaattaaaccacacttttccaaaatttatagattagtgataataagtttataaaagcacacacgtggcgtccctgagggtcagggcgttacaacatggtatcagagcgaccaaggtttaaagatcctgaagactggtttgatatgtacattggctgcgaagactcgttcgactcatggtttagtaagtgctaattattcgctgattagtgaattatttattgattatttgaattgtctgcttatttgaaatgtgtaaattgttagagaagcatgataagttttgatatgatataaagttgctgagtatatttatgcgtgtgcggtaatgcttattagcattagttttagttataaagattctaactttgagcaaggaatggccgcgagtgtactagaaggtgtacttgaagcgatctagtaagaataatagcgagcttgctaagctcagggtaggtggtgtgggtatgaatcttccactaccataagatcgagagtaaatgcatgctatgaagtaagagatttgtaacaccctaactaccttaggcg

SEQ ID NO: 269123 - DNA, 649 bp, Cannabis indica
ccgagcttcatgagcatgttggcctgctccgcgtgtcaaacaacgtgcatgtatataatgctaatatgaccaacctagtgttagagcacatggatcatgtacatgaaccaccataccacaccaccttagcaccacctcgtcggtcccagaccaagatattctgtcaccgtttcaacgtgaccaatatgaccaacctagtatgaccaacataattaacatgaccagcgtgaccaatatgaccagcttgtaggggctatccttgaagaagtacttagcacttttgtgaagaagcactttcgtgttagtcacatgccctcaaagtcatccaagaatatctactacaactattagatatttgttttaaaatattattttatattttaaacctaactcaactatagttaggaaatgaggtatattgagttaagaaattttaaaccctacaatgtaaggtggtgaagtcacttgtaaaagggacggattttctcgaactctcactttctcacattttaaaaactcacttgaggattgaattcttggagaatataaccctaaagaactctccctaagcattgagaacaataattgtccaagtggactagcctatactatctctgaaagggggtgatccactttaaaaattcgttgt

SEQ ID NO: 269124 - DNA, 853 bp, Cannabis indica
acggtatatagaatgtccaaaacggacacccaagtcaaaagttatgacaaaatacgatttctgatctcttaggaatttctaaaaactatgaaattcgaaaatctcaactttcgcactcaccaaaacactaccaaaacttatccaaatcactccaaacttcatagggcatatatataccataaatattaccatccttatgtaacagaaataaaaattgaacccttaaatgaaaaacgtcattaatgttcagactaagctttaaaaagttctaaactcgatttctaactcaaaatcacctcaaattcaacaagaaaatattgatactagtcccatgactacccgagaataatcctataaggttagaaccttaataattattctaattcacaaaattcctgtacgaaactaattagttttaaacgtaaaacaaaattaaactataccttaagctctccttcttcaaggatttgctatcctgctattattattataaaataatattataataataataatataatattaataaaaatattattattaatagttattttattatttcttagccactaagaaatctctacttctagggtatttggccaacttcgagtatctcaaaatacctcgatatttctaaaatcaacttatctcaataattccattaatatttttaactagaatcgttgtgacatttttggcctccaatcggatctccagggttgccgaatttgaaaatatttttatgtcacaaaaaactcatattatatccacgtattttaaataaatctctataattaataaattatgcttatatatccacttattgaattttcagggtcaccgaacttgaaaa

SEQ ID NO: 269125 - DNA, 1060 bp, Cannabis indica
atgtgaaaaaacttttgaaactgaaaacatatctatatatcaatgaatatgcgaggaagcccatgtgatgttatgatttgagggattaagatggcaagcttttggtggaaaacaaaaggttcaaatggacaaggtatcatctggatgtcttgggatcgtatggccgcacctaaagattctggaggtatgggttttcgacatctccatgattttaatcttgccatgttagccaagcaaggttggagacttctttgttcatcatcttctcttgctagtcaggtgtacaaagctaaatactaccctcgcactgattttctaaatgctgaattaggtaataatcctagttttgtctggcgtagcatttggagtgcacaacatttggttcggctaggggctagaatcactatcggtactggtctttcaacgcatatcctcaagcaaccttggcttcctgaccctgtcaacccctatgtctctactataggaccgggtcttgatgggtatatggttagctccctttttgatgtctcaactcgaagctgggatgtctcccttgtcaaggatatgtttaacacacgggatgcggatctaattcttggaattccacttagctctgcagctactgaagattgctggtcttggactggggatagaacaggcagctacactgtaaagtctgcttatgctatgttgcaacttcagaagacttctcggtctggggaaaacaattcgggattctggcacaaactttggcaccttaaaataccgcctaaagtgacaaatttcatgtgagagcaatttctgatgctcttcctacttgcctccaactggttactaagtgtgtaagtatctctccaacttgtcctgtttgtcttcaacatgtcgaaacatcttctcatattctcctcaactgcccgcttgctttaagttgctggcacaaagttgatctgattcctcttgctgattcgcaaggcactattggtcattggcttgatagtgtgtttaataactatgatgatgatgttatttgccgtgtggttatgatttgttgggctctttg

SEQ ID NO: 269126 - DNA, 1477 bp, Cannabis indica
ggctataccgattaagatttttaagcttgtcatgagacagaaagtctacaaggatgatgtttactcttgggggtggagcagttttttggagaagtgctaagcaaactgcaatcttagactctaccatggaggttgaatacatagctactactgaggctgctaaggaacttgtttggctaagaaagttattgtcaggacttggtgttgttcctagaatggaaaaaccattggttttactttcttacaacactggtgcaatagacaacagtaaagtgtctcgaagccaagataagcaaacatatagagaggaaataccacatcatcaaggaatatgttgcaagaggggacgtactggtggagaaagtggatactgaagacaacttaactgatccattcactaaagttttgactttcactacatttgaaaagcacacaatgaatttaggattaattgaaatgtactgatagttttatgttagtgcaagtgggagtttcttgggctttgtgccctaactaaaactctatttcaatgtaatcttttctattcaattatcaataaagaaacagatttaatttcattacttttttaatgtgttattttgttcatgtgatcatttatttatgtatttaatttacagattcatccaaatcattatcgcactgattttcttgtttattgtgttcaacagtggaaagtcaaaaagattgtgtgattaaatgtattcctatgatttatcactacacagggttaaactgataggataatctacaatgtagtttacttgcaccttggataagtgctatgtcctttccagggcattggttaaagtaagcttgggttggatgtatggagtatgcattggaagggaccgatattgtagttggattagatataatgaacttaccataatatctattcaatttaatatcacctagttgatcttagatcaaatgatcgtaatcctgagatggttaggttctagttcacttgtattgtttgtgttcttcaatctgtttgttaaagtcaactaatggatcttctcgtgacatagattaaggacatggtagttcaattgagtgggagcgctaataatacataaggaatctatagcttctatctagacatagaagtgatacgataatttccttcgagcttggcttaatagagagataaatgatagagcgctcattttagtgattatattagttcagtgaaatatcatttataggtagcagtgttttaaggataaaatccatggaagcgtgtaacgataaatttatccctactcaatgtaaatcatctacagagaatcatagattattaggattataataaatggctaactcatagcgtatctatatcgtggaacatatatagcattctatataataaagagtgcaattccaaatctatagtggtgcaaggaagaattaataagttaaggaatttacttggtgaattctagatctgcttatt

SEQ ID NO: 269127 - DNA, 717 bp, Cannabis indica
cgtgttatttatttttattcattataacactgttatagaaccggttctattttaattataactgggtttgagttattttatattatttatatttatttattatgttacagaactggttatatttcaattataaccggtttgagttattagtttttattcatataaccggttatatttttagttatatatgagacatttactttggtgacttttcgagtgacttttccagtgacgttgactttttcggtgacattgactttccagtgacgttccggcgacttttccggcggccgtgatttttctggtaatttttttggcaaaacttattgttgttttacaaatgtgagatttctatttttttttacaaaaatatggcataaaaaagcccatataaatgtaaaaaaaaataaaaaagaaaaacccataaccctattgtgttatttatttatgtcataaaaaagtaaactatatataccctcaattacctatgaaaattcccctatataatagagaaaattacgctgacagaccaaatttaataattaatcctataaataccatttttctttttatttaagcaataataccgatccatcttaatttttttgaaacatgtgtatacataaatatgccaaaaacgagcagcccatatatcaatgcaaataggctaattgtttagttctcctttttgtttttttgttttgttctctctttttt

SEQ ID NO: 269128 - DNA, 808 bp, Cannabis indica
aataaatgcaaaattgatagagtatttataactcgctgactggacagtcttaagcgaaacaaggatgtacaaactatcaatttttgtattgacgagaaaccatcttgtctcggaaggggaaatcccacaggggccatagataacgcatagcgagacatccatctcgctacgtataagaaggctttggcaaggcgagtcggttattagaacacttagcatataattcacattataataactatgtgtaatggcttgaaggacatgattgtccagtctgcaaggccttatggttaaagagaagttcttaagtttgctcagtacatgggtgctcatgccattgttggaaagaaaagcgtatgaataaaccaagttgttaatgtactaggcgagatgcctcaacgaaatacattttgtagtgtgtcttaatctacgccagcgttgacccccttcaagacaatttaaatcacaactatgtgattttctaatattaactgtatttatttacgtggagcgtaattaaagcccacaattttggggaatatgtatgggatttgaatttgaatgtaattaactgcctacctatattactataaataggggcatattatacaaaaaaaaggacgaaaaatcgtagagagaaaaaaggagtatactgattgtaaaaaccctaattctatatcaaaatatctaaataagatagacttgtggactatacagagttaactgcaaaaccacgtaaaaacctggtgttatttctgtttttactattttcttaggtcacttaaaatttatgtgccaaatctattac

SEQ ID NO: 269129 - DNA, 968 bp, Cannabis indica
gacattaatcattataatatgttcatttttttatgttttaacaacaacagtgttatgattttacatttaattatgtttgtttttttaagtcgtacaacgatagataaactattatgcaactgcatacaaactatttttagtattcaacatacttattatttaatttctgacatcttatctcaatatatttattactgttatgcaactttttccttctccttactatacaacttataaaaaatcatatctgacttttaaaaaatatttctattgaaattatttttgtaataaattcttaataagtgtcaaaactatcttgaaactattatgcaactactagcaaactattaaactttacaaattaatagcaatctatcaaatataacatttcatcctgtgtaaattctcatagagacttaaacaattcaaataattctggtgtatctattttatggcttgattgttgcatgtctttcggttgtgaccgtgttgaccacatttgctgcacctaatctgtttttttgtatcctaatcagctgtaaatcttcttttccttggtcttccagatcttattttctggtttggtggcaaaacaaggatatcttttatgttctgtggtacatcccatgttatgtgattgtgtactgaatatgttgagtcgttgtatgtttcaagccatgttcttgtcgtgtaataacttgaacagtagttgtaaacattcaagttcatctcttttatcacagcaagcgcatgagcacacggtaattcgtcaatttggaatcggttgcaactgcatgttttctcctttagattgatcacccatgatcttgttagttctaccacttcgaacatgctctcgtttattggctttacctacaaattaggtcaatataatcaattgtcaatctgtacaggaaactaaaaaacaactattaggaaactgtatgcaacttaaagtttaaagagat

SEQ ID NO: 269130 - DNA, 825 bp, Cannabis indica
catttaatgagttattccattacatgtgattaacgttacacacatcgatccatattccccttcacttgacaagtgtcctccactgaaatggtagccgaatttcgggtataacaatatattttacacgtgtttaaaataaaagagtctaccatgcaacaagctgtttgaatactatttttggcctgttaaattttttcaaatctctcaaatttttacaggatgtcttaaataactaaaatatagacgactataaaaaaaactagactaaaaaattctcgcagatcctgaaaaaatagggggtgcatcagtagacctcttttagaggtgcattgtagaagtatcttatatatataaattctttatctaaatatatatagggtaattctactataggacccttaatttatacctcatagtataggtagtttttttgaccaataaaattaaagtcaaatagaagatatatggcatggtaatgtgtacgtacacataaaattattttttctggttaaaagaaaaaatggccattgttgttttatttttatttttttgttattaaaataaataaataaatatgtttttaaaaaaacacatatataattttaaaatgaatatatatatatttatatataaatattagaatgtatcataaaaattatattatattcataagaatgtgttagcaagtataatttatagcgtttagctaaactaaattttttatataattaaaaaatatatatgaattcaagttgtatagataattacattaaatagagcattaaagactcatttggtacactgtattatattgtattgtattgt

SEQ ID NO: 269131 - DNA, 679 bp, Cannabis indica
caagtctgtgtttgggatcgggtcccagatttacgtccatgtcccggtctcaattctggtttgggtacacgaccgtgttcgggcccgagttcaagtctcagtttgggtctgaggttaggtttgtgttttgttctaggtctggatctgggtcctggtcacggtcctagtcttgttcaggttctaattttggttcccacgtctaggtctgggtacgggtttcgttcttcgtcttcaatccggtcctagtctgagtcccagatctagacccggcctactggtctgttccaggccccgttacccaaatccatagtcaagatctggatcactgtcacgggtttcggtctgtttcttgtttaggtcccaggtgccatttttgagtttgggttcgggatcgagactgggttgcggttctaggtccagaccctggttttgtgtccctagtctggctccatgtttgggtctaagttcaggttcgagtttgggtgtcgagtccaggtttgggttgggatcctggtccggctcccaattcaggtccaggtctgatttggagtccgggtcctggtcgggttacagttctggatctaggtcatattcagttatgattccaaatcaaagtcctagttccagtcccggtcaactttcaattttggttccaattttgggtcacagggtacgggtt

SEQ ID NO: 269132 - DNA, 510 bp, Cannabis indica
tttatattatttcataacaaataaatttttttttcaattttttgtatacatttaaattttattccattccatttccattctcatccctatgtttttattcctccaaaccaaacgtgaccttaataatgtcctaagtaattacctagttaagttcttattaaatttggcacatcatatatgatcacaataatgtaaagtacatattcaaaatgcacgatttgggatgcatcataaattatatttatattttttacgtgatacttacatatatttttctgtgtagttaattagaattattcataaatttacgatatagatattcacaaataacgcaggactttgaactagaatagctcattgtctaagcatactttgtcaaatcatgaattatgtttgttgttctcctattattaatcttgttattactaattgtttgattgtttaaagtttagttgatttaactctacactattactcgtaattttcccacaacacactctctctctttct

SEQ ID NO: 269133 - DNA, 949 bp, Cannabis indica
gcataaaacccaacagtatacacgtatctaaacagagggcgtatatctatcctcttccgaagtagaaggccgatacaagacgaagcaagttctagtttgggacagtcaaggtctcaaggacacagtcgattgggtaggaaaacacgagagggaagtagacctcgacgttatgtcaaccaagaaagcatgagcaatacgaaagctaccaatctgagagttactcatagatgaggtctgtgagtaattacgagcgaagatatacagatcttcgcgagcacttgaatcgaagacaacccgatctttgcaagtgactaaatcagaaagcacctcacttgcgccatcaacttaatgcaaatcaacaataggtggatcccatccaacttcgaatcattgaattggaggataagttcaggatgtatcaggatggggaacatgggaaattacctggttatgactcagatgaggaaactgagtcgtttcatcctaatattttgacttttgaattcccccagggattcaaaaacccacatgtctcgcagtataatgggactacggacccagttgctcacttgaataactttaataccacatgcaagccaataatgtctcaaataatttgcgttgcatcttattcccgacttctttaattggagcagcgagtagctggttcgacaaatttactcatcatttaataacatcttgggaacagctgtccaaggactttaagaaacaatttcaagctgctagagacaggcgacctgaagcatcatcccttactaacataaagtagcaaccaggcgaatcgcttaaggattccttgagtcgctttagcacagtcgttgcaaaaggttagaaacctaaatgacagtattcagcttactactcttcaggtagggatcacaacctacctttctacggccagaggcaagttgtgggatgacttacatgg

SEQ ID NO: 269134 - DNA, 957 bp, Cannabis indica
ttttttataaatggggttgaaaaaactgcctctaaaggctaacattgtagtagtggaatatttgctgaagttgttatcattgtcagattatcatcgaaaaattcgtcgaagttgtcttcataactggaaagtcaccattgttagaaattggagttgtcgttggtgttagaggttggaatttgatacactgaaaccagttacaataatcagctaattaacactataattgagaaaccaattatttaaaccaaccgaatcaaaaactaaaatattagagccagttacgtaaaataataaaaataataactaaatagggaaaccagttaccaatacaacctgctaaaacaatcaaaagataaattaaagcataaaaactagttttacttaaaaaaaaaaaaaaaactaacaattaaattgcaaaaacaagttatattagataaattgaaacataaaaactagttcttagaaaaaaaaaataacatgtaattaaacagcagaaaccagttacattagatagctaattgaacaaaactaacaattaatatagaaacaaaaacataagaagcctaaaacaataaaatgatatattgaaacacgaaatagctaattaattaaaaataattaagacatatcacaagagaattcttaacatataaataaatttaaattattgaaactagttatgttaaacaactaattaaaaagtgacacagaaaaattagttacataaagcaagtacattacgtaaatctgacacagtaaaaccagtttcctaaaataacaaaagaaaaaattaaacttaaacctcaaatacgtaaaataacataccaacaataaaacacggaaatcagtcatttagtacaaccaactaaaaaattaaacattcacaagaagataaattaaaacaaattaatatatttcaaaaaaaaaaatgcataccaaagatgaatccttaaa

SEQ ID NO: 269135 - DNA, 585 bp, Cannabis indica
cttttctttttcccattcccttgcttgtggttattactggaacccttgccacttgagctcgaattacttgggtagtagggaagttgggcggatgttccagtagaaggagcctttgacttgccaagcttttgctcaccttccgctcgttgaatggcttcttcgagcttgttgaagacttcgacacagtcaaggaaatcactcattgagtctaccggcccgttcttccttatatccttccaaagttcaccgaggacttcgattccccccagtatcacgaataactttccatctttagttacccgtgaaactttggtcgcctccgtcatgaatctacttatgtatgcccggagaggctcacctggtcgttgcttaacttcgaccaagtctcccaaatccaatggaagttagcgtgaggaggagaattatgcatggaattccgaagagaatgttttccatgaactaaactttccaggagccaacttgaaataccgttgctgagcagcttctgacagggttgcaggaaaaattctgcaacatacgtctcctcgtaccccttgcaagtccatttgcatttcaaagtacttg

SEQ ID NO: 269136 - DNA, 907 bp, Cannabis indica
aattgttaaaaataatcctccacttacactgatattaagtccaagtacaacatgaacacaaaggacagaaaaggaaatacatgcaaatccctaagttgaccttcggtctctaataaacctaacagaaagtagttagagtggatttggctaaatccacttctaactacattctgtaactaactaactaatacattcagaagcaacaaataaaaccctagatctatatatacctcaagcaacaaccagatctgggtggttgagtgagttcttcaagatccagagcaagaacacttgaagaaggaagaatccaagctcgtacatgcacagaaacacaaaagagagttagatctagagagagagagggattaaacacaaaatacatgtattaaaggagattaccagtcaaaaattattacctgtgacttggaatcttcatggttgtatgattgaaacatcttgatagtggaatcgagctctcaaattcgaggagcagctcaaacggagacgtagccaattttattggtgaacttcgggaaatttctggtgttttctatccctaatcttttctatttgtgtgtgtgggtgtgtacagatcagatcattgtagatctgatctgtgtatagtgtttggggcttgattttctgggtagattgaaacctagcttcgagtttctcagagagaaactctctgctagggtttcgaagtgaagacagagaaagagagaaagtggctgagaagattctcgagccttgggttttgttcaaacacaaaacgctgtcgttttgggttctctgactttgaaaagtcattgaacagggaaaggtcgaaattgaccttatacttgattggttttgtttgttggtgtagggggcaagatagtaaaatcctatcataaaattcctacaa

SEQ ID NO: 269137 - DNA, 643 bp, Cannabis indica
tgtctgttcatattctcgcgtaagcttgcaggcttaagatgcgtggaagaccagtcgagtatgagatgtgtgcgtcctgtttgagtcgcatatacagacatcctgcaataagtcaacaacttaagacatgcgagtccttatcgggttgtcgaggctgttgggtcatccagaccaacttgcagagtaaagaattgatctttacaaccttgcaggaagatctttttagtcctcgcatatatctcggtatacgtgactcttgaaccaatcttcggtcctacttcgtgcgaactatacgaacgcgactagactttgtcaaggtcacatcatcctgttgagtctagttcaggcgaggttttcactcaagaggtctcctgctgacatctcagccctcctcgaggagagtgagtccacgtgtcatttttataggagcctggtctcgagtttctaggtgagaaattctcactataacacatgcccctagtttcgcgactggcatcttatgtcatgagggaaactataagcgagaggcaggcgaaaggttttcacgagatggtgactattggttgtctaattgagggtttcaaaaagacggctgtaatcattatacttaacccatgtggggtgccacgtcatcaaaactctt

SEQ ID NO: 269138 - DNA, 651 bp, Cannabis indica
tgttatactaatcttacctggattccgaattcaggtgtgtcggtcaacctgactggaacgaactcataacactaataagtgatacgctaaatcacttcccggggacttaaactagaaactaaaagtttccctatcgataaaaagcatggcaataccccaaagaacttccagacctgttctatacaccccaaagaacaatacccatgcaccaaaacatcccagaacacacagatactaagaatgccatgtgagctccaagctttgagttcaaaactcaaacttggctgaagctcacctacaagcatcaaaactagattgaaactacataatcaggcataataaagctgcaggaaacaatctctaactcaagcaacaaacacagcaaccaatttcgaaatttctctttgaaaactttagcttttgaaccaaaaactctaaattagattaaaaccaatcaaacatgcaccaaaacagattcaatccactcaatccaacatgctaaatcctctgaatacaacatgtcacagcagtaacaaaccactcaaaactagcatgcaacactcatctttttcatcaaaaattcaagaaactaaaagagcaagatgaagaaactttaccaacaattagagattgcaaaatcttgctaaaaag

SEQ ID NO: 269139 - DNA, 538 bp, Cannabis indica
ttttttttaatggcttagcacgatacgacctgtattttaaaaaacttaaaaaaaaatatagaccaaattagcacgatacgcacgtatttacaactttcgatctcaattggtgcttgaatgtcaaggaataattaaagaaattaattgagttttaaatgctaaggtaaggttaatgtaagataaaggatgcactagttcactttgaccatattgctaccaaaattattcttgtagcacttaatgattccaagtccaatctaaaattggtgaaaattatgtctgaacatcattatttgaaaattatttttctattcaaaagttgctagcaatttttattatagtatagtcgtgtattatatatatactaatcgagttttatttttctctctcaatcaaaactttgtaagattttaaacatttattatgttgtcttgttcaagtctatatttacttaagaaacttttacatgaaaaatccattttacacaatttattacaaaattactcatacacgcttatacctacttttttacttacaa

SEQ ID NO: 269140 - DNA, 875 bp, Cannabis indica
attacataaaggtgagcctgatactgaatctttctggacagtggcctttcttggggcaactcacctttcgttatgtattctatgatggggaccatccagttgggttcttgcccaaccgttgctatggcctcttttattttgatgcttggctctgccaagcattccatggtactacccccagttcctcgatctgagtttctgaagctaacttagccagacagtccgcgtgagcgttcttttccctgggattctttctactttataatccgtgaactcgtggagcagttcctagactatcgccatatacgcggccattctttcgccgcgcgtctgatattctcccgacacctggttcacaaccagttgggagtcgctctagacttctactcttttggcccccacagcctttgcgaatctcagccctgctatcaaggcttcatactcggcctcgttatttaaagttgaaaagttgaaccgtagggctgcctggagtcgaagtccactcggagatatcattgcaaccccgctccggattcattttctatggaggctccgtccacaaatactttccatgctgggaccgacggtgccggtatgttcgcggttgcttcggcttcattacattcggtgatgaagtctgctagcgcttgcccctttatggaaatacggggtacgtagtgtaagtcaaattgacttaactccattgcccatttgaggagccttccgaatgcctgtaggacttgccggagtgggtgattggtcaacaccttgattggttgagcttggaaatagggcctcgactttcttgaggccattaggaggcagaaaaccagtttttcaatgacggggtatcgtgtttccgcccctatcatgcg

SEQ ID NO: 269141 - DNA, 860 bp, Cannabis indica
aaatatttaatcagaatcttgatataatcaaggctataaccattcaaccgctaacacttagccacatatggcacttaccacttttcttaccttaatttagaactcaagagtgcgggccgacctgagtggaaaataagctgggcgatcccggtcctatgtcacgacaattgagacttaatagataccttaatctagaatttcaaaacaaaaccctaattctaaaccaaacacaacctaactcccaacaactccaaaaaatgtcaaacaactcataagcaacctaaaataggtaccacgcaacaccccgagccaaaacagaaccggaagaaaaactcgggaattccccctactgggcaaccagtcgactggttctggtacaccagaaccaaccggacgaccggttttggcagaccatgaagtttgggttctcttccccaaattcgaaccaaaaccaatccatacctgtccaaacattccagaacagtataatgccacaaatttaactcatctcaagcatcaattaatcacaattcatccaaatcataacttcaccaagtttgaaccaaaacttgattctaaaactcaattgtttatttcaaaccaaaccagccacacaatacatcaattaaaatctaaacattcctaaattaaacttaagaataagctcaagatccaagctaccccaaccagccatgaaaccctagaagatttaaccaaaacccaaccttaactaaagtaattcaaaggaaaacaagcaagatcataccttgatgcctaagcaacttctaccccttgcaaaaacaatctgattgctgagaattaagcaaagaaatcccttggttgaagcttcttaggggttc

SEQ ID NO: 269142 - DNA, 628 bp, Cannabis indica
aaaaaattgggccttaaaaaaataggagccttgtacaatggtccaagctgcccaatgcttgagccgaccctacctataacgatattgacatataagaaggtgctaaatattactaatactatttaacatttctctaaaataaattatcatagcttaaaataaaaatttacgctcaagatattaattagatataccaaaatttttattattattattttatcaaaattcttttttaaatgaaaattttattcaattccgccttaacaatattagaaatatcaaaatagagattatactttgaataaagacgatcaacatataaatgagacgctctagtcatatagtgagcaaattttaatttgaatcacaattttaaaaataaaacaatattttaattatagggtaaattctattttggaccatgtattttgcaaaagttataaattggaccccctattttgttaaatgacaaaatagaccctatactttttaaaatggtacaaatagaactattttagaaaatacatggtccattttattatttaacaaaataaaaagtccaatatataacttttgcaaaacacaaagtctaaaatggtatttactctttatcatataaccaaattta

SEQ ID NO: 269143 - DNA, 752 bp, Cannabis indica
ttttcaccaaggtttttcccaaacctctcacaatagttttcttccaaggactatcaacctcactggattgttgaagtgccaatctcactatcggaatgttgtagtgacaatctcacttttctcgggttgtttacaaaaccggtgtcaacctcacctaaaactgagtttttttatagcggtgacaacctcacctctcaataaaatggataattgattttgaaatacaaagcaaactctctctctaataagatgaaatacaatgtgaaatcctagagagaattacaagtacactagagaagataagaacaagtttggctcaagtgtgtgtggttggtgtgtttatgaaaagataattctttagctcaaaacactttgaatgatgttatatgatgaatagaagctcaaccaaccttaatttttgagtgaaaataagtttatatagtgtaggaacaaaatctagccgtttatagccgttagcacattttcaaaaagaatcctgggaaaaatgaactacctattttaaaacgaactacctattctctgaaaaatggactacctattgaaaaagggttggtcgaaaatcaggcaggttcaaaacatgcatttttcggcactaaaacgtgcataactctttactcgattatctgttttcaaaaattccacttttgttctcttatttaaacaaaatgtgatttataaattcaatcaaaaaaatatttaaaccatctggtgagaaagcttgttgcacaagt

SEQ ID NO: 269144 - DNA, 879 bp, Cannabis indica
tcttgcttattgtaagcttataaattttgccctaactcacgaaattttaaacttccgagtttttaattttcgtcgaatatttttattctttaatttgttgagtactcctggtcggcatatttgcctgtttaatgttcgatatcccgaccaaacactcatcttgtgtattgtcttttgtaaatgaacccaggtgagttttggggaagcgaacaccaaatcgaccaggatctgcttcaactcttgcacgaaaatcatcctcgtcttcgttctagtccaccctcttcgagcgacggacattttagcttaaatctctcgtccagccataagatgatggctcgtacaaaaaagacaatgcatagaatcgacacatctgaccctcaagcagcccggcatgccaccttacccagtgccgaacaacatccatcgatctaggaggagcaggatcatgaaggggatgctgaggtccaggagattgaggaacgagaccatgttcgtccttgcagtccttctgaggaagaggaagaggaggaggttgcacccccaaactttgggggatataatgtggctggggagccaatggatgcggatggtgacatcttggttgagggcgtggactatgccagtgaggaacttactgccgcagtacctcacagaaggcaagtttctttgggtgccaggtgggtaagccctccatccaaggttaacgaggcacgcttacgggatctcgaccaggatggttatttgggtgagtttgactgttatattcccgcctataccaatcgagctacaatgtaaagaccgcctatgaatagtactttttattattaattatttaaggtttatgtattaataattatggaatgcatattttagaaatat

SEQ ID NO: 269145 - DNA, 689 bp, Cannabis indica
tcaagagaaggagattcgggctcagatattagtgatactatgctacagataggatacaagggttagagatctgagtggaagaagccattaatttccgctgcaaccactgtaaggtttctgacactttatatgtgtttatttcatatcattttagaagttcatgtttaggatgttaaaaacatacttgttatttcatatctatgtgtttttcttgattgtttgatgtttgaaaatattttacaaaaaatagttagaatttttttctggaataattttttttgaatactttggaaaaaattaagcaattcacttttttacagaacttaatttcgatttaattttaattagttatgaattttcgaaaattcaaaaaattaggggtggtgtcaccccacgtacgcgcgcgaatcccctcgatttcaggggcgcacgcgcattcggacaagccctatccgagatttctcgatcaggatgggctgatttgtctgaaatttgtcccatgggcgcgcgaagaggctgctagtagcctcctgcactgtgatttctcaaccaaagacccccatcgtgagcgcgaggatggtatgcaatgcataccatccgcacccaaataccaaatttttcccatttttttctatgttttttctatggaataaatttcgaatttttgtgtaattttgtatttagatttt

SEQ ID NO: 269146 - DNA, 679 bp, Cannabis indica
ctagaagaggcagtaaaatttgtaaggaatttgcccgtcgggccaaacgcagttattaggaggatgttaatcaatgcttgtaaagttcatcgtgattttgatataggattgagtttgatcagagggctaaagactttttcacacagtcctgaaaatcatgtcatctcttccaatttgttagctgaagcaggaatgtgggatgatgtccttgatgaaagaagcttgatggtgaaacaaaaagttctaaaggttgctggtaaaagcttaatttctgaattaacataataaaattctggtagaacctcagcgatgaaagttattgtggctttcccagtttcccttatgtgaatcagcaatagcaataatagggaaagcttgctcaataacaatgagtcagaactgaagatgctctggacaaaataaaaaaaatgaatcaaaatgtcacttcaagcatgtctaagagaaaaatcaatgaaagatgtaatgaatgttggaggatgcttgataagctattcttgtctcaatgatcattctagtaatatttaaggcaaattctaagtggtcaacggatgatatagaactagtttaatgaatgttgtttatacattatgactgatatgagtagctttcttatctggttttaaataatgttatgttgcacccttccagttatctctaa

SEQ ID NO: 269147 - DNA, 597 bp, Cannabis indica
aattgtcatgtcatcaagtaataggttaaaacaaagaaatattaaattttaaagttgacttaataatcataaatatgaatcattagatttgatgtaatggttaataataaaatactcatacatgagtaatactcattaaaactatgcccatatatattaatagaagaggttttaatggttacatcaaatatgtaaaaatcatggttacatttatttttagtcattggatcactattgaatggttgtgataaatttagaaattaaaataaataacttggaatctgatcctttatttccttaaaaattcttaattaagattaaattactaataattattaattaattttttacaatttgttactaaataaggatcttttaacaaataatttttttacacttaaattattgaaatatttgtaacaaggctccttataattcaaaattattacacacataaccttaattaatataaaatagtaagaatgacctctaattagatgtaattctacactcaatcttcttattaatactttaagtgccaaataaatgtgtcaatctaggattggttcaagtgattaagttttttttaaaaaaaaa

SEQ ID NO: 269148 - DNA, 615 bp, Cannabis indica
ttttctagtttttcttttccttattatgataaaatgagatttggtttagtatagcacaaacaataaaccttatttccacacaatttttttccattcctttttttcaaacttttttgttgttcttcttcttcttaagaaaaaaaaaggatggattttattttttttttgtaaaagaaataggatggattttagtgtgcctggtgttgttacgataattaaaggtggattttgaaaataaataaaaattggtgagacaaggttgttgtttaccaatgaaattgaccacttttgtttcttatactcagtactcttgtgacttgtgacttgtcacttgtgatgatgggtgagtccaggggcggagctaggacgggatgtttggggggggccaaaccatattaaatttaagtgataaatattttaaatacatttaaattgataattaagattaaaatattgaatgtctctcttgcatataaaataaagcttaacatgatcacgctagttacaaaaatagtggtggatattacttggcttgaaatgagaaaagaaaaaaaaattaaaatgatatctaattctttataaagcagttgtattgatcttttaactttttaattt

SEQ ID NO: 269149 - DNA, 819 bp, Cannabis indica
agttcatctagggtcaacaaagatgtatcaagaccaaaatgccatgttttggtggcgaggcatgaagaatgacattgctgagtatgtttctaagtgtcttacctatcagagattaaaggctgaacattagaggtcggcagggttatcgtagacattgaacatactagagtggaaatggaagatatttctatggacttcctggtaggtttgcccagaaccacgagacaatttgactctatgtgggtcatagtggacagggttacaaagtcagcgcacttcctacccgttcggatgaatttctccattgaccagttggctgagttatatgtcagagaaattgttcgtcttcatggtgtcccatagtctattatttcggatagagatatgaagtttacatcaagattcttgcagagactacatcgagctattacgactccttactcaattcatccagggtcaacaaagatgtatcaagacttaaaagtcatgttttgtggcaaagcatgaagaatgacattgccgagtatgttcctaagtgtcttacctgccagcgaataaaggctgcacatcagaggcctgctacgattgttacagccattggaacatacaagagtcggatatgggacgatattggtatggacttcgtggtaggtttgcctagaaccacaggatagttttgactttggtgtgggtcatagtggtacaggtttacaaagtcatcgcacttcctacctattcggacgaatttctccattgaccagttggctgagttatatgtcagagaaattgttcgtcgttgtggtgtctcaaagtctatta

SEQ ID NO: 269150 - DNA, 1056 bp, Cannabis indica
tgcgaagtaaattcttccaatagccacaccattttttctcctagcccatattttttcttttaaattccaaacccagtatgaaggaaaatcagaataagttagttctcgtgcatcatcatttttcttattttgtctccaaccattcagtgaactttgtttgtcttattccaggcttggaaagaacatcatcaacataatctttttctccgaatattactgtatgctctccaggcaaatggaatggcaatctttcaactgatggttgtctataatgtatgtcaaattgaaagattctccagcaagcttcagttgctgatatatacctacattctaaatatgttttgatttcatctatttcttcggaagtatcaatagattctattcttgcagttgctctatcagaacctttatgaacatatttgaatagatatttgactgatctagagtaattacaaatctcgatattgatatgtgcatcaaacttgacaatcaaatttctattataagggacgacatatcgattatctaaaatgacacctttcttttcaatgtgtatacctttatttcttcttttgtagactggaaagccatctgcgtctattgtcgtccgatcattaaatttttttgggaaatgttttgtgcacctaccttgcatcatacatggagagtttgaattgagttttccacaaggtccatgaatcataaatttgttaacggcattataaccatcaggatcaatatttgagtctgggatttctgcacttattattttgtctatatgttctgctgaaggatttttcaatgttgaatgcaagaaaagtagtatgcgtgcatgaggcaatcctcttttttggaactcaattgtgtatatacctacaataacattgagaaaatgttaaaatttacatttaaaattgttggaaaaactgtgaaatattttcatagaatatcattttaaaataatttaattttttgttgaatttaataatataagaacttacatgcgattatttttccaaatggttgttctttttttctagatcgtgcattagttgg

SEQ ID NO: 269151 - DNA, 516 bp, Cannabis indica
tgattttaagtactgcaagattcgatgggcagcatggaaatgtgaaacccgtggacaagttaaaaattgacttaggtggtttacagcataggagatgtcgggccttgttattgtcaagtatatgagtttgcctatgagacttctataggctgtaggaccgggaagaagcttcccttgatctttacttaatttgagatttgtttccatgggagtggacacaggtttggcactaatgtagcctgtatcttgtagtaattgaagggtaaaaggcctttgagagaccgaaatgcctttctttgtgcgaccagcctcaagaccaagaaagaaacgaatggtgccaaggtctttaagttgaaatttgtcatggagatatgttttgaagtgtgatatggcattgtcatagttgcttgcaacaactatgtcatctacatagatgagaatggccacgaagatattgtttgtccttttaatgaacaatgaattgtccgaaagggattgaatgaaaccatccgaaat

SEQ ID NO: 269152 - DNA, 998 bp, Cannabis indica
cattgaaacagagtttatttagggcataaaacccaacatacccaccatcctcaacacacggaacaaccctcctaagaccagaatcaatcttacccttcaaagagtgaatagtcatatcaaaataaagcttaccccacctaaattcattgtatcgaccaccatcaacaaaatttatttcctctatcgaaacaactttacctaaaggaccacccaacaaataacactgaacaaaatatgacagagccaacttgactgcaagatcatcattacccttgagattgtcagcaataaaggcaatttgaataacacccttggtaatttttttggtaaccctttaagcactgtttaacaataatattatcatcttgcttatattgataaaggtcagaatcaatgtgacaatctaacctagtaattaaggaaaactcctcaatactaaacctaagatattttccttgtacacaaacccaaaactttaattcattaggctgttgaacctccctcaagagcaaacaatgaagaagctggtaatggataatgtactctgggatccgaagaaaatacccaaacacagtttttgaaaaaagttgtagttgggttttagttagaattttcttgatattcaatgacagaataataagcagatgttactactctagaatggtagtattgagatcaggtgtacttggatttccaatccttaaaaaaaaaacactactaaaataaagctataacgacacgaaaaaaattaaataataacaaaaacaagataaaaaaaagaacaaaaagaataaaattacacacctctttaaccctattgccaataatttcctcaacaacagctgttgatggcataatcttcataggggatttaccctttccctaaaattaaacgaaacaacaccaaaacaacaacaataaacaacaagaaaaaaaatagaaaatcatagaatacaagaaacaaaaaaattaaaatagcaaaataaaacccaaaataa

SEQ ID NO: 269153 - DNA, 945 bp, Cannabis indica
ggcataaaacccaacagaggcaagtgtgactttgaagcgatctagaactcatagccgatcaactcgaagaggagaaagtactcaatgagccaatgatcgggagagtataggaacaagtaaatccgcaagccacttaaaaataaactctataagtaggacgcggtcaatgagtaagatgagatctgcaagcaattactcccaagatttgtgagagcacttgaataagaagaaaactgatcttcgccaacagcttggcccaaagtaagaggatccaatctaattgcggataaacgagctggaggacaagttcaggagatatcaagtgggggagatagggaaatcatcttgatacgactctgacaaggtgcttgagccatatcacccaaatattatgaataccccttttccttcgggactcaaaaacccgcatgtcttgtcctatgacggaaccacagattccatattgcatttgaataactttaacacgataatgcgagcgagtcttgtcaataatttcttgttagaaactgtctagtgatttcaagaagcaattccaagccgctagggatatgtgacccaaatttgcctcgctaaccaatataaagtagtagcatgacaaaaaacttatggcgtactaaagtcgttttagcatggctaccgtaagggttagaaacttggatgacaacacgcaacttatagcccttcaggcgagaatctccactgatccattaatcgctgggagcgatttgtgggatgacctacaaggacgtcttgtacaaaacatcattgagttcaatgagagagctcaagtgttcatccagaaggaagaagcccgaaaagaaatgaactattgaaaacaagctcgggaggtaaacccagcaatgtttcaacagagactttttccatgagaattgataactcaggggtttctagtccaaaaagaaa

SEQ ID NO: 269154 - DNA, 1296 bp, Cannabis indica
tcatcatttcacttttatgtccatatagaagctgtagattctatatcaatgtttagcgctcctcctcaattgtattatcatgttcccaaaatgtacgtatcacccagaccaaaaggtaggcttaactaacaaatcaaagaacacaaataactctcttgagatcgaatctaacaatgtcaggattaagatcttttgatgtaagatcaactagtgacattgacttagaaagatacaactgtaagattataatatctttaccaagatcaatatcggtcccagtccaatgtatactttatcgctaactatcatatcagtgtaaatctagtgcactgatgaatcaagggacaattatcttttggaatcatataatcataattacctcccactgtgttgacatcactgtaattatgaataactatatgttctagacttaacagaaattgtatacattaaaccataaacatgaaaactacatgtaaacataaatgacttttaatcttctattgataacaaatcaaattaaattgaaataagttttatttagggcataaaatcccaacaaactccctcttgcactaacataaaacaagtagtgcatttcaataaatctattgtcttgatatccagatcaagtgtagtgtatttgactaaacccaaattactggaactgtaagtctgtgctaaggaaatgctttctccactattactttctttgtgttcataaaacattatgcaacatcattttctatatgcattactcatatagggatacagaagaaatatctctaattgtatccaaatggaatagagataaaccagttaagaactttcttcagttgaacaactttccagtgcttttcgaaagcaacaaagttatgtatcttgtctgatggagcttaaattattatagatgggtttttacatccttctagaataattcctccacccccagagtaaccaccgtctcgaataggttatgagttggtgtagatataaggattctaatataaacccttataatctaacatataggtcactttcagagatttttcttgactctgtctcctaatgttccttgtttgattacatcttagatggctcccactcaacagtaggagtcttgttaagttcctacactagcgtacacttagcctcttactaatggttctcagggacatcttgttgtgacatattgtcttagtctgaaactataagttccttctagactaggtcatcaacatagcattctagtattaacattaatgtaaaatacttgcttatgattaagtaatcatt

SEQ ID NO: 269155 - DNA, 806 bp, Cannabis indica
tctctaatattagggagtctttcctaacttttctcctcaagctatgcactacccttctattgttgtgtcgatgggtatgtagaatctaagtatgtcactcgtgaaagttaatttctcttcttcctcttttgaatttgtgatctcctctctatagctgtttgttgtaccacccaccataaatttgtattcacaatgtattagttgtgcaattgtgacctgttccaagtagttgtcctcttgttgtctctccttcatgttgtacccaaattgttagtcgtgcctagaccttcttagtctttctcctttgaaaatgtcactgtcgaaaccatgcacattttactctattgtctcctccaccaagtagatgaccttgagtttaaagtttacaactttccttcggtaatcttttatttgttaatgctctgtttatctcttagtgtttaagataccttcataagctattacctcaagcaattttatcatgtctctttctaacttcttatttttggattctattcagcacactacactcctttctatatgatggcatcgtcctctcctgactcatttctataacagacttctctctaaagtctttgcatacactattcatacttcttaccatctaacttaggagtgtgtaacttatggaatatccaacaagatagtacttgctccttaaagatctattctttcatccttcttaataagtgggtttcgtaaaatatactgtcccagtctggtataacgtctactattctaagtcatccctacttcctatatgttgggcttccattcatagctag

SEQ ID NO: 269156 - DNA, 652 bp, Cannabis indica
taggtgaaggaggcccacaaaattagggaaaaatataaataaattatttttgaccattgtttttgacctataaatgatataatagattccatatctatgatcagcgctcccactcaattgaactaccatgttcccaagatgtaaatatccaccataaccattagttagctatcaaatatgcaaatcttagttagcaattctagcttttcttaaggtcacgatcaggaaatccatgaatctagtaatggtttacactaagtacacaactattcaatcattctgaaattttcctatcactaggatatttcctagaaggtcttaggcaactgctagtaactaatcaaagacccttcactttcatcaacatgcaatccaaatttttagggaggtaagtttggatacaatttaaaaattcaactctatgatctttgaactacatatccaccatatatttctccacccctattagttcgtgttgaccgaggttttcggcaaccaataaaataataagagttaaaagagctgtaaggaattaagagaaggatttttacgtggttcgggcgttaatgagccttagtccacgagtctgtatatttatgagtgtatttaatacagagaatgttcttggtgagtatttactcttcttgcactt

SEQ ID NO: 269157 - DNA, 565 bp, Cannabis indica
aaaataaaagttctgacagagaggaaaaggaaataaaacctattacaatttgaatgtataccgcctactaatttaaggcaaatgatattaggtatatacttaaattaaataactaatcatatatccataaataaaatgaagttaaagtcttttggtgcaattattcctaatttaaatgagtgtgatgatttgtgtgattatttagtaatggagacatattaacgaaaaatatgcttaattaaattaattggttttccaaaactattaggcaatataaaatgagaaaactattcactttctctaattacaataatgagcaaaataggaaactagagaggttgccttttctttcataatactgcgtatctgtatccatctcttgaaattagagatattgttgtgtgttgcaagatatataggatatatctctaaaaatgtcccactcgcaccctctgatcggcttatacgagctgtctacatgatggagttggtcaggtattctcgtatactctgctcagatattaagttcatactttgagcattagagctctctacacgattagta

SEQ ID NO: 269158 - DNA, 558 bp, Cannabis indica
ccttgcagagacttacccccgtcaccttcccaaactgaggttgttcgagttgaccattgaggagattgaggcccagaccgcggcccgttggaagaggcttatgtcgaagtcccctaagcgaaaaagtagggcaaagaaaagtaagggagtaagggttgaggaaaatgctccatcggatctcggcatgtcatctcagcatgactcagccactgatgatgccattggggccttacttagtgctctcctcgagatctcgtcgggctagggcctcctgatcaagaaggtttctctcagcctgagaacctcccggcggctacgctgggccataatccggggcttccatcctcttgtcctgctcggactcctgcttctctcctcgacgtgtcgtcgacttcccaacttgcgctttctcctactctaacacaccctacaaccttctcttccagccggggctccccgcctctacccaatcttcgcccgcgggcatcggctgaatgggacgagatccccgccttacagattataaaggatgttccgttctaggagtcggctgaaaat

SEQ ID NO: 269159 - DNA, 519 bp, Cannabis indica
aaagataaactttgtgatgcatgtcaatttggaaaacaaattaaaacatcttttcattccaagaaagagattttcaaccactagacctttgcaattgcttcatatcgatttatttggttcttctagaatctctaatcttggtggtaaatactatgtatttgtgattgttgatgacttttcaagatttacataggttattttcttgacactcaaagtgatgttttaaaaaatcttgtcaaatttagtaagagtgtgcaaaatggaaaaggttattctattacctccattagaagtgaccatgatggtgaatttgacaatgatgccttagaattgtgtttgtgatgaacatgattttaaccataactttttggctccaagaacttcacaacaaaatggagttgtcaaaaggaagaatagaacaattcaagaaatggctaggtcaatgctaaatgaaatctcactaccaaaatatttttgggttgaggccattaatatctcttgttatattttgaatcgtct

SEQ ID NO: 269160 - DNA, 654 bp, Cannabis indica
gtcgtctatgctagtcggcacgttagacagcactcggggcagtatgatgccatgtgtctattcaacgttgacctgccctcttgtgtgggcttgccaaacaacttcttccaactttataaaaccatcaactcgctcaaggaactccttcatgtttctagttgagatccttttgttatctttccaaaattcactcaacgataagatgcctccgagtatggctatatatcggccttcttttgtcaggcctttgaccttggtggccttagccatgaacctttgaatatattctttcaaaggttcatcttgtctttgctttatctcaacaagatcctctagccgtgaagctatttttcttgaggaagagaacttgatacagaactctcgagacaattcttcccaagaattaaaccttcctagggccagcttgaataccactgttgggctatattagccagagttgccagaaagatttggccttacacatctccaaatacttgttcgagatctgtttggatctcaaagtatttcaggtgtactagaggatcatctttccccgtgtacatcttccaagttggcatcttgaatttggacacaggcaaggcattgatgtatgccgagaaaggtgtatcccttgaactatctagctcaaggtcc

SEQ ID NO: 269161 - DNA, 1061 bp, Cannabis indica
caccgtacgatggtgtctgatcaccattgccttgcaccctttttggtttataaaagctagcattttcccttcattgagttactctcgctattctaccatttcaaactagataacccatttaaaaaaattccagaaatcatagatttcttgttgctgttcctccgtcgttgccagtcaaaattctaccgtcagacgacatcgacttctagctcattaccattgtgtaagttttctgggtacatttcgcttttattattcatttgcatgttaggacaaggtttagggcagtgcctttagtcgcatttgatttctacggtgaaacggtcatggtgaagaccgttgtgcgtcgtggtttcttgtctgtgttccattgtttcccttttttttttaattttgcgaacaacttcttcacttagggactgtcgagtgtatgaaactattttcatacttaggttcctcctttttttttcttgcttttctctgttttcattgcctttgggatatttgcacccgatgtttgcctaggagaatccctgaatttctcatttctggcagacatccggagggggcctccgtccagcgattaggggacccccattccctccttttacgttagggtttggtttgggggctaactgctggatttctctttttcatatgagtgaggttctccgcgaccttcacgagcatggcttcttatgctttgatcaagaaatttcagcattttaccaatccccaggcatgtctgtccttacaaccggagcgaagtcttcaagcaaagggtccaagaccttagccactctagaggaggtgatgaaaggactcgtggtccaggagaaatacacctatcgatccactggctgggaggcgaacgagttgcacttaactttgacttgtgcccaccaattggagaagatagatacagttgccgggatcaagccttcttcatccaaagtctttcaccgtcttcccagagatgaagaaatgcccaaccgtaattacggcggctttggggcctggagtcaaacccacctcatgcatgtctggggccatgctaccac

SEQ ID NO: 269162 - DNA, 765 bp, Cannabis indica
taaaataatttccaacatgttttgttcctgaagtggctaaagccttagctatccgaacatgctatttcaatgcatctcttttgggtatggacatgttattattgagtttgactgcttgagtattgtgattaaactgaaaaacaaggcttctattattactttattgggtttagtattagtctttgtaataggctctacgatgttagttttgtgcattgtaatagatcttgtaatggtgttactcattctttggctaaaatttctttgactttaggaaaagtgtaatctggtggccatgaaatcgaacttgtattcaaaacttaacaatagcggatgttgtaattgaataaattatcgtccccaccttagtagagtacttgttgcttttagggggtgtttaaaatgggttaatgttagtaagggaatggtaatgttaaacattaccttgtttgtttggagggtttaatcttgaaatgtcattcccttggtaatataaatacccttgaagagggtaatgttgatacattaaaaaaggttgggattcattatttccttccattatattaatttgaataatatttttaaattaataaataaatttaaataccattaatattataatttattataaacaaaatattatgatagtatatatatatttagtctgtaagatcggtttttttataattgatttatttttattatgttattagcaataatatatatatatatatatgcattatatataaactagtaaacaatccg

SEQ ID NO: 269163 - DNA, 835 bp, Cannabis indica
ttttttcaatagtctatttccatgattttttcgtgtctattctccaaccacatcgcccttttcacatttattaacaacataattctcaaacataggattgtcagttaggactcaaacatggtttgaaaaaaaataaaaattaaagtcatatatattgtataatagttttgtttgatatattttactgttattttatcctagatttttagaattaccttttccttgacgtcctcaaagttgaacttgtttgaaggaattgtaatgcgaagaagaaacttgataaaattgttaaacttgttgccatagtcatttatcggggccccagtccccttataaaatataaatttcaatttatgtcctgcatgctatttggtttgttgttgttcaatattttcccctaactccctttttcttactgtttcttgcacccgcatcaaccattctacacatacaagctagaaataacttattaatcaacctattaacaaaagcaatatgtatttaatttaattaacggtgagtttcaatattacaatactttgaagtctacaagtcatcataatcatcatcattaacagttacattatttttattatcactatcactagtgccttcatcataactataaacaatcaaatattggattttgtgtctaaaacctatttcaatgtaatcagatttactaattaataaagatcagaaatggcattttatgttccatggttcacatgatttatttcatgactatatttaatttataaattctattaagtcaagaatatatggatttgttcatgattatagtgttgtcagcacagtggaatataatcatgat

SEQ ID NO: 269164 - DNA, 715 bp, Cannabis indica
gtcccgggcaagtagctagcatggttcaaattttgtctcagttagcagaagatgaggtcatatgaagcatcgagtttgttgtaggcaaacttcataacttgacgttgcaatctgatctgttagaacgtgttaaaactgcttagctaaatgataaagagttagtaaaagtcagagaagaggtttcggctgtgttgacttcacttttagccaacgacaatgagtctattttacaagcgataaacgatatgtagtagtagatacatgataaagcaataataagacacaagaattttatagaggttcaaccccaagtagttcggtaatagcctaatcctcattattcatattgacataagatcaagaaagaagattccttttcttatagctcttacaacagtatctctgaatatataattcttagataaaagtatagtcttagcttagctgcttttcgaccgatcccttgcccagtgaatatgcatcactatttatagggctaggaagcttgaggaggaagagtttcctctatctttacaatgcgtataaacagaaagatcgtgggatcaatgctgaatgcaaggatcgtgggattgaggctaaatacactgatagtgggatcgtgtgtatgccgtatccacgtaaattgatccctaagttatagcgattgagatgatgactcatgatgtgaaagctaaattcgctaagtgttgattgc

SEQ ID NO: 269165 - DNA, 735 bp, Cannabis indica
ttctaacatgttattttgtgaattacttagaacaccatgctctagattgtgaaatctaatcaaataaatgagcccttgctctgataccaattgttagcccaagatatgattccaagcgggggtgaatccgaaatttaatctaattttggtaaattaaaactttcaacacaaaattaagaaattaatcaaattattcaagtaaatgtaaatagtatggtaagcaaatatagatagcaaataatcaagcttctatagtaaagagtttaagggtaagaaattacaaactctcaatttttacaaggttcggtagaacatagccacctacttccttggtcttcaaagctaagacctagttttgagttccactattgagccaagttaatgggcttgactaaccctgacaactaggaatttctcaccaaggaatttccaaacctcttacaatagttttctactacaaaggactatcaacctcttttttggattattgtagtgtcaatctcactctagccgggttgtttacaataccggtaccaacctcacctcaataaaaatttgaaaatatatttagaattacaagcaaactcactctagaagtatgatgacacaatgaagaacctagagtgattagcaagcacacttataagagataaatacaaattttagctcaaagtgtgtgccaagtgttttgttggattttaaacttgggaactcttaaaatcacttgaatgtgtt

SEQ ID NO: 269166 - DNA, 507 bp, Cannabis indica
atatgtatgaatagtgagaagaacagagtttatgagggttactctacccgcaaacgatagatttctctaactccatgttttaatcctagctgtcattttttcaacgggaatctcacattccttacctgaaattctttccgagcaacttgggatccccaagtaagtaaatggtagcttatgaattgtgaaaacagaggcatttacaatcatattcaggtctgatcttggcattttactactataaatagcagattttgaggggttcgactgtaaacccgaagttaaagagaataccttgaggccttgaaacatataataaagactcttaaagtcaccattacaaaacaagagaacatcatcagcaaaagaaagatggtttatcttgatgcctgcacatctatggtggaatttgaaatcatgcttctctctaattttccccataatcctagagaggtattacatatctaaaacaaatagtagtggggacatgggtgttgggttttatgc

SEQ ID NO: 269167 - DNA, 865 bp, Cannabis indica
aggatgttaatcaaacatacttggtagtaaatctagatcctggtaaaatatttctaacacttctttcctagtctccttctcgagtttcaattcaaagtcctttcactttaatgctgcatgaacaccctccaacaagatcacatccctgccatacttgattgctgctttaacttcttgatattctattggcaatgatctgagcaatatgattgcttgactttctttttctaccttatgatcaatgttagctaaaccaacaattatttcattaaatttatcaatattttcatctaaggaaagagaagagtttattctaaacccgtataatctttcaagaagattaattttgctcgagattgatggtgccatgtacaacttctctagtttgttccacaattcttttagggtcttttcttggattagctttcttctaactccattggataggtacataatgatggtgtagtatgccatctcctccatttttgcaatttcctctcgcttcttctcagctagcaacttttcatcttcgagtacctttaccaccttttggtgcacaagtatacccttcaaactctctcgccatagtgcgaaatcagttgatccatcgaacttctctagttcgaacctcgccatcgacatcctccttcaatatgtgttcttgtagaattccttgatgaattcttgttgagtttttaatgagttcttggtgcggaagcaagtgatctttgaatttcccttgatgatcgaagaaccaagctttgatttgtaggaaatttagctctaatttgtaggaaataacttctgtaattccaacttcaagatcacacttaaacaaatacatgttaaatcaaaacaaacaaat

SEQ ID NO: 269168 - DNA, 1845 bp, Cannabis indica
cccaagaccgaacactccaggtggtgccgccacgacatgtacaacctcatcgcagccaggctcactcctgttcagcttttgcaattctgttacctacacatggaagtagagctgtgagtcgacaaacttagtaagaaaagtatataacaaatagcgacttgtatgtaggcgcccatacacctatttacaaggcttaacagatgagtaagaacattccatactagcgcacaaccactgtaccacatacacttcgtacaaacattgtacgagtgttggtagggtttgttttgtaccctgagtacaactaagtaacataccacgcacaccctgtactttccagtacttgtgctggtatcactgtaatgtactcttaaacaatatacactataccaatgcactttgtaccctaatcgtacaagtgttggtagtgtaacaaacatataagcatgcatatacacttacatatacatacactcacatattgatatcacacattatataaagttcttacatatacattcaagtgtgttggtcgacctgaacgaaaaatcttgtgctcgatggatgcgctaatcatatattaaaaccgggtaaataatattttcgaaaccataatttgggaaacccaaacgtataactctaggctcttctatattcactagggattacactaactcaagaaatagtgaaacacccaactacgacactaaaatggacgagaattgagaaaatggtttgttcgagggatctgccaaaactggttaaccgattttacaggtcttggcaaaccagttaactggtttgcaccaagtttccccaaataacccccaacttgctcaaaactcatccaattgccaccaaactttccagagtacctaaatagttcaaatacaatatattccaaccaataattcccataaaaaaacactgaatcaaaacatgtcattaaagatcaaagtttatgtttctaagctcaaacttgcataaatgcaatcccataaaccaaaaacagttgcaagaagctatattcaactcaaattaagcttagaatttgaattacaacataacctaaccctaacagcccctacatctcaaaatcacatactcaacaaaaccttaaaattcaagaactaagaaatagtgatactagggcttaccttggcttgattctctctgaatttcttgctgaaaacaccaagaattagcaacaatctcccttggtttcagctggtttgaagagagagagaagggaagaagagggttctttcaattttggcttttcttctaattttctttaattgaattaaggttaggaaaatcaattccttggctgaaatcaactttctaggtgtcatcaccaagggtagccaccaattctctttctttggcaatttactaaaatgcccctaaacttaaaacttaggcattttcaaggataggggtaaaatggtcaaaatctataaccccgctcaaactcagtattttattttctccaatttacatcccactaagaaataaggtcctagatttacccatgtaatcaaactagccatccatcgcattttctgttgtcaccgagcaaaaattataaaaataacataattcacatataattcataaaatacacctagagtttaataaaatctccagaattgacaaattataactttaatgcccatttctagtaatgggagcacaaataattaaattcataaataattataaaaatattagaaattagtgctaattgcctttactaatccaaattactaacgcagtcattacataaagcatgccatgcaaaaagcaaacacttggcttgtaacaccctaactaccttaggcg

SEQ ID NO: 269169 - DNA, 834 bp, Cannabis indica
tggatcttgaaggttaagattcaaatagtaatagtgaagtgagatcaaagatcatttaaacaagagtatgctacataaaatttatgctgacaaatttattggtaacagaattttaattttccatctacttggctctacttttcttttgtataatttttgttgtgtgttagaaatttcatgttgttggtacatgtataataatagtgtttgattatgtttttcttcttgatttgtaagagttttagcactatgagattgattgtgttcacttgtgtttgttctctttttctaatatccatatagttaatgtaccctgctcagattacaagaaatttatctctgtatgacctctaaaactcttcaagtattatctttttaaaaatatactagggtggtttccaatagtagttgattttctttgtttcattacttttcatatatagtgaaaaaatcataagttttatatgaagtgaaaaatccatatgtgagacatatagtgtaaaaagccagaagctttgtacagagtaaatacattcattgacaattcatgaataccttgttcgactcagtttggtgccgagtgtcctgtcctgtcaggctagactattttgtcaattaataaggtatgtatgcattttttttctattgtaacagagtttgccttttggatgtgcttagttttattcttgggtataaaatggtttcatcttttattatatcatttgaaatagaactttgttatactgtggttactttgttgatacatatacttatttagtttggatattaattttttttccgggtacttttaagttcacttgtaattaaatttct

SEQ ID NO: 269170 - DNA, 578 bp, Cannabis indica
aatcacgtaatacgcctatgctagttagggtgttacactggctgtcctcatgctcccactcaatagaacacacataacatgaagaccagatccaagtctggaatccgtaagccaaaatcttacctggtcacaaaagttccctccactcttcaagaagcattgcaacaaattcaatggaatatagcaatggctgatgaagtcttagccttaacaaggaacaaaacatataccttggttaagttgcctcctcgtaggacagctattggttgtaaaagggtatatcggatcaaggaaaatcctgatggcactgtcaacaaactaaaggccaggttagttgccaagggttttcatcagcaacccgaatttgattttacagagacgtttagccccgtggtgaaaccagtcataattcgggtggttttaacccttgccttgtccaagggatggactattaagcaattatatgtgaataatgcttttctcaatgcagaattgcaagaagaagtgtacatgattcaaccgggtgagattcctggccaaacaaatttagtttgcaaacttcataaggctctttatgg

SEQ ID NO: 269171 - DNA, 1286 bp, Cannabis indica
ttttaatcagaaagaataacccgcacttacaaaagtatgtcaaggctgaccaggatcaaagggttgcccaagcacacaatgatcagaaccaactgatgcccccaaaagtggatgggcatttacaagttattattgggggtccttatcttgctggagactcgagaaaagctagagaaaagtatgcccgagccttgcagtatgaacaaattgaagcaatatcggtcgtggaagaaaggaaacctaaaataccacgtgtaggggagccaacaataacatttatgatgccaaccacatcatcttcccacaaaacaaccccctggtcatagaagtgcaaattgcaaacaagatggtggcacgaactaaagtagataatggagcttcctcgaacattctgtttgaaacaacttatgagaagatggtactccaacttaaagacttaatcccttgcaaccagctcgtatatggtttctccagccaaagtgttgcaccccttggacaaatctgcataccgtttactgttggacaaactctgaggagcataaatgtaatggcacaattcttaatagttgatctcctctccactttcaatgtcatgttaggccgaccggctctatatgacttaaaagttgtcacatctatttttcatctgtgcatcaagttcccaacaaaaagtttagtgggatgtttcaaaggaaatcaaagaattgcgcaggaatgctataaccctgctctaactaaggttaagaaggaaaatacctcaggctagagttcagacaaggggaaaagcattgccaaataggaagtcgcccaaggcagtgacgaagacatggatccttgacttggggaagcaaatacaaatgttgggccaatagaagaactggaagaagtggaaatcgatccagataaaggcttgctactcgaaataaaattagctttaataaaatttttgagagcaaacctggacgtttttatttggtcacatcaggatatggtcggtatagaccccactgtgatgtctaatgccctgaacattgacttagactttcattccgtccagtagaaaagaagactactggacaaagaacaggcacaagcactgaaagaagaggtagaaagactaagcataaacaagttcatcattgaagctttctaccatgcttgggtggctaaccccgtactagtgcccaagacgaacagaaaatggcgagtacgtattgattttatcgacctcaacaaggcatgtcccaaagactattttctacatccaagaattaatcagcttgtgg

SEQ ID NO: 269172 - DNA, 700 bp, Cannabis indica
ctcttgccacaggtcagcatctaaggaagacaaggcttcttggaggttggcatgatcttcctctaaggtgtaagcacaaaagtctaaaccaaagtctttttttactctagctctcttgcttattctagattctatttcactactctcaatgtgctcattattcctaaccgtaggaacatttctagtagatgcaccctcactatttcttaatttaaaggaaaatcaatattcataaaatcagtatttagattctactataacatgtgcattcagatcatagaatctatatgctttgctattcaccacatatctaataaatccacattcataggctctactagctagttttattctcttaggattaggaattctaatataagctaaacagccccaggttcttaaataagacatatttggttccctgtttttcaagatctcataaggtgaaactttgctcttagattaagaactctattcagaacatagcaaacagttaataaaatttcacccgctaactccgctaatgggatgcagcaccagaatttaacaaaatagccacaactaattcagtaaaggttctattttttcttttagctttaccattgatttcaggtgaatatagtgcagtcttttcatgtatcatgccatgtgaattataaaatttaataaacaagttagattcatattcagttcctctatc

SEQ ID NO: 269173 - DNA, 727 bp, Cannabis indica
ctataggaaggcgcattcttatagcttccacaagttaacttcagacatctttcagtgagacctataatctcgacgagacaaaccaatcagaatgaatcattaagtcttcaaacaaagaggcaacaagatgtatatcatcgacctcaaaaagataagggagaaaagctccagctcgctattaaggttattggaaccaagttcctgtcgagacatcacaaaacgctacaattaaagacgtgtttaaacacataattttttgacgctgtaaaagcaggaaaatcacagctgtgtgatttttaaataataactgcatttatactacgtgatgtgtaatcaaactccatgatttcaggagaaaaacgttgtaaagattatagtgaactttataataaactgcctactatgtgatgataaatagtggcaagcaagataaaaaaggggggagaaaatatcatacaaaagaaaaggcaccgtaaaactatcagaaatctaataagattaactcgtggactatgcagaattttaactgcaaaaccatgtaaaaaatccattgtgttcatactttttactttacaacttttatttttctgtgtgagattgtcactattaggctcaaagttagttagcaaaaatcggcgttaacagtttggtgttttcattgagagcctttgtgaaaaagctcagaaaaaccctcctttcttttgaagaaaaactatctccttcatgg

SEQ ID NO: 269174 - DNA, 892 bp, Cannabis indica
tgcacttttaaatttttaggtaataattaccatttttgagatttttgtgaggttaatgatctctttgaaattttgtgaggtgaatgacctctttaatatttcaagattgattgtagcgagctcatttcaaattttgtgccattttgtatggatttggaattttatcacttttttgtgataaaaatgagattagcgatctttttattatctttagaaataaaaagattatttgactgatatttttattatttattctaaaatttggggaataataatttatcttttatcatacactatcttaaatttaaatttaagttggtcaattaaaatttaaaagattatttaaaatatatataatattataattcaatttctatttgaatttgaattaggctaattagtaatttttttctcccgaatttcgacatgtactaaattatgcccctgaacttttttggcagttaaaaatccccataatcaattaagattgttaaatttaaagatttttgtctaattttagtaaaaaattctaacatggatgaaagttcagggggcatgatttagtacgtatcaaagtttgaagggcatgattcggtagatatcaaagtccggggagcatggtttagtatataaacaatcaatgaaacagtaaaattgaacgaaattagacaaaatttcttaaatttaacagtctcaatagtttaaggagatttttaacggacaaaaaagttcagggggcataattggtacatgtcaaagttcaggggaaaaaattactaattagtctttgaattatataactggaaacaggtaatatatttatatatatatatatatatatatatatgcagggccaaccctgagttgaaatggactataggacaaaaaaaaa

SEQ ID NO: 269175 - DNA, 560 bp, Cannabis indica
gtgagttaaatataacataaattaaatttgtgttcaatttaacacaaattttaaatttagttgaaagtctcatgtttcaaatcagaggtggaccctcgtaaagctcaaggtgagcgcccaaaaaaaaattattaaaaaaaaatagttttttatttatcataatacatgtaagtaattttcttagggaaatttcattaattgaccctaataaaataccccatttcaaaatttataccctccactaatttatacaaattaattccattattttccaaaactacccaaaatacccttttattttaattttccctccctaactcttactcttctcactctctctcttcgtccttctctcttcttcctctctgtcaaccgacccacccccacaccacaccaatatctcaaccgacccacccccacgactaaacccagacgccgacgacgacgacccacccacagacgcgaccccacgacgacgactaaacccaccccacgactaaacccacagacgcaaccgaggacgacgactcacccccacgacgcgaccgaaccacccacga

SEQ ID NO: 269176 - DNA, 543 bp, Cannabis indica
ggcattcaattacagtcgttatgatgccgaaatgtcagtagattttggatcaaatttgatatattatgttctgttttgtttagggtccacttcttcaactgccttcaagacatgatgcgtcgaaggggaaagctcccatgctttctccacaaagcggtcatgcatgggaagatgaattattctcgaaaagaacatggacaggatccctaaatcgctgaaaaggatggttgttgaatttttgaacctcaaagataaacgtgatataatcacaattcctataccccgaggattcatagcactgcgtacccagatcacgttattttgagaggatttgcagcaggttgcattgtgtgacttcattggcaaccagggaatgttgtttggaatgatgtatactcttcttaatctaattaaccttatatatatcaaattctagtcaaattattgttcagttttatgccctaaataaaactctatttcaatgtaatctttatctttttaaatatcaaaaaagaaacagaagtattttcatcacttattgtg

SEQ ID NO: 269177 - DNA, 466 bp, Cannabis indica
tgctctcttcaactatgtagtcccatacctacacagtctcaaaatcatcccacttgacctttcccaggcggtgtgggattgcacaacttacccggtgtttccccttacggatcccgggactactgactgtcacatatgggttatgtttcgattaccctgaattactattttggaaagtttaatagcttttggttaggctaggagctaattttgggggactgaaaattgggaatttttaatcccttgctgcttaggagaagcttccatgatcggaggagcttccatgatcggaggagcttcaatgatcggataagcttccatgatcggaggagcttccatgattggagaagcttccatgattggaggagcttccatgatcggggaccttccatgatcggaggagcttccaagatcggagagcttccatgatcggaggagcttccttttggattatattttaccagga

SEQ ID NO: 269178 - DNA, 768 bp, Cannabis indica
gttttatttagggcacaaaatcatacagctagccataaaggggaccttgtgggaaaagagttgataaattgtcttaatgagtagggtatctccaaagtatttgcagtgaaagttgacaatgcttcttcaaatgatgttgcactaagaaaattgaaggggcacttgttggaaaaggataatacatttccactaaatggtgaaatatttcatatgaggtgttcgacttatatcttgaattcgatagtaagtgatggtttgaaagagttgaatgaagctatttcaagtattcgaaatgcggtgagatatgtgaggtcatctccagctagaatgaaaaggtttaaagaaagttgtatggatgcaaatattgatacaaaagccttgttatgcttagatgttgctgctagatggaactccacctacatgatgttagaagctgctataaaattcaagaaggcttttgacaatttagaaggagatgcaaactacacaaggtactttgatgaagaaagaatggctggtctgccaagtaatctagattgggaaaaagcaggagtatttgtcagttttttgaagagattctatgatcttactaatcggtttagtgggtcattatatgtcacatccaatctattccttccagatattttgaaagtacaggctgatttgactactatggcttctagtcctgatactttattaggaactatggctattagtatgaagcggaaatatgacaagtattggggaaggattgaaaagctaaatatg

SEQ ID NO: 269179 - DNA, 611 bp, Cannabis indica
atttttttttctcctactattacttgtatatatcaattattattacctggcaagaataagtaataaatgtgtaagaatttttcaccattaattaaataataaatgaatatgtataataaaaataattaaaaagaatagataaaatattaaaaagaaaatagcaaaggccacaacaataacaaaaaaaaaaacgataatgaaggcaattgagatacgttgaggctaaatccaaaactgaaaccataatcatttaggctaaataatgtagtgtctctcattttatttatgcatagtacttttaaatttttcttctcattcaactcaagttagatagttaggagttattaataataaattattaagttcttgcttagttgggattattggtttctctgtttttaaagtgttctgattgtgttttttcacgtaccttttaactttaatacaagtatttgttgttttacaaaatctatcttatgttgggatttcttataatttcatgttccatggtgccatgggtaaaataatccaatatttactgtagtgatggatgattattttgatcacttgctttattctgaagatgacaacaacaacaattcacatacaac

SEQ ID NO: 269180 - DNA, 554 bp, Cannabis indica
ggccagctaccattcacacatacaaccacctaatcccccctttaaaaatgactaaaatgtcgtttaatcttagacttaagctaacttaagcctacgggtaaaatagtcaaaactcataaccccgctcaaacccgatattctatttatctccaatattaaacccactaaggaaaaggttataaaaatacccatgtgattcaaatggccatccatcgcattttccatcgttgtcgaacaaaaatagtaaaagtagcataattcatatataactcaaataacacccttagagtttaataaaatctccggaattgagaatttataacttaatgcccacttttaataataggacccacaattaaataaattcataaataactataaaaataccaataattaatgctaaatgtctttactaatccatattataaaatgtcgtcattacaattatcccccgttaaaaagattttgtcctcgaaatttaacatgaatagctttggatattgagtcttcatgtcagactccaattctcaggtggctgttggaaattattttac

SEQ ID NO: 269181 - DNA, 1065 bp, Cannabis indica
cactgagggagtcttgaatgcagcctacccattttgtagcacaatgatagcagcctgcatgtctgttgttgcttgttcaatgccctgatgcgatcttccatctgaggcgcacctgatgttccggtagaagcatctctcctctcgatcgcagctaccctggccaacaagttagcatagtcttaagccaacgtggcaacttgttgttgtgtcgttgttggccctgagttttgaatgctagaggttagctccctgaccctctcgtcaaggccatctaattcccctatgcgcttctcaagctcttgaattctttgggccacctatttggacactcccaagtaggtggaacgtgcggcacttgctggcacactgagctagcaagtcagcctaaacgcgcctacaggcaaacaagttcaaaggtaggcacgatacatgtctcgcacatgttgattgcaaacaagaagcatgagcaagaaaacacaaagtgtccccaaggaccaatctcacacaacccacaagcaaacatatagacaaatggcacacaatggcccaacaaaggcaacaaacaggcatcacagagaccatatagaagcatacataagaaacatggataaacatcattttattattatatggccttgatagggcaagggagtacacaattgggcccctatcatgctggtgacaaggtgcttcacaagtcatcaggtcaccccccccaccccttaaagagcttagttggggttttaagggatttaccaagaacatacatgttatagctctctatacatatttgagtggcaaataaataaaaaaaaacgaaagactaaaactacaaaactacctccccacccaatgaggtgcttggtgcaagacttgactaatgatcaagcaccaaggcatgctcatagttacaaaactggccccagttgtggatgtgccgatggggcagcacgccacatctatcgtagtctacggcctacttattttgtttgctatctgtacttgcaggactaatggatcgttgtgtaggaagcgaacatgaatagcgtcttcttcagtgaaggt

SEQ ID NO: 269182 - DNA, 1462 bp, Cannabis indica
agtaacttaaatcgcaaccaaaatctacatagtaatctacatagaaactaccagagcaaacccctggtgataatattcttcccactggtgatatccttaatccaaatgctgatagcaattgtttgttgtgcgcttcctgctctgagaaccccctacacttatttgcctattgcccttttgcaatggcattatggttcagttgcccctttcctgtgaggcttgactccatacaggctgtgagtattactgatctgctttgtaagttatgtcagggaattgaggttgatcttagaggcaacatgctttattgttttgctgttctgtttgacactatatggaacaccaaaaataggatttttcatgataaagatgttgtttggagtgtggatcaggcaagaagagagattcacaattgatttcaagaatttgtctctgcttctctttcggttcctcagagatcagtgggagctggggagtatgttgagcccctcaacatagctactaagcatctgataatggtggatggctccttctcttccagaaagtatggttgtgctgccattactttgagtagagagtccaacgacaggttttacggctctgcgtttggactctgtggcaatgctcttgctgctgaaatggaagctgtctactttggtattcgttgggcagtggacacaggctgggacgatttcacagtagcctctgattccaaactcctggtcgaagctcttcgagccaagaagacccctgattggcaacatgcggctgtcttttattccatattatagttaatgaactcttgttctaaatgtaatgtggttttcgtgaaaagaaatgttatcacttttgttgatgaacttactaagaatgctagacattctcaaagcggttccttaaaatgtaaaggggagggatttctccctgtgaatcccactctcttttggagttaatctctctcgaactgagattctttttaaaaaaaaaaaactaccagagcaaccaccaaagcaactcaaactgtaaatttaaaaagaaaaaaaaagttaagaaaaatagtatatggggtaattccccttctatattttccattgaaaagtattttgttaacgatatgcaataaaatctaaaataattcatttatatttaacactgagaatagttcaaagagaatccttaaaagaaaataaaaattaaaagacacaatttaataatagccctaaagaactttaatacaaacttattctctcttacttaaaagaaaatatcaaaagtaaaataaaataaaagtggaagaatgtataaaattagaaaattaaaaatattaaacttattttttggatgtgaaattataaaaaataaattataacaaataaatcttagtatattatgtaggtaataaactttaagactaaatttccttaaaagaaagaaaactaagagtcaagtatttatttttcac

SEQ ID NO: 269183 - DNA, 601 bp, Cannabis indica
tctaatgaagttttaattattcgctttttataataaaccctttgattagcaaaggcgtgcacagtatttagaaaataccataacacgcttaatctagtagggtgttacaattttggtatcagagccgccaggatatgtacaatcatcatctaaagatcgtcaagatatgtacaatcatcatctaagataagcttgactcatggttcgttaagtttttacatgttttattagttttatttattatgcatgactagaaaactgtgatagaaagcatgttagtagattgataactgagtaagagaatactaagttcccatgtaagcggtagttagattacaattatgatcgctacctgaccgagctgactcatgaatgtgcaggtttgtcctatagaatggacgcctggcaagaatcatgtagttgggctaatatggacgatactggtggcggatggagagattgggatcccccttatacacaagaccgtgaaaagacttatggtgtaatggccgctttagtaatttggattagtaaaggcaattagcactaatttttattattctattattatttgggaatttatttaattgtggaccccaat

SEQ ID NO: 269184 - DNA, 787 bp, Cannabis indica
gcggtttcaagagtaattactcataacggtattaactgtttcccaccctaggtcataacataggctcaacaaacatttactcaaagtctttataataatcaaggccacaatctttcaattattaatatttagccacatacggtgcctaccacttttcttaccttagttcagaacccaaacgtacgggccgacctgagtggaaaacaagctaggcaatcccggtcctatgtcacgacaattgaaattcaatgaatacctaaaactaaaattctgaaataaaaccctaactcaaaaccaagtataacctaactcccaacaacttcaaaataggtcaagcatcccatataccacttaaaatagatgatacacaacttcccgggccaaaactgaacctaaagaaaacccaaaaaatttcccctgaaagcaaccggtcgacaggttctggtacacaagaacaaaccggtcgaccaattctcgcagaccaattttccaaaggttctctcctcaaaatttgacccaaaactccgccaaacctaaccaaactttccaatacagtataataacacaaatataacatatcccaagcttcaaattacagtagttcaatctctaactcaaaatcataagctcgagtgaaggaaactcaattcttttagcttcctcactcacaaaacaatcccaacagccatgaattcaattaaaacatacacaaacaaaaataattcaactaagatagcatactcaaatctcatctaagcctacaaccttgaaaacttacaaaaactaa

SEQ ID NO: 269185 - DNA, 798 bp, Cannabis indica
gtagaattaggataaatcttactaaaacaatattaatatttacataacacaaataactagttaattataacatagtgataagaagttaggtcacataaaaataattatatacacatttatgtaaacttttcaattttaccaacattctaatcaactaaacaacctaataacatgaactaaactaaaacgagaatttgagtaatttataaattaatatgaataaattgtgagaaacttagttagttacattgtgtaattagtaactagctataattagttactaaatactgaatttttttggataggatttttgttatggataaatcatggatgcgtgaggagagagacacactgcgatttcaagtagggttcgatgcatttttagagtttgccttaaagaattctaaaaatcacgatcgtattcattgtccgtgtgtagattgttgtaatgtatctaaagggaatattacaatgattaaggaccatgtgtatttacgaggtttcaatagaagttatactaattggtattaccatggcgaacatttacctgatgatccatatccattaggaaagcggggggtagatgatatcgagggtaatgatttcgatgattatccattggacttgcttaacgaagcacaggaggaatttcttaatgatcctgagaaattcgataattttcttagccaagcagctcaagttttttacatttctgatccggctaatgataaatggtttattgttttatcgacaccagagaggaggttcttagagactgaagaggatgaggagaatgct

SEQ ID NO: 269186 - DNA, 668 bp, Cannabis indica
attgtaatttacttattcttaaccaaaactcacataaacaaatttgagtgtgtctatatataggttggattcgtaaatttgatataaaggttttttttttatttccaaactttgcgaaaaatatggtgtgggcattcaatttaaaatataaaataaataataataaagttaaaaatatggttaaaaatatttataatattttaaatttaaatttctttatataaaatatttacataatttttcattttatgttaattcaaagttaaaccaataaatttaaaaataaaattaaaaatattaataatattttaggtattttaaattaaaataaaaatttatttatataaaatatctatattatttttattcttaaatatatataataatattataaaattaataaagaatattctgttaagtaatacaatattctattatagttaacgtaaaaataaaaaaaaaaatattgttaaactaaaaattctgttacataactacactttatatagaataaatatgttatctcatgtttgatgttaatgccatgtgtaatttaaaattgaaaatttcatttttttatcaacaattaataaataaaaattatttattactttgacttttgtcaaaactaaaattaacaaccaacggtaattgatttcaatcaatct

SEQ ID NO: 269187 - DNA, 1074 bp, Cannabis indica
agagtaaatactcaacaagaacattctctgtatttataagagtaaaacactccccaaatacattcactgtattaaagacatcgataaataacagagactcgtggactaaggctcattaacgccccaaccacgtaaaaatccttctctaaatttcttacagctctctaactttataatattttataagtggccgaaaacctcggtcaacatataataataggcatataaatttattcaggctcatctagttacaagtacataaacacatcaacaattaactctaaaataaacaaaataaaacaaagttttctagtttgagtaagtccacaaaataattgtttttttttattatttcttttatttattttatataataaaaaattaatttgttttccaccgctttcttagttaggaatattacacagcttatttaaattaaatatttatttattttgaattatgagacaagtcatttgtgtggtaatagatagttttgagattaataaatatctaaattattttaataatattatttttatggaaagatagagaagtacttgattgattgaacatcatgaaaagaactataattccaaatcaacacctaaataataatattaaattatataaaaataattatataagctgataaattatatattaatattaataacatgtaaagaaagagatacctatgtgtttataattctaataatttctcaccttgcataatgatacatattcttccttggccatctttagacaatattaatatcatcatgaatgatgtcattcaacggtaaaagattaagttttacctaacttaatggaatataaaagcaataaatcctgaaaattaataaaaaatgacaatacaaataacaattctaagtaaaattaatcatttaatctgctttaatttattaaaaaaaaaatcatttaatctgctgaaaagaaaagcaaatacagaagaagaaaattaagggaaacaatcatggtggcagaaaactgaagttaaaaagcgacgttacctgatcacccttgtttctctatcctttggcccaacgatgaaaa

SEQ ID NO: 269188 - DNA, 682 bp, Cannabis indica
aaattataagttaatattaaattttttttaaaaaatagtcgggtcggattagattcgatccgaataaggcggatcggatctgagtatttgatctagtggggcggaatggggtagatccttacatgatctggatcaggtcggagcatagtccgatcaaatccgacccgacccattgacactcctatttcctaacagaatatttgaaatcaatcaccaatgaatgttgattactcttgagtacaaaattcaaaactattgagggattcataaaaaaaatataaatatacatgtatatatatttagaaaataatacaataattttaaataaaaataacatatgtcatcgatcttcaagtaacaatatatttcccaatagtagtgctttttcgcaaactaacatgaccccagcttgcataaaataattatgaaaataatcaattagttaatttgaatttctcttatctacatgaattccattgtaattagggaattggcattattataagaaaataaaataaaaatttatgtttttcaaactttagagaggaaacaagtcccctactctaatacttaaatccgagtgtgttgaattcatttgaattcactcaacctttatatatgaataagagtaggcattagtagtgtctagtgtggtgtactgtctcgtggtacatccatatgg

SEQ ID NO: 269189 - DNA, 740 bp, Cannabis indica
agtctatactcaatatgctagtcatactctagccatactgatgtgatagcatcgatcagtatttgagcaaaacatacatctatcagtatccaatataactctatgtatactgatatcgctatcgatgtaatctaacaggcataaataacatgtacgctaaacatgtaatcacataagcatatcattatactaatcttatctcgtttccaaattcaggtgtgttgggcaacctgagtggaacaactgctcgacgaattacagggccctaaatcacattattcgtaacactagtgagtgacacactaaatcacttttgagggacttaaacttgaaactaaaatttcttccccatcgataaacaacatggaaataccctaaataatcaaggaatcaaccaaccaaagctttgaaactaacacaaatcgacgacacgaaaattcaagaaaccagtttttgatccagttaattgatttttatattctgtaaaaccggttaatcgatttacacctggtaacccaaattttttgaaaccttgtccaatttgtatccaaaccataccgaaccttctaggcctgcttaatatacccccaaagaacatatttcaagcaacaaaataaccaaacatgctccaaatcaaaaattgccattgaagaccaaagtttgagttctaaaactcaaactttgtctaacaaccaaaacacactaccaactagctaaaaatcagcacaataaacataatt

SEQ ID NO: 269190 - DNA, 618 bp, Cannabis indica
atataaaataaacctagatttttctgagcaacctaagtatttttcataattaatttatgaaataaactaaataattcacaataattccgaataaattcagaaaattatgaaacttcaccaagcaccttagaataaaataaggaatcaaaatctacaaaaatatttaagaaaaacacctcagaaatgctcagaacgtggtcaccagtgttctcgtcggtttctttgccgggaaagtgtaactttgtccccgattgctcttgacacgtcctttcgattgggaaagctctacacagtactcaagacctcaaaacgatcaagatcaacccaagaaaagaggtccaagttggcagatcggagtcgtctccttcgttggcggtataccgtctttaatggagtcaaaatattggtactttgttttagacgttaaagcttcgttttcttacgtcaaaaacattcttagggtcccatgcactcatatataacctcctttgacccaagaacaagcttaaacacattcaaattcatgtccgtttcaagtcgcaccttcgaagcttcaacaatggcgaaactcgaaacagggacctccgaccctcataccacgttaaaaagcttccttag

SEQ ID NO: 269191 - DNA, 1320 bp, Cannabis indica
aaaagcttttcagctaaaaaagcaactcgcaaaacctcatctgctctcaaaacctctggacggagaagaacttaggatatacctcgccgtcacggaacatgctgtaaaacaattttgcagtaaatccttcactgatttctgtgcgaatcatggaatcatcaaaagtttctctgtagtggcgcatccccaagcaaatggtcaagttgaagcagtcaacaagacattgaaggacaccctaaagaagagacttgaggacgctaaaggaattagccagaggaacatcctgaagacctatggtcttaccgtacaaccaagagaacatcaaccagacagactccatttgccatggcatatggatacgaagctatgctgcccatagaactcgaacaacaatcccaaagaagattaacatatggccaagaggctaatcatgtactccttgcagaatcaattgatgaaattgaagaaagacgcaccgcaacaaacctaaaattgatagcccataagtcaaaagtagcttggtatttcaacaaacaagttaaagctgggaaattctttgtgggagttatggtcctaagaagagtatttttaaacaccaaagacagtatggtaggtgtattcggacctaactgggaaggaccatatcaagtggtcgaagttctagaatcaggggcatacaagttgggtaagtatgatgaaaaatgaaactcattctggtaccaaggtattggaacggggaacatttaagaaaatactatcaatagaagtaccaagtcggatgaacatatcaagtacaaaataaaagaacatttgctcttaagtgaatggccttcagggcgaatcacacgcccaaaggttccgataaaattttcaagtacacaggtcggatgaccaccattgaaagtacgatttttatttccggccatttgttttgttcatgttaagctaaagatcaaatcagatcagcataatatctttgatgtaagttactacggtaacaaacatattttcgaccaataaatgaataaagatgtttattttaatttcaaattgagtcaagttcattaacatgtaattaatttaccatatagtgcgtacaaaaggtttggtcgaacctgaaatcccgagcagacaaagagtatacttgtaaaaataactaaaaagtgaccaagagtcataagtctgctcggtcacttggggggcacctatacctgtacaaggcttttggtaaaaccaaaacaaacacaattgcacgatgattataaacaaagaatgaaattcattaaggatagcaaaagcattcaaacccgggattaaagg

SEQ ID NO: 269192 - DNA, 474 bp, Cannabis indica
tttattttgtttttattttttttcactttttttcttttcttttcttttttaaaagaaattgtgcaattttattgtaaccaatcggctaaaataatagcttaaaactccattacgacatctcccctattagaaacactatcaaaattaaaatcagaaaaacgaaccaaccaatccctttcctattctcgaattgtttaacaaaaacaaaattggatgaaaaacattgtgttaattgtcacaaatgtattagttttatttttattattattattgttagttgtttattaataatatctccatgagattaggtatgcctagaatagtggcttagttgtaacaacccctaagtttaagagatgttaacgttaaactatagtagcttattgtatagttatttaaggaactcttcaattttgtattattcaattcagtaaataaatatatttccttctttttcactgtttttatggtatc

SEQ ID NO: 269193 - DNA, 590 bp, Cannabis indica
ttactttagatttttttattattgcagaatgagacaaacagagaaagtagaaatgaacaagatttcattattgaagaaaaataaaaagatctcgttgatatgagatcagtacaatgaccatgtatatatacatatcaaacagaactaaccatagttagttagccaatcaagaaccaagatatgaaccaactagtgttagagtaactaacactttactgaagtagaaagaatctaactaacttgtaactgtataaacaatattcctaactaacaccaacatagacaacactgaacaatatacaaaatctgttacccccctcaaggtggaatgtatatgtcataaacaaccatcttgttgatgtgtgaatgaagtgttgtagagggtagaggcttggtgaagacatctggcaattggaggttggtgctaacatgaatgaggcgaattgtacattgcttaatcttttcgcgaatgaagtggctgtcgagttcaatgtgcttggttctttcgtgaaatattagattgttggcgatgtgtattgcagattgattgtagcaatagatgaaggcaggtgtattttgttctatttgga

SEQ ID NO: 269194 - DNA, 718 bp, Cannabis indica
caaaacgggttcagcatgtcaaaacaatgtcagcaacggctacaaattggaccttgggagacttaatattggacacatgttatatcttatatcaatacttatcaatgaaggaagcaagcgaggcaaatctccgactagctcatcacaatctttgataataagtgttttgagcttcccgtatgttgttgcctcctcattttgcattgaatgccattgcttccatgatgacattttcccgaagcttaatgtttccaatgatgaaaatggctttctcgcagaacaattcccgtaaaactcagcacccaccatcactaccgaacgacatcttgagttacttcaacaatgtggctaaatgaatctttcccaacccaatttggaaatattttgcctggatagtacttaatctcaagctccttcaacgttgtgttaggtgaaagcatttcaagcacaccctctccatgctttggaccaacaacaacatcattaacactccattccaacctcaatttctcaagttgcttcttctccagtacaataacttgatctagtgcatttgtaatattgaccacattttctaacttcttaatggaaagctctccgtgtagactttgaagttctgtcaattcttctactttagcgcaaccatccttccccacaacaaaagttgtcaaaatttggagattcgtcaatttatgtatttgacttggcatctcaacta

SEQ ID NO: 269195 - DNA, 578 bp, Cannabis indica
aaaagtgacttttgcatcttgtttccttcagagtaaaacctgagccttcactctaaatctagccgccaccctcctttcttcttcttcattgattgtttcggaccctcttagtgatagagtagtgcccacacacagcaagtagtaccttaatcatagtgaggaggatggtgaagaaagaaattcaacaagaaggacattcgggctcagatcttgataatactctacgacagaaaggatacaagggttagagatatgagtggaaggagacatattattccgctgcacccaatgtaaggtttttcatactttatatgtgtttatttataatcgttttataagttcatatttagggtgttaagcaacatacttgtgagtagatctaagatcctggtaaaataatttccaacagaagcaacttggtcagaggttgaagcagccgccttgttcccagcataagccacttgggccatgcagtactcaaggtacatgtccttggtgtcgcccaagtagtcaaagttggcccggggattcgctttcaagaaatcgaggaagagttcgagaccagctgtctccaaggc

SEQ ID NO: 269196 - DNA, 993 bp, Cannabis indica
taaaaatatattaaaataaaaaatttatgaaattttcttagaaaaaaataaaaaaaaatatatacatgagttagaaaaaattatgaaaatgaaatcaaaataagtattgaaattaacataaaataatgttaaaaaaaataaaaaaaaatattaagaatactttgaaaaattatttaagtttatatttttttaataatggggtgtatttataagtttatggggtgcaaatagagctccccttagtattttttaaagttgttatatatcttcacatcatctaaaaatataatattttattttatttttcttccacattattttgacacctttaaaaatactcgaatggtataatatcttttaagaatgctataatttgatcttatacataataatatatataaatctttttctttattaaattattatatatatattgctcttttaattttttattttaaaaaaatatagcagcaatgatattgtgtggcatcaatgcacgaatatcattttcttatctccaatggtatcttctaccctaagctttccacctcatcaaacattcttcacaatgctactattgaaggtgctctaagaaaattcctttttgcactctatttttacgagaagtgttcattattaaacaatgtccatttttatttaatatttagtcataatattatcattttatttacacttatatcattaattaaatcactttactaatttaaaaataactttatatttatttttaaatgtcacattttttttttttgtgcaattttaaaaaatttaactaccgtataatacatagattattataaattctctttaaaaaaaaaataaatagaatatacacatcaaacatggccaatatacatatatatacaactaggtaatatagcttctcttcgcgcagctattttaattttttagtattataataaaaaataataaaaatagtaaaaataattatttattaatatatcaatataa

SEQ ID NO: 269197 - DNA, 903 bp, Cannabis indica
ctcatgttaccaaacagattgagtgcgtcagtggccaatcctaatctcacatttctaggttcaagtgcaaaggatggatggcgtctgtcaaactgcttccactcttctgcatctgcactgtgcctaagcacaccatcctctttgggtctcttagagtagtgtcatcgcatgtcctctgccgagtgtcttgaactatataacctcctcaatctcggaattaaaggaaagtactgcaaaacttttctagcaactttttttctgtctccctttctctttttccaacgactctcgccacaaataggacaaacatctttttttttcattctctttccaaaataaggcacaatgatacttgcatacatcaatggtttcataacctaaaccaaggttacgcaactttatctacgactcgtaatgggacttgggtaattttgtaccctttggaaataactcaatgaatatggcgagtaacatatcaaaagaatggttactccacttatagagaactttgcattgcatcaggttcaccaaagcattgagtgctgattttttgcaacccaggtacaatttagtttccatatccttaaaaaaaatcgtcatacttactaccaccattcatagggggctcgttgaaggtagcagtggtagaacgtggatcgtcaaaactaggatcttcttttaaaatatcagccatgacatctgccatttcttcttcatcgttgtctaatatttctacagctggttgcgtgaacgactccccatgaaaataccaggttgtgtacaatcgttggatgccatgcacaaacagatgtaccctaattttatcaggagtctcgaagttcacattcagacatctcatgcaaaggtatcgtgtaactcgagcagtatttatttgcattcgag

SEQ ID NO: 269198 - DNA, 669 bp, Cannabis indica
acgtacacttgcgtgtgctaaatatcgcaacagttagcaagttgtttgacacaatactgaactgaaacactatttttattcattgattggtcttaaatatgtattgttgttgtgcaacgtacattttttgtgtaacaaaggcttacaaatcaaagtcttcttttgaaaccatattttggctacccctacgcgacataccatgcaagggccattagtgaaaagtgatggtcatatagtgttgggtttggtaccctaaataaaactaatttcaatataatcaaatttactaattaataaaagatcaaaaattattttatgttgcatggttcacataatttatttcatgattatatgtttaatgtataaattatataaaatccagaacatattatagtattgtcaacacagtggaatataattatgattatatgtttcaaagtttaagtcccatgatttgtcagtacattggatttagactgacatgataatcagcggtagagtatacttacaccttggataagtgttatgtcctttctagggcattaacaaagtatgctaggatcagatgtatggagtatgcatcggactggaccgatattgaacttagataagatatcataaacttaccgttatatctatctaagtcaatatcagttagttgatcttagg

SEQ ID NO: 269199 - DNA, 1151 bp, Cannabis indica
attattattattattatatgtcatactaccaattttacaactcttcaaatgatgttcttaacttctttcaaaaaaagaaatcatctccaatctaagagatgtaaaatttgtgttaagtaataagtatattataattagctcactctttatattaaattataataattattggtactataataaataaaaagaagtaaaatttattgtatgtcaaattcataataatattatatattatgataaatttagtataatttttaacatctgtcaaaattaatacaatttttagaatactactgaaatagtattcttttgaatgtgttaaaatataacaatatactactttttggagtattttattagagatgttgttataaaaataaaaataaaactattattataaaaaataaaaataaaaagccatggcttttcacttttttttttttttgaatcaccatgatttttcacttttagttctatcaattatcaaatatgtattttgtttatttatttggtaattgtgtttattaactctttgttttgcctcttttattttactaattgttgatcttaaattcacaactataatctaatcattctctactaatttaataataaaaaaaatcaatcaaccagtttaattgcctatacaaataatgaagacaaaaatcaaaatcactcaaatttattagctttcactaatttgaacaagtgtgagttttcttagaatattagcatgttttccattaaaagtgtctcatcgaagtcacttgcattttaagaaatacacaaataaaaatcccaattattcatgagaggccaagcattatttaaatttcataagaataaattattgcgcaacgtattaggggtacatctagggatgcacattttctctacggggatgggtcccacccttaatggggtagggattctccatttaaatggagaacgggacggagacggagattaccttttgtcactgaacgttaaacggggcggggagcgggggatcacactccccgccccggcgggaccctttagtattttatcttatattttgagtaatattttatgttttataatttatgtttgcattttattagtatattagtatcttttttatgaattttaaattgtgttttggataa

SEQ ID NO: 269200 - DNA, 1432 bp, Cannabis indica
tgttcgtgttccggttcaggttccggtctcgagtcctgatttgagtccgagtcccactctgggttatggtcccagtttgggtcccagtcctagttcgagtctgaggttcgggtccctggtctgagtctggttcttaggtcctctgggtccggccctagtttttgggtttgggtcttggtctaggttcggcacccagtctgggtaaaggcctcggtcttggtttacgtcctaagtcacaggtcccggtctaggtccaagtcccgatatgggttctggtctaagtttgggtttaggtttggtcctattattgtcccaggtctgggttctagtcccaggcttggttcgattccaatttcgggtccgggatcaggtttggatcccaatttgggtctgggtctaggtctgggtatggatccgggtatgggtcatggattcaaacactgactaccggttaggtcgaagcctcaggttcaggttcgaatttaagttctggatctcagtcttgttccagttctgccctaggtctagccccgggtcctaagtttgggtttgggtccgtgtttggggttgtgtccccgtagtcaggtcctgggttccaggtctagggtcgggtcctgtgtctcgagtctagggtcgagttttgggtcttagtccgtgttctaaggcccgattttgggtccaagtctcctatctaggtctgaatccttggtccaggtctgggtctaggctcgggtttggggcccaagtcctccatctaggtttggatcttaggtcttggtgtaggtccaagttcaggttcgggtttggatcccgagtttgggtctgagtctaggtcccagtacggcttcaggtttgagtttgggtctgggtcacggtctgagtccaggtccctatttgggtctgggtcggggtccggatccgggtcccagtcaaggtcttggtctcgaacaggttctggtcggtgtttggatccgggttcaggtcatgagtctgggtctaagttcgggtctatattcaagtttggctctgggtcctgcgttccaatctcggtatgggtatgggtctagggccatgtccaggttagggttttgggtttatagtttagggtttagtgtttaggaatttaatgtttaggatttagggcttagggtttaggggtaagtgtacagagtgtaggatttagggtttaaggtttagggtttagggtttagggtttaagggtctgcttctagttccagttcacattttgggtcatagggtaagatttaaggttcgggtgtgggtctaggtccgaatcctggtctgggtctaggttcgtgttttggtttaggtccgaatcttgattccaaatccaaacaccaaccacatgtctagtctagtttgagttctggtccgggtctaggtccggctccaagtccaattcccagattta

SEQ ID NO: 269201 - DNA, 824 bp, Cannabis indica
ttccattccttagagttctttccattagctgcctcattataagtcttgggttccatatcatccatttccaaatctgttagaagagcataagccaattcttcactccaaatgttgtagctgaatttctgattaggcttcggagtcctcttagatctatcccttgtcaactgatagtttgtaaggtcctcttcggtgtcttcatccctgatctcttgttgagcatcagttcctcccccttgaccattgttcatgggctgctggctttggttaggttccacctgaaccattcccggtgtgtcttcattttgttccacctgattagaaccagttttaacttctaggtttgtacctgcagggttagtatcttccattcctgcactagacttttcattaggtaaacaaggaaaaatattttcttggaatataacatctctactattcatagttttaaatccccctttttcctttacccaaagtctatacccttttaccccttcggggtaccctaagaaaacacactttaaagccctaggttcaagttttcctatgctttgatgtgcataagctgcacatccaaaaactttcaaatgagaaaggtttggaggtttacctgaccatttctcctcgggagttttaccttcaattgctcttgatgggcttctatttattaggtgaactgctgtcaaggcagcttctccccaaaacccttgagataatcctgactgaagtagcatacaccttactttgtttagtatggtgcggttcattctttcagccaccccgttttgctgaggtgtaatcctcactgttctatgtcgctgcaa

SEQ ID NO: 269202 - DNA, 565 bp, Cannabis indica
agatcctggtaaaataaattccaacatacgtcccacctgctgtccagccaggcatctgcatccaagatccaactcaaagagattctaacgtgacacaagtcgatcaacaggctaaaccagttcatccatttgtgcaagcataattggatcaacttaaaaacatggtacaagacttgacctgccaaaaactcactaatctcgagctggaccgagcacgcggatcacccttctccctggagattgaagtccttgaactacccccaaaattcaagatgctaacttggaagatgtatataggaaaagatgatcccttatcacatcttaaatactttgacatgcaaatggatcttaaatactttaaatactcgaggacgaacaagagtcaagtgtggaggaattcgatgagtccatatttgtcttataaatatgatcaatttatgtattaatattcttaaattgattctttaaattattgattagtgtgattttaatttgttaggctattttaaagactattcatgcatttagagtcctttggaggggttttagcatattttggtagaaa

SEQ ID NO: 269203 - DNA, 531 bp, Cannabis indica
atgattgctaacatggcatggtatgagattgagttgttgtaagtgtttctaacatggatggttttcgtattagattgagttgctaacatggttgttgtaaggtttgttaacacggttgctgtatgagattaagctgctaacataattactgtaagagttgctaacatggcttttgtaagggttacatggtatttgtatgagattgagtttctaacatgcttgttgtaaaggttgctaatacggttgttgtatgagattgagttgctaacattattattctaaggttgctaacatagttgttgtatgatattaagttactgtgaaagttgatagcacgtggttattataagggttattaacatggttctgatatgagattgggttaatgtaagagttattgatacatttattgtatgagattgagttgctatcctggttgttgtatgagttgttaattaaattcattcaaaaacccttacaaataatttagcaacccttataacagtatatatatagtacaacaacctagtg

SEQ ID NO: 269204 - DNA, 625 bp, Cannabis indica
attaatgcttcaaaaaaaaaaaaattttttagccccaactaaaatgttaggctggctcctcattgagatgcatccatttagtgcaagaatatatggtcaaataaatgacaacactaccaacttttataatttatttctcaagaaaaaactaaatatattgaaattatttctaatgaattgttaacaaagtgttggatattataaacttatactgatcaaaagaagatgaacactcaaatatacaagaattttaatgtatactctataaattaacctatttaattttttatatggataaaaaaccccaaaaaaaaaaactaaaaataagatacaacgtgtcttgcacgtagttgccgcctagtatatattaaaatatatatatatatatctattaaataataataataataataataataataataatatatttgaacccaattccatattctttttcgaattttactataattttttacttcaaaaactaagcttacttgaaaagaaatacataaaataatatactacactaaaaaaacatttactctctagtcattttagatatcatgcacatatatctagtggtcttcattttcaaattaatgaagttcaaatatataatttt

SEQ ID NO: 269205 - DNA, 470 bp, Cannabis indica
aactttattttgacaaaaaatcaattcaggatcctatttgtactattttagaaaatacagggtccattttgtcatttaacaaaacacagggtccaattggtaacttttgcaaaacagagggtccaaaatggtatttacccttatatttaacccaaaaaaaacattatagtatttttatattaatttttatttttgtcctctattatataattataaatattgatacaaaatttaatatatcatttaatattagattatttttaattataaaataaaacaaacaattgattttgtgataaatgaatattttatcttctctatatgtttacatttttatatttattatctaatttaatttccaaaattaattgtcaaaatattctgacaattaatgtggcgcagatactgatggagtatttcacctataaatatagagtctcggtccccgagctcttcactcattctgttca

SEQ ID NO: 269206 - DNA, 1029 bp, Cannabis indica
aatgaattttatttagggcacaaaacccaacagtctccccatccgcgctcgcacgtgtgtgcttagtttcaaatattttcattcaaatttaaaaaatcataactaattcataaaatccaaattgagttctgtaaaagcctaaattcattaatttttcttctactttccagtaaaatattttcagaaggaaacaaaaaatatttttcaacataaattgttatttctatacaatcattaaataagcacagaaaccatcatgaaaccgtccaaatcaacaaaaacatcgtttttaatccatatttcatgaaactaaatcattaccatggctctgaggccagttgttggattatatttaacaaggatctagatttactaccatgtatgttatttaacatcctaaatatgaatttctaaaataatgtaatttaaacacatataaagtttgagaaaccttacagtggtttcagcggaattaaatgactccttccactcagatctctaacccttgtcctttctatagcacagttgcacaaacatctgagcccgaaactccttccttatgtttggattcttaacaatcttacacaatatgattgaggacttacttgatatatatgggcaggcactcaatcactaaggcttgaaattatttgtgaagagaggctatagtatttcaaaaattgaagagtaagaagaaggaagaggtctcatcaaaactagatagaaaactaggtttttagctttgaaggcattagttggataatgagaccatagcctttcatttatactattctccaatagggttacagttgaattattaggaataaaaaattgataaaaatagagtgaaaaagccacctaaaggtcggccatacgatgggccctacattagtttgggcttatcatttttctaacctattttatatatttttcacaaatactactttttgcactttacacactataaatgccaaaactattgatttaataattcaaataactatcaaataaaattgtcatttataatat

SEQ ID NO: 269207 - DNA, 1165 bp, Cannabis indica
agagacgacttgctgttttttttatttctaagagacaggggcttggccaagaaagacacaatatccgaaaatggatcgacgtgtgtcttggcaagcgccccaatccgcatctgcaaaaaaggagagttgaacattcgaaggtgataagcttgtttcagcaaaggctaaaatgtttggacttgtgttagaagggaaaaaaagtccttgacagggggtgcgtttaagatattggagcacacgatgagtggcttgaaggtgaggtacccttggagatgtaagaaattggcttaagtgattgacggcataagctatgtcaggccgagtagttgttaggtagattagtttgccaattaggctcctataagtggtagaatcgggtaagaggtttcccttgtccttgctaagctttagattaggttccatgggagttgaagcgggctttgctcctaggtaacctgtgtcagttagaagttgcaaggtgaagggcctttgagatattgatattcctttgttggttcttgctatctctaaaccaagaaagaaccgaagtggcccaatgtctttgagggaaaaaattttgtccaagaaggatttgaattgaatgatggcagccttgttgttgctagcgatgatgatgtcatccacatatatgagaatggcaatttcaaaagttgaagctctttttatgaatagggaattgtcagaaagagattgttggaaaccttcagactttaaagtggtactcaacttttcgtaccattttcgagaggcttgtttaagaccgtatatactcttgttgagtttacacacactgttgggaggggctttataactaggtggtattttcatatacacttcttcatggagatcaccatggagaaatgcattgttgatgtaaacttggtggatatcccaattgtacattgcagcaagggcaagaaaattttttagtgtgttaaacttagctacaggagcataagtttgatcataatctatgccttgtttttgattgaatcctttggctacaaggcgagccttaaaacgaatggcttctccttgttgattgtatttgactttgtaaacccatttacatccaatgactttgtgtccatggggtaatttggtaataatccatgtgtgattttttttctaaggcctcagtttc

SEQ ID NO: 269208 - DNA, 763 bp, Cannabis indica
ggaagaacgggcaaccaagccctgcctaacattgggttggccagccatggccagttcccttacccagggctagccagccaaagccagcttctaggcttaagggctagccgaccttaaacttaccctctcctacggtatggctggccaagctctatctaatctaggattgtagccgaatctagaaaggccaatcaaccaagcccatgcaacactaaatccttcactgcaagcatagttggatcaaatacgagatatgaataagggcttggcaggcctgaaaccatcagaccttgagctggataggtcaaagggccgacctttctctacatacatcaataccttgcccttacctaagttcaagatgccagcttagaagatgtacacgaggaaagaagatcccttagtacacctaaaatagtttgagatccaagcgaatctccaacaagtatctggtgaagtgcgatgtcgaatctttttggcaaccttggctaaaatagcctaacagtgttatttcaagctagccccaagaagatttaattcttgggaataattttcccgagagttctatattcaattctctgcctcaagacaaataccttcataactgaaggatcttgtcaaaataaagtaaagacaagacaaacccttaaaagactgcattcaacggttcatggttgaaaccaccaaggtcaaaggcctgatagaagaagaccaatatatgaccatactcggaggcatcttaccattgagtgaattctggaaa

SEQ ID NO: 269209 - DNA, 741 bp, Cannabis indica
tcctctgagcagtcatctcgcatttaatgccgcatgggaggaaacgtgttggaactgccacacgcaataaagtctgacgacacaacccctgatctgcacctacaagactattaccaataaagtctaatgacgactactctgtgaagaatcacatcagtcaaaaggaaataaggacaaccctcataaaatccctacagcacctagggatttgaccatgcatcacccatggtatattcattgggaatacacaactttattgatagttacagaaatacatgtactataattctggggatcaccccacgaaaacactataaataccccctcaaagctcattaatgggggtcgagaattctgggttgcataagtgcaagaagagtaaatactcaccaagaacattctctgtattaaatacaatcataaatatacagactcgtggactaaggctcattaacgccccaaccacgtaaaaatctctctcttaatttcttacagctctctaaactcttattattttattggttgccgaaaacctcggtcaacagaacccgaatgcgaacccgaacacacacccaaactggaatcgaaactcgggaccctgacccgaacctagatcaaacccaaaaccgaactcggacccagaccaagactcaaacagggatcaaaaccagggacccagacctagacccgaacccaaacccaaagatgaatcaaaactcgggaccctgacctgaatgtaga

SEQ ID NO: 269210 - DNA, 602 bp, Cannabis indica
acttacctccctagaaattcaaaatgcatgttgatgaaaatgataagtctatgattagttactagcagctgcctgactccttatagggaaatgccttagagatagcaaatgacattctacgcggtaccatctaagtctggtcctaagaaaacctcggaatgatggaatggtcgtaaactcaatatacaccattactagatttagggatgccctaaaaatgaacttaagaaaaactagaacggttaactaaggtatacatgtttaatatctattctaaagtgattaggggtggaccatcatatggtcattaagataagaaagtatttgtttcaaaaaatactatttttctaagaacatgaataaatctaaaaatagagtagcaaagtagaggagataccatttgagtcaaactcaaagtgttccatcatcttatactatataagatggtcccactgcctctattgtattgacacaaccaatgaggtcaatgccactaatgttcctagaaaaaaagtcacagtaccttgtcgtagtgggagggttttaaggaactcaccctgttatgacttggaagcacttgtgataaaaattcattgttagtt

SEQ ID NO: 269211 - DNA, 564 bp, Cannabis indica
agagaaaaaatcctcagaccaagaaaaaaccttcgaacactttacaaatttccctgctaaccttcattcaccactgtcagtctatatttctttgttcgaccaacataaaacccccagttctaacacttcattgtaagtatctcgcatccctcactttattgtttgtgtttatggcatgctttactatctgtttgtttttctgggtttggtatttgaagtttctggaatgtattcttttgagtttttcacgtaataggtctagatttaccttctctgggttagggttactcttgtcacgcactgttgttacattttgtaaaggaccatacactcttcgtgtgatggccttcaagggcacagagaagacttcatttttctcgattttctgtccttctttctttttctttcatgcgcgatgtcaccatctgtgagatctttgcacccgactttggtccaggaaatccctctaaggctttcttgttgacagatgtccggagggggcctctttcaaacggttaggggacccccattcccttttttgatttaggatttggtatggggcct

SEQ ID NO: 269212 - DNA, 728 bp, Cannabis indica
ttttaatccattcaatctcaatagttcatgagacatttttaacgacaagtttagggacatgatttggtacatgtcaaagttcaaagggtaaaaaacttaatttgctaaaaaaattcttttaaaattacatatatatatttttaaataatttttaaaaatatcacttattcttttgataaaagttcaataaaaaaatctggctaacttgaatcatggtcattttacaaaatgaaaactaatattataaaataatttctcttatcaataaagtcaaaattagtgaatcgacatttaaatttacattatacaccaatgaaattcaccattcggagtgtaatagctagataaagaaaatgtcaaggaaaaaaaataatacattatattttttagttacatttcaatattcatgaatcaacttaatacaaattccacattacaatagacaaacaagtttcaatcaaaacagagcaaagtaaaggaaaagatatataatagtgcacacaacaatatccaaatcaaagccaaataacaatactccatcatcaagtgtagaaaccaaccattaatgttgagaatcatggagttccatctcaaaaccaattgacaatgagtggagtagcccatgttcttatatatggctcaattctctaccatttattccatgtgggacattgtccacaataattaaccatacatgttttcactttcttggattgatagcaaaccaa

SEQ ID NO: 269213 - DNA, 556 bp, Cannabis indica
gagccagttcgatatcaggtacagaccaagatctgcgattaaggggcaagccttggcagatttcatactcgatttcccgagcactgaagtggcactcatagaaaagaaaattgatactgatgtaccaaatggcgaaggatggactttatacgtcgatggagcctccaatagcgaaggctccggcgccggcataatactcatcagctctagcaattttaaggtacaggctgctctaagatttgaattttttgcgtctaacattgaagctgaatatgaggctttgattgcaggattaaagctcgctcttgaaatgaagctcgagtacttacaggcttttagcgactcccaaatcgttgtatgcaggtaaacggagaacacttggccagaggcgggcgtttggctaggtacctcgccataacatgcgagttgctgcagaaattcaagaaattggttgtctgtcgagtactgtgtgctcataactctcacgcaaacgctttgacccgcttggcctccacagagaagctgaattgctcgatgtaattcctgtcgatgtatt

SEQ ID NO: 269214 - DNA, 689 bp, Cannabis indica
agacctagccttagacccaaactgagactggaactcgggcttggacacggtcggtacccaaaccggaactaagacccggacctgcttgtaagtctgggacccgatcccaaacacagtcttggaccttgatagggatctggatatgaacctaaactcggaccaagaaccagactgagatcgaaatgctggacctagatcttgaccgagatcctgacccagaccaaaacttggacccgcactcgggacctgaacttggacgtggacccgaacctatacccagatcggggcccagaccttgacacaaacccaaacacagactcggacccgaactaaaacaaccacacctataatcagacctaaagcaagacccggaccctaacccaaactcgaacgcagaccaggataagaacaaaggacttagacccaaaacataatcgagactaagatcaggatctgaacttgggactcggacccaacctagaccaagacccaggacgtgaacccacacccatagccttatctggacctaagctaaaatccagacccgaaaccaaactaacaccaggactggaattccgacccgaactcaaacccaaacttcaacttagaatcgtaaatggaactagaaccgaacaaggactagtaccaggaccaggacctaaacccaaacccgaacccagatcaaaacc

SEQ ID NO: 269215 - DNA, 635 bp, Cannabis indica
cttacccaccatatcagcataggtggtgttgtcatcactagtgatcattagatcatgtcttatctttgcattcaacccgtcaaggtatttctctttcttgctaaaattgattggcacgattctcgaggctaatcttgccaaacagtcaaactgagtcgtgtattcagtaacactcatattttccttttgagtcaactaagtgaattcttttctttttgcgctttggactgcctcgttgtagaattttgcattaaacagttcccggaacatttcctaggtcattgttgtaacatcatgagtcagggacatcatgtcccaccacactagagcgtcttcttgaaattggaatgtggcacagaccactctatcattgttgatgacacctataaagttcaaaattttggtaatcactgttagccacttctcgactttcataacatcgggacctcccaggaaaactggaggtgccaacctttcatacaggggtgccattcagtttactgcaggaactggtcctacctgcacagtagaggcaggagctattggtatttttggagcagggattgccggagcaccctattatctcaaatgcctgatctcttcatcttgtttattaatcctggcttgcatttctg

SEQ ID NO: 269216 - DNA, 622 bp, Cannabis indica
ttatctatatcaacaaggtgtatgtttttttagtggcccattacttgagaattccaaaattaagtatgtttgacttaaagtaatcttaggatgggtaacctcctgaaatttttttctaagaagcgtgcaagtgagaaagcatgcagagtgacatacctgtatataagagtcatgattctgtgggaaagacccaataaaaatttgaaggagagccatatatcttaaaagacataactgagtagtgtaaaaaattcaagagacaaaatatactatttttttaacattgcatttgattttttcttcttataatacgctaaaatacagtattaattggggtttttacaccacatactaaaatttttaatttttttactgtgggacggaattttttttaaaaatactgtgtaagttttacattgtgtacagtgttaacttttcacggttgttccatggttggtttttagttgttccactgttgttttaattgttctgttttgttattttacgtttgttttataaaaagacaatatttttgtaaaaaaattttgtatggcagtaaaattataaaattttgtcaaaacaccaatatttttataaaaacctcttaattgtggccataaat

SEQ ID NO: 269217 - DNA, 903 bp, Cannabis indica
aaaaaaaatgataaagtaatgagtattattctttagagacactacatatttttagtgacatacattataagagactaacaccgaatgtttagagtctcattatgcgtgtcactaaaaatcactcttagctctttactgacacgcacttttacgtgggtcactaaagattgtcactaaaagtctaaattgtagtagtgtttatatgcattactcaactagggatactgaattctttactgtttattaagtgcatctgaatatacaaaagacatacctctaattttatccaaaaatggaatagagataatacagtaagaactttcttgaattgaataactttcccagtgctttttgaaagcaacaaagttatgtatcgttactgatggagcttaaattatcataaatgggtttttacatccttctagaataattcctccacccctagagtaaccaccatctcgaataggttatgagttggtgtagatataaagattctaatatacaccactatcatctaacatatcgatcaatttcagaaatttttccttgactgtctcgtaatgttccttgtttgattacatcttagatggctcccactcaacagtaggagtctggttaaatttgtacataggataacatttaacctcttactattggttctcagggatatctttgttggaaattattttaccaggatcttagatctactcacaagtatgttcattaacaccctaaatatgaaattctaaaacgattataaattaaacacatataaagtatgagaaaccttacattgggtgcagcgaaataaaatgtctccttctgttcagatctttcttcaatgttgaaactccttcttgttaaatgtctttcttcacgatcttcctcattatgattgaggta

SEQ ID NO: 269218 - DNA, 1165 bp, Cannabis indica
tcaagaagaagctgcacgactcccatctgaagttcaggacagattctggggaaatcatgctgccagacagagcttatccaagaaaattctaaggcaaggttatttctggccaacaatgattgaagattcaaaagcctatgttaagaagtgtgacaaatgccaaagattttcaaagataccaagagctccacccaacgagttaacacagatgcaaagtccgtggcccttagccatttgggggattgacttgatcggataattacccaaaggtaaaggcagagtgcagtatgcagtggtagcggtggattactttacttagtggattgaagccgaagagcttcctaaagttctatggtcataccgtacaactgaaaaagcggcaacctaacagacaccattcgcaatggcgtaccgttatgaagctatgctgcccttcgaactcgagccaccttcccacagaagattgacgtacgatcaaggtaccaatcacatactcctagcagaatcacttgatgaaatcgaagaaagacgagccactacaaacttaaagttgatggcccatcaacaaaaagtagctaagtatttcaacaaacaagtgaaggctcggaaattcttcgtgggagatatggtcctgagaagggtattcctaaacaccaaagatagtacggcaggtgtacttggacctaattgggaaggaccatataaagtggttgaagttctcgactccggagcatacaatttaggtaagaatgacgaaaaaatgttactcattttagtaccacggtattggaatggggaacatttaggaaaatactaccaataaagtaccaggtcggatgaccactttaagtactaaatgaacattttcttttaagtgaatggcctgctgggcggactacgcccaaaggtttcgataaaagaaacaaagtacttaggtcgggtgaccactctaaagtacagtttcttaagtctgcaatttgtcttatatcatgttaagctaaaagttcacattagtttaactagctctgatgtaagttactacggtaacaaatacacttttcaatcaataaatgaataaagatagttatttcaaaattcatattgaatcaaaattatcagcatgtttctaatttaccctatagcgcgtacaaaaggtttggtcaaa

SEQ ID NO: 269219 - DNA, 811 bp, Cannabis indica
ttttatgtgatgtacatggagtacccgcacacggagccttcgatggaggattttagttatgcctatgatataaagaacgtgggcctccacaatggcttctgctgtgaaatcaacggggtcgaaggaatggtttccaatatgggagattggaaatctaagttgttttacgtgttgaaagtaccagggattaggactgattttaatcaccgacctagtacgtcgcacttttcaacacttagttaatatttacgttaccttatgaggtcgtttaacatttacttcctcattgatcgcagatagactggctcgacctgttctggacccagcccgcaaagaagttactgaagttctcggtagcatcgctagtcaagatcacgattggcgattattgtgcacaacttcgaagttgcgagaacataagctaattcctaaaaatgcaagccttcatcgggagccggtatacaaagagccatctgtaaaataaaaggagaagatagacaagcgtctttccaaacagtcctcttgaccaacatcagataactcatcgcgtatacgttgtatataattatgaattatttatacttatcttaactctttctgtcctcccagaattgactttcttgaagcaggctctagtgctcaaccacaagcccaaaactggaactgcgcaacttctcctatcgttccttagaagagaagagtgacgttgtcgcgacccctgctgccgactcgtccacgaagcaggttaagccttctcaggacaagggaaagaaggtcatgattgacctggctgtcagagcccgcgactttg

SEQ ID NO: 269220 - DNA, 520 bp, Cannabis indica
ctgacgctttgttatgaaagtatcttgtgtttctatcacttgccagaatccattccgatcttgatctctgcttccaataaagttcatctctactcataagatcatccaatttaagttctagagttttctcacctcatccattcgctcattgagagcattagcattcaaaagtttatctatctccatctgagtttccactacttgcttagacaacgacccaaatctttgcttattccaagttgacgggcgatttgcacagtattcaagagattcctgaagtcccaaagggtcggccacatctattgtacatctttgccaagcctccaacacgatggatcgacattgatcttctttaagccaatgtgattcaaaacggaatcgccttttaactcgctcatgacttcatacgacaacattctcaagttttgcaactataagacgatggtcagaacaaagaaaatcaccatggcacactcggactgaaggatacaactaataccaagcttgattgcacacaaac

SEQ ID NO: 269221 - DNA, 671 bp, Cannabis indica
tttttttttttttgcaaatttaacaggccaattaaatactgtatacacttgtgtattaaaacttcaaaatcaatacagtaataatccaatttatatttaacagtagtatctaactgacactttaaatttatataaaaaaaaaattaaaaaaatttgccataaaaagttaaatatataaaaattaaaatagtttcgccgcaaattattaaaaagaaatatatatatatatatatatttaatattggtacaatataattgcacatttgagttcgtcggcataccaattgaaaacaatgtgatgtgccataaatgaaaaggtgacttggtgttcttacaattaaaagacaacatattgtaaattgacatttaaccagccagatttgaaataccactaacttgcataatctatatatgtatggatatttcttgttcgaacatgaaatgaggtttttcgataaaactaaatttattgttcctcaaattattattggcaatccttttcatactccattgcatcatcagatgattgatgggggacacaaatctataaatgaaaaaaaacaaagtaaatttcactacatctttccatgaatatgagttctgcagaaactgtaaccaacatattcctaactcaaacataataataatacaaagtcaaatgaatcgagctt

SEQ ID NO: 269222 - DNA, 816 bp, Cannabis indica
tcaatagttcaggggacatttttcacgatcttaaaaagtttagggggcatgatttggtacatgtcaaagttcgaggggcaaatatcctaattagcctatatatattgatattagaattattttttaatttactaatttttttatttgaagtgagttactatttgttatatagttattttttattataatttcaaaaaaaaaaaaaatgaaatagttgcgcgaaaaaaaactatatttcctagttagataaaatttacaattaaaattttttttaaaaaaaagagggtaacattttgatttttttttatgtaggaaaagggattaaatggttcagattctttctccacttattcggttattttgacaattctgagaatcacgtgtcagctatagggactttatatttcaacctgtcttaattgagtcttcggtaactaactcaagaatttccatcacaaatgacgggtattaagttaaataaccctcttccaaagctacttttgctaaataacttttttataaaattattttaatttttaattttttttattaatcaataaagtaaattactaatatacccacctaaacacaacctaaactcctgtcctaatccccacgtattttcttcttctcttgtttattttttcatctcttcttcatctttttatttcaaccaactccaataatgagctcaactattattttgtttttcttttcaccttcattgtttttttttaagtattttttttttctataaattctatctcctatatcttctccttaaatctgtcatttactccttaaaattcctaaaaa

SEQ ID NO: 269223 - DNA, 1185 bp, Cannabis indica
accagataaaaatgcatgtcccagatcaggaacgtacaagcttcgtaaccaacattggactttattactataaggtcatcccatttgggttgaagaacgctggagcaacatatcagcgactattgaatgaaatgttctcgaatcagatcgggcggaacatggaggtttatgtcgatgatatgtttgtaaaatcgataaaaagtagaagtcacaccatggacctcgcagagtgcttcgaaatattaaggaagtacaatatgaagcttaacctgaaaaagtgttcctttggagtttcctcagaaagttcttgagattcatagtcaatgcaaggggcattgaagcaaatcttaaggaaatcaaggctttcgtagatatgccatcaccaaccaagcctaaggaagtccaggccttaaccgaaaggatggttgcacttaacagattcattttaaagtcaactgataagtgtctaccatttttcaacgtattgcgaggcaacaagagatttgaatggatagaggaatgcgaggaagcctttcacagcattaaaaggcatttggcgacacctccagttttggcaaaaccaataactagggagacattactcctctatttagctgtctcaaatgatgcaattagtgcagcaatagtgcgagaagagggaaagcaccagcaacctgtttactatgtcagtaaaaggaaactgggggcagaatcgaggtatccccctattgaaaatcttgccttatgcctaatccacgcatcttgcaagttacggccttacttccaggcacacccaattaaagtgttaaatgatcaacccttgagacaagttttatctaaaccagacgcttctggaagactgataaaattggtcgattaaactggggcagtttcacataacctataacccttgaacacccatcaagggctaagctttggaaaatttcttaaaagaaggaatatttccagaggaaaatcagcttgttcagtgtgacacgaacacttggaggttattcgtggatggtgcatccaacgagcagggctcaggtgtgagggtgatattaatttcgccagaaggctttacgtttcattatgctttgagatttcgattcgatgcatcaaacaatgaggctaaatatgaagatagcagaagcgttgacgttcaagaatctcatatgtcatagt

SEQ ID NO: 269224 - DNA, 818 bp, Cannabis indica
ctcaattaaaaaattgaaaagtaaaacagttttatagaacatgtttttgaaaaatatttttactttttcaattttagaaacagaaaactgattaaaaagtgttaccaaacgacaccataattaaatgttaaaaaatataaaatttaaagtgattttagaccaaaaaaaaaaaacctaaataaagtaaaaaggtttagttagtgatccataaatgtggtgggcatatcatatgttattactcataaactcataataattaataaatacattgtacgacgaactaaaggaaagaaagctcccaagttgacatgttttgtaaatgagataccacctttaattaatatctaccactactacataacctacctatatatctatatacacgtactgcatagaaaataatgaggcagcgatgaataccgttcaaattaaatatttttctacattaggtcagtgtgacagctacgtatgctataacctaattattaatttaataaactaaaattatgccattttcattttctaattattcaactaactatattaattaattaatatacattaagaatgtatattggcctgttgctttagttatagactgtatatgttaagatataagtcaaaccctttgtccaatgaattatgaatttaacgtttgtcattttccacttggtacttggttttaataaaaccatcaactttatttacatgtgaaacaaaagagtacgatactataaattggtaggtgcattgtatgtgttctggataagtgtcatagtttttactctttaagcatagagatctccacttgatttatt

SEQ ID NO: 269225 - DNA, 1068 bp, Cannabis indica
acccgacttagacatcactaaatttctttgagagtcttgagcgacaatcaacctctgtcaatctcttattacaatttcttaatcaacctccgcacccaaaaatacatgtcgaaatatttttttccaatttttttatggtggtattcgttatagttacaacattatccatgtaattttttgaacaatttcgaatagttgacagtgctgatcaggtttgaaattttttgaacgcatgtgtggtaaattagaatatcgagaattctatttttggtactgtaaactatttaaattgtaactataacgaatacgattatgaaaaaaaattaaaaaaatatatattctgatatgtgattttggacacggagtgttacaaaaattccaacatgcaagcatactaattgttttcaagtaataaactcagatgttgatcccacaaaaactgtagctaattactaattaattgatcgatttttgattttatttggctaacattatttgaaagtttattgtaatcaaataagagaaagaaaacaaataaacaagataagaaaatatgtaatgcccagttaaatgatctgtggctaaaagtattagttacaaaaattacaatttattgtgacttaatgagtttttagtcacaatatttgttgtggctaaaactaaattagtgataacttgtatctaaacatagacgaacctaaaggtgttgagggaagactaaaacccaccttaaaatttgaaaatatattaataaataactgttgctttcatatataggaattataaagttcaaatcaaattttaactcattaccaccagaataggaggatgttgctaaactataattctattttaatttagcttgttattaattgttttaaattatattaaatgtataactaagtccattctaaaattaaatcttaggttcgccattgtatctaaatattatattttagttaaaaaaattatgttgtgactaaaaagttgacattaaatgtagttatttttttttatagtgatagtattggtattagtgtgcctaattacaatgctctaatgaatata

SEQ ID NO: 269226 - DNA, 952 bp, Cannabis indica
ccttcttttttctagatagtaaaacagctatggcccctaatgcaagtggtaagcatcgacattttttgagaatctcataagataatttcactaactcttcaaggtaacaaccattaaactcatgtctaaatggctttttagaaaaatagctcaagagccattttattgtaaaaaaaaaaaattatttcaaaatttattataagcttgaggcccaacactagcttgaggcctcatcatctaattataaaaaaaaaaattaattattcaaaaatttattataaggatagaattttaatttatataaaaataagttcaatttttgtaaaagaaaaattgtaaatattataattaaatggcttaacttttaaaataattatagtatggatttatatataaataaaaaaattatttataaattttaattgctaaaaaaatcttgttaaatatttatttaattacttaaagtatagttaattataattaattaattctaaaaataaaatttttacatattcgtaacctgttattataggtcataaaaaaatataaccatatagtcacaataaaaatgtaaccattaaatagtcaccccattagattaaacttagtgttgcactaacactaaatatagtgttgttgctctatttttctctcaatatacgtgacaccttttgagtgtgacatgtggctgacatagacacgtcacccagagatgagttgtagatttaacaaaatcaccttaagaaacaatgagtatgattcaaagggctagctcccggacatgagcaaaaatgcccatcttcccctccgggagttaaagcacgtatattgacttctttaggccagtaaggctgaatttgaacactcactttgcattaaatgcgacatggggaaaacgtctgggaacgcccataagggcgtgttagacatcataaaccagatttagggcgat

SEQ ID NO: 269227 - DNA, 507 bp, Cannabis indica
atgggtagatctgtctaaatcctagtatttatgaattcatatttctgttcatcaggttctttgattcacccgttaaagttactcagagaagatgattcttataacttctgttttaggaatcttataacatgagtggctcagaacatgatatataataatggaatctaagcttttctgacggatcgaatattagttcccttagtgttaattctgggagtgctaatggttaaatccaaatctataataagttatagattaattgttcatgttgactcaaaatttggtcaacagacaacagagtcttatatatgatcgataccatgtgtaaacaagtaaataaatgaacacaacaatttatagaggttcaacccccttgattagcgggcaatgacctaatctccttttagttgtattgatacgagagataataccacttagatcacaagtgttgtgagttctagagtgactctcctaaaattacaacagtgagaatgtaaggcagatctc

SEQ ID NO: 269228 - DNA, 695 bp, Cannabis indica
accggttctgcaaccggaattctgtttctgggaattcctgaaccccatccggaattctagttgcacatccagaatttcagttcctcgcaggaatcaatcaaaaattcaaaactccctcaaatcaaatccaattcataccaaaccttccagacctgttctaaatacctcaaagaatatatccaaagcatcaaaaccatccaaaaaccacagatactaaacatgccatgtgagctccaagctttgagttcaaaactcaaacttggctaaagctcacctacaagcatctaaacttgatttaaactacataatcatgcataataaaactgtagaaatcattctcaaactcatacaacaaacacagcaactaattcctcaacttttcatagaaattctaatttttgagttaaaaagatccaaacttggttaaaccatctagcatgcatcaaacctactcaaatccaattaattcaagcatatagaatcacagaaaacaacctagaactatagcagcaacaacatcttcaaaattaaacatgcaactaacaacattttctcaaaacttcataaaacttaaaagaaagctaaaggaaacataccaacaacttgtgatcactaaattagattaaaattagcttgaaatctaagaagaatggccatcttcttgctgctcaaagagggccgaaagagagagagag

SEQ ID NO: 269229 - DNA, 509 bp, Cannabis indica
aaaatagtttattatttttactgaagatgcatttttgtaaataaaaatatttaaagcgtagaaataaaatttttaccatagtgacgtatttttgtaatttttttcttcaaatttttgatatattatgtaaacttttctttttaaaaatcataatactaatttggtcaaaatttgattttaaaaaattgaaaattcgaaccaaaccaattcataaatagccgtaagatcataattgactcatagaattggcaagctgggttaatttttataagggtaatttgtggcataacctctttaagtggtcaggtttttgcaactaaccccaaattctaaaatttaagtggtaaaacctcctaaactcgtgttctgttagcagtttaacatttctatctatttttagctgttaactgccttggtgaaatgtccacgagtacacagtgtacacgtggcacaattttattggtccacgtgaataaatatttaaagaaaaataagaataaaaaaaaatt

SEQ ID NO: 269230 - DNA, 582 bp, Cannabis indica
attccttgttttcttaagctttatttaagttgttgaatgattttgagagtttaggagttgtggatgtgtaacctgcttgatttcttgtcctggtgttaaattaggtttatgatggttgatttaagttgaattggtaggttgtggtgatgatttggcaaagtttgacatccaatggcgaattgagtttccgtgtttaaaactgtgatttattgcttgaatttggttcattatagtatgtacaagtattctggaagtttttgtgaaatttggacttgaattgagaagttagcgacaattttggtggttcctgcactgaactggtcgaccggttcagcgggacctgtaggaaccggtaaaccggttggtccccaggaaccctaccaaatcgaaattcttgttggggaactggtctataggttgggaaaattttggaaaccctagtttttcccgtatttgtgatatttagggtattatcatgttatccatcgatagggataattctagttttagttttaagtccccagaaattattttagcatgtctctcatcaaattatgaatgttgtgatatagggccctgtaa

SEQ ID NO: 269231 - DNA, 469 bp, Cannabis indica
gcactcttgattgtgaacatacccgactcatccttcaaccaataccacatgtcactcgtcgatgatgaagagagaggaatcttccaaactagtgattgatccctatcattgagcacatctgtaacaacttcctcatcccattcaaccaagcctactttcatcaaagaatcaaccgtcttccccacaaggcctggatgcaatgattcaataaaagggttcacatcatcaggaagccaaggcttagccagaatagatatgttataaccactacccacaatttgtcgtacaccagactgaactaactgttgggaatattttaccaggatctagatttactaacaagtatgttgaattaatatcctaaatatgaattctctaaaataatgaaataaacacataaggtttaagaaaacattacattggttgcagcagaatataatgactccttctgttcaagatctctagccct

SEQ ID NO: 269232 - DNA, 626 bp, Cannabis indica
tatatataaatgtgtaaaactcacacaacatttaatatatatatatatatatatattcatggaactgctttgataccaattgttagttttatggtgctaaatcaggtacacaacaaaagaattgtatttgatttattattgtaccacagccccaataaatctcgagatgtgtatacattaaattaaaatataaattataagaaaggaacatatacttcttgattatcctttaataccgttaattcactagtgaaagtataatttagatcatatatatacttcttgattatcttttagtaccgttaattaaatagtgaaagtataattcagatcctatctaaatttttgtacaacttttcagttctaaaattaatacttaaagggaaccaacattcgatatgttaggaaagtcaagattctataattgtagatcatgttcccagctatccacattattagattcccaacacagaagttgtaagaatcatcttctttgagaaactttaacgagtgaatcaaagaaactaataacataaatatgagttcataattactgagaatttaggccaatctattattgatcatcgttatgatatgagttaggtctttatggtaaacgacatgtt

SEQ ID NO: 269233 - DNA, 728 bp, Cannabis indica
ttatttatatcgttttagaagttcatgtttaggatgttaaaaacatacttgttagtaaatcttgatcttggtaaaacatattccaacatatcaaacatatgccaatcaaggatgtggccatccctctaccaatcgtgcttaggggcactcccatggtcgcgaaaatccatccatttctcaattgctttgtcaggtttgccataaagtagggcacacgactgctgtctgccattacaaattcgataaagggtttgtcacacctaagatcaatgaatctaaggcctatcttgctgaaattaatgaacaagaagatccacatgtttactccagctcaacattaccagaatttgtggaagattatgactagtatgctgacacaggagcaaccaatcatatagcacaaggcatggaacatcttgaatctgaaattccatactcaggttctgatactcttgcagttggaaatggcaaaagacttgctatcagtcatgttggtaactactctctcccatcttctaattcttctttacatctgaataatgtccttaaagttctaccataaccaaaaatcttattagtgtgtctaatttaacagctgataacaatgtttacttggaatttcattccaaatgttgttttgttaaggacaaaatcacagggagagtgctactcaaggggaggcttaaaaatggtctttacacgccgtctcacaattctttcccttcttc

SEQ ID NO: 269234 - DNA, 1043 bp, Cannabis indica
acataagtggatgattttagttataaattacttacttgcctacatcatataattttagagaacctaaaaaaaaaatatatacaaaaaatataaggtaataaaatacaaatacaaaaaccaaaaactaaaaacaaaaaataaaaaaagattaaaaaattaaaaaatcctcatcaagaataaagatttcagattttttttttttttgacaaatctgtaaaaaaaaaaactcatattataatttgtggtctacaaaagaaagagaaataagagatattatcaaatgatatagggtaataaaatactaaaccaaaataaaaatagagattaacaaatattaaaaattgaaaaaattctcaccgagaatagagatctcgaaaaaaattgacaaatttataaaaaaaattcattatataatttgtgatttaaaatagaaagagaaagaagagttattgtcaaataatataaggtaataaaagactaaattaaatagagatctacaaaaataattgataaaattgaataaaactctctatataattataaacagaaagaactgtgagaataaaattagaataaaaaataaaattaataatagttaaaaagagacagtaatattataaaattagaataaaaaataaaattaataatagttaaaatcagatttaacatattgttttaataaacttatagagacagtaatattataaaattagaataaataataaaattaataatagttaaaaaagagatactgagttatatatattggaaaacttgggtgattaatatttatataagataaaaaataaatatagaaaagagaaaaaaagctgcatctaataataattgatggcattatgtgattttttgttactactttaaaaagaaaaaaaaaaacatgagtatgtataagcatgaataatatcaaaaactttttctttgagaacttataaaataataaaataaaaaaaaagagagaaaaaaataaatatttataaataatgaatatgtatagaataatttataaattgttattattattt

SEQ ID NO: 269235 - DNA, 694 bp, Cannabis indica
tattggatcggatgactttctgcacaccccttaatttttttttttatctatatagtgttttattattttaaattacattacattgcaactagtcttagttttagtattcttcatagttttattaggtagttagttactaatagttataattcttaaattacttgtaaatcaatactcctttgtctatatagatttgttgatggtaagggatcatctattgctattaacaatcaaatgcaactgtaacaagttcagggcttggctttgggctttggattaattttacataaataaaaaagggatttttacatctagacacatctttttctatctaatatcaattttaacgtatatgttcaaattgttaatattaccgtgagtttttgctgttttgaattttaaagtatttagttgcttattgttcgctgacatcatgatcaattttcacattatatctatcaatctatgggatttgtagtcactctcaacacatgcatggtaggtgttgatgtcaactgataatgtcacgtaccattacctctaataacttacaaaagatacatacggtacaatattagatattagttttttttttttacatatatatatactagtagaatgctccgtgcgaggcacgtatataagttttatgctaggtgtgtcttgttttatttaaaaataatacaataaataa

SEQ ID NO: 269236 - DNA, 1154 bp, Cannabis indica
atttaaataattatttatgctattattttagaattccgaatgcattttatgtcatatagtgaatttcataattttgcatttccggtgcccagcaacatggaactcggtgtttggctcagtagaatcaaaacttagcatgttagtatattgggacagtttcttagacattgggaatgtcgggagtggtcgtgaatttagaatttcccaaaataccctttagtacccctttatgttatgttagtatggaggggcaaattggtcattttgccccattgttattttgtcctttagtggattttatgttgtgaaaatatgtgattttaattgctattggttagctgaataaaagtggagttatgcatgttatcctttatttcaaattgtaaaaaaatagaaaagaaagcaaaacccaaatttcctctcaagtctctctctctttcggcctctctttgagcagcaaggaggtggttttttccttggatttcaagctaattttaacaagatttttgtgttctcaagtgcttggtattatccttgtagctttattttagttttcttagtttttaagaaaagttgagttttgcatgcttgagaatttatggctgtagttgttgctaggttttaattttattttctgtagtttaattaggtttcaatacgtggattcaagcaagtttttgttggtatttagttgattttaaacaagtatgaagttttgagctaaatcttgattttagtggtggattgttcaattagcttgctgtacttgtgggatttgtttagtattgttttctgcagttattatatgcatattaatgtagtttaaaccaggtttgattgcttgtaggtgagctttagccaagtttaagttttgaactcaaagcttggagctcacatggtgaattgtgtatttttgtatgaagctcggttttgatgctttggaattgtttaatgggatatttagaacaggtctggagagttttgtatggtttgggatcgttttgagtgagttaagaatttttattcatttcctgctcagaaccggaattccgaatgatgttccagaatttccagaaccggaattctgcttgtaaaaccggtctgccggttgggggatttttgggaaccctagtttttcccatttttatgttgtt

SEQ ID NO: 269237 - DNA, 758 bp, Cannabis indica
aatatagaaaaaccctaaaaaaaattataaaataaaaataaagcaatgtacattactaaaattagtagaaattagatttataccttaatagaccttgagatacaatgttttctccactaaaaacggtggccagaggtataaccaccacgaccactacctctacctttggtttaccctaaaaaatgagaaaaatgtgatcttttcaggtatatttagatatgaaaaatagaagatttagaaacaaaaatgagctaaaatggtgagaaaatggtaaaaagggggtaatttttcgtggtggttggcagagagggtttggggtttctgggttggttggtcgaatgaggaacacgatgggctgggataggattataaacccttttggcgtcggttatttccatcacaccctatggcgtcggttatttcaaaatgatcgacaccatacatggtgtcaaaatcccttccaaaacttccccaccctatgtcgtctgttctttaatattatgttgaaaaaaagtgcctctaaaggcttggcttgtagtagagtaatttgaattcgatttataggttaacatatagagcccaaaatgagctttctaacgatactaagaacgtctaaaatggagttttgagtcaaaagttatggtcaaaacaagttttaacactttttgtcctgaaaaaccgctagcgggctgccacactcaaagaccatgccgcggctcctgggttaaaaatccaaaaaaaactcacctttaggcacc

SEQ ID NO: 269238 - DNA, 764 bp, Cannabis indica
cctggtatacattataggagggcagagagtggtgaaggtgtgggcattgtgggagttatgaccaagttaggtgaatgaataaaagattcctcagaacatgtatcagacacagaagatgtgacagattatacttacaaatcatcatcctacccctaacgagtaggagtagttgatgaaaaataaggtgtatttttcacaaaggtaagatcaatagaaataagatatttgttgagatcaggacaataatatctgtaccctttctgaagatgagaatatcaaagaaagacactttaatcctttagggtctaattggtaacatgtggacggacatcgcgagcaaaacaaacactgccaaatacctgaggagcaattgaaaacaatgacttactaagcaaaagaattttaaatgggatctcaacattaagtacaaaggatggcatgcgataaataagaaagcagcttgtggaaactgcatcagcccaaaaaggtttatgaactttcatttgaaacaagaggacacgtgcagtttcaagaagatatctgtttttacgttctgtgaaaccattttaatgtgcagtatcaacacaaaaagtttcatgaaacatgtcattagaagttatgtaagattgaaattgaacatgtgtactctttggcattatcacttcgcaaagtacgaacaaacacatcaaattaattttgaatctcaacacaacgcgtagaatatacaaaacaactcagaatgatatttcattaaatataaccaa

SEQ ID NO: 269239 - DNA, 693 bp, Cannabis indica
aaaaaatacagtaaaaaagtaaaaaatatcgtcagacagtatttttataaaaaatggcagaagttagtataccatgtaaatttccctaaataaataaactctgacagtgggccgataattaggccctacacactgtcgggccttcatacaacgaatgacctactttgatttcatttgtagactcgtagcgaaacagtggtaacgataataaatgggctatttacaaaaatagggaaaaatgaagataagttttaatatatatgacataaaaacttaattacactaaatatgatatttttttgaaaaatacttataaatatggaaaaaagtcacgaggaatgccataaaaaactttaaatttgtgtttcttttattttattttcttttttaaaaaaataaaatactaaaataaataaaaaaatgattttcaacggtagatgttttttttatagaaattaaatctgttttttttttctagaaattacatctgtttttttatttaaattactgtttttttttctttattttttttgtgttaaaaactaaaataattccctaaaaagcagcagacaaaaaatacagtttcatcaacatcatcctgataaaaaaaataaaaaaaaaattaataatttaaaaataatacaaactttaaaaatcagtttcatcaacactgaaagaaactaataatttcat

SEQ ID NO: 269240 - DNA, 707 bp, Cannabis indica
  modified_base (31)..(31): a, c, t, g, unknown or other
gagagagagagagagagagagagagagaganagagagagagagatagatagatttgccaagcgctcaagcaattagccagagcaagaaatgaaaaagtgttcgagcaattagtgaaactgaccaatgatcacatcttatgcaattttgcatcaagtcaaagctaaaacaggttcaaacttgctttttactgcatgatactgcattttcggcagtctcatggtcagattttgaacccttggatgtaccttcaatatgattatggcttttcattttaatttcaatttcaagccacaagattcatttgttctggaccataaccccaatttcttatggaaaggtattatggggattggcaaattaagaaccagttgtttttcctctgcttcaataactcaatggggataagagactcttcctctttttatttatttatttttcctcccgaaccgccccttgtaaacttctttgcttcaggggagttatgagttgtacccagtaagtaccctacacctaaaagaaacatccatgatgattcaacgaatataagaagcttctttgacaccaccaagatcattttgttcactggttcctgattccccaaaatatagatggctctggaatctgtcctctgagatgatggtagagactgactatccttggctgggaaattcttccattgataccattgggttttgaggatataacc

SEQ ID NO: 269241 - DNA, 575 bp, Cannabis indica
ctgaacctagagtgagaagaccacgaggaaaacctcgtggctcacaaaccagtagacaggaaaaggcccgggaagaacaaccttgggaaaatgagacaccccctgagaatcacaacgaatagtcagaaaggagacaaccacaaactaacgagcgagaaatccctcatgaaaatgaggaggatcttggaactcaaccgggagaacgaacatcacctactaggtatcactggtgttcttcccaaacccatggagcgaggactcgtatgcaccctaatgggggaaatacgacaaaccgatctcgggaggaaagaactgagcgtgaagaggcaagtgtgacttcgaggcgatccagaactcatatccgatgaactcgaagaggagaaagtactcaacgagctaatgatcaggagagtatgggaacaagtaaatccgcgtgccacttaaaaacaaagtctataagtaggacgcggtcaatgagtaagatgagatccgccagcaattactcccaaccagatctgcgagagcacttaaatcgaaagaaaccttaccttggccaatagcttggtccaaagcaa

SEQ ID NO: 269242 - DNA, 418 bp, Cannabis indica
aacaaaaaaattacaaaaaaaaaaaaaaaactcaaaaacaaatgatcttccttctagctaggattagaccccaagttatattagcactttaactattgtgattaaatatgttattattatattttacattaaattatatttaacattataaaaattacaaatttatatcaacttttaataaatttttagcatattatattatttaaaaataacatgtgcttcctcttaagttaaatttttatttaggagttttttttatttttatattttaaagcatctttttttttttgttatttttacgaaaattcatatagaaaatcaaaactcatatatcaactaacggaggaacttaaattgaaaccgaaatctacacagtaacccagatagaaattactaagcaacccaaactataaattta

SEQ ID NO: 269243 - DNA, 525 bp, Cannabis indica
tcaaggtttagttttactttgacccaattaagtatttagaagtaacatcttgtcaaatttaatgttcagttcatgaatttctttcaaagcttccaacttggtattggccttattcatgtaaaattattgttagagttgcaggatcttgtgcttatttctacaatttggtatgcctatgtcttaatgtaacaagggacatagtagttgttgtttttgctagatagtaacctttaatatcgtctttgctgaatgctcatcagaagatgtcaagattaagtcagaagatgaagtcattatcagcagctcattatcttctatatctgattcaaatactcgaaatgcggcagaggtaactgaagcagtggctgaaataacagactcaatcatgagttcaagtggaatggatgatattggggatggtagtgttttaaaaggaaaatcagtcatttccaccgaaaagcattccatttcagttgaggtaagattctggatatctttttatcatggtttgagctgattacatcc

SEQ ID NO: 269244 - DNA, 685 bp, Cannabis indica
taatttgtgtctcaaattaatattgtagctgaaatcttattgtacagaatgtaatcactagaaaatattggtcttattgttctaataagtcatcttaagaatggaccaacaactcttaaaaaagcaaatggttcaatatgcatgttcttttagaaattgtaaggaattactaaataacataacttattagaatttatcaatgacttgtggattattaatgattagttatgaattctcaataaccattaaccttaagagttgttgtgaatcgtaattaatctaatacttgaggtgtaagtttgactgtttgagaaaataaatgatcttttctagaaactaggttcctagatcgatcgctcccactgatcaagtcaattcttaattccacagttctagtattgtgagagggataataaaatatgtaacacttataccttatagattttctgatgaaatgctcatttatggtatttaggcccagatcttttctttgataattgtactctaactgtatacgtgtatttctaaaatgtgtacatgtcataaagtcagtttcaaatcttatcataactcaaaatatgtttgacaaacaactttggttagaatatgattcgatatgtacactcccattgaagagtatcgattgacaaagatttaagaaagtttggagtttgctatgtaggct

SEQ ID NO: 269245 - DNA, 973 bp, Cannabis indica
ttattaaattagactcgttgtcgttggctaaaagcgagagcaatgtcctaaattctaactaaaattcaaatatctaaccaattttcaaattttcaatttatttaaataatttacattaattaaatatctaataagatattataatataatattttaatttaaaatttacatatttctaattttaaattcttaatcttaaaatttaatgaattacatatataaaaaaaaatcaacaatttgaaaaataagatattttatggttaggatattatcaattttatttaataattaaataaaacaaaatattctaagttttaaaatttgatggtttgaaaatcctaaatttttttattcaaaactaaattaacaaacttttcaaaatttcatgttattttgccgaaaattaattttaattaaaataaatatctaaatagtataaaaagtaaaaaataatatttttctaatcttataatttaatttaataaaatacattttaaaaataacaaattttcaaaaacttatttgcttagctaatttgaaatttaaactagattatttcttaattttattaatattttaatatcaaaataagatcatttcaaatattaataattactgagtaatatttgatattataattaaaataaacaaaataaataaaataatcaaaaatttcaaaaataacaataaggctttttttgtggaaaaatcagatttcaaactcaaagtctactaatatctaaaattagttttaattaattaaaaaaattatttttatttggatgattagatttttatttaaaaatttagattctacacaaaattctacaaaaatttgaattttgtttcaatgaaaaatgatttttgaatcaaaaaatatgacaaaaacaattttggggcacaagggtatgcattgcatacccctgcgcgcaacatggggcataggatcgagaaaggaggctgcatgcagcct

SEQ ID NO: 269246 - DNA, 1702 bp, Cannabis indica
agcttcaatgagtcttttgctgatgtagtagaccgggtgttggatattgttctcttctctgattagtatgacacttacagcatgttccgtgacagccacgtatattcctaactcttctgtgtccaaaggttgtgagagtacatgaggttttgcgagttgcatttttagctcttgaaaggctttttcgcattcctccgtccattcaaattgcttatttccttgcaggatgttgaagaatgggacacacttgtgttgacgcagatttttgttaactaaatttgagcctcatagttataatttcacacaggataaataaaagctattgaaaaacaatatatgaacaatatatgaacatagggttcttacgtggttttgcagtgaaaattctgcatagtccacgagtcaatcttattcagatttctgagtatttatgtttacagccattatccctaaaatcgtgggatctgattacatatcacgaaatgtaaatgcagtgtatgattttgaaaattgtatagctgtgattttcccgcttttactgggtcaaaaatatcgtgtattaaacatgtctttaattgttgaattggagatgtctcgacagaaacttgattatagtgatcccaatagcgagctgggaccattcttctttctaaggacgacaatgtatgtcttacgtcgatcgcgattataaagaaatcttctgacttgccagggttataagcctcgctcctgttagttggatgaaggtataggaagtcttctcatagcgagatggtcatctcacatacttgttcttcgagccaatttgtctttttcacttagtttgcttattgcacgctaagggctttcacggttgatacgtatcactttctttagtgcctccctattcgcatttaacgatgtatgttttctcgctaatatactaagtgccagtttgtacattgattcctcgcctaagaccttacagtcagcgggttataaatatactctgatacttacgtaattaatgagttatttccataaaaagctattgcaccgaatcacattccctttatcttgacacgtgtcctccagccaaattttgggtataacaacttgtctgttgactttgaaacaaatctactaagcgcgacaatccgaccagttaagctttcaacttccttactttttgttggtgatttcatatccaggagggcttgaattttctctagattagcttcaattcctcgggcattgacgataaaacccagaaacttacccgagctaactccaaaggagcactttaggggatggagtttcatgttgtatttcatgaggactttgaagcattcgtccaagtcatatatatgcccccaaccttactggatttgacgagcatgtcatccacgtacacttccatatttcgtccgatatggtctttgaacattttatttaccaatctttggtatgtagctccagcattcttgagaccaaatggcatgactttataaaagtacagacccatatctattcggaaacttgtatgttcttggtcgggtgaatgcatcttgatttgattgtaccccgaataggcgtccaagaagcttaatatctcgtgtcctgcggttgcatccacaagttgatatattcttggaagtggaaagcagtcttttgggcacgccttgttgaggtcggtgaagtcaatacatacttgccatttttt

SEQ ID NO: 269247 - DNA, 704 bp, Cannabis indica
gacgaatacgaaggaaactttgacgtgtacgattcctatgacaaaggtagttacacagaactagtgctcttgagataaaaggttgctgatcatgaagctgaaatcacagcccaaaaagagcaaaacaaaaaaatgtaagaggtgatgcttgccatgcataaagccatggaagcggcagggattcatgtacatcctaaagacatccctgtaggacttggagaaacaccagaagagtcctcaccaagcacccaaaagcataagtccagggaacctagccctatacggtatccctctaaaggggaccagtggaaaaatcctatctccactcccgggaaaaagaaaaaggtgcaggacccgcgaaaggtccgctcagatttcccaaaagggaaaggtccgcaaaggggcaaactccaaaaagggagtcttggccctcaggatcgagaagaccgaaaaagcgtttctgtgccccaggaacccggagagagaggaagaaggagccaaagataccctctcgtcgatctgaggcatcagattaacagaaaacatggtgacctctgggatcacctagaccagaagagacatgcgccaacggtctccatgggaacgctgaacgaaggaatcatggctgagcttgccatactacgtaaagatattgctcgggtctcctggagacaaaaaggcgatgactccgactctgactgtga

SEQ ID NO: 269248 - DNA, 1205 bp, Cannabis indica
tttcgaggaggatgaagacgataatatttttttggggcaatccacgatagtgatggttttaaatcatgacctatagtatcgactatagccgacgattttaaaccgtcaagtattcttttataccgacatttttctatcgtcacctattctatcaagtattcacaaagcttgtataggggacggttttatagaccatcaagaaatatttacttgacggtgtaaaactattgaaaattccaagttttttagtagtgatttaaatatcaagaatattctcttttatctaagtcgatgaataagggcacaccattggattggtgaccttagatcttctcaggtgaatattgtccattgatcttgtttattgatgaatggttgagattcatccatcttggttggaatgaggaccattggttctaagattgaacaaggtccattgattgaatttcgaagctttgatagcctaaattctaacttctccttataactcaattttttatgggaatgattttgaatttcaatatcattgtgagacataaatcgaaagaaaatcaaaagggctttctaatgcactcaaaatcatgtaattcaaattttatcaagtgaaatatgcataagaaatgttgtagtgtgtatcaatcctagaaaccaatgagtaggtgagatttttggttcatttgagtgagaattcttaataattattcatccttggcatatattggattgccaatgtgatattgggaaattgctaacgtaaattccttagttgcctcattaagcacacagtggtcactcgagtggtgactgatgcaccacctgagcgcatggtcacttaggcgccaaatattgctcttgacattatgatgttatttttatgccaaactaccccaattagagtgaattgtactagtttggtgatatctccactgcttgtacttgttatattcgttgtacaaccatattctctctccaaactttgttagaggcgtgctagctttaacgggctcacccttagtcgtacgaccatttggtattctttccatcaccacctataggttatttgactgagtgttgggagagggggtaacacttggtaatttgactaagtgttgggagaaagaagctcccttggtacatgtggggagtaatgggagcgtagagctcccatagctggatggggaggaaagagagagagagagagagga

SEQ ID NO: 269249 - DNA, 483 bp, Cannabis indica
aagaaccattcccatgatgaatcattctccgagtctcctattctgaatgccaatatgaatatgtggttattagcatccattgttgatgctgtaaacaacgtccccccttatgttgttttcaagaatgtgccatctaccacaataaccggtctacaatgaatctatcctctaattgagtttggcagtgataggaacatgtacttgaaccggttcttcttgtctgttatcaattcggttactgtgcctagatttgctttttttagcatatgaaggtacattgggagttgctggtatgagtcttctggctttcctcttgaaaattctagagctttttctgttgttctccaagccttttgatatcccatcgagaccccaaactcatgtagcaagtccttcatgatgttattcggtgcatgcttcctgtttattgaatcgtacttcttctttactatttgagcaatagtattgtatgttgcttgcctg

SEQ ID NO: 269250 - DNA, 832 bp, Cannabis indica
agattttattgagaatcggccattcgaagcatattccggtgctatataaccactgcatttgcataatactatatattagtgttaaggcaactaaaagatttttcaagatgacttgtcacttactaagttcctacaactttgtttgtgtttccttcaatttggtctccaccaaaagttctagccaagccgaagtctgaaattttgggattcatttcttcgtcaagtaacacattactagctttgagatctctatgtataattctcaatctcgaatcatgatgaagatagagaagccccttagcaatcccacatacaattttgtaacgcttagaccagtttagtagtatgctttgcctttcatctgcaaatgttggcatctacttttattagaacaaaattggcaacttatatatttatagaacatcacatgtactaaaagaggtgaaaagagtcttgccaaaaatgaaatagtcaagacttttgttggacatgtactcataaatcagcagtttcatttctctatgaatgcaataaccaaatatcttgacaagattccgatgttgaagcttagcaatcagtttaatttcatttttgaactcattggctccttgtccagaacacattgatagcctcttcacagcaatttcttgacctccttccatagtaccctattatgtgacattgacaataattatttaccatattaaaaaagaaaaaaaaaaaaagagaaaatatgctgagtgagagaagcttactttgtatacaggtccaaaaccaccctctccaagcttattagcctctgaaaaataattagtggcaagactaattgtat

SEQ ID NO: 269251 - DNA, 516 bp, Cannabis indica
aaataattagtgttatcgttatattcgtaagaatttttctagaaattattgcatgcataataacaatatttaggtaataatactagctagtagtaataatacttataattattataataatatatgacaataatgtaatgctttcaataaagacttgcactaaataataatccccattttcattcatcacattgtcaagtgtgttatgttatgttctagtaatgatatgtagaatctagcttcaatcatatcaattgtaattttcaacgtttataggtattattttatgccatttaataattatttatattactttgattttatttttaaacatattgcattattatttctttttaaatacttaagtatatactttaatttttggttataaataaatatttaaatttaattttaatgacggttaactattaagtaaattactatttggtaattcctaattaatttaagttattaagtttttattttttatttaaaattaatttaaatatactaaga

SEQ ID NO: 269252 - DNA, 791 bp, Cannabis indica
ttttttttgaatttgaatgaaaaaatctgaaatcgggttgcacacacgcgcgggggttgcaatgcatacccctttgcaccaatttttattttcttcatatcttttgattcaaaaatcatttttcattgaaacaaaagccaatttttggtagaattttgtgtagaatctgaattttcaattaaaaatctaattggcagaataaaactaatttttaaattttttaattaattaaaattagttttagatattagtaggctttaattttgaaaatttgctttctcacaagaatagccttatggttaattttgaaattttagattattttaattagaagatcaaatattttttttattattaatattgaatgatcttactttgatattgaaatattatttttttaaataatcttgttcaaattttcaaaaatttgctaaccatatcatatttttgtcaaatttgtttttttttaaaatatattatattaattaaaattataagattaggaatatgttaggtttaacattttatcttattggattttttttattaaatttatttttttggcaaaaataacatgaaatttgaaaagttggttagtttaggttgaatagaaattttaggttttcaaacttgttttattttattattgttaacaaaattaaaaaatattctaaccaaataaaatatcttatttttcaattagtttatttatgtaatatttaaatttattaaattataagacttagaatataattttttttttgataaatcaatgaattgtattgcacaaa

SEQ ID NO: 269253 - DNA, 689 bp, Cannabis indica
gacccggcactagaaatggaaccagactgggacccgagattgggatctggatttggacccaaggcttggatttaacccgtagtcggtgtctggatttgggacccagccctggacccaaaccctgatagggacccgaaccctgacaaggacccgaaccctcacccggagttgaacccaatcccaaaatcaaaagtggacccgccgtacccttagaaccgaaaccagaagttgaccgggattggaactaggacttggacttggaatcataactgaaattggacctagatctagaactgtaaccggaccaggaccaagactccaaatcagacgtagaccggaattggtagccggactcagaacccaacccaaacctggactcaggacccgaacccaaacctgaactcagacaaagacatggaaccagactagggacacaaaacaagggtcgagacctagaaccgcaccgcagtctcgatcccgaacaaaaaatcaaaaaggggacctgggacctgaacaagaacgagctcgagacctgtgacagtgatccacatcttaaatcgggctttgggtaacggggcctggaacacaccagtagtcggtgtcaagatctgggactcagacgaggaccagaacccagactaagaaccaaacccaaacccaaacctagacctgggacccaaaattagaac

SEQ ID NO: 269254 - DNA, 1003 bp, Cannabis indica
ataaaaaatgggttgggttggccaagttggtcgcccaacccatattttgtgcacccctagctcgagagagagaaaagagaaagggagagagagatatatgagttttctattttaggttttctaacttaatatttaatataaataataactttcttttttttcagtctaaatggtcactgaaagacaaactatttacaaaccaagaaatgactattctaccctttttaaacattatagctcaaatataacttacaggtaatttggtcttttcaaactaatcccgccaaactgacaatttacagttcaaaactagtcaagctcgaaggaaatcatcatttcacttctatttgctagatagaacttatagattacatatttatgtttagcgctcccattcaattgcactaccatgttcccaaaatgtacgtatcaccctgaccaaaaagtaggtttaactaacaaatcaaagaacatgtataatattcttgagatcgaacctaaccatatcaagattaagatcatttgatctaggatcaactaggtaatattgaattgaatagatattatggtaagtttaatatatctgaatcaaagttcaatatctatccctttcgatgcatactccatacatccaacccaagctttactttaaccaatgccctggaaagaacatacccaaggtgcaagtaaacaatgttgtagattgtcatatcagttaaaccctgtgtactgataaatctaggaatatatactcaatcacataatcttgattactttctactatgttgatgactcaataaacaagaatataaatgtgacatgggtttggatgaatttataaatcaaataaacaagttaagataacatgaaccaaatgacgcacaaataagtgaatgaaaatagttctgtttctttattgatatttaaaagataaagtattacattgaaattggagttttatttagggcataaacccaacaaactcccactttcactaatataa

SEQ ID NO: 269255 - DNA, 1088 bp, Cannabis indica
tttgagtttgtaagcgggtaaatttaataattttttttaatagcataagtactcaatgtttgtaaaactgtaatttttctctatttttgtatgtcaatacaagttccattttaaatttattaaaagaaaatttggaaaaactaatactatatacttctgtccaaccaaataatcttgaatttgggtcttatatgtatcatgtttaagattttaacagagtttgtactgatgaaactggaggaaaattaccgttttataaacattaagtatttatgctgcttacaaacctaaaattttaagtatttatgctactaattactatatttttaattaagtagttaaattaaatatataaatttaaatccttcaaaaaaaaatatatatataaatttaaatttatctttattcatttattattgacataaaaaatctaataatttaatatatatatttatagtgaaactcatttaataatacttatttcatatataaaaaaaaagggacaaaagttgcaaacatcttcaagagtacttttggattatacacaagatatatacacatgggaaactctatataaatagaataaatatagtatttgagttgagagcaggatatataatttataaatatagcaaggaattaatatagaatcatggcattggcaggcacaattttgggaactgaaaaaaaaagtagcattatcatctcaaatagcacagatgtttttgagaaggggtgttttgaaattaaatccaatttttttgagccaagactggtttcgtgggctactttttcacctccaaaacaactattcatcgtgagtccaacaaaggagggcacttatcctgtagtgttgttcttccatggattcttactcgaaaacaaattctatgaagatctactccaccacatatcctcccatggacttatactagttgcccctcaggtacctacagtacaattaatatatgcattttttattatttttcaagggtttaaattgtaaagtaggatgttttattttattttatttttttttcttgatttaagcgtttatatattacaacatgtttaatttgggactcaaa

SEQ ID NO: 269256 - DNA, 517 bp, Cannabis indica
ataattaaacataaacaactgctaatttccaaattaactaagcgggctttacaaaagtgatagccttttaagtgcattggataaccaatgaaataatagtgagttgttcttgggtctaactttttcaaattaggatcataaatccttacttcagctggacaaccccatacacaaagatgattcagactaggctttctctcagtctacaactcaaaaggggttttgggaacaaatttctttggaacacgatttaaaatgttagtcgcagtcataagtgcttcaccccataaaaactctggaagatttgttctactcatcatacttctaaccatatccatgagagtgcgatttctcctttcagcaacgccattttgctcaggtgaaccaggcatagtgtattgagcaactataccattttcttgtaagtactctgcaaaaagccccatgtgttgtccagattctgtataacgaccataatattctcctccacgatcagaatgaacaactttgatgactc

SEQ ID NO: 269257 - DNA, 588 bp, Cannabis indica
agctcaagttcttatttttaccactttaaaaaatacgggatccattttgtcatttaacaaaacagatggtcaaatcaatagcttttataaaacataggatccgaaatggtatttatctaattagaaaaacaaaagtaaatttaaatataagaaaattctacattgcactaccttaaaaaaaatattgatgcatcgttatatgcttttacatcaaagagacttttttaaccattttttttttatatttgtgtatattataattatttaagacatttgcaaaattttgaaaatttttaacatgaattcaaattgtttattgcacgtgagactcttttattatatacacgtgtaaaatggactatttgagcattgctttctatcttgtaaattattctgaattttttaaaattttataaaatgtcttaaacagctataacgtatactaggggtgttcgcggtgcgggtggtgcgatttttgactattttttcaaactaacccgcacatgcagttttattaatttcccaaatcgcacccgtaccgcgaaactaaaaaaccgcaccacaaaaaatggtgcggtgcagtgcggt

SEQ ID NO: 269258 - DNA, 990 bp, Cannabis indica
tatgagcaagaagagtaaatactcaccaagaacattctctgtatttataagggtaacattccctcaagtgtggaatctgtattaaatacatccattaataataaagactcgtggactaaggctcattaacgccccaaccacgtaaaaatccttccctcgctttcttacagctcaatattataatcatattttagtagttgccgaaaatctcggtcaacattcataattatcataattattcaaaataacaattttcataaattactattttgtcgttaggtactatatctcgtagaaattaattttcactcaaatttactcatcaaataaaacctcccatgtatagtgttgtatagaggtgacttggggactatggacctatattttcaagcttcattaaatacttgattattattgatctcatctatagaataatacaatttattaattctattattactccactataaatatagaattacactctttgacaatatataattatatttacagaatttttactagtagtccattgatataatcaatataattagttcgcgctacaattattagttcgtaattagagttggtcaaaactactattttaccattctaatcattccttgatcttaattcaatgtgaaaaattaatctataacttataatagattttgatccaactgttagcactcctagaattaacactataaggaaactaatattcgacccattaggaaagcttgaattttcttattgtataatatgttcctagccactcatgttaataagctcttaaaataaaagttgtaagaatcatcttctttgagaaactttaacgagtgaatcaaagaactcaatgaacacaaataggagttcccgtttactcaggattcagactgatttactaatgatcatcgttgtgatatgaataactctttcatggtaaataacatgttaatgaaagatgttattacatatcggtctagtcat

SEQ ID NO: 269259 - DNA, 1159 bp, Cannabis indica
ttaatgaaacatactttgtagtaaatctagatcctggtaaaatatttccaacaatccttagcctcgcccaagtagtcaaagttggctcgaggattagccttccaaaaatcaaagaagagctggagaccggctgtctccaaggcattgcccttctccttcaacctgtccacctcggccgtaagctcccccaccttggcgtccttctcctccttcatccaaagaagaactgcagcttcgagatcctttttcatcacggagatcttcttctcagcagtgaacaacttcttgttggcctgcgcaactccaactgaacaactccaggttctggcctggcctcctcagcttcctttttggccaattctgcctccgccttcaaggtgtcggacagagccgcgctcttggaagcaacagacttagcccgggagtaagtgttggctaacgtcagactggcctgcacaaaggagaagattcaatatatggagctaagtgttgaaagttaaaggaaagtatcaaaaaagacttaccctggtgaactccttcaggactccacccaccaacaaatccaaagatgagtcactatcagcaccatcctgttgctcactgacctcgagaaccagccggttcatatagtgggctagcatctccttgccctttttggcctttggaagcacgggcaaaggtggagttagtgcctgcacccgctcaggagtactcctgaccagttcaggcccaactgttggtggtccagactccttggacttggcaaacttgggggtagaagggtttgcaacagtcagctccttagaaagatcaatgacctctccagaaggtctcttttctgagaacccctcaacgcccttggacttcttggccggaggagaggcgctagagcttccgcccattctcttcctcagagcatcaatcatctgccgagacatgtctgcacagaacaaaagtagtatggttagaaaacagccatcagaaaacacaaggcatgaaagtcaagaagctcaaaagtaaagtaaaatgcaaggtgaccgcccgcacagagactcagaaatctgtcatcacctgacattgatcttatctcagacatgacggccttccctttcccggcaaagggggagatggccgaacaggtgaagtgggctcccttatg

SEQ ID NO: 269260 - DNA, 693 bp, Cannabis indica
attggtattagtgaatattgtttaagagtacattacagtgataccagcacaagtgcgggaaagtactgagtgtgtgtggtatatcactcagttgtactcagggtacgaaacaaaccctaccaacactcgtacagtgaggtacgtagtgtatgtggtatagtggctataccctcgtattgaaaattcttactcatatgttatgccttgtaaataggtgtatgggcgcctagatacaagtcggtattatatgatatgttatatacttttcttactgagtctgtcgactcacagctcttatttcatgtgtaggtaaaagaaaggcaaaagctgcgcaggagtgagtctgagctagaatgagattgtacatgttgtggtagcgtgacctggagtgtcggtctcgaaacaactagggatatattttgtagtcgctgtgcgacctggttattgtattttggcatattttgtataaaagtttagaatcaggatcctggtgtttgtaaattattatgtaaattataaagtttaatatttattataaaagttttaatttgacacgtttttcaaaaaaaatctttgattagcaaacacagtactgtaattgtaaaagtactgtagtgtgccttagcattagggcgttacaattagagatataatttctcaattccagagattttattaaactctaggggtatt

SEQ ID NO: 269261 - DNA, 561 bp, Cannabis indica
actcttgaaacttgatctgagagggttgaatgacatatagtctatgactaagttgaccttgtattagcactaccttggaagcctagtctttcacaagacaataattacgataaaacacaaaagagacattattatttgcagcaaattgaggcacacttatgcaatttttagtgatattgggaacatgaagcattttgttcaaggtcaggggtttggaagagaaatctatgtgaaagatagttttaccaacattctgtataggagcaccagctccatcacccatgtgtaggaccaagataatgctctttgtgtgtaaagttagaagcatctgcagtgcaataataggtggtgctatagaattggatccaaagcctcatcaagtaagttatcagaagtaccaatgttaacagatagatttagcatcaccaacatagcaatatatatgaccagattgagaacaccttaaggcaatatgaccagatcgagaacacagctgacagactagtctagtgctaagagagtatgcagatgaaggattgggagagaatccacgaccaaaaa

SEQ ID NO: 269262 - DNA, 662 bp, Cannabis indica
tataataacagttatcagagtaccattggtatggcaccttacgagatgctgtatggtaggaaatgtcgatcgcctattcactaggatgaggctggagagagacgttatcttggacctgaattggtccaaaggaccagtgaagccattgaaaagatttgatctcgtatgctttcgcaaagtagacagaaaagctacgttgatccaaagcgtagggatatcgaatttcaagtgggagactctgtatttcttcgaatatcacctataaaagaggtgtgtagatttggaaagaaaggaaaattgagccctagatacattggcccttttgaggtactggagtggataggtcaggtggcctatcgattagctttaccacccgcgttatccggggtgcataatgtcttccgtatctctatgttgagaaagtatctgtcagattcgacacatgttttgagttacgatgatattgagctcgagacagacttatcttataatgaacaacctatccagatcttagacaaaaaggagaaagtactctgaaataaaatccctctggttaaagtcctatggatgaatagtatgttgggttttatgccctaaataaaacccatttcaatataatcagatttatttattaataaagatcagaaataacattttatgtt

SEQ ID NO: 269263 - DNA, 611 bp, Cannabis indica
aagtctttatgggtgtaagcattgctcttatttgccaccctttgggcaacttcctttgctaaaacatctttacatctcaagagcaactttggtagtgactgttggtgctgagttttacgggaatagttctttgagaaagccatttgcatcattggaaacattatgtttctatggcatgtcatcatgggagaaatggcattcaatgcaaactgaagaggcagcaacatatgagaagctcataacacttgagattattaactgttataagctcatcggagatttgcctcgccttcttccttcattaacatatattaaaattgaaggagataaggagtgtgcattgttaggtctaccaagattaccatgtatcacagaaatgagattttggcacttggagaacttaaagtcattgtacatgcaataaagccaagcaatccttcttccacttctacaagtggatgcttgcctacaactctcactccagtgtaccattaccctcctcttcaggtgcttcgtttgtggaattgtggatcatcctttagatccctccatatggatttatatcgatggattttcagaacttaaaggcttgcaaacacttgagatctaca

SEQ ID NO: 269264 - DNA, 1477 bp, Cannabis indica
aaaaaaaaaaaaaaccttttaaccattttttttttctaaacatcaacctgacttaatttctttatttatttattttattatttttctgttaataacatgacatcaacatatttcttttattttattttatttatttttaaagaactttataataattttcaacttcatatacttatttatctttctttttcttttttcaagtttaaaaagattaatttcactacataaaaaattgtttggttttaagagttacatcattgttattttttttaagatgatcattttaatgtgtgagaagtatatattttattcaccatcaccaaagaagataatgagagtcaaatgtaacaatttagtttcttttatattttcttaacaaataagtaattaatttttaaacttaaacaaaacaaaatttaatgtatcaacaacttgataggttactaaaaagtatttttcttattttatctttagatattaaaagattaaattataaataaactaatttttataacattattttgatagaattatgaaataacttgtaaatacactaaatattatcttgaacatcatataaattatattttttaaaaaaaattatacattaaaagttagataaaattaaatacactaaccaattcataagttactaaaaaatatttttatatttaataattaaaataactaaattgtagttttcatgtacttattttataaaacacttttaatatattttgaaattagaaattattacatagaaaatataaattgatacttaatttacaaaaatacctccagaaggtaacgacaatatttatacctattatgtgattttactttccaaaatatcacttacactatcacttacacaatcagacgatggttgtatggtggttgctgtgtggttgcagggtggttgcatccgaagaatgtttcaatcagacgatagatgcagggtggttcctgggtggttggccaaaggttgcatcagacgaaggtttcaatcagacaaaagtttctgggtggttgctaggtggttggctgaatgttgcatcaaacgaaggttacattattcagacgagataactgttagcaaaatgtttatgcaactgtaatggaactgtaatgcaactgtttaaaaattagaacaatgttttcatgtacgtaactctttctacatgtctcttaatgatttaatatgaacaaattcaccattagaaatttgcaaaacaacaaaaatacatcaggataaatattttgctatagtattgatataattttttttggattatacttgagttggattgttgggaactccagttcaattatctgcctttcatagatctaaaaattaaagtcaggacattagttttatgcaaaataaactagattttttgttgaattttagtttcgtagtagtttttctacacttttttatgtattcaaaacaacccctgttttgattaattctagt

SEQ ID NO: 269265 - DNA, 734 bp, Cannabis indica
ttaaactttaaacctttataattatatatatccatataaaatgtcgggatcccatatttaaaatttacatttatacccaaaatacactttataaacatatcgcacaacgactacaaaaatatagcccaagtcgtcttgagaacgaactctccaggtctaacgacatgtacaatcatccccgagctttgaacttactggtgttcagccttagccttttttttaccaacacgttaaacaaaatctgcaagttaatagactcggtaagaaaaacatataacacataacatattacagacttgtatttaggcgcacatacacctatctacaagacttaacagatgattaagaatgttcttaagagaagtacgatctttgtaccacatgcactaagtattgctactgtgctagtgttggtagggctaaactgtaccccgagtaccactgagtgttgtaccacatgcactacgtacttgtcccgtactagtgttggtaacactagatcgtaccctttgaacatcatatatgttgggttttgtgtcctaaataaaacacatttcaatataatcagaattactaattagtaaagatcagaaatcgcttttatgttgcatgattcacataatttattttatgactacatttaatgtataaattctattaagttcagaagtataaatatgtatatatttgttcatgattatagtgtcgtcagcacagtggaatataatcatgat

SEQ ID NO: 269266 - DNA, 530 bp, Cannabis indica
aaaaattaatctgaactattgagctagttagattttaaggatttttatcttaattttattcaattttaatcaaatcatgtccctacaaactttagataaaagtaccttaaatctaacaatctcaatagttcaaggagaatttttaacgttcaaaaaagtttagggatatgatttggtaagttcgggaaaaaaaatcctaattagcaaaaaaaaaatacaaaaatacagtttaaaagaattttcaatatttttacgatattttttgtttacaaaaaattgagtctttttatgttgtattcttcttaatttattgttaattttttgttacctatatgttattttttgttgttgttttcatattacttttatgtaattttttttgttgttttcgtgttgtttctatggaaacccataaaaaatgtaaatttaatttttttatgaaaccaaaaaatagtgctttatttaatttttatttttttttggtaaattttttttaataacttgttcgcataagttttgggttttttttt

SEQ ID NO: 269267 - DNA, 619 bp, Cannabis indica
aatatataaatatatttaaataaaaaaattaatctaagaaaattatatactacatatcataacataaataaaataaaataaatataaataaatctaaaataaattataaatattacaaaaattaatgaatttatattttttaattagttgtatcatttatgttaaaaaaaatttatcttgctaaaatttcaataaatcaaattcttaaaaagaaaaagcaatcaagtctaaatttacctgtaactaataatttctaacaactatattaaattatagtccataattataataagatatataaaaaaaaaaatcaaaatcaaatcaaataatattcaagaaaaaaattatttattattattattgaaattaaatattatatcttgattaataatttttttcccacaagaaagaaagaaaataataaaaaaaaaaatagacgagttttttcttagtagcaaaaaatgagatgaacttatgaaatgttcggcttttctttaaataatatttgtgcattttatttttctttggctttagttattaagtgtatagtgggggcttgtagttgtttcttaaacaattttattcaaaaaaaaaataataatactaggaaaagaggttt

SEQ ID NO: 269268 - DNA, 549 bp, Cannabis indica
cccaaatctgccctaactctgttggaaagcttagccgccatctccaccgtcactggttgtagtcttcgtcagcttcaaagcttcgcaatcatcatttcagccatttttaactacttcagggtaatgtattagtcgccatatttgatacaaatgtgtataattgtgtggtggttttgttttttttctttatattaaacaaagaccgttcttatggggataaacagctagaatggaacatggaattccgtcgaatttactggatgaagccgttgggtccatcgccggctgtcttttactcctccacgactcagtagagaccaccgccgcttttctccttcatcatttcctcaagcgctctctctctcctcactcttcgaatgccgtcattttcgtctctttcgctcaccccttctctcactacgatcgcatcctcagaaaactcgtactctctctctctctctctctctcactagatatatatagctctatgtattgtgtttattcctgtatacattttcaataattgaagcgtgttctgtaaaatgctgg

SEQ ID NO: 269269 - DNA, 769 bp, Cannabis indica
gagttatagtattgtgtttcttcatagaagtagcttcagcatgaaagtacttattgttactatcaccatcctgaagccacaactgtttagagcgttggcgccagaacacttctcgttgattcataacttactaagattcagttcagcctcccaaaacttctgaatggacatagcatcacgccccttcttccaatactggatttcccgcttgcaatggctaattctttgcttaaaattgcctgtataatctcacccccacacttgaagagattccccacaataagaaattttcttcataacatgctgaccctcacaaaggtcccaactatctttaacaacatggcggcacaacggttcacgaagccaggcattttcaaaacgaaattgacaaaatggcaccgtcacagaacgtaccgtcggttcagaagcagcgggcaatgatctgaagcagagacttccagattatgtagctgagccatacgaaacctctggaaccagttggaacaaacaagagctcgatcaagacgaattttaacccatgaatcagtgcctttcccacgctcccaagtgtaaggatacccgattagctccatatcaacaagatcacaggttgattgaaaccatccaccagcatctgtggatatctaatacctcctcttttatctgcatgactagtagtattatttaaatcgccaatgatacaccaaggaagagaagattctaactttaatgatcttaataaatcccaggttttataccgaacaactct

SEQ ID NO: 269270 - DNA, 712 bp, Cannabis indica
cccttaatgtatttgtacacacaagcttcttcttcgtttattcaaagccatactctttaatagtcttattaaaaccaatattccgtgatctagaggcttgcttcaatccaaatagatttaagcaacttgcacacctttcgatcactccatggtaacacatacccttctgattgttccatatatatggtttcatcaagatcgccatttagaaaagcagccttgacgtccatttgccatatctcgtaattatatgcagaagctatggaaagaagaatgcgaatggatttaagcatttccacgggagagaaggtatcttcatagtcgatgccttctcgttgtgtgtagcctttggcgacaagcctagctcttaaggtctctaccttcccttcaacatttttcttcttcttaaaagtccatttacaccatatgggtgtaatatcctcaagtggagtttcatatacccagacattgttggtgcacatggagtccatctctgaatccatggcattgttccacttgtataagttaggttcatgcattgctttgttgtaagtcaatggatcatccttgtctatgtcagaaacaagaacatgtgcttcatgttcatagcggaaaggttctctcataccctcctactgtgatgatatacggggtttcctttttaggaactgtggtaaccgctgtcggttgttcaactaatggtgctgaaatt

SEQ ID NO: 269271 - DNA, 592 bp, Cannabis indica
aaaaaaatagtgcagtgtaaactaactctccctcatttaggtattcgtagagatcttctaatcgatgaattccaatcttgtatgtcatcttctcaaatgttgatgctggtgataacttgtgagtaaatctgcaagattgacacttgattgaatttgttgaacaccattatacattctcttaaaataaagaaaaatatggtgaaatgtattttaattctatctccttcaatgtaccttgcttttagttgagcgatgcaagtaatattatcttcatagagtactgcttatgttgatagttctttattgagtgtaatctatatattttccgaatatgttatgtcaatgatctcacttccacacattctctacttgcttcataaagtgcaagtatactaacatgatttaaagttgcctcgttgaaaaccttgtcaagaaaaaccagtgggacaaaacctaagataaggaagaaagagtgcaatatatatttaatatttataattatttgcaagttgcctcgttaaaaaccttcccatgaaaacctagtgtgtgggacaaaatttgagctaagggaaaaagagtgcaacatgaatat

SEQ ID NO: 269272 - DNA, 911 bp, Cannabis indica
ataatcaacttgaaaaaaatcctaaagcaacacaagatccatagaaaaaaaaatcttattagatttgggagactttaaaactttggctcaaactcaaaataagagtcggagttctccaacacagattgagggtattttgatttagtattcttcgaagtactagaatctagttttcttttagcaggaactaggaagtatggctaggaggattatctttcaaactcttcttgtccattgatgctcgtgttttatttttctggggttgttttggggactttttagcaaccggagaagatcggttaaaaaccattgttaatgagaaaaaacaacatttataagaattccaagaaaaaaagtgggaaatgtatagggaagtttaagatgaaaaataaaaaaataataaaaaaaaaactctacaaatttgaaaaaaaaaatagaaaaccacccatttcacaataagtgcctgaaaaaaaaaaaaaaaaactaggaagaagaagatgaatagtagagcatgggggttggatttatgtaaaaaaaactagaagatgaagataaaaaagaagatgaatagtgggacatgggggtgagatttttaaatctatttaaataaaaaaaaaaagcaaaaaaacatgtaacttttgtgacaacccacattccatcaacattttaatctaaaaataatataataattattaaatattaaaaataataaataataatttttaaatccattaaaataaaaaaaaaacaaaaagaaacttgtacacttttatgacagcccacgtcccaatcagtcaaaaaaacaaaaaaattaatgtacacaaaaggcagtatactgccgaataaaaaaatcaagtaaaaaagttaataatccgcatatcacagtaaaattgtaagaaaataggaaaagt

SEQ ID NO: 269273 - DNA, 1320 bp, Cannabis indica
gttgtaacgccctgactctcagttttccatgtgtgtgcttttacaaacgcattattacaagtttattagttaggaaaaagtgtgttttaattaaaatctttaagtaaatctaaaataaaaactttcatttcaaacactgtcgtaatatggggatcccctgctaataaaattcctttacaactaatttacaaaacgactattacgaaatcaaggttacatttttaaatatagagaaaataagtcgatcttacttcccagaagccaagacaccacggcggatatgtacattgctggaaaaatctcaaactcatggtcgaacacaacttctaacttcatacctgcaccatgaagcaccagtgagtcacattgactcagtaagaaaatctactagataaagcaaaatcatgataagttatagcagatttcattacaatagaatatacataccaataggtcatactctttcaaagtacatatacaattcagagtttatacgagcaatcttattacaagattatacataaccaacaacctcagtgtttcataaaacattctaatcatacattatcataaacacttactttcaatgcttcataaagcattctggttcacacattagcatattcacacaacttcagtgcttcataaagcactctaattatgcatcattataaacacaaattcttacatccctaggtcactatgattgcaagaaaagtgactaatttcataagcagtataacatccatttaatcctacaataacaaaaatttattcaattacaactcatcacataataacacacttgatccatttcacaacatcataccacacaatctcggtacttcataaagtacccttaccactcgttaaccacgagatatgtatgtcactattgttaaccgatacagcgaacgataagtaagaaacctgtccttagtttcaggagtaattactcataacagtaatgaccgtttcttttactcgatcataatcgactcactacgataataatcgtttcaaattactttcctcgatcataatcgagtcacaacaatgacaatcatttcctattgttttccctcgatcatagtcgagtcacaatgttgataatcatttcctattatttctctcgatcataatcgagagacactaatacatactaagatctcgatcataatcgagactatcacaactataattgttaaccataaataatgcgtaatacttttcttacctcagtccagaatttagcattcatgctgacctaagtggaatcaaagcttgacgacctcgggccttatgtcatgacaacaaaaa

SEQ ID NO: 269274 - DNA, 676 bp, Cannabis indica
ttgtgttgtgtgtggaaagtaacttcctagttactttacattttaggtatcataattaactaaatagttaccttttactatagtaacgatagaaaaatatctatattacgtattaaattaaccacaataaagaatagtttctttttctatttaattaaccaaaaaataaccaaattttataaataaaaaaaatttaatatgcaaactaaattcatgagttactaaaatatactttcttattcatattcaaaagttattatatgataactaattagtttctacaataaattaaggttatcaaaatgtatcttaaataatattaggatactgtgatgtaactttaaaataactaattagttattaatttggatgtctaaatattttactaataaattatgtgatttattttactttattgtaacacgttagttttttcaataagattgaaggtaacataaatgttacacaaaaataacataaaagtatatatcttaaataatgtaatataaactaataataacatatagttttaaaagtaactaatctaaaagtcaagttatctatatgagatatttttattttaaaatgtatagatcgttttatgaaaagtaaccaattggtatcttatcgaaataataatcaattggtccaaaaaaaatgtgtcttgtttgtaatg

SEQ ID NO: 269275 - DNA, 1025 bp, Cannabis indica
tccaaaaggtggattaggtctatgccgattagaattgaggatagggagtttagtgctgacttaatagaaatgggtttagcagattttgatattattctgggagttgatttcttatccaagtactcagccaatattgattgtaagcggaagatggtaatcttccaaccagaaggtgaggaaccgtttatttttgttggatcggttcagggatctcggatcccagtaatttcagtactaacagccagggaattgttacaagacggatgtctagggtttctggtcatggtattggataccactcagcctgagtctattcggctagaagacataaaggtggttcatgaattcttagatgtttttcctgatgaacttctgggtttaccactgcaaagagaaattgattttatcattgatttggaacctggagtagaaccggtatctaaggccccttaaaaaatggctacaacaaaacttaaagaaataaaaattcaacttcaagggttgcttgacatagggttttcacggcctagtgcgtcacccatgggagctccagtactgtttgttaactgtacggtgttacaaacattagtacgcttaagtacgtagtgtatgaggtgttgggttttgtgccctaaatcaaactcttttcaatataatcagatttactaattaataaagatcaaaactcattctatgttgcatggttcacatgatttatttcatgattatgtttaatgtataaattctattaagtccataacatatataaatatatatatatttgttcatgattatagtgccgtcaacacagtagaatataatcatgattatatgttcaaaagttaaattcccatgatttgtgagttcactaaatgtagactgacatgataatcggttataaggtatacttacaccttggataaatgttatgtcctttctaggacattgacaaagtttacaaatattggatgtatgaagtatacattggaagggaccgatattgatcttggataagatattataaa

SEQ ID NO: 269276 - DNA, 1059 bp, Cannabis indica
aatattctcaatcatttctatgttttttgcaagtgttgatttttacaattgcactactttgttgttttactatttttagttccttattctaaaactttagccaatatgtgttagtattacccttcaattttttgttatatttagagagatgtcagaattccattctctaagatgaactaaaggaacgcttagctgcttcaagcctaacccgaaagagtatagattgagaagtgcatagggaaggactccccttactctgtttcactttagagagcttccagcgctgttaggaaatcatgattagtcctacacctaagatagatggattcttcttaatgggggagatgagatcccacaaagcccctgttcccttagctaagattctccttattattatccattatatctagctataaaaccacagggttataaattttaaggtatctcatttcgaaacctatgtagtcgtatctagttacgaacctaatctagtcttttatttcccatcccacaacctcctatggactctaagtggtggggtttcagggtagaaggttcatggtagctagctccaatatggcgattaacatctttctagtatgtagcgagatccgtcaatggttctaggcttaactatgatagaaactgtaaatgaggctgtgcagtggatttcatatttataaattttattttcattaatattctgttggtagtgagactaagcatgtttggtttagaagcattaggttaaggacttgtccatcttatataaacttgagtttgacaaaaccaatttccatcaagcatcaaatgattgtgtttgtgtatagatagtaaagttgtcattattgtcatctcttttgattattttctaatgaccatttttgtgtttgagaactatcaggggacatatatgagcatgctgttgttctgagtgtaaagactgaggaccaagatgctttcgagagagatttctttcagttgaaaccctattacacagatgcccggtaatttgttataatcgttagctcagcacattcttgagttttattgtttgtt

SEQ ID NO: 269277 - DNA, 945 bp, Cannabis indica
acttctacccttgtagcccctacgacttttaccaaccttagttctgcaatgagagcttcgtactcgacttcgttgttagaagctgggaatgcgaagcatagggcggcctggagtcgaagtctatctggcgatatcattactatcccaacaccggatccactttcattcgatgctccatcaacgaacaccttccatgcctgggatctgcggggttggtatacttgagctggcctccgcgtcattacatttcattatgaagtatgttagggcttgtccctttatggaaatgcatggaacgtagtgtatgtcgaactggctcaattccatggcccatttaaggagtcttcccgaggcttctggcttttgccagacttgccgaagcggctaatttgtaataaccttaatgggatgggccaggaagtagggtctcaatttcctcgaagccatcaagaggcaaaaaactattttttcgattaaaggataccatgtctcggctcctatcatgtgcttactgacatagtacaccaggtgttggaccttgtcctcttcccgaactagggccgcactgacagcgttcttgaaaacggccaagaataggaacaagtcctctccatgaactggtttttacagtaccagtgttttggccatgtgctcttttagttttttgaatgcctcctcgcattcatcagtccactcgaatttttgacatttcttcaaaatgttgaagaacgggatgcacttgttagttgaccgggaaatgaatcgactcaaggcgacaacctttccagtcaagctttgcacatccttgtgtttcttgggggaagacatgtttagcagaccctgaatttttttggggtttgcctctattcctcgttggctgacgataaatccctgaaactttcccgatttgacgccaaaagtacacttcttcggattaagcttcat

SEQ ID NO: 269278 - DNA, 2050 bp, Cannabis indica
tcgagtttatctcagacataacaaccttctcttttccagcaaagggatgagatggccaaacaggtgaaatggactcccttatgcgaaatgcatgttcaacaggcctaggcatggccgagagtttcttcttcctcttcaatggggtcacctgctcagcctcagcctcagcctcggcttcatcttcaggattcataggctcctgagcatactgctttgcccgggcacctcccttcaacttagcttcacgcttaagttgaatgagctcatcctccttattagctcgttcgggccgggcagcatcagatttccccttcttccccgccacggacttgggagagaaagtcctctaggtagagctcgtactgctaccagattctcattggaagtcaattggatgatattcctgtcttcctccggcaaccgggcaagtttttgagatctatccctaagagcaagagtgaggggaggacggtgatatgtcgggatctgctgaaactgagtccgggtgatgctcggatccttcaccatgaagtactcatcaacaaaatgccctattttgctgatggccttgtcgtccgtcccgctcaaccacttgtagccttgctgagagaagtaaaaataccccgacctgccttgcttgggggtagacttcaggtcgaagaaccaagcgacctcgtggggagaaggagcatcccattcctgggaagcgtagagaacgaagagggcggacaaatacttaatgccctttggagtaatttgggccgggtagaggccgaagaagtctgccacatcccggaagtacttatgcaagggcaccagtgccccttgctggccgtgagcccccgaccaggcgcacatccccttatcagggtttgtggcatgattgtcgtgggcgggaatgtagcagtctagctcgcctaggtatccgtcctggtcgagagtgcggaggcgtgcctccaaaatcttggacagaggacttaccctcctggcgcccaaggtactctgcctcgtgtgaggaaccgcgtcagcaagctcctcactgacgtagtcaacgccctcaaccaggacatccccgtcagcatcgactggttgcccagcctcattgtactccccgaagttagggggtccaatctcttcctctccctcagcagcgggaggactgcccggacgcgcctcgtccagctcctcaacctcctggacttcagcgtccccctcacggtcctcctccattgggaccgccaaatcctgttcggcgtcgggtagagtggcgagccgagccacttgagggtcagaagcgtcagccagacgcgtggttttcttcgtacgagccatcatcctatggctgggtacggaatcagaagaatttccttctctagaaggagagttagcacgaagacgagggtggacttcgtgcagaagttgaagcagctcctggtcgatttgatgctcgggctcccaagactcacctgggttcatctacaaaagacaacacacaagatgagtgttggacggagtatcaaacgaaaaacaagcaaatatgccgaccaggagtacccaacagattaaagaacgaccatgttcaaagaaaagtctaaactcaagaagtcagaaagttttcttgagttagggcaaaaaagttcatgaagcttggaaaaagcaaaatggaaaacagacgcaatgcagttctaaaataagccttacggctgaaagctaacacaaggacatggaaaagaagagtcgcagaagtttcaaaccctagggtttcctaaagtgttctttctacaacgaagttacattcaaagcgtaagcatgcaaaggaaaagcataaagggaatcagaaacttactcaaagattcgaatgtccgggttcaagcaagccagaaatcgtctgtaggcacttcggcaacttcgaagccagaaaattctctcttttcgctctgaagtttacttaacaacgaagggtgataaaatgaagtaatgtgccagtactccaagtatttataggcaaaagggtaactgtacataaggaaccttagacgcctcggcttcc

SEQ ID NO: 269279 - DNA, 561 bp, Cannabis indica
aacttattaatattttattgacattcaaaagatgtgcattgttcataatgaatttaaattaacctgtaaatttacagatttagatagcataaaatgttggtaaaataaaaaaaaaaaaaaaaaaaaaaaaaaaaaaaaaaaaaacttaaaatatcttagtcaaattgtaattaaactaactttgtgtgatactttcttacttttttttttttaattgaagtatgttatgttttacttagggttaattttttttttttgggaaacagaacctaataatttatttgcattgcattttgtgaattaaatcatcacttgtggtgtgggtatatttatatatttatgtgaattaaatggccactaacaattactatagtcatttcaaaaacatatacatatataaaaaaaattcctccaataaaattgtgtatcatattcatggctcctttgtgatacatgaggtcggtgtgggatttcgggatcacgcgcttatacaaagcgtgtaaacaaaagtcaacaacttgggcaactaaaccatgctcaacaatcaaaaacggtaaagag

SEQ ID NO: 269280 - DNA, 1014 bp, Cannabis indica
atagatatttatatcttataaccaattgagggaatgtcttaaccacttgagcgaatatctcaactacttttcaaattcaaatatttatcttttcaattaattaattaactaaaaaagacaaaatcattggggacacccgatataggtggtgcatgcactgtgtcaggacacaatgcatgtagtgcctctaagtcaagagatgtgtcttttgtcttttcccaatttattaatttgaaatataaactatttattacaaaattaaaaaaaaaatactattttgacaattcaaaatagatttttccaaactttcatatacaacttttattcctctccttgacagtattttaaggtggcgatccggagaccatgaaactataactctaaactctaataaacaagattatttattgaatctcataaatcaaataatcatgtttattaattccatgattactccacaataaatatggaattgaactctaagttattatagaattatattaattaagttttactacagtgtctattgatataatcaattctaatgattagccctccttgtatctgttcgtagttagtttcggtcaaattatcattttactgttccgattacttctttatcatttagtttcgttaatttactagtgaaagtataatttagatccaatctagatttgtgcgtaactttttagtttcagaattaacacataaagagaaccaacattcgatctattaggaaagttaggattccataattgtagatcatgttccagccatccgcattattagattcccaaaacaaaagttgtacgaatcatctccctctgagaaactttaacgagtgaatcagagcaactaataatatgaacatgagttcatgattacttaagatttaggccgatttaccattgatcatcattatgatatgaatgaggtctttatagtaaacgatttgtttgataaaaaatgcttaattatctatcaattattttcatttataatctctattatata

SEQ ID NO: 269281 - DNA, 999 bp, Cannabis indica
aactgaggtgaaatctgaatcatcctgtttcctacctggaacccttcctgctcagggcatcagccactacattagccttcccaagatggtagaggatttcacaatcataatccttaaccaactctaaccaatacctctatctcatattcaaatatttctaagtaaagaaatatttgagccttttttggtcagtataaatttcacatttctctccgtagagataatgacgccaaatctttaaagcaaacactaccgtgacaagttttaaatcatgagtcgggtattgctgtgcatattctttcaactaacgagaggcataagcgatgacccgatcagcctgcatcaaaacccacactagaccctgtctggatgcatcacagtaaactacaaacttttctttataagaaggtagggctaacgctggagctgtgattaatctctgtttaagctcctgaaagcttgcttgacacttgtccgtccacacaaaccgctgattctttttagtaagcttggttaaggtgttgaaatcttaggaaatcccactataaaccgacggtaataactagtcagacacaagaaacttctaacctctgtaattgtttttggtatcggccaatccctgacagtgtgtccaagaaaggacacttgcgatagccaaaactcacacttcttgaacttggcatacaacttatgttctcgaagttgctgtaaagccatctgaagatgttgctcatgctcctcttctgactgagattacacaaggatgtcatcgataaatataataacacaaatatcaaggaaatccttgaataccctattcatcagatccacaaaagctgcgggagcattggttagtccaaacaacataaccaaaaattcataatgcacgtacctagtaccgaaagccgcatttgtaatgtcttcctctcggattctcaactgatgatagctcgatcgaagatcaatctttgagaagaccgtcttcccctgaagctgatc

SEQ ID NO: 269282 - DNA, 738 bp, Cannabis indica
ttggtttttttttttttgaatatttttaagtacataaataattagagagtacaatgctttaaaaaagtgtatcacaagtcaataatatgacctctatttatagaattttcactctcatataaatatgaatgaccaccatacaattattggatgtttccaaccataaatttagtgtttatagtattaattgggtaatttaaaggagttttgaggtgttaaaaaggcttcccaaacgttcaaaaagcatgcaattgtatgctgaaaaaaatagtgactagttactagttactaattaccatttttcaactttggtcaattctcattcaaggtgttccaaattactcctacttgattttgaacaatttatacgccttataaataaataaatctagtctttagcaacaatacttttaatagctattatttactcacattcataaataattagtaacatcccttactaatttaagagtgataatgtggagagaaaagttacacaatttatgattatcatttttcaaggatttaaaacttttttttttatgatcattatcaacactttgcgactcaagactcaaattgtatattacaatttcacaaaattaataattaaataataatggtatttatatatcaattgtaattccacatttcatcaagctttctgttaaagtcaaaaatctccaacaacgattttttgaatttccccaaatttccattaacatacgaaaataaaac

SEQ ID NO: 269283 - DNA, 498 bp, Cannabis indica
aataccaataaaaaaacctaaaacaaaaaaataccatatcaattggccaaacttaaatgtgccatatttatcataagaacttttaaaatctcatactaagtgtaattccctttataaaataatgggaaatagtagtaaatgaccctttctcttttattcgtgaaacttaatgtctatttttaaaaataatatagcaaatagcctttattatttttagtacctaaaatacccttaattatataagggtattattaacattatatttactctctaaatagaaatgaaaactctgctccaaaatctaaatgacaaagcctcacaatcgaaagcgacgaagctctgctcattttcttcttcttctaattttctcacatctccaaattacaatgattacccccaaacaacgaccaaagtctcagtcaaatttttctgttggtggtatatacattttgtattatggtatatatattttctatactatggtataccattcagaaa

SEQ ID NO: 269284 - DNA, 771 bp, Cannabis indica
cgataatcaatacacattctgagggaaccatctttctttttcacaagcagaatcggaactccccagggcgatacactgagtcaaataaacccaatgtttagcatcccctgaagttgcaacttaaactcctaaagcctcgctggaaccattctatatggagcttagacaaaaaagttcgactccaggtgccataccaattaagaaaccaattcctcgatgtggcgacgcgaaaaccccgacaacttctcggaaaacacgtcaagaaaatctttcactgccctgattgcctcagacccaaatgtttcaggtctgctgaaatcaattaccactgctagaaattctacacagccactgcatagtaaatctctagcccttattacaaaggtaaccgagatccaagaccccaggactgatccatcctaaataaatggattttcaccttcaggctaaaaagtcaccattctctgcttacaatctatactggtcgaacacttgaatagaaaatccattcccagtataatgtcaaatttaattaattccaattttataaggtcaacgctcaacttcctatcttcaatcctaaccatcatagacctaaagtgcccattagagttaaccaacgccccactagccattagggttccaaaccccatttctaaaatatcacaaagccttactcaaaaagattaattattcacataacgatgtatgaacatatagctcccaaatcaaacaacacaaaataaagaagtcgtttacagggagctgacc

SEQ ID NO: 269285 - DNA, 730 bp, Cannabis indica
ctgacacagctcgtatggcgtctttggaactgacttgctaggcacttgattcaagatataagcggcagtccttaatgtctcatcccataaaaactttggtaagctagaatgaataacataccgtaccatatcaagaagtgtgtgattccttctttcagcaattccactcagctgggatgtacttggcattgtatatcttgcatcaatgccacattcttccaagtatttagcaaacggcccgaggttccttccagtttcatcataacacctataatactctccacctctattagaattgacagctttaatcttctttcccttttaaagctcaacatttgtcttgaaaatcttaaaggcatctaaagattcagacttctcacaaatgagctcaatatgaccatatcaggaaaagtcatcaatgaagataataaaacatctatagccgcccatagcaggtggaacaaaggacccacaaatgtcagtgtgaataagctccaatacatctgggcattcatctgacttactctttctaaccttagcagttaactttccttttatacaatcaacacaggcagtgaattaagagaaatcaagatcttgaagtacaccatctttcgccaatctttccattctatctctagaaatatggcccaaatgtctatgccaaagcatgaaagatttcaattctaatcttgcacgcttggaaccaacaacaacattaagagaagaa

SEQ ID NO: 269286 - DNA, 923 bp, Cannabis indica
ttctagtttttatttttatttttgtgtggattttagacttagtttggtgtttcaggtatttttggagcacaatttggagtttgggatgtgatttgggggtctgaagtttttgctaaaatttttattcaattttgctggagcaaaaactgggtatgaaaaaaagtttttgtcgttgacttggaaaacttcgcctgctgcagtatttttctagcaaaatctagcaaaagtggtacaagttaaatgagtagtcaggaagatttttgctgaatttttgcgaaaaaattgctacagcaagcgtgtttgagtttcctttgagagctgtagtaattttttaaaaagaaaaaggcaaatgcttaattagtttttttctcaaaataaattaaatgaaaaaaaatgaaatgcttagaattcctaaccttatttcccctcatatttttttctttttcacccatcttcttccccatctcaaaaccctccatagccgcccaagctcaccaagtcgcctgaacacccatattcgttcaccacctctcagttgaacaccattcaagctccattcctttatgtgcagtatccttcatggcccggtctcacctttccaaaagttcacactcatgtctacatgccatacatatcgtgctttgggagttgatttggcactatactaatttgtattttcgggttaaaatgatatattttgtcgggtgctctgtgcattgggagagctggttgttgttagccatggtgactattacagatcccttttggtgcttgggaagtgtagtttctgtgagtatttgttatggtagctgctacatcaggatccaacaatcattttgttggttgtaattgtttgaaattattttaccaggatcttagatctactcacaagtatgttgcttaaacaccctaaatatgaactt

SEQ ID NO: 269287 - DNA, 724 bp, Cannabis indica
ttcacaacacttacagcaactgcgttagcaaccatgactaacaaccatttgtaaaaaaaaaaaacaaatgcagaaactattttcacaacacttactgcaactatatgtacaaagaacaaagaaagaaattcagcaaacttgataccaatacttccaacaacagtatttttaaaaaaacaaaggattgaatacaacaactattttgacaacacctacagaaacacttccaacaactctatgtaaatagatataataataaaatacaacaatcaatttagcaactcttgcagtattacttatagcaactttctaataattgattatagcaaaccttccagcaacatgtgtagaaacactatagcaactatagatctgcaactttaacatcaattcatatgcacaaaatataacaaaaataattcattaagtgaaacaatcaaattgaaccgtgtaaactatactcaaagttaagaacaagatgaaaaataaataaaatttaacacccaaattcatatttacccataatattaataaaagagaattttaagcttttaattacctcaattagaatttaataaggctgtaataatccttcaacttgaatttaatgacctatgctgatattatttgaagggatagtaaagctttttttttttttcaattaaatctaaatttttctcaaattgttcaaattcttgtcaactttaatgtaattgaagaaaaa

SEQ ID NO: 269288 - DNA, 881 bp, Cannabis indica
tatcctcctctattgctgcctcgattagaagaagaaaactgagatggataattgtaccttgagaatggagattgctgtctaaaattcccaaagttgtttctgaagttggcaagattagcttcaggatgatcaatgtcaagtgaagcaacctgagcactgatttcaacctctcgatcagtcttctcgattctggattctgaagcaagaagtagagactcaatctctgcaacagaatacgtctctaatctggtgttggtggatatgacaaaagtgtcatattcactcggaagtcctttgaagattgcagctacatgatcttttgccgtgtacacttcaccaactgaggcaagtagatcaacatgatgtttaactttgaggagataatcagatagagatagtgagcctttcttcaagttttgaagcttggttcgaaactcaagaatcttagcagaaacttgaagagtaaagaacttctccaatgtcgaccagatctgattcgatgtttcgcatccaaccatgcgtgtgagaagattctcagacattgaagatagtagccaggacatgagaagctgatcttggacttcccagtcaagataagcagggttaaacgtctcagattcacgatctgcatcagacaaaaattttgcagggggatttgaattgatgtatcgttgtaacctgttgccacgaatcgcagctaaaacctgttgtttccacaacagaaagttgtgatcatttaaacggattgaaagattgtgagtaaaaaagacaggagagaactcatcgtgatctcgtgttcttcctcggttgagagatggttgacgattggcaggttgagcagagccacctccattgtcaccgtcaccagagttggttcttga

SEQ ID NO: 269289 - DNA, 781 bp, Cannabis indica
tttagatttcaaagtaaaacctaaactttctagaatggtcatcaataaaagtaacaaaataaagttcacctccaagagttctagttttcatagtacaaacatcaatgtgaatcaggtcaataatattagatcttctagacggtggatgtgtatgaaaagaaactctatgtgcttttctagctaagcaatgatcacaagttttaagagttgtaccttacaaatttggtaagaatttctttctagcaagagtttgaagtccttttgcactaatatgaccgagcctatggtgctaaagatcaatgtttgtatctttctgaactgcattaatctctcatttgtgtaacttagcttccatgatatagagagtatttattttttttcctctcaccactacaagagaaccattggtgagcttccatttactttcaccaaaccagtttatgaacccctcatcatcaagtcttccagtagatatcaagttaaggcaaatgtttagaacatgcctaacatctttaagaatccatttgatgccaacactggtttctaagtaaatatctccaatacccataatctttgatgcaccattatttcgcattctgacattgccaaaatcactagtagtagtaagaagtgaagaaatcactacgagtagtaacatggaatgaagtaccagaatcaatcacccaactagaatcttgggttgcaagactaacacacccatcatcacatacaataacaacatcaccttcagtgaaaactgttctctttctcatttttcttc

SEQ ID NO: 269290 - DNA, 742 bp, Cannabis indica
aaataaatattactcaactgacggtatataattattccataatgctcttttcaaacctaaaaaaatatgacatgatgaaagtaccaatttgtgagatatttattttactctataggtagacttttaaagcttacatatgtttaccactattagagaaaaatctttatagttgtctatatacattctcctctagtttactgtttgaaattgattaatgaattgaaacgagcaacaaatgtcaaggttactataatagaatcttttataaagataaataagaatgtaaatctcctttattattgattcttagttcaaaataaacttcttaacaattaatcttatttcatctctatgtttcaccatgttgccttatgagtatttattgatgaaaaacctatgattaatattctccacccattaggcaactttactaaagatagacttcattgctcgttaggatattcatttcttcattcatagcatattgtaacacaatttcaaatctttgtgttccacagttttaatttatgtctcaaattaatattatagttgaactcttattgtacataatgtaattaatcactagaaagtattgatcttattgttctaataagtcattttaaggatgaaccaacaaactctcttatagagcgaatacttcaacatgtatgttgtttagcaattgtaagcaattactaaataacatgacttattagaattttatcaatgacttgtggattat

SEQ ID NO: 269291 - DNA, 802 bp, Cannabis indica
tgtttcctcgataattagggtattgtcatgttagttatcaataatgaaacttgtagttgtgagtttaggtccccagatcgggttttagggtgttatttatctttttacatgaatgtaacatagggcatccatccagcgtgtgattttctgtttaggtcagccagcacacttcaatttggaaatgaggtatgactagcataaagcgtatttatttatgaatatgtgtatgtgtgatatatgtatactatttatgattcatatgctactaacaatagtacggtagtggtattgagtgcattggtatagtgtatgatgttcaacaagtacaatacggtgttaccaatactaatgcggtcgagtatggagtgtaagtggtacaaaacttagtggtactcgacgtatggtgcaaaccctaccaacactcgtacagtagcagtacgtagtgcatgtggtacagtggtcgtaccttagtaaagaatgttcttacttgtctgataagccttgtggataggtgtatgggtgtctagatgcaagttgatattatattatatgttatatgcttttcttactaagtctattgactcacagaaattactttttgtgaaggtaaaagaaaggtgaaagctgaacaggagtgagttcctgttggaaattattttaccaggatcttagatctactcacaagtatgttgattaacaccctaaatatggacttctaaaacgattataaaataaacacatataaagtatgagaaaccttatattgggtgcagcggaatattatgtctccttccgttcagat

SEQ ID NO: 269292 - DNA, 598 bp, Cannabis indica
aaaaataaaagattatgagactaattttcgtattaaagatgaaaaaattactcttttaaagaaggaacttggaaatttcaagaaaaatgtccaaatgcttaatcctagatcttctatttttgaagaagctcagaatgcaggtcaaagaggttttgctggcattggatcagatgatattggaagttctggaatcactaaatttgtaaaatctagtgttctaacaaactatcttgatgctgtaaatttgaaggttgctagatcaaattcaaagcctatagctccagatgttgtatttgcagaagcaaagtctccaggaactacaaaaagagtaagatctcaggtaaggagatttgtgcctatttgtcatttttgtggtaggaagggacatatcattcctaaatatttcaccatgcagaatatgtacaaaacaaattattttggtaatttggaaaaatctcaaaagaaacatagaagtatgaagcaaaaatggattgagaaaaaatgtttagctggtttttttttttctaaaagtgctgcttctcaaatgtggtattttgatagcggttgctctagacatatgacaggtgacaaggacttt

SEQ ID NO: 269293 - DNA, 1167 bp, Cannabis indica
attagtcacaaaaattataattaattgtgactaaatgtgtttttagttacaatatttattgtgactaaaattaaattagtgacaacgtgtatctacatactatatttcagtcacaagtgactttttgttgtgattaaaagtcatgtttagtcacaaaaaaaattatattgcgactaaaaaattatcactaaaggtagatatttttttgtagttgatcagtgataactgttaggtaactagttactctacactatttcttttttctatattctttaggttttttatttttcccgtaaaacaactgttgaaaaaaaaaaacatatttcttcacacatagtataaaatcttataaaatatataatattatttttttaaaagctttgaaaagaaaaagtgtaaagtgttatttctctatattcacttcaaaattatggtacttgcaacagttcatgaaaagttaatctcattggcaaatgaatcaactttatgtttttcatgccaaatcgacttcaatcacaaagtaaagaagatattatatatttgtccaaaaatgtgtcttcatgatatgattgttaaatagagttgttattgtcaatagcaaattaagtttacaagataattaactcttatacttttagccattaattattgatattataaatcttcatcatcaatacaatataagtaaccaatatagatttaattgtaactaagattatattgttgggaggaatagaaataaataagaatacattgagaatgagaatctataatgaaataaattttaatatatatatatttatattaaaatgatatttcttccccttagttttaaatgaagtagtttttttacttttttgataattgagtagttttttttttttacttaaatagtggaaaagtcgttcggaatgacatttgaatacattagtgatatgtttgttttaaagagaatgaaaatttgttgtagtatttattcttatttatttatttactgaactttgtaataacagaaattggtgactttcatttacatcaaggaaaaaaataaactaaatgaaagactccccttatttgtgagctctctgctagggcttgatcggagttttcattttccctcggcaacgaagggactctggttaatcggactgtgtggaatcacctgcc

SEQ ID NO: 269294 - DNA, 658 bp, Cannabis indica
gtctcctgtcttaattaagaggatgatacttaccctcaaaaatctcttgtgaggatttctcgtaatgatcaatgacatctcctttatttggagtaatttgaagctcctcaatcttggaatcaggcatggcaaaaagatccattcatttggatcgggtctgtgatccgatccgacggatcattactgatccgaaacattcggatagttattggatcttggatcagatccgacccgccccgcctaatttttttacgttaatacagatccgatccgttttaaacttaatattttttaaaaaaaaacattttaactttttaatatatctttttttaaaaaaaggaaatttgaatccttgaattgatcactttatctgctatatatctaatacttgcttatatatatattcatcatttcatttgtctaacctgaataatgcaacgtcgtacgtgtactaatttatatacctaagtatactaaatgtcatgtgcccttatcttattgatgagtgacgacttgttataattacaagaaacattatcattaaaaataaataataaatagcccgtctccattccaacgaagagattggaccctgcatcgaaagggagacaacccgtaagccggttgttcaaaaaaagaacttcttttaaggtattcc

SEQ ID NO: 269295 - DNA, 1072 bp, Cannabis indica
gactagctcaggatcttccaactacacccttcagattctttctaacaaatctgattgaagtgtcaggttgtgtaactttccaactacaaactcaatttcagccttaaccatttctgaagctagttgaggagctatcatcacggtgttgaaaactttcctaagacttcttctacttaaagcatttgccacaacattagctttgggtgatacagaatctcacaattgtaatctttaaccaatttcagccaccgtctttgcctcatttttaaatccttttgagtgaagaagtacttgaggctcttatgatcagtataaaactcgtatttttcaccataaaggtagtgtcgccatatttttagagcaaacactacagcggtaaactctaaattatgcgttcgacagtgttgctcataatccttcaattgacgggaggcatatgctataactctatcagcttgcatcacatcacatcccagaccatgtctggatgcatcacagtaaacaacaaatttttcccgatctgatggcaaagctagaactggtgctgttataaatcgatgtttcaactcctgaaaacttgcctcatacttatctgaccatacgaaccgttgattcttcttagttaactcggttaatagcgtagaaatcttagagaatccttcgacaaaacgtcgataataccctgctaaaccgagaaaacttcttacttccgtcacagattttggcctcggccaatttttcactaattcaatctttcctgagtcaaccatgattccatcttttccgataatatgccctagaaaagacacctctgacaaccagaattcacactttttgaattttgcatacaacttatgatccctgagtcgatgtaacaccaattggagatgttgttcatactcatcttcagtctgagagtacacaaggatgtcgtcgataaacactatcacacagttatcgagtaaatccttaaatactctgttcatgagatccataaaatctgctcgaacatttgtcaatccgaatgacattaccaaaaactcatagtacccatatcttgttcgaaacgcag

SEQ ID NO: 269296 - DNA, 980 bp, Cannabis indica
acatacaatcaagattatattccactgtgctgacaacactataatcatttacaaattcatatgttctggacttattaatagaatttataatcatgaaataaatcatgtgaaccatgcaacataaaatgatttctgaactttactaattagtaaatctgattatattgaaatgggttttatttagggcacaaaacccaacacaatgaacctccaactaagcctgtcataggctttaacaaggtcaattttaattgcaaaataaccctctctgcctttcttccagttgaaagaatgaataatctcttgaatgattacattattatctcgaatattccttcttgggacaaacgccgcttgagtagggcgtataatagaaggaaggataggtttaattctatttgcaactattttggatatgatcttataaataacgttgcatagggaaattggtctgaactgactaggtcatttcggattctggactttagggataagaactacattcgtagtattgttgggaattattttaccaggatcttagatctactcacaagtatgttgtttaacaccctaaatatgaactttctaaaacgataaaataaacacatataaagctaagaaaaccttacattgatgtagcggaattaatgtctccttccactcagatctctaacccttgtatcctttctgtcgcagagtattatcaagatctgagcccgaatgtccttctctttgtgtgtgatccttcacagtcttccaatctatgattgagttaccacttgctgtgtgtgggcacttactctatcactaaggttcgaaatttatgaagaagaaaagagagagaatgatttcggccaaagaagagaaagggaaggctcagtttttctgaagagaaaattttctgacagaaaaggttattcaaagttatgattttgactgagccatcactttctatttataggcaactactaggtttaggt

SEQ ID NO: 269297 - DNA, 729 bp, Cannabis indica
gcctggtcatactgctttttcccgttctccttctcagtttccaagtcgcgacatctcttcgaccttcgcctgtgcgttcttggcctctagctcaacttgctccttggccttgcggagttcctcgagctccttgtccttagaagacgcatcttgcttcagcttcttactgtcttcttgaagctgagcaatatgtttcttcgcgagttcaacctctttgaacccggtagcaaaagccttcgagaacatggccatgaactgcgaagctagctccgcggagcgaggcagcagctcctcagtaggagtcttgtcaaccttcgactggaactcatcgctgacaaatctctcctgaaggtacagcacatggcgagctcgaaccgctgggtcgatcacaactttcttccctttctcttgaatgcccttagcaggcctcttggaagaatctgcgacaggagtaaccaccacatcgcttttcctcttctgggaggtgataggggaagtcgctgctgtcccaggcttcagcttgcggttgagaataggagcggacttcaagaaagtcatttctgcagttacaaaagaaagaaaaaagggttaatactaataaggatgaaattctaacgccctagtttatgtatgcgataaactacctgatgatggtcgaggagtttgcttggaaagacgtttatcaattcgctcttgttgcttttcagaaggttccttatacaccggctc

SEQ ID NO: 269298 - DNA, 1024 bp, Cannabis indica
cagactagggaataggaaatccttcgtgataacgagagagatcttgagactcaacctaagacaggtgggttgccaacgagacaccgtcaacgtccttctcgcactaatagggaaggggcacatacaaatcccaatagagggcatgtatcaacccgttcccaaaggagaaagtcgatacgtgatgaggcaagttctagctctggacgtacaataactcatagttgatcgacgcaaggaggggatagaactcgtcgcagtactgatcgagagagtacgggcacagctagaactgaaagttactcaaggacgaggtttgtaagtaactatgatccacaagggctagatcttcgtaatcaattgaattaaaagaagcctaatttacgccaacaactcgaccgaaagtaagaggatcctatccaattgcgaattaacgagttggaggacaagttcaggagataccaaggtggggaattgggaaaactgcctggttacgactcagacgaggagctcgagccatttgacctagacattatgagagctgaattcccccagggatttaaaaacccccatgtcacgtcatacaatgggactatggatctggtcgctcacctcaacaattttagcacgataatgcaagccagcaacgtaacgaataacttacagtgtattttattccctacctcattagttggggtagcgagcagctggttcaacaaatttacccatcattcaatcacctcttaggaaccgttgtctaaggacttcaagaaacaaatccaagcaacaagagacaggcaacctgaagcatcttctcttactaacataaagcagtagccggacgagacacttaaggcctacttgagtcgtttcagtacagctgctccaagggttagaaatttgaacgaaaatatcaagcttactgcccttcaagcagggatcacaactgatctcttaactgttggaggcgagctatgggatgacttgcagggtcgcctagtgaaaaacatcagcgagttcaatgaga

SEQ ID NO: 269299 - DNA, 1517 bp, Cannabis indica
tatatttttcttctactttgttacataaatgtttatttaattaaggttgtcaccgtaaaattatggtgaaaataaaccttattaattaagctcaaaaccatattggtttagtgtagtccaaaatcacttaagctagcttttgtgtttatatttgttcatctttgttttgatgatagtttgtgttatacccgtattttaagcaacaaataaatgaatttatttatgctacacgtatataaatgaaaggtattaaataatctccttacaataagaagacatacaaaggccttctcgataaccgttaagcacgtcaaagttatcaacaagacgtatataatattaataacaagatcttctcccaagtctatacggggcttgccaatagcaagctcacccatttttggtcccgtctctccagcatagtatcgatgacgcgattcggttgttgttcctgagagttgttaacgctgatttttgttaattatatttgagcctaaatagtgatagaatcgcacataaaataaaagtagtaaaagaaatgtatgaacacaaaggtttttgcgtgattttacagttaaaattctgcatagtccacgaatcactctattagatttctgatacagctctcaggccttttttctaataattttatcgtccctttttcagtgtaacttgcctctatttataattacatagtaagacagttaattacatagttgcactgatatcttacaacaattatcccctgaaatcgtggggtttgattacatagcacgtaaaataaatgtggttaatacttgaaaatcacacagctgtgataggttcgcttttaccgggtcaatgtaaacatgtattaaatatgttgtaaaccttaacattctgggatgtctcacagggaacacagtaacaatagccttagtagcgagctggaactttttccatgtctttctaaagttgatgatataagcctcgtcgttcctgcgcttgaagacataatgctccatctgaaaatcgcagttttgggcgacaaggtggacctcaccagtcaacatcatttgtatgtcaggttctatctaagagacctcactcgacggagctgtgaaccccattgaaaggtgtctggagctgattaataaaggtacgacgggcgcgtcttcctatagcaagatgggtgcctcgctattagctgtttggttttatctgattgtcatacttagtctgtataaggtgtattatacactaagtgtcttaccagtcaccatgtatcgtctcctaatgcgtagcgaggttgatgtctcgccttatacatctgaagtcgtatgatttctcgttaacgtacgaggcaacaattggtgtatctttatcttgcataagacttttcagtctgcaagttgtaaatatactctaccaattccgcataaatgagttatttcattttcaaatataattaccgttacattcattgattcgtattcctcctattttgacacgtgtcctcctttgaaatgatagccgaa

SEQ ID NO: 269300 - DNA, 633 bp, Cannabis indica
aaatcaccaagaaagtgatcaccaagaaagtaccactttcttggtgatttttctgggtactttcttggtaatttttttcggcaacaatgctaattctgatgacttttttgataccggcaactacttcgatgactattctgacaccaacagcagcaaactttggaaaagtcgtcagaattggcatagtagccgaaaaaattaccaagaaacttcttgatgaagaaaccagtttctagtttcttgatgaagaaactagtttcttgatgaagaaactagtttcttggtgatttttgtgacaataataccagttccgacgactattttggcaccggcaacaactccgacgacttttctgacaccgacagctactctgatgacttttccggtaccgacaacaaacttcaaaaaagttgtcagaattgacattgccgccgaaaaaatcaccaagaaaccagtttcttgatgaagaaactaatttcttggtaatttttttggtgcaagaccaattcctgtaacttttttggcgcagcaactccgacgattttcttggtgccgacagctactccggcgacttttctagtgccggcagcaaactccggtgccttttccggtaccggtgacaactccgacgat

SEQ ID NO: 269301 - DNA, 568 bp, Cannabis indica
gaacaactgctcggcgaattacaggctcctaaatcacatcaatcacagcactggtaagtgacacactaaatcactttccggggacttaaacttgaaactaaaagtttccctattgataaataacatagcaatactctaaacatctcaaaaatgggaaaaactaggcttcccaaaattgccccaactggtagactggttcccaaccagaattctggttctgtggggtttcctgggagccaactagaatttcagttcctgttggcccctctgaaccggaattccggttcagtgcaggaatgaccaaaaaccttcccaaacgcacaattcgatcccaaactctccacaaacttgcaaaccacctaaaaacatcctagtaaagagatcccatgcaatacaaacaataaataacctctgaaacttaaaacaccattgaagaccaaagtttgagttctaaaactcaaaccttgtctaaacttcaaaccaaaccatcaactaacttcaaatcaactcaaataaccataataaaattatatactagaatacataaaccagcagctttacaaattca

SEQ ID NO: 269302 - DNA, 719 bp, Cannabis indica
aatgatctcttggtatgtataatatgtggtattataatctgctatcattttttcatgattttccttatctagtagcttttcttgctgagtcattgtgactcacgggtgcttcatggtgcaggtaagaagattagcagttctgttcggccatgggtcagaggtctcccagcagtgtacatatcaaccgtgttgtcttggctttgaaacaggatcaacccttttatatgatcggatgtataatctattcttgtactaatggatttgtaattagtaataaaagaattttattggcaggggatccccatattacgacagtatttaaaatgaaagtgtttatgttgaatttaatagaaaccacactttttcaaaatgtatagattagtaataataagtttgtaaaagcacacacgtggcgtccctgagagttagggcattacattattgttttgtgcttttgtcgcgttagattgatttgggcaccatgaactgcatacttttttgaaactttcatttaaaaatttctggagtggatcaatttttgacaaaagtgttggcaaatctttatttgcatccaaaatccttctggtttttggtttgatgttaatttctgtcatctttcttcatgtgtttttcctgacttcctatctagagcgagtaccccctgggagttctcgtttttggatagttagtctagttaagactctacaagcagtttatgg

SEQ ID NO: 269303 - DNA, 622 bp, Cannabis indica
agagagagagagattaaactcacagtagttcttctctgctcagcagcaacagcaagagcaaaagcaatcaaatcaaaaatgaagaccaaaaccagtaccagagtggaagccatgacttcaaagcttcaaaagctctcacctttttctgacccaccaactcaaaaagtcaacaaaaccttaacaagtgtctaataattgatactatgtatatatataatattgaaagacagaagctttaaccaacaaaatcctagaatagagagtaaaggtttggtttttgtggcacacaatatgagtttttatgccttgaaaatcataaagttatgtatctttttttgattctttcgtttcaatttcttcttcatttgttgaagagttttattgttgtacgatatcaatacgcggttgttatgaacaagtgttctttatttgtatgacaattttttttttatttttattttaaatacaataatttacggtataaatatatatttaaatttaattttaatgctaataatatttaagttataattttaaaatttttaattcgtttgagttattaatttttttagaaaaattaatttaaatatatatcaataaaaaaataacacataaataatga

SEQ ID NO: 269304 - DNA, 454 bp, Cannabis indica
tttcatatagtattatatataaatatgatatataatctaattcaatataattcaatacaatacaataccacctaatacgacgttccaaacgagcccttagtgacattatttagtgactcatacttttgtgcatgtcactaaagaactaggattgatttttagtgacacgcacaattagactctaaacttttcagtattagtcttttataatgtgtgtcactaaaaatatgagggaccagtaatgagtaatacccataattaaaaaatattaatctatagtgacacgccaagcgcgtgtacgtaaacgcgtcactatatcattttacttttttcaactttaattaatatttttcagattttttttaaattatacataaatataattagtatattttatttattaaataaataaataacatatttctataaaaaaaaacctattcatatctctttc

SEQ ID NO: 269305 - DNA, 833 bp, Cannabis indica
caagtcgtgtcttgtgttgggtcaaatgaaaaatatttggctgtctatctcaaaatatgagatgagagtagatagacgtacatgtgtatgaggtgtaagaaaatagacatttatatgcatatatattgtagggagatggatatatatatatgaatgagaggaggtagacagacataatatataggcatgtatgtagataatgggaggagatagacatgtatataaataatggaaggaggtagacagacataatatataggcatgtatgtagataatgggaggagatagacatgtatataaataatagaaggaggtagacagacataatatataggcatgtatgtagataatgggaggagatagacatgtatataaataatagaaggaggtagacagacataatatataggcatgtatgtagataatgggaggagatagacatgtatataaataatagaaggaggtagacagacatacattaagtgttgtgaggagatggacatatgcgtatatgacaagtagtgtaatatatatattttttaacttactgatgtgtgcttggcattaaagccaactgtaataggttgtatatatcgatagaagggagggctggcgtagagaatgggttggcgtatgactttgtgtcataggagcttttatatatatatatatatatatatatgtcttggtcaatacatcatcacataaaaagggttgatgtggaccaatatgcaagtaatatgtatatatataaaggtgatggctacaactctcctgggcgtatggcatgcacgtttgtgtgtcgtaggagcatatatatgtatatatatatg

SEQ ID NO: 269306 - DNA, 581 bp, Cannabis indica
agaaagaagtgcagcaagagctaaagcagaagaagtcaaggctaacaacgttaatggcgtaacaatggaggcaacaacgaaaataatgggggtgcagtagaagaccaagttgcaaagagacattaataatttttctcaactggacaatgaatctctctatgaggcttgggagaagttcaaagatctcattggaaaattttgacatcatgggatcgaaaagtggatgttggttcacaatttttacaatgggctaattggtcatactagaacaattatagatgtcgtagcttgtggggcatttatgagaaaaagtgcaaacgtggcttaaaagttgcttgtaaaaatggctatgaacaacaaacaatgggcaactgaaagaagccaaacaaagaaggttggtggtatgcatgagatagacgccatcgccaagttgacagtcgaagtagaggccctaacaaagctgatggttgctctggtaaaataggctcaagttactgtgaacaatgtgggggccctcacacatatgacacataccccgtggatgtgaacaatttgcccatggaacaagctaaagccattgg

SEQ ID NO: 269307 - DNA, 593 bp, Cannabis indica
atacttaaagccgtaacactggtaacccatgtgaaaaaggaaaagaaaaaaagaaagagcttaaaaagtaattgataaagcctattgccctaactactataagtctatatataaataaggtacatcaatttacttccttttttttttccttttttctcttttataaacaacaactatctcacctacaccactctcacttagacactttgtatagatttattaaaaattaatttaagagagacacagagccttcatgtttattaaaaattttaaaaaaatatattgtaatatgtgtttttgaacacagaaattaattaagaggttgtaatagaaagttaacagtaacaatcctttattattttttctattgcaagtatcgtgagttagggagggctgtatggtcccaaaattattttttatttttgaaaaatataaatattttttagaaatttttaaaaatactacgtatttctttctatgagggctaataatattgtttttttttgttcctagagttcacaaattttcaaaaccggctctaccttttacttaataattaatgatattttatagtattcatgatggcaaattat

SEQ ID NO: 269308 - DNA, 630 bp, Cannabis indica
caattatatatcacactaacatatttttaaaaacgttaattctaaactaatttaatccctactaccccattctcattcacaacaaatacatatacaatacaattacacaaaatacacaaatagtatatacacaatatatacacacacaatatatgtaaacacatattcaataataaaatacaaaatatatacatatatattatataccaagttaacaaatatttaccttataaatgaaatctgacgataaattgcgacaaaaatccgcccacctatagcacacacacaatataatatttaaaaaaaataaaaaaaaaaatacccaaaaaaaaatttaacaaaaaatgaaataatacaaatgtacattaataaaatgaatagaaagcatatttataccttaatggttgttgggattcaacgttttctgcgctaaaatcggtggccagagttataacaccaccttttttttttaaaataggtttgggtaaattgcaaatgggtggaaaaacaaaactttttaagtgtatgggattagatattgaaaatagaaaattttaagacaaaaatgggatgaaatggtgaagaaatgagggagatagggtgggattttagtggtggttggcgagggtt

SEQ ID NO: 269309 - DNA, 1170 bp, Cannabis indica
gaatgaggacacgagatagccccaaactagagaacaaaaaatccctcgtaataatgagagaaatcctgggactcaacctaggacaagtggggtgccgctgagacaccttcaacgtctttctcgatcagagagggaaggtgtacacacgtatctaaatagaggatgtgtatctaacctcttctaaaggagaaggctagtacaagacgaggcaagttctcgttcgggacactcaaggtctcgaggacacagtcaatcaagaaggcaaacgcgagaaggaagtagatctcggtgttatgctgatcaagaaagcatgagcaatacgcaaagctatcaatctgagagttattcagagacaacatctatgagcaattatgagtaaagacaactttatcttcgcgaacatttgaatataagacaacccgatcttcgcaagcaattgaatcaaaatgcacctgacttaagaatcattgagttggagggtaagtttagaaaatatcaggatggggaacatgggaaattacctggatatgactcggatgaagaaactgagccatttcatcctgatattctaaattctgaattccctcggggattcaaaaatccacacttctcgcagtatgatgggactatggatctagtcgctcacctaaataactttcataccataatgtgagctagcaatgtctcgaataatttgcaaagtattttattcccaacgtccttgactggggcagcgagtagctggttcgacaagtttaatcaccatttgataacatcttgggaacagctatccaaggattttaagaaacaatttcaagctgccagagatagacgacctaaagcatcatccctgactaacataaagtagcaaccaggtgagtcacttaaggcttacctgagccgcttcacgacaaccgctgcaaaggttagaaatttgaatgacagtattcatcttactgctcttcaagcagggatcacaacctacctttcaacagctgggggcaagttgtgggatgacttacagggtcgtccaataagaaacattaatgaattcaacaaaagagcgcaagtgtttatgcgtaaagaggaagcaaggaatgagatgaagttgctgaagactggctcagaaaacaaacccaacacaagtactaccacaacaagtatcgtctt

SEQ ID NO: 269310 - DNA, 653 bp, Cannabis indica
ccaattctcttccggatacccgtttccacttgctccctgtttgtgctttttatctttggcgttgtttccacaccattccagcacaggaagaatgaaaaatggaggttaaattggattctccaacacacatattcaagtgttgataattattaatgttaggatttataggtattgtacctgattgtgtgttgttgctatagattatcttcgctctttcgttggtttgtatctccattatggaagtcgattggagatttttgtcttctatgccctctaaatggggattatttattgtctcttctctttacatggtttccactcttcctttgttatccaccttaagccaagaaccataagccatagtgatttgcccatcttctttagtcacagtaatcggattaatcgcacattgacgcatctcatggccaatcagtccgcacctgaagcgcatatatggtaggcgatcatactggaattgtagccacctccttcttccttcatgtgggaatagataccctgggaaaatcttggattgaatgaaactccgcactttgaatttaaagaatccgttcacagcaatacgatttgttgggttttatgccctaaataaaactccatttcaatgtaatctattttattcaacatcaataaag

SEQ ID NO: 269311 - DNA, 1146 bp, Cannabis indica
tttttttgcattatatttttttagtatgatgttgatgaaattgatttctttttctactgattttagtgaaataattagtttatttcaatattaatgaaactggttttaaaagttggtatcatttttacattattattttttttatatgaaatttattttagtttgtgattctcccaaaaatatttaccccatattaaatgctcaaatcaactatcattttttattaagcaaataagagattaaatgtcaaaatagagtatgaagttagaaatttggtattaggtattcatataaatttatatgttggaaactgattttatacttgatgtcatcttttagattatattttttgcattgtattttttttcattatgttgttgacgaaacttgttttagtttctaatttcctttgttatctttaccccattttgtatgcttaaatcaattctgattttttagaaagtaaaggaaagattgaatgctaatataaagaatgaagttagaagtttgaatactagatattcatataaaatttatatgttcgaaattagtttttaaagtttgtatcgttttcatattataattttttgcattatattttttttcattaggttgttgataaaattagtttttttttcggttgctttaatgaaataaatagtttactcaacgatgaaaaatagaaggaaaaactatttttaataaccattttctaagctgaaataataatatcattggatctaacaataaaataatatttttgaaattttttgtttgtaatgaaaatatgaaatcatcagtctcgtacacttattcatttaatagttcacaaggttcacaggtttgtaactagtattacagggttcacactatccacgggttttaaactggtttaagaggttttaagggttttgaaattgggttcacatgtcttaagggttttgtgatggggttactctattttatgatgttattatatatttgattttaagtatcttctttattattttttttctaggttcaaaactagttttcacacttaaattttgtttttagaatattgttgtgcattttataatgttctaattatatttgtaagggcttttttttttgtatttttgtattttagtgtgtgtgtgtgtgtgt

SEQ ID NO: 269312 - DNA, 595 bp, Cannabis indica
gacttggaatcgtaactaaaattggacttagaaccataaccttaaccggaagagtacccagactccaaatccgacctagacccgaattgggagccggacccggatcccaacccaaatatggacacgggactcaaaattgaacctgaactcagacccaaaccaggaacaagactagggacacagaaccagggtcgggaactagaaccgcaccccagtctcgatctcgaacccaaactcaaaaatgggacctggagcctgaacctgaaccagaccgagacccgtgagagtgatccagatcttgactcgggattcgggtaacggggcctggaatagaccagtattcggtgtcttaatctgggactcagactacgaccagaacccagacgaagaaccaaacccaaaccaagacctagacctggaacccaaattagaacctgaactagaatcgtcgaaccatgattctagaacaagactaggaccatgaccaagcctcggaccctaactgagactggaactcggacccaaactgagactggaactcggacccaaactgagactggaactcgggcccgaacacggtagtctggttccatgt

SEQ ID NO: 269313 - DNA, 992 bp, Cannabis indica
atattatatatttattatatatgattcatatacaaaagaattcatattcacaagtgatcattagtaataaaatcaatgatattttatgattaaaagatgaaaatagtatttgtgggattaatattattattatgaatatttttataataattaattaaaatgtgattttaaagattaattaaaaatctgaagacatttagtaatttttttaataaagagaattttgtgagattagttataatttttgttgttaaagatattttttatatgagtaattaatttaaaaagttaaataagagaggaaaaaaaggacaaaatagaaagagtgaattaaaagttgattaatttatattgattcttctgtaagttatctccaaaaatcactcaacgaataataaaaaaaattagatcatcaataaatatataaaagcaaaatttattgtatattattattgtaaacctaaatattgcggaagggaattaaaactaaatatgataaatctctaaaattgatttataagcattaaattaatcatcacgtgtatatagaatttttggatgaagaaaataatatatatgtgtagactattaccttttacaacccatattaatttataagcacctaaaataagtaagaattatagaaaacaatatatatgtgtagactattactttctataagaactatggttttgtgtttgtcaaattatgagttttttgccatctagacagtcagtagttccatatgagtttgtcttttactggtttatgggtaaactttgacagatcgactttttcatgttaaaatatcttggacagctgttaatgagttgttagtgaactgtcaaagtctcttttgtgtgagttggtgttatacatagttgattcttgaatattctaaccaactcccactcattttgattctttgattgaggtttttcttgttaggttttatgccttaaataaaactctttacaatctgattagttatc

SEQ ID NO: 269314 - DNA, 632 bp, Cannabis indica
ggttaattttgaaattttagattattttatttatttaaattataagatcagatattactattttttttattaaaatttgaatgatcttattttgatattaaaatataatttttttttaaataatcttatttaatttctcaaaatttgctaaccatatcattattttttttttcaaatttgttatttttaaatttattttattaattaaaattataatatttgataaaattaaaattaagttttgcaaaaataaaatgaaatttgaaaaattggttagtttaggtttgaatagaaattttagggtttctaaccataaaatttttcaaacttattttattttttataatacaattggtaatatcctaactataaaatatcttacttttcaaattgtttattttgtaatatttaatttattaaataataagattaagaatataatattaggaatatctagtttttaaaatttgagatattatattatattatcttattagaaatttaattaatttaaattttgaataaacttgaaattttaaaattggttagagatttgagtttaagttagaatttaggatatttaggagagttgttgggtttttgaattttttcaaatattctctaacaaccta

SEQ ID NO: 269315 - DNA, 498 bp, Cannabis indica
aaatctttatatggattgaaacaaagtccttgtgcttggtttggtaaatttagtcaggctgttgagaaatttggtttgttgaaaagtaagtcagatcattctgtattctataaaagatcaactgctagcatcattttgttagtactatatgttgatgacatcgttattactggaaatgatactgaaggcatctcatcccttaagtctttcattcatacccaatttcacatgaaggatttaggggagctcaagtaattcttgggtattgaagttactcggagtaaacaaggtatttttctgtctcaaaggaagtatgtacttgatttgttaactgagacaggaaaattgggagaaaaacctcgtaatgctccaatgaatacagctgtgcatcttacacgtgatgggaaaccatttgaagatcctgagaaatatcacagattggttggaaagttgaattatctaagcgtgactcgtcttgcattcccagttagtgtcatt

SEQ ID NO: 269316 - DNA, 651 bp, Cannabis indica
tttatatactaaatatatatattacgtgtcaagctacttatgcttaaaattattttaaaatatatataattaaatgtcacatgtaattttataataaataatatttaatttagattaattttatataatattattaacgcagatttttgttaactaaaattaaatagcatttaaataataagaattctacaaaaattaataaataataaaatatatataataactctagttatttttatgtagttttgcagttaaaatctacatactacacgagttcttattagggatatttttaaagtacagagtacaatatctgatattgaataataatgattctatctcaaatttttcgtccatcttttcatgaaatctgcccctatttataggagtataggttggcagttattctttttgggatagatttaaatataagtattgtaaataagacgtggacaatccccacgttttatttaaatcacgcgtgagataatactaaataattacccaaccgttctttagttttatcctttaaatggttattattgatgtggaaggttacatcttctctaattcgagctatctttcttgtccacattttgataagaaaaaacactaagtgttggaaagatttccatctcgctatgtcctctt

SEQ ID NO: 269317 - DNA, 546 bp, Cannabis indica
agagaaaagagagagattggatttgagttttgtaagaagaatcttctatagatgaagaagattcttgagtaagagtttgagagttgaaacactttgagagaactcaatagagaatccttcccgactctattgtacatgttcttgctcaatcaataaagaagatttggtggtgttccaaaactggagtagagctatagatcacatcgatctatcggacttgaaccaatatatatcttggtgttgatttttttttttttgacttttatagtttctggttttccatactctttttctgtaattactatctgcgtttgttaaattttgtcattgctaattatttaattgtttaaagttttgttgatttgattctgcactgttagccgtaattttcctaccgttacaatatattaatatattaatatgtaatactacaaaaaattatatacttagtttaattactatataatttttttttttaaaaaaaaattataaggtagtaaatgtaattttatattatttattagttaatttatttatatttgtacc

SEQ ID NO: 269318 - DNA, 953 bp, Cannabis indica
agttgttcattttaaggttaaattcgaatttgctaccgccaccggtagatgggcactgaaagttatcgttggaggcccacacattcctggacattcgggcaaagctcgggagaggtatgcccgaacagcacagtacgagcaagaagaagttatcctggctgtggaagaaaggaagtccaaaatgttagaatatgttttaccaggatctagatttactgacaagtatgtttcattaacatcctaatatgactttctaaaacaatgaaattaaacacatataaagttttagaaaaccttacattgggtgtagcagaataatatgtctccttccgctgagatctctaacccttgtatctgtcccagagtatcacatagatctgagcccgaatgtccttctcttcagtttggattcttcacaatcttgcagacaatgattaagataccacttgatgtgtgtgggcactcactctatcactcaagatttcgaaaaattgaagaagaaaagagggagagagaggttcggctatagaaaataggataggaggctcaatttttctgaaggcaaaaattcatctgattttcattcacttcacacttttttaagtgtgagccatcactatctatttataggtaaccactaggtttagattaggaattacttggcattaaaataatgaaaatattaatttgaaaaagcctcataagtggccggccatagagtaataggccccacttggtgttttccaattttgacaattttcacttctattttctcaaaaatgtcaattttccaattctaaccttttaaatgtgaaaactaattatttaataacttaaattaattattaaataatattttcaattaatatatttattaattagacataataaagtcttccaattaataaataaaacttagaatctcttttcttcacaatttcgccattgcttag

SEQ ID NO: 269319 - DNA, 873 bp, Cannabis indica
gttatggaggtttatgggtttttatttttggtattttaaagagagagaaaatgagaaatatagatagagagtgagggggacgagatgatctgtatatattcaaaattaatttttttttaacatacatatatattattatttaattaatattttatatatatttatacatttgactcggtcaaaaatcgagtctttacaaggacaattgggtcaagtaaaaaattcattaaaccccaattataacttctcgtaaaagataaaattccaaagctaggtgggccaactttttctaaaagctataaattttatttaaatttttcaaaaagctatttttcaaaatttaccaaacacatattaactcataactttttccaaaagtaatgttagttttttaaaaagctccccaaaacggggcctgcatcttcgtcattagatccaaaactcaaagatgatcttcccattgcactacgtaaaggtaaatgcgaatgtacttttcctatttcttcttttgtttcttataatcatctctcatcttcttcttgcttttttattgcttctcttgattccgacactattcctaaaactgctcgtgaaacaatgtttcatcctggttggcttgctgcaatgatagaagagatgaatgctttagttgcaaatggtacttgggttttggttaatttacctccaaggaaacgggccatagggtgcaaatgggtgtttacggttaaattcaatcaagatggaacaatttctcgcttaaaggcctgtcttgttgccaagggttatgctcaaacttatggagtggactattgtgatactttttctcctgttgctaaactcgcatctattcgactgttcatttccatggcagct

SEQ ID NO: 269320 - DNA, 712 bp, Cannabis indica
aatttctctaaggaaagctgagatgtcaatgagatactcctcgagtttaaacctcgtctgagctaaactcagcgagatgatgcgaatatgaccaagtctaatcgcatcatctcgaggctcgcactatgtgggaccaaggaacggactcaactcgcatataccacgatatatgcgagtatcctctcaatcctcccgcgaaaacatagatcgattctctataaagcgagttggtccgaataacccaacaacctcgataaaccaatatagactcgcatgtctaggttctattagctcgttatacgatgtccgtaagtgcgactatacaagaacataaacatcttagactcaaccaagtgttaggtgtattctaagcccacgagcttacacaagaatatgaacaaccaactcacacattggaagtcgcatatattgctgtatttagtgaatagaaactgtccttcatttattaatgtttacgtttttagtcttaattattgtaaatcaatgtatgaacggattggcaatgaatgcaatccttgtaaataatcggacacttgctttgtatatagaggagtgatcccccgtgaaaatggacctacgaaatccttgcaataatggactaagcagaccgtgatctgacagaaccactatatccctttatcttctttatatttccagttttcatcaagcatttacgatcccagttcgagta

SEQ ID NO: 269321 - DNA, 502 bp, Cannabis indica
ccgattcagttagtctttgaagtgatgaagagaacggtgggaacgaaacaatttcgtttcgaaaacatgtggcttcgtgaacccgcctgtttgcagttggtgaaggatacttgggagattctttcggggtcctctgttctggataaaattctttattgtggggagaagctttcggtttggggaagagattactcaggaaattttaaagaactaatacaagcttgcaagactgagttacgccgttggaagagaggaagggatgcaagctcagttgataactataaaaaggctgaggctcggcttcaagaagtcttggttcaaaaggaggtgttttggccccaaagatcaaaacagctgtggttaaaggagggagatcagaattccaagtatttccatgctttggccacttctaggaagaggaataactcaatacaaagactgaaaaatgacaatggtatttggattgattgggaaaataattggctaatcttatggttgatta

SEQ ID NO: 269322 - DNA, 872 bp, Cannabis indica
tgttcttatatatggctcaattctctaccatttattccatgtgggacattgtccacaataaacacagcacataagcataaatttattaacctcaaaatacgatcaaaaccttataatttaatgacaataataaatatgtatttattaaatataaataaattgataaataataaaactcaaatgtaatacatatcatattaatttattagtaaatattaaaattcaaataatttttttttatagttttttgtgaatttgttgtaaaattatataaaaataattgaaattaaaaaataaatataatttaataattaataaattcaaaaaaaaaaatgaaaaagtgacaacacaaattcaagcatgtataagaaaatagattaatctgattaagaaaatcgaagagatctaagtaaaatatcgtgcgaaaatatcgtgcttatagaatgtgtgacgcctatcctttcaaaatattagtacgatacatcatgactcatattattttatggcatgatatgcacgatttatattttgaaaggtatggaataatataagtcaggttagctcaagcatgtcgaacgattatgtattattgtactttattcattttgtttttgtatgactctcatgaagattcgtttatatagaaaatattactttgacttaaaatatataagtggtacttggtaacacttttatttttaaagttttaatcataaaattaaaagtaaaatttttgtttctaaaattttgtttgggaaaaataaaaatgtgttctataactactttcatttttcaattataaaaataaaaaataaaagtgtgttttgtaaattttatttttatttctatatatgttgattttatttaagtca

SEQ ID NO: 269323 - DNA, 621 bp, Cannabis indica
aaattatttttatactatcttacatacatccaaatataattttttagtgcacattggatgctagagatcattacgctaggggaaattattcatttagaccctatacgtgtccacaaagttccccaacaaattattgaaatgttagaaatgtaataatttaattactctttatgtaacaaattttttaatgaactaatgaattgaaatgttaatataatttttaaacagagcataccagattataggggcatcaaatgcgtatcttaggccgtggccaggaatttcactagcaaattgtccaagaaaacctgaaaaccaagaatgtagtttctatgttttgaaatatatgacttacatcgtcgcacgtgcaaagccaaaccattatatacaagatcaaaaagttgtaagttttaattattagttattgtaatgaccgctatagtattgggattagtaaaggcaattaacactaatttctaacatttttataactatttttgagtttatttatttgtgggccccattattagaaatgagcactagagttctaattgctcaattccggagattttactaaaatctaggggtattttattaattatatatgaaatatgctatttt

SEQ ID NO: 269324 - DNA, 511 bp, Cannabis indica
gattttgatgtcgtttcgactgctttttttcacaataacaaagatccataaagtcaaagaagtcaaattcacaactttacatttctcattttcgactcactcaaaaatgaagagtttcaagtctctcatttttacagaacaacaacattttcgtgaactggtaaccagcttcgccagaacacaaaaactgactaagtgatgtcaaaatatcacttaagcatcttaaagtacatccctttgacgtttttacaattacccaacatccaagttgacgtaagatgtcaatctgggcgatgggatgcatgggcacaagatatgtaaacctcagcgttaaggtcatgaactgtcttcagtaaacagtcataactcagtgaatattgattcgattgatgcgattcaacttgcatttcaaagctaattcaatgctctatcaagtcatgtgccacacttcaatcgcaattctgaagctgtcatcatcaaatttcacaccaagggagttacgaaaataagc

SEQ ID NO: 269325 - DNA, 536 bp, Cannabis indica
aggtgagcctgtgccaaaaacctgtgcccatatatgatataactacatcaccaaattaggtgagcccgtaccataatctagcaccgatatattgcatcgtctaatcaaacaagcctgtacctatgccagttacttattatatgtcactgacgcccatacttatgcctagtacatcaccaagaaaatcgcatcacctaatcaggcaagcccgtacctacgctcaatactcatcatatatcactgacgctcgtacttacgcctagtacaacgccagaaaaatcgcatcacctaatcaggtgagcccatatatcacatgtataatattattatattatcaatactcaaccaatcactctattcattatataaaaatattaactatatctcaatattaatcaattcagaacaatactaattgtattacatacaacatactatatagtactatatacttttcaacctttaatctaggttcatacatgtcagccaacccaattggagaattattcccgataatctcggccctatgtcacaac

SEQ ID NO: 269326 - DNA, 479 bp, Cannabis indica
gcatgggatactttcacatcattgttcaccaagaagaatgatacgagattgcagcttctggagaacaagcttctctcaattaggcaacgcgacatgacgatcaaccaatactccaccaaggtaaaatctctttgtcgcgaaatctctgcattagactctggtgctggcatgtcacatgctagaattagaagaattattattcatggattaaggcaagaatttagaacctttattgctgcaatacaaggttggccaagccaaccttctcttattgagttagaaaacttgctagctgaccaagaagcgttagctaagcaaacgtctggagtctcattaaagagtgacgaagaagcactctttagtatagataagaaaggacgaccccgaccaaatactagtagaaatactagaaaacatgatgacaaggatagtcatcatgggagctcccaaacagggggagctcagaataaagacaaacg

SEQ ID NO: 269327 - DNA, 632 bp, Cannabis indica
catgcatggaattctaaagaaaaggtttaccgtgaactaaaattaccaggagccaacttgaaataccattgttgtacaactttcgacagagtggcgtggaagattctccagcatacatccccccatactccttgtaaatccattttccaaagtacttgagatgggaaagaggatcttctctcccagtatacatcctccacgttggcattttgaacttgtgaggcagtggcaggagattcatctttggtgagaagggagttctcccagtatacgctgtccagccatgccgtgaaacatatttttcaattcgtcaagctgggcctgtacggctgggctgacctgctctgcattctggtcgacttgggttacgtcagtgtctttctgagcgaggatttgactatgggctccaggctgtacgattgttgtagtattctgctcatctgttccccttcttctgtttagatcgttccttaggtcatgtgttgttcccaacctatcgaactagaagagcctggttgccttagcaattgattcgcttggttgacaggtggaataacgccattattcaggttggaaccgtcatgtatggctcctcctgatgaattcccagacaaggtctgcacgcctacctc

SEQ ID NO: 269328 - DNA, 567 bp, Cannabis indica
tttaaataaagtgcacacacgtggcgtccctgttggacagggcgttacaattaagctctaaaattaataactttggctctagataccaattattgaaaaatatttatgcaagagcattgtattcactacaatcgaatagtaatccaataatgctcataaaactatccaagatccaagcatttatttagagcattaatagttaagaaaacatacctctcatattgctcatccaatcatattgacccattgttgaatatccaagtccaaacacactaacaatgctatagagtgaagagtagtaaagagacaattgtggagaaaactcacttagtgtctaaccattcaattaacacactcactatccatccttaatatatatatatatatatcaaatacccatctaactctaaagagttatgtaacttattgggttaataaagattaattgatggtggactataactcaatgggccaattatagtcatatgggtgctttcatgtgcctctaaataatttatagttattaaccatcccattatggttgtatgagatatattaggcacataa

SEQ ID NO: 269329 - DNA, 962 bp, Cannabis indica
acccagctaaacccaaaaaacttctgacctcagtagctgatttcggtgctggccaatcccgaacagcttcaattttggccggatccaccataatcccatctttatccactatgtaccccaaaaatgagacacgagataaccagaattcacactttttgaatttaggatagagcttgtgatcccgtaacctttgcaaaaccgctctgagatgcaactcatgctcttcttctaactcagagtacaccaaaatgtcgtcaataaatacaatcacacacctatccaggtagtctttaaacacccgattcatcaaatccatgaatgccgccggggcattagtgagtccaaatgacatcacaagaaattcacagtgtccataccgagtacggaacgcagatttcgggatatcttcctctcgaattctcagctgatgatagcctgagcgaagatcgatcttggaaaagatcgtcttccccttcagttgatcaaacagatcatctattcgaggtaaaggatacttgttcttgatggtgagcttgttcaactcccggtagtcaatacacattcgcagggttccatctttcttcttcacaaacaaaaccggagcaccccaaggtgagtagctcggtctgatgaatcccagattcagaaactcttgcaattgtatcttcaattccttcaactcagctggagccattcggtacggtgccttagatactggatccactcccggaaccaattcaataacaaattcaatttcccaggtaggtggcaatcccggcaaatcttctggaaagacatcaaggaactcgcataccaatctcgtattctcaggccctgatgtcacaggttggctggtatccaatgtagtgactatgaagcccagacaaccttagctcatcagatccttagctttcaacagtgttattcttggtatgcgtgcccctgaatcttacccacgaaca

SEQ ID NO: 269330 - DNA, 943 bp, Cannabis indica
cttgatcgtgtcaacttcaacagaagtattctattgagaataggtgtgacagactcaactgtactctctacttttacagctgaattagaaacttgtctcgacgctaatcttaacaatcttccggattgtaagtatcttattattactgtttatattgctgctgtcagtactcaagaatgagaggaagaagaagaattgataatatataatacaattagggagacacgagatgccaactggcacttcaactgctgttgctgctaaagatattgttgccaaccctaacactgctacttaatttgtcttgattttattatttaattattatttttttgaaatattgttattagttttattagtttagatgatttagatcacattcaaataaaattatttcttagctatgctttgatataattttattattgaactatttaaatattagaaaaaaataataaagtatttaaaggttaaaagagatgtttgtgtaggtagctatttatttattgctatggtattcctacatatcagcacaaaagaaatctttattaaaagcactcccagtccactccactcaatacttcaaaataagtcattatatcgtgcatactgcataagcttctattatttatttatggaagattgaaataacttgatcgaagttcaattttgttactttttttttcttataattttaaattgagctagttttatcatcaatatctattgcagcgcactaaaataaataagggaaattttcatgggccaccttattttggcaattattttcaaaaataacggtttttttgtatgttaagtttctgtatatatagttgccgtgtttttttggtaattttttatttttaacgctttctataattggctttgtaatcccgttttaggctgtataacaaaaacgaaaacaacaacacaacataaaaaa

SEQ ID NO: 269331 - DNA, 547 bp, Cannabis indica
tgcaagtcagcttaggacaattaagtatacttaattctgaaagacaagggagataataagacaaggaagtgtgattatcttcatttgcatttgcatcaaaacaagaatggtcaacttcaatctctctccaccatccttttagattaggcaaattcaacaacacaagtgtctctagagatggcagtaatgttgttgttgaacaacctaagtctttactgacatttttactgttggatatgtactctaaacataccaaattctcaagtatcaaatgcttgagacacatggattgatccaatggaacgagatactcacattttgcacagtcattcaaagataactccactaggttagtaagtgatgagagccagcaggagagcttaactcccccataatttgttagccttagcttctgaatattttgatgtggctggagaccttctaatgacatctcataaccaacaatagcctcggtttcatccattttagcttcagaatcccactccattgtcaatgatagaagatattgtttatcctttaattttgc

SEQ ID NO: 269332 - DNA, 1098 bp, Cannabis indica
atggccataaggagaaaccatatgttttaaactttagcaaatcattaataactcttaaacaatccaactcaatgaccaccttaggccatccaatcgctttgccctaagataacgcctccttgatgccaatggcttcgaccacatgaggctgcaaaaagccacttttggaaagaactctcgctgccaacaccaaaccagcagcagtccttgcaacaagacccacaccataacgcccctgagtagtaaagattgcaccatcaacattaactttaacataagggagatcaggagcagtccaatggtcaacactttagacatgcaggccatcaacaggtacatcaataccattatgttgttgagcattaaaccagtctacataattcagtttaaccaatgtcaccacgtcactaggaactggttgcttggagttccaaaccaggtcattatgatgagtctaaattgaccaacaagtcatagcagcctcaatgatttcggctgtgctccaactagccaaaccaagctccaaccaactagagaaaagcatcacaccaagtgcaaccgttggaaccttaagaatattaagttttaaaataaaaagaaataaatataatgcatttgaaccttccacatttaacagaagtggtagtaacgatgtaagagaattgtaacataaatatttttgcctctaaaaataaacattaggtatttaagtgtataaaatctgaaacattaggtatttatgcaacaatttaccatttttttttagaaatgcagtgccctttaattattatgtttgttattataagtgtttgggaaaaattttaatatataaatgggttcttacaaaaaaaaaaaaaaactttttaattcatatttttactgtattatattataaaaaatactgtcttaaaatttaaaattacaaaaataatgtatttttgtaaaacaaaataaaaacaagagtaaatagcggcataagtacccaaagttttgagtttgtaagcggcataaacccaatgattttttttagtggcataagtacccaatgtttgtaaaactgtaattcttctctatttttgtcagtacagactccgtttt

SEQ ID NO: 269333 - DNA, 769 bp, Cannabis indica
ttgtgaaatgacccactatgtatatacatatttttatgtatgaattgaatcatctcacatcagtaataagtgagttacttttattgcgtaaatgcatatataagtcgtacctttaaagtgttatatatgggctatgtaaagttgtcctttggaagatagcatataatctctagctaggcttgtccgccttttttagagatatgttggtatgaaccccatgttgtggtcagagtaagcactatattgaccttaggttggtctgcacatatattgatttaaggatgtcaatccctaattatggttgtaatatataatgaacttgcacaaggttgaagagtcacatcattagtgtagatatgaaaattgcaaaggctcgtctacatatatgtggagtgaccaatatgcaaataaaccactataaggtctgactctaataacgtgttggatgatggtcaaatttttgcaagtgaggaagagtttgtttttgtactttgataaagtgtttgtactcatacatatatacatatttatttcagttgctgtccattgcctaatggtctgtttcaactaaggctgtccattgagattgcttctacttcatgtatatccatgagtgagggtctgccatactattattatagttacaagtattgtatgaacaatagtgaccattccatatatgcatatatttttttttatgttcagtggtgtaacatagtgtgaatgacagtgtaaactaggtaatgtagtgcctcaacttgttgtatct

SEQ ID NO: 269334 - DNA, 747 bp, Cannabis indica
gtttgcttgctaaaaaggtaattatatgggctaaaacaatctcctaggcagtggtacaaaagatttgatgatttcatcaccaaatcagggttcaagaaaagtgcctatgactgttgtgtgtatgtcaaatcatccaatactaagagtactgttttcttactcttatatgtggatgatatgctaatagcaagcaaacacatgagtgagataaggaaagtaaaagacatgttaagctctgaatttgaaatgaaggatctcgggcatgccaagaagattctaggcattgagatacttagagatagacaaggaaaaaggctgatgctatctcagaaggattacatttcaagggtgctgcagaaatttggtttctcagaagtcaaacctgttagcacaccaatgacacacatgacaaaattatctcactcacaagctccaactacagaatctgaacttaactacatgaagaacataccctactccaacctggtgggaagtctgatgtacatcatggtgtgcaccagacctgatttgagccaagcagtaagtgtaatcagcaggtttatgggtaatccaggaattgagcattggaaggcagcaaagtgggtggtaaggtacttgaagggcacatctgacatgggattaatgtatggttcaaactctcaagcatcagaagtcaagggctatgtggattctgactatgcaggtgatatggacactagaagatcacaatctggttgggtgtttcaa

SEQ ID NO: 269335 - DNA, 785 bp, Cannabis indica
attgataggtagatattttagattttaaattagagaataattttttaaaaacaaaataacataagtattggtttctataataaacaaatctatatatattttttagagaaaaaaaaattaaaacttacgtgtgtatatagattgtataattaaattttttatatgtatttttatttagaaaaataataaaataattactcaatatttatatagctaataaataattaaaaaatgagagaattaatgagaaaataaataataaatttttgaattgtaaataaatatttataaatttattaaaaaaataagaaaataaaggatgaaatcaataaatatattttaatgattttactctaataaaaaaattaaaatgttagagaattaagagaaaataattaggagggtttggaggattttagaccgctacgtctccacctcctacttctcctttatatagatatataatggctcatttggaacgtcgtattaggtcgtattgtattgtattgtattatattgaatttgattatatacaatatttttataacttaggtattattaccgccaaaaattaaacttaaatatttatttacaactgagaattaaacttaagtatttatttacaactgagagttaaacttaggtatttatgtcgcaaattactcatatatagatattataacaagtctttgtaatctctcgttgagcagcagtgttgacctcagtaccttttttctttatatttattacactcttactctctcatatcaccaaggtcgctttgg

SEQ ID NO: 269336 - DNA, 679 bp, Cannabis indica
gcggtgtgggattgcacagcttacccggtatttccccttacggatcacgggactactgactgtcacatgtacattgcacgtaatattaacttagtaatttaaaataaaactaagaatgagtgcatggccagcaaagaaatatgtgtttaaatatgaataatgaaacaaaaatgaaatcaaaataaaattgttaatattatattacaaaagtcaagaactaactcaattgactaatgccttatatacaaaacgacatatgtaacgttggtatattataaaaaccataaagaaaaccaaagatgagatgagaaaagttaagcaatgcatgcatacttccaaactgtctgctgtatatatttatgcatgtaaatattttatagctatcataaatcatgtgttctgattttcttttaaaacagattatgatttataggtgaccctcaataattaaatataaatgtgagttggataaagaacattcagctaaaagtaccgaatctttcgttaaggagaaacatgtctttcactgatttatattaattgacaacataattatatatataaacagatcgacttattaatttataatcatcacttacaataggaatttaattgggtctctacgcaaggcgattctcatggcatcaaaacccaattggcttggggacagattctaaca

SEQ ID NO: 269337 - DNA, 530 bp, Cannabis indica
atgcatgggagtatgtactacgagtaaatacattgagagtatgtactacgaccagaagcatggggagtatgtagtacgaccagatacataagagtgactatacagatgcatgggagtgtgtactacaaccagatgcatgggagtatgtactatgaccagatgcatgtggagtatgtactacgaccataactccataagcatgggagtatttactacgaccaaatgcatggaatagtgtactacgaacagatgcgtgtgagtgtgtactctgaccagatgcatgggattgtgtactacgaccagatgcatggggatgtgtactacgaccagatgcatgggagtgtgtactacaaccagatgcatgggagtatgtactagtaccagaagtgtgagagtatgtactatgactagatgcatgggagtgtatagtacgactagatgcatgggagtatgtactacgactagatgcatgggagtatgtactatgactaaatgcatgggagtatgcactatgaccaaatgcataggag

SEQ ID NO: 269338 - DNA, 731 bp, Cannabis indica
gtaaaataaatttccaacatctgtgtatatgcaagtcttccccgatatttggtcctgctccatgcgagctacttgaatgcgactagacactgtgaaggtcatgatatcgctcaattagttacactgcagtcgcggtagtaaatgagctatgtcgtatccacagggaggtaaattaccacttaagattaatataaatagaaaatgatataaatgtgaatgaagtaaaaataataaaaataatgagatgagaaatttgtcagataaagagcttcgtaaggtagaaatgtagttatgcaaatcttattctaattccgatattaatctaaaacacagttgtaattctacaccattaattacaactggaagatatttataataagagagaaaattaagtaatcttaaataaattgaatcttacttctaatttcacagcatatcatattatatatcataaatcgacaaaatatcactattggaagaatgcagtaaacgacattcaatataataactataccaaaatactaatagcctaacttacataagaaaaacatgactgaacttatataaaagatactattaactttggaagaaaaattaaaagatgaagaacaatttaataaatgagatttgtgttgggtttgatgccctaaataaaattccatttcaatgtaatctctattattcgatatcaataaaggaacaaagtatttttcattcatttgtgtattatt

SEQ ID NO: 269339 - DNA, 444 bp, Cannabis indica
ataatgagatatatttttatgttaaaaattttaatttagatttaatttattgtctttttttggtaggaattgaaattattgtggtattttaaagtgaagaagtggagtaaaaataatatttgagaaaataaaagaaaggatcagaattttgcttgagaaacccactcgcgcacagccaaaagctacaattcgagttgtcagaccgctgatctggtggcctagcttcgcgcgtgttcttcactccaggtagaggggcgtgagcgcctgatctcctcctgccaagccagctgctgccatcacgcgtgggaccccctgctgcaccttgtctccccacgccaaccctcacacgccagccaccattttcatcaatttttctagctgctatttattcggatggatgaacaatgtgcccaaaataccaatttcaaaatacactataatttt

SEQ ID NO: 269340 - DNA, 549 bp, Cannabis indica
aaatatagaaatttacatggtttactaacttttcccattttatttcaacaatactgctacacacgtatttttacttttatactgtgtatgaatttattattttatacggagtatactaccattggtacaaattttattaatactttgtggcttacacgtgtcttcaccgaatttcgtcacttcattttttgaattttttttcttcaaaaaaagctttgatttaacgtgggtgtcactatttgtgacattgtgcttccttttggagttttgatttattttaaaattatttataaatatttcaaaaaagctttgatttgacatgatgtcactatttgtgacagtgtgctttttggggttttttaatttatttttaatttattttttaatatttttaaatgttaaataatcattactaaaatctcactcccatgtttcctattcatcttcttctaatatcccttttttcaagcgtttatacaattttgtgggtggtttattttttattttaattttttttcagttatttcatattcataatatttccctctt

SEQ ID NO: 269341 - DNA, 556 bp, Cannabis indica
ttataaagatatcaatatgtatgaataatatgtatgtttttgtagaaagcagaagaggatgacgaggagtgtgaaggcgaataaggacgagacagagatgagggtggccttgtggctgacgtataattcgcgcgcgtctatgctgatcattgctattcttatcttcatcagaacccatggttactacaccactttagattgatatgttttgaaggaaattaatataatatgtttgaccaagaatatggatgcaccatacaatttttcaaaactattcttttttatcgttaatagtattatgaagcaatattatcctaacacgattttaattaataatatagatggtggaaggtggatggtagatgaaagttaaccgagaattgttaaacttgttgttactttagccataaaaatagttaaactaagaattaaaaaattattattttaataaatcgttataaaaaaaaagtcatctaataatttctcataaaccaagaattcagttatatacccacattttatatagaatacaaattggactttttttttttgaaat

SEQ ID NO: 269342 - DNA, 676 bp, Cannabis indica
taatataccacgagcttaaattttttataagtttcttttttgtttgtcttttatttatttttttaatgagataatgtaatgcataatatatataatgtagtgaaaataatatatacgtcaaacttaaactaatattttttctttctttctttctctcacgatatatcatatcacatacaaatgatatacctaagaccaatcactacaatattttgcttcataccagcggaagtagtaccggcgtagccaaaccgccggtattaatggggttattatcggcgaaaaaggtattctgccggtattactttttaataattaaaaaatttttaataaattatagtattacaggcggatatagagtattaccggcagaaaatccgcctctaatactttcggcagaattttgaccgcccaaaatttgaaatatgactaataccggcagattattagaggcgggttccgccggtattagtcaatgaattctgacctttttttattatcggctgaacccctattattaccagcgagtcccgccggtaataaaaatctatataatcccatcccttaactcagaaaacattttccatttttcccccaccaaatttcacccccaccctcctcctccttcgcccatcctctaaccctcctcttctctgcccatttctccaccgtgaat

SEQ ID NO: 269343 - DNA, 665 bp, Cannabis indica
acaccgtaatgtcatggatccttttatcggtgtctcgagaaattggtgcaagcatcatgttcaaaaccactactcgcaaaatgtggacaaacctccatgaccgcttcaatcagtgtaatggctaacacattctccaacttaagacctctgttaacaatgttaaacaaggtgataacttggtcaccacatacttcactcagttacaaaccctttgggatgaactcaatgagtatcaaccaaataccccttgcacttgtggctgcatttatggtgccatgcaaaaagttcaagattactacgctagagaacaaatccttcagttcttaatcggtcttaatgaatcttactggggaatatgggctcagatcatcctctttgatcctctcccgccactatccaaggttttatccatggttgttcaacaagagcgccaatgttgtcttggcaacaccgacattattgttgctgcctgccaaattgaaaccgaattagccttcttagaaaaagaagcctcgccctacatgttccaattgtcttaaatcaggtcacttggttgagaagtgctatttcctccatgattttccaccttgatatggtgacaaaaagaaaaatacacctactgctcgggcaaaccatgtttcagccagtcgtgaggcccctgttgc

SEQ ID NO: 269344 - DNA, 722 bp, Cannabis indica
gaattacgcttgttttctttgatttcaggcttcaccacttgaaatgtacaaattgatcaattataaaaaatatggaggaattcggaaagagtctcttcctccaaccactctaactagacttgaaatttggaattttaagagcttgaaaactcaaaatggcaatgcctttcgaaaactcacctcccttacttggtcatcttctcatattgcaaaaacttccaatgcttagtcatctatgaatgtcatttgctaaggcaacgctgtaagtaaagatgagaaaattggcctaagaaggctgcaatgatctgatctctataggtatgttttgttcttcttaatacacattctcttatattataatctcagcacatacaagtttgttagttcacattttcttatatttgacagtattaatacatttttgtaggcaaattattgaaactaaagaagctcatagattgaaagtgacaagaaaccacaacaatgttatgatgaattgaaatttctgcttatatttttaagtgtttgtttcctctgtttttctacagttcttgaatcgtttaccatctgttaaaaatcaatattttaccgaaatattttgacttaattactcgtctcattaaaattgaccaaatataagtttgtatgtaatatattaagaaacaaattgcacaaagaaagcctacaaaagacactgttaaaacccctttttaagattatat

SEQ ID NO: 269345 - DNA, 1100 bp, Cannabis indica
agatttttttgttacatacttcttctttattttatttatttaattttaaaataaggtagcattatgtcttctgattttggtagttttgtagtttcgaagtatattagcatttaatgaccatcttttcgtatttttttctaaattctatccattagatcaattgtctccctgatctaacagagattgacccaagagtataaaacgaaaaaagaaaccattttttcaatatctttgccatttcaaaaactctaaaagtttctcatgcttttctgcggaaaaccagatttacccaaaaccttgcttgacatctttgtcattaacattttttctgcgagtttcatccgatttaattttagacttcaagcattcagagggatcttcgcgacgttcgctgtttcgtagattgcagaaccgctcatcgtctcaaaacccaactccgaacactaagttatttttctccttattttcttacatgattttaattttgcatttctgggtttgattactaatttcttagttagcacctttgttacttcatttggttttagaaactttagggttgaattgtatctgggtaaatgttaaggtttaggcagaacgtaggttttcgagatctccaccctaccaacttctggtttgataaatttcttccaggaattgggattgctttctccttgcagcaatgtcccaatctggttcagaagtttatcgtctagaagaattagaaatagagtgtcctactgaacttgccatcccatacaaccctagagctttagagcccaaatccaaattagagataaatgatgcaagaattagagaacacttagtgaaaattcaccaagaagattttgctagtctccatagacgcttcttgcaagaaattacaaaaggcagatgccatttcttgcgagacgctgtttggcctgaaccccccagttcgtcttctattcctttgcctaagcctctttttaaccaagatcacaattgcgtttgaaccaggtgcttggattttgaaattatgtcttccaagccacgtaaatcaaagactccctaggaccctaacatcactttcgaggtagagctaatagagtcgaaggtgc

SEQ ID NO: 269346 - DNA, 558 bp, Cannabis indica
ttaaaaaaaaatactcatgaatagcagagattcatggcatgaaattcatgattagtaaacagcattgcagaaaaattgaacttccatatgccgaataagtactttgttaattttgttgaatataaaatcacatccttcagtctcatgaaaaagtcttcatttgatttatattataatacatacattcccctttttgttcaaataacgaacaaaccagagtaccatgactccattgaaaaaggaaaaggtaatggctctaactttgggactattatagtctatatttgaagtagttaaatattcaaaatcaggacacccgatggttacacaaacattcatccttgttttcaatgattgtttctatatgcaaaagttcacatcattgagaatccaaaaacctttcagatcatcttacttatatttgttttgtgtacaaaaactaccaagtcaaggcttgccaggcattatgaggctaagtagtacacctgtatgaattggctgtattataaacaaaaagacaaaaatgctagcaaggaaagccttgtaagttgtaacatt

SEQ ID NO: 269347 - DNA, 1187 bp, Cannabis indica
ttatagagagctatatcagatctcagctatagtgatcatcttaatagtatagtattatctctaagagggccaaacttctataaaaatccttgtctcatttgctacttcaataactatattatttttttaaaaaaaaaattatcttaatcacatttttttaaagattaaattagtagttaatgacatagcttagagtataagtatctcattgtacgatttaaattttggttagttgtgcttttgtctcggtttggcttgacttaattaataaccaaacttttgtaatggcacaagtataaagtgagagcacgtattttattaagagcattgctattaggcaccagtggcgcctagcaccttctcgacatgtcacgttgcgattggctagcgatacttcttaaaagctattatattaaattatgtgggacccgatacttagtttgaccaatagcgatattaacacataagagggtgctaggcaccactggtgccctttagcatttctcttttatgaatggcatggttgccttaattatcctgctcattggaattggacttgtattacaccatctttaattacaagttaacattaatattaattgctaattttcaacatattaaaattgattaagtgttccatttaactttgacaaagccctattacaaatatttttacttttaatcgcaataaaatttataactaaaaataaaaaaattgtgtttaatcataaattataatttctatattgtcactaaaaagtctgtggctaaaggtattaattacaaaaattacaattttgtgttactaaatgtgtttttagtcacaatatttgttgttaataaaactaaattagagataacgtagtatctaaataatatgttttagtcacaagtaatttttttttgtgactaaatcacatttagtcacaaaaaatttatgttagaactaaaaaatagtcactaaaagtagatgtttttttagtgtgtttattattgttgggccccattctttcaccttgtcacgccgctacctcaccttgactctcatattagtatgatattatccgctttaggtctaagccctcacagttttgtttttaagcaccttctcaaaagaaggcctcatactaatggaaaaggtagaacacttaattatatccaagacaactcttgtcataataaaaaaa

SEQ ID NO: 269348 - DNA, 1234 bp, Cannabis indica
acgtaggttgtgcatgccctattatatatatttgggaacttgtgcgtgcccatggatggcatttaaagacaattaagacctttttccttcctaccaatcgctataaataccgctcaataaaattaatgaggggatcagaaaaagaaacacacacctattaatagcagaggctcgtagactacggctcattaatgctcgaaccacgtaaaaatatatgcattaattctccctaagctaccattactacattaaatatctggtggccgaaaatcttggtcaacactaacatattaatgttatatataaggaaagtttagtatatatggtgtaatctataatttttttttatatgtttatttattttatgtatgtaatgtgtttgaaaagttctgttcttattatttattttaaattgttaatgttaatttttttaggagttaaccgattttctcggtggtccaataaagtctttctcttttatcagtggttctccgagtgatatcattctcggtatattattgtttaattagataaatttatgtaatatgatataaaattaatgtaaattgattagtctcaattaaacatgtcaattcacaattgatgcatattttaaatttattttttagatatgagttcttggtgttgattgaagagtgcaaaagtagctagttttatttgagaaaggtataattacaaaaactttaaaattctttattttggtggagtttgaatatcttagatattcattcgtagtgaagcaggttctgcaattaattgtactattgtcggacgggtggaatatgcatgttagatgagtttgaatatcttaaatttttatctgtattgaagtaagttctacgacgatacatgtactgcggtcgaataagtggataatttttgtattgttaatgttattttgtatattttgtacatgcgttttgtttcttattttttgcatgtttaaaattttcaagaacgttcaattacagttgttatgctatcaaagttttaatagaattaggataaatttcactaaaaatgcataaatattagaggaaaagtgttagattgaggtaaaaatgcataagtattttttttctttaaatttaaagtttatatttgtgaatatcttgttttgaatagaggtatatttgttagtttaattaaatatgctaagtattagaattttattttgataaagttggtattgtttatgtttttgaaaatataa

SEQ ID NO: 269349 - DNA, 711 bp, Cannabis indica
aatattttaaaaacacaattttttcttaaatagattaaatcatcaagattattattaattttctttattagtagagaatatgacaatagacattataacatttataaaatatatggttttatttaaagtaaatatgaaatgtcacaataatattttagaaacacaattttttttcttaaatagattaaatcaacaagattattattaattttatttattagtagagaatatggcaatagacattataacatttataaaatatatagttttgtcaaaagtaaatatgaaatatcataataatattttagaaacacaatttttttcttaaatagattaaattatcaagacgattgttacttttttttattggtagagagtgtggcaatagatattataacatttataaaatatatagttttatctaaagtaaatttgaaagtttgaccatattaaatcatatagctcgactataatgtgtagagctcgatcattataaattatatagctcaactgtatgagtagagctcgactgtatatggttgagatttttaaagagtttaattgtcattagtagagtttgattgtttatggtcgaaatttataaacactgaacaaaattaaaattatcgcttgtctataaagagtagagctcaactgtataggtcgagatttgtaaacattgaacaaaagattagtaaattgttcaattgt

SEQ ID NO: 269350 - DNA, 582 bp, Cannabis indica
tggaagaatagcaagaagcctgttcaagctgtgaaaacagttaaaaagaaaaaggctactaatcccgatggaaagccaagaggaaaatgattctattgcaatgaaaagggccattggaaaccccaatgccctaagtttctagcaaagaaacaaggtgtttctttctatgctataaactcatgtattttagagaatttttatccctttgggttattaattctggatctactaaccatgtttgttttcttcttatttcagctccagctgcttaaacttggattgctatcctagcgagttgagtcggatggttggacagaagggtggagattgtccatgattgaagatgaagcttggaatcttcttttactaattttttgaaataattgttttactttatgaaaaatttaatttcaattattggttttgggattttatttcctattttttcatattattgcagacaagttcatttttttttgaattattataataaagttttctcttttaataatgaatttgcatttatgaattgagctttcatacttctttttcttgtgtgtgtccaataccaatttatattta

SEQ ID NO: 269351 - DNA, 686 bp, Cannabis indica
agttagtagcccatcaacaaaagatggctcaaactttaacaagaaagtgaaggaaaggatattttttatgggagatatggtcctcagaaaagtattcctgaacacaaaagacagcacgagtagggtgctcaaactaaactaggaaggaccgtatcaggtggtcgaagttgtagaatcaagggcatacaaacttgggtggtatgacaaaaatatgaagcttgttctggtaccaagatattggaatggggaatatttgataaagtattattagtaaatgtgccaggtcggatgaccactttaaggacacaaagcaagaacatttactcttaagtaaatggccttctggacggaacctgctcagaggtttggataaaataattaagtactcaggttggatgaccacctttaaaagtacaatttctttttataagtacaattgttttatgtttaaatttagctaaagatcaaattagatcatgtaatagctctatgaatataagttactacggtaacaagactgtttctaccaataaatgaataaagatgtttatttaaattctaattgtgtcaattctattagcaagttataaattcaccattaaatgcgtacaaagctctgctcgaatccaaagggccaaacagacaaaaaccatacttgtgaaatgcaagtgaccaagagtcataag

SEQ ID NO: 269352 - DNA, 414 bp, Cannabis indica
tagtctcatctaaatttgatagtgtatgaaaactttagataattatgaggtactttaaacgtactaaacgatcgaattgctccccttgtaaggacatgatttattttattttatttatttttaatttaactaataaattaaattgataatttatttatttttttaaaataataatatatggaacaattcttatactataaaaatttaaaattatcgtggtgggaaatcttacatttttttgttgttattatatatatattgatggttgtattacataaagtataatagtgaagaataaagtaacacgtctactaataaataatatccaaataaaaaattattgctctttgtcaaagaaaaatatgcatattaaatagataaaaaatttgttctagaaaaaatctgaatgatctc

SEQ ID NO: 269353 - DNA, 738 bp, Cannabis indica
aatatgttagcagaacttccattgtctattaatatacgtttagttaaacaatttgaaataagcaaagaaatgactaaagcatcgtgatggggattgagcaaatcttaggcttcatcatccacgaagcttatggtttgtcttgtgcaactcattgctggcttccgtggccttctgtccgttcctacaacttctattgcatgcctcttagctggtgaatacgtcaccccgctaacttcggaccctccagatattacactacaagttctagtgtgtagtggaggttatgctggtgtaacagtcctgatgtcccctccagctatgatactcttctccttgttagataagaattctttaagatgtccccattaaaggagcccagcaacttcaaaacgcagagctatgcattccgccgttgtgtgaccatgatcgtcgtggaattcacaccatttagttttgtctctctgatccgctggctttttggtcttttcgggccacttgaccttgttccccattcctttcatgtagccacgatctctgctggttctacaattaggttgtattctaggatgggtgccttttcttattctcttggtcttggtgaaggaaacctacgcatgggcccttttcctttcctattgttcctggaagttgggtatggctcatgatgcatattctacttgcgttccactctccttgtgctcttattttctcttgagtatgagtaagatccgggagtat

SEQ ID NO: 269354 - DNA, 722 bp, Cannabis indica
aatggattagatttaggagattttaatggaattttgggaatggatttgttgactaagtacatgctattatagattgtaagatgaagatggtgattgttgaaccagagggtgaaaccccatttgtttttatgggaaagattctgggatctaagattctaataatatacacttaagaccaggaaattattacgagaaggatgtatgggatacctaactggtttattagataccacaaaagatacacctcaaagactggagaacattcatgtagtatgtggatttctagatgtatttttggaagagttaccaggactacccctaaacagagcaactgactttgagattgaattagtgccaggagatgagccaaattctaaggccctgtatagaagcgcaccgacaaaattaaaggaattgaaagtctaattacagaacctgcttgatctgcagttcacaaggctgagtacttctccttgcggtgcaccaattttatttatcaagaagaaagacaggtcactatgtatgtgcattggttatcgagaattgaacaagttgacaataaagaacaatatcttttgccaaggatagatgatttgtttgattagttacagggaaagaccatcttctccaagatttaccttcgatctagttatcaacagttgaggattcaaaaagagaatatttctaaatctgctttcctactcgatatgggcactacaagt

SEQ ID NO: 269355 - DNA, 1247 bp, Cannabis indica
cttattggatagaagtaaattcttacttaaaattagtttattttaacctttaccatttaccaataataataataataataataataataataatccaacaactctaggaataaatatcccaactaactttttgtcttttttaataaccaactaactttttgtttaggtttttttcttattaatttttaaaaaatatctaataaaaagaaaaaagaaattattcatacacttatttttttaagtttttttttttttcaaatttacggtttgagttgctccattaatttttctggtagtttccatgtgagttgctatacggatttaagttgctccgttagttactatagatgtttcttttaaaagtgtaaaaataaaaaatataaaatataaaaaaaaaaaccctaaaaaaatgacaaacataaattatattgggatataataatcacactgaggaagaaaatgtaaagtaaaagataaattgtgaaaaactaggtgatctcctaaaaaacatacattttttaatttgttttagatcttaaaagagttttttaatttaattttttttaaaaattaattgtaaagagttttttaaaaatatttatgattaactgtaaattttaaaaaatttaaataatatacaatattaaaagtaaggttcaaattttttttttacccgagtaattattttttttatatttgttgtaagtatatgtttgaaccttattttcaacaatgaaaattattctaaataatttctcaaaatgtacaaacaatcttaaataagtataacatacacaattatgaagaaagattgactaaaaatttctatattgctatatataaaagatgtacgagaactatctcattataaatttgtttcaattatcaataactatatataattttaaggcctagttcatatattaattctataattttatttttttataagaataatttcattaatagttagttgccttgagagaagtataaatctcacaaaaagaaatggaaaaagatgtatatttttcagttttggatgtgcaattatgaacgttttgttaaattatcattttattttcatggtctataatattttggcatgaccgtacgtaatagtttatatatttgtattcaaaaattgatatatataagtctataaattaagtaatataatgataaaagggattttttcagttttaaccaaaaaaagtaacaatattacaaaaatactttcagctggccaa

SEQ ID NO: 269356 - DNA, 804 bp, Cannabis indica
ttaaattttttattttaatagttaatattaggtggcaattttataagatgatgtggcattattttaaatgatgtggcatgccagctggtgtctagtgtgcaagataacagcaaggtacctacaaaatgtctgaaagtgtaacggaaggtatttatgccgccaaaattttaacttaggtattaaattgcaaccgaatgataaacttaggtatttatgccgcaaatttctcttttcaaaataagaaactaggccatttcagtgatttatagcattatcaatgtctatatttttactttgtaaatttgtactaattgaattgatagcaaataaaatatcaaaccaaatagtcatgcccaataaaaattcaaaattctctaattcaaaagttgctagacacttagcttcactctttactttaggatcgtcacttgattctgctagttcaagcaaagcatctcttatttttggagcttgaaatctaattgccttaacactttcaatacgactttccaacgggtttgagacaatgatttcacagttaacgtagatatattatttttcaatattgtccatctcttaggtgaagaagagaataatgaatatatacgttgtaaaacaccaaaaaatgttacagctttaacacaagaattagcaacatcacaaatcactaaattaagactatgacaaccacaaggtgtatataatgctctaggatttatctctaataatcttttttgtacaccttggtgttttcctttcatgttggacccattatcatatccttgccctcttatgtcattaatg

SEQ ID NO: 269357 - DNA, 718 bp, Cannabis indica
attatcaccaaaaataataatttttttgtagtggttaattattgggaaataatgagaagaagaattgattatatcaatattattggtttgatcatgatgatgttggatgtatctacttggaactgtcaccatattggggtcctttgtcatttatagtacacttgtagcaattagctttcaaactccattatgaactataatttgagattattttgaagaggatcaataataatatatagatatatatatatccaaacaacatagatatgcccccatatatacatatttatataagaatatgtttttagaataaaattattttggcacgttttgttttgtttttttttttgtttgtatcttacctacttttatatgtaattaaatatacattaaatatatattatttttaaattattgtatggtggggaatcattgactataatattaatagtagatagaaaagtaggaaacccacaccgacagagggggccaattgaaaagtagggcaaatcgttaacaaatttattttgagggggcaaattataaaattatatattctgagcagtacctaatatcttttataattggtgtttcacgattagttagcgatatttctaaaagttatttttttaaattatatagtactcaatacttaattacactaataacagtatgtgaccgagaaaggtaataaacactaataatacattttaacaat

SEQ ID NO: 269358 - DNA, 1651 bp, Cannabis indica
cttgttatttatattattatgagtaatttatagcataaatacttaagtttaactcctgttgcaaatatatacttaagtttaatttttggcggtaataatacctaagttatatttgtaaaactctgtagatacctgaccgttaaatgctaagtcattatatttaaactattttttaaaaaaataataaaaatttaatgactttgaccaattaagaattgtcatgtggtaatttactcaacagttaacaaccaggtacctacagaagttctaaaattataacttaggtattattactgccaaaaattaaacttaagtatttattttcaattgggagttaaatttagatatttatgatacaaattactctattattattctagagtttatttattacattaaggtttatttattagttaacaaaaatctgcgttaacaatgcagtaagttgatactgagtacaacctatcagatcctattacatagataatgtcaaatgctacatttgatcaagacatcaagtatatgagattaaattgaaatgcaatttagttttatattagtgtaagtgagagtttgttgatattttatactctaaataaaattcaattcaatgtaattgtatttactttcaataaacatcaaaattcataccatgacctagtaatatgctttgtttacatgtttgttacatgattatagatttaatatataagttctattaaagctcaaacatatagttactcacaattacagtgatgtcatcacagtagaaagtaattgtgattatatacttcaaattatttagtcccacgagttatcagtgcattgaatttacactgacgtgataatcaacgataagatttccttacacttaggtgagtggattgtcttttccaaggcattagtaaagtaagtcaggatcggatgtatcggccatacatcgaactagaccaatattaacagtggaaaagatatcataaacttatgttatattttttctaagtcaatagcacttaatttatcatagattatttgatctcaatctcgagatggttaaactctagcttaaatgtatggcacatgttctttgacttgttcattacctgcttacttacagggctagcccatacttacatcttgggaactcggtggtgcaattgagcgggagcgataatcatagatttggacaaatataacttctatgtctattagaagtgaatgatagtttccttagagcttggcttaacgcgataaatgatagagcacttatttcaataattatattcgtttctcaaaatatcatttacaagtagctaattattttaaggataaaatataatgaagggtaaaataatatttttttccctactcaatataaactgtctataaaggatcaatgattgttataattgaaacaatggataaattcatagcgtatctatacttggtttatagagtgttctaaacactattacaaaatgcaaaatttgcgtcggtcaacgcatctcaccaaaatggttgaccaaggtaaaaaataggcagagattttatgcttcagtggataaccgaagctaaaagaaaacaataagcgtaagctactacagtgatgctaaaagaggaaccgagaaaaaaagtgaaaattttaaaaatt

SEQ ID NO: 269359 - DNA, 521 bp, Cannabis indica
ggggtgagcaactataaataccccatcaaacttccaaattgtaaccaagcttgagtagccaaagcaagtcttttactactagcctactaccttgtctcctctcttactacacacataaaaattaaaacactacataattcttccttatcccaccaatcatccaacttatcaacatcatcaaactattaactacatatgcacctattctaaacaaaactaatacaaatttattctcaaaccatcactatataatataaatatgtttggtaacagcaagggagaataggatgaatggagagattagatagaatggagttgagtaggatggatggagaggttagatagaatgtagatgagtatgatggatggagaggttagttagaataaggagtaggatggatggataggttagaaacgatgaagagagttggaggaatggagattatagtaactctctcttttattggttttttttttttttttgtttttttttaagtaagtaaagaatatttatttctaac

SEQ ID NO: 269360 - DNA, 836 bp, Cannabis indica
gggctatcaacttcaagtttgctacagtttgcttctcttcgatttcatcaagtgatttggccagggttacagtgatttgcttcttggttgtatgtcaatcttctgtgggattgtggctcgagctctacgggtagcatagcttcatatccatatgccatagcaaatggaatttgtctgttgccattttctgaattgtccggtacgaccatagaaattcaggaagctcctcaagccagtttcctttagcttcctcgagtcttttcattagtgtatcgtttaaggtcttattgactgcttcaacttgaccattcgcttagggatgtgccactgcggagaaacttttgatgataccatggtttgcacagaaatcagtgaaggactggctgtgaaactgtttgccgttgtccgaaactatttgtacggcaatccgaactagcaaattatgttcttcacaacaaagtcttgaactttcttagatgtaatggttgccagtggttcgtctttcatccacttagtgaagtaatcaagtgtaaccattgcgtactgcactcctcctttgcctttgggtaattgttcgatcaagttaattctccaaatggcaaaaggccatggactttgcttctcagttaactcgtttggcggagctcgaggtatcttcgaaaatctctggcatttgtcacatttttaacataggactttgaatcatcaatcattgtcagccagaaataaccttgccttagaattttcttagatgaactcttcccggaagaatgatttccacaaaatccatcgtgcccctcaaatcatagtcgcgcaacttcttcttgagcgacaca

SEQ ID NO: 269361 - DNA, 972 bp, Cannabis indica
tatataatctaattcaatataatacaatacaatacgacctaatacggcgttccaaacaagcccagaatattttatacatatatttaaatcttttatgtatatatatttaaattcctttatatatacatataccaataagttaaattctttttcgtcatcactcatgaatatattttttatatatgcttaatgatatatatatatacataattgtcatttttttatatgaataataatattcacatatataagtatatatatagtatatatatatatactatatataagtataataataataataatattcacatatataagtatatatatatgaataataataatattcacatatataagtatatatatagtcactaatcgcctattcttttttttttttttttatagagagaattttcaccattaattatcatatcaacaaagtgaatttggtttagaatataatcgattgaacctatattttttttggagtgtttagtaagtaatcaatcaactttcttatattgctctcatttctttggtatgagaatctacattttatgataattttggtggcataataatttctttaaatcttttattcttctctttggttatgtatcacatgtcgacttattttcagaagtctagtgaaccaaaagaaaatcataggaatttacaatgaattagacagaataacaccataaaatttatattattctcttcgattatatatcacatattgacttattttctgaagtctagtgaatcgaagagaaatataaaataacaccataaaatttatattattctcttcgattatatatcacacattgacttattttctgaagtctagtgaatcgaagagaaataaagaaatcaatgatgaaattggcagcttaaaaatattagtctcttcctttccctttgattatatatcacatcaacttattttctgaagtttagtgaatc

SEQ ID NO: 269362 - DNA, 656 bp, Cannabis indica
gatgtagggtgttggtatgacccaacatgagtccaagagcagcatagaggttctagatctctgtgtcatctccaatggttgtttgaacattggtagcgggcggaacgactgtgctatgaacactgtggttggctgctgaactggtattcccagtctcttgcacaccaggcgtgatttcatccacagcagtcgtcacactgtgacccgcagttgatgggtgtgcgtgagtgttgaacaagattttttgaaatgtttatagcactagtattatcacagaaaatagttaaagttttcaaatcaaacccataatcaaccatcatttgtttcatccataacaattaggtacaacaactacctgcagcaatgtactcagcctctgtaatggacagagagactgagttttgcttcttactgtgccatgaaacaagattgtttccaagatagaaacatccaccactagtgctttttctatcatttgcaatattatctgcccaattagcatcactaaaacaaacaagattaggttgttcaacatacacttcttccttcaacaaaccattcaaaaaggcagatttaacatccatttgatacaatttaataccaagaatgcaagctgtggaaagaagtaacctgatagattccagtcttgctactgg

SEQ ID NO: 269363 - DNA, 1307 bp, Cannabis indica
ttgctcttgcgttctatatatttgttgaagagatttgaaatttgagttttaaatatttgttgcaaaatttatgaaatttgagtttattttatgaagagatttttatttattttaaatattattaatagataaaatttatttgaaatatttattacaaaatgataatgattattatatttaaatattatagagtatagatttattgtgtaattaccaactgtcttgccaaacatgacaattgaaattcacatataattaccacttaacatctaaatacacgttgtattttaaaataaaatgtaattactatgtagtgtaattactacccttacactgcacattaattataaaaacatgacaattgaaattcacatgcaattaccacttaacatctaaatacatcttgtgttttcaaatacaatgtaattactatgtagtgtaattactacccttacattgcatagtaattacaaagacatgacaattaaaaatttacatatattgtaattaccacttgacatttaaatacaccttgtattttaaaatacaatgtaattactatgtagtgtaattactaccattatactatatagtagttacaaagacatgacaattgaaattcacatgtaattactatttaatattcaaatacacattgtattttaaaatacaatgtaagtaccacttttacactctttagtaactataaagttgcttccaaatagaccctaagtgttcattatttttgtgagtagaaagattgagaaaataacttttgaattatattgatttttaaaaataattttaaatattttagatatgaattatggtttgattgaatgttgctttaaaaataattttttttattgacaaattttattaagaaacttttatataattatttcttgggttatttgcggcaaaacccctttaagtggacaggtttttacaactaaccccctaatctaaaattttggtggtaaaactacctaaaccactagtccgttagcagttagccctttccatctatttttggctgttaagtgccaggttggaatgtccacgtgtacacagtgtacacagtgtacacgtggcacaattttattagtccacgtaaataaatatataaaaaaaataaaaaataaattaattattttaaaaaataaaaaataaaaaaaaaaaataatttttactttaaaaaatttaaaaaaaaaaaaaacaaaattttaaattttaactatttttttttacttttttttttttcctttttcttttttttttttttttttttcttttttttgttttct

SEQ ID NO: 269364 - DNA, 1052 bp, Cannabis indica
gaaaccgttgcaactccttccaatgcacccctgctgcttcagtccctcctcctgttgttgcaaaatctggagattcatcgcttccccagcgtgaatctcaacccgagaagccaaaacgcatccccaagcaagtggctcacaaatcggtaagacctcttcgaacctggacttcttcgtctgagtcttcgaaggaatctcctccaccgttggcagttcctcctcctgctgcatcagtccctgccaccactccaaccggaccttctactcgaactcgagcccaacaagcctctgctgagaaggaacttcgagcttctcgaagtcgtgataaggcagtccctccagccaagaagaaacttaagtccaatcctccctcggtttcttcaagttcagaagaagaagatccaatggaagtctcctcagacaaatcagtttctctccattcagagaaggagaatccagaggacatgggagattcgtctgacagtgaggacacagaactcgagccagagcctcaattgacaaaatctgcttctgcagcaaaggcttctgctgctgccaaaggcaagcagcctatggaagagccttcttctggtaatgttccttcaactctttctcactgccctcgattttattatcgtgataatgaacgtgactggaatttatatgcaacccgtaagtttgaatgtgagaggaactatgatttgcatgctcatcgggtttatgggattgtaaagtttattcaatttcatcaatgggaaaacactctcactggtttcaatgggttcattgcaaacattgttaaggatttctatgctaatctcactgatgattttcttgatgagaattctagactatatcggagagtatatgttaggggacattggttttctttttctgaaaaggacattgctcaagctttgcaactacccgagaatgtctccaatgcagtgatgtctatggatcgtgaattgatgctctctgaactcacgggtgcacgatctgaattgaaatcaggagagagtcttcgaatcacccatctcacatttgctcat

SEQ ID NO: 269365 - DNA, 689 bp, Cannabis indica
aaatctgattatattaaaatggattttatttagggcacaaaacctaacacatagtgttttaccatggtttggattaggtttgggatatgaactttgtaattttgggactgtagtaccaaactgagtttgaattgtgttattaggatcgatttagaatttaattaagcttagattaaatgatttgaatgaatgttgtgttaaaaattggagaattgagcttataacacaattttaaggttctaacatggtgatttgtgtaattggatgaattattgtgaatgaatgctatgaacatgctgtattcatgttattgaaagattttgtgaagtttgggaacaattggttgggtttggagcaagttttgggactttgaagacctgaaatttttgagtttctggtgtagtgaactggaattggagatagtacaaggctgccccaaccggaattccgaatggtcaattttcaagaatcgcctcttttcgtattttagccataacttttcacttaggtgtctattttagacattctatatatcgtttcgaagcttataaagagctctacagtatgagacatagattagagccaaaagatatcttttattttaggttgtttttactataacatttggtagaaaaccctaggttattttatgcgggttttagacaatattttggaatagacccttattg

SEQ ID NO: 269366 - DNA, 615 bp, Cannabis indica
tggcttgctgcaatgatagaagagataaatgctttagttgcaaattgtacttgggtctttaatttaccttcaagaaaacgggccataaggtgcaaataggtgtttacggttaaatcaggatggaccaattgctcgcttaaaggcctatcttgttgtcaagggttatgaaacctatagagtggactactatgatactttttctcccgttgctaaacttacatctgttcaactgttcatttccatggaagctactcatcattggcctttgcatcacattgatattaaaaatgcatttcttcatggagatattgaggaagaagtgtatatggagcaacttcctgggtttgttgctaagggggagttagggcgagtttgtcgtcttcgcaaatctttatatggattgaaacaaagctctcgtgcttgttttggtaaatttagtcaggatgttgagaaattttgtttattgaaaaataagtcagatcattttgtgttctataaaagatcaactgctggtatcattttgttagtagtgtatgttgatcacatcgttattactggaaatgatactgaatgcatctcatcccataagtctttcgttcatactcagtttcacac

SEQ ID NO: 269367 - DNA, 809 bp, Cannabis indica
ttcagcttcgaaaattatgcccaaaacaccccaaacccaaaccaaaacctagaaccatcacataggttttcaatcattaaaaagagagtttaaaacaccatttcatgcattaaacattaacaacaaactctccaaatttcagattgctaattaactcataatcatgcttcaatttcacaactcaacaagctcataaacatgaacttcaatctattccaacccacaattccagctgcaaactcaaccaaacaatcacataatttctgacctagcaagtacttaataaactcaaccaaataaacacatatatcctcacaacaatatcttgaaattcataactaaaaccacaagatcaagccaaattcctcctatcatgcacatccaagatcaacatcccttttcatgcttatcaacaactaaaaaccagcaagaatctcaattaaattcaaaggaggagagttacctcaagccttaagcaagaattaagcaaaaacacaccaaaatccaagttcaacttcaaacaattcctccaaatcaagaaattgaaccaaagagggaaagggaggaagagggttcgggtgagggcatgaaacaaccagaaaaatacttgattttcttaataaaatccaattttccaaatataatagaaagaggtcaaatgaccaaaatgcccttagggccaattaatcatgcatacacattttcaagggcaaaaatgccattccacactcatttaattccaaataatttcagatttcatattatcaaataaaatgccaaataattcaattcaaattgcatttcggacc

SEQ ID NO: 269368 - DNA, 541 bp, Cannabis indica
caatgaaccccgtctattttgaaggaaaacaaacacggttagagtgaacatttgaattaatagaaaaacaaatcaaaattctaacaaataacagcttacttgtatgtctttccaaactttatttttcagagtcgggttgacttctttccagtttttataggacaaccctatcgtctgccggcatctgactcctagagtggatacgagcttggcatagcttttctcgcagtattgtcctttgtcattaacctcgagggccactcttttgccctgatccattagtttggatatttcattcatctgcgtcggccctcgtgtaggtattacggttggacactcattttctgcgcctgaatcagatcctgatcccgagttggccatgtctacaccattaacaaacaaaatttaaagttagctatatatataacaagtagtgtatatgaaatattaaaagcataaacaaattgttaagtattgagcattcacaaccacaatataaagtaagctatatatcaagttaccaattagacacgttttcttt

SEQ ID NO: 269369 - DNA, 1682 bp, Cannabis indica
gcaggaaaaattctgcaacacacgtcacctcataccccctacagatccatttgcatctcaaaatacttgaggtgggaaagaggatcttctcttccagtgtacaatttcctggttggcattttcaacttgtggggcaacgccaggagattgatctcgggagagaaaggggttctacgtgctcggtccaactcgagatcattgtttctctgctcggccatgccttggaacatactctttagttcatctagctgtgcctgcacaacttgagtaacctgttcaacattttggccaatttgagtcacgtcagtatctttttgagcgggaatttgagcacgggttccgggtttcgagaattttagatcgtttctgagatcatgagtcctccccaacctttcctatacagaaacacctagctaccttggttgttgattaactttgttgataggtggaattgcaccgttggccttgttggaaccatcgagtacgacttctcttgatgaattactagacaaggtatgcccacctactacttggcccacaggcagaacctgtgaccggagatttggcggctgaccatttatagtctgggaagtattcatcgttggatcttcatctgtttcaccgaggcggatgacattcgggggttgctgcccgacagtttggtaagcttttcgtatcagcacaataacttgccgattatgattgtcaatctctgcatgatgagcccttaacgcttccatttctttgtccctccattcgacaaacatgcgtctgtgttcctcgaacgcaagatttaccgcagcgtggagttcctactgatcatgatgtaaggtgttggtatgagcttgcattagtccaagagtagcgcagaggttttggatctcagtatcatctccaatggtcgtccgaacgttggtggcgggcgaaacgactgtgttatgtatgccctagttgagtgctgaactggaattcccagtctcttgcacactaggcgcgatttcatccataggagtcatcacaccatgagccgcgttagacgactgtttaggattaatagttggcggagccctagtgtttcctgggttttgcaatgctggatccaccgcttgtggattttctagatcaaccatacccctaggagtttgtaccaccatcgtacttgtggttagatttagaatgaagagcgattcctgattctgctctcaatgaaagcaccaaaatattaacttcgcttttagaaaacgacagtgaatctaatttagtaagcgacaagtagttaataaacaattaatatatagtaaagcaatataaagacacaggaattttataaaggtttagccccaagcagtttcgtaatagcctaatcctcgttatttgtattaacttaagaacaaggagaaaggttcattttcttatagctcttacaacaatatctctgaatatgaattcttagataatatctctcaagtaaaatctttcgactctttgcccagtgaacatgcatcactatttatagggctatgagcttggagaggaagtatttcccttctcgttacaatggatataaatagaaagattgcataataaatacataatatcctgatcgtgggatttggagagcgcgccatatctctgcaatctgatccccaagttataggaatttctctgatgactcacgatgc

SEQ ID NO: 269370 - DNA, 634 bp, Cannabis indica
cattgattaaaagattatagtatgtttataattattatttctctttattttttttgaagggtgatatttatggtgtcagtatgatgattgagatgagtgagactctttatactttggcgtattgcatttgcaccagcagcaacatttcccaaaacgtatctcaactctcaaccttaatcattattttgctcaatatttacgtttggataaatactattttagactttgtgttttgtaaaagttatcaattagattttctgttttattaaatgacaaaatagactctgtattttttttaaaatattccaaataggactctgcattgattttttatcaaaataaaatttaattataatccgatctaaaagtgtatgacaaaactgtttacattttctgtatctgttcgtattaggaattgtctttaagttagttatattaaaaaaaagttgtcaaaaattaagctcacacccatatttttactattttagaaaatacaagatctattttgtcatttaacaaaacacaaaatccaatcgataatttttacaaaacacaaggtccaaaatagtatttacccaacctttacgtttttgtcaccattctattttcattattatattattatcttttcagt

SEQ ID NO: 269371 - DNA, 701 bp, Cannabis indica
agtgagttgtacaggaaccactactgaatagtagtatttttataagttggtcactggtagtactttctgagatgttctccattccaatacctcagtgagagaactaatttcatgttcacattgtacctaccaagcttatatgtacctttatttgttatctctgtaacatggtatggaccttcccagtttggtccaaatgctcctgctataggatctttgatattaaggaatactcttcgaagcactaagtctcctacaaagaattttctctccttgacttgtttattgaagtacctggcaactttttgctggtaggcatgcaatttttagttggcttggtctcttctttcttctaattcgtcaaagtattctgccaacaaggtgtggttcacttcttggtcatagtaggtcaaaaatacccttcctaagtatcttttggataggcgttgtcccccgccatgattgtcacagaagcattcatgcacttctattaataattgtttagcttctgtcttggtgacacatttaagaagtggcattaatgaaccacatctgtacataaccccgtccaggattagatacctagcagttttcctcctcattgttcttgcttcattcttgttttctggcaagattcctgtccggagatatgtcactatggttgtcatccaccatgtgtatttcttctgaaatagtgatgc

SEQ ID NO: 269372 - DNA, 1074 bp, Cannabis indica
tttttatatgtattgtacccaaaataccatgacataagacagtcacatggagagtatcttgaaataacaagggcaaaattggtacaatgtttaaaaaaagaggtaaatatgatagacttttaaaaaagaaggtaaaaataaaagagaacaatataaaatgagtatagagtgtaatttcctctttcagaattgagaaaaaataaatgggcttaaatatttaaagatggacatttatgaaaaacaaattggggcctctttttgtaaggaaatgagacagggttggggccttgggttgggctgacttcggctaaatggcccattacggaaactgctaactataacaaccaccagacgatttttagtgaaatatcattttatgaagaatataatcttgatttatatcacaattttttttgatggtgtctaaaaatagatgaaattacattgcattttactttgttttaatttttacttttatttttatattctttaaaatatatctattttggtatattttaataaaatataatttaagagtatttttaattaaatcatcaaaaaaaaaagtatttttaattaatggataaaaagaaataagtatttatcaccttatcccctcaaaatatggctttaacttaaaatcttagattgaaaaaaattaaaattcaaatatcagttataaatattattaaaaaaaaaatcagttgtagatatgtatagtttaggttttaggctacttttcctaggtttgattttatttaatttctgtttatttttctaaattttaatttatttttaaatgtgttttgattaacttttatgtttgaaatcacccacataaagctaatgtttatttaatcaaatgtcttatttacgatattttaatttgttgaaaaaaaaaatatagattttattgaagagtttcaaaattttgattgccgttattttctttaaaaaaaaaagtttaattaaattataattttgccttaattgaaattttgtttgaagtagcacacgtgtgatactaattaaacttgaatttataatttcattaattaaaaagatttaaactac

SEQ ID NO: 269373 - DNA, 752 bp, Cannabis indica
tttgcaagttcttgagatgtctcatttacaagtcattatgaatttttctcaacatgacttagagcccttgtatgaagcatggtggagatacaatgcatttttaacaaggtttccatatcatgggttgtccaaagagtgtcaattagaaatcttcctaaatgggttgaatccaagcacacgaaaatgggtagaaagaggaaatagtaccaccaatttctaccaactatcaatcaatgaagcctattggatgttggaagacatggtggagtacaatgagtggtgttgtaattgtccaaacaaagaccatgtttgggaggacaactacaataatttggagccaaattttgacacttacactcaaggaccaaatgatgagattttagaagatttacaagagttcaacatagaagaagatcctcatcaaatggctcaatcaagatcatttgaggtgttgatgatggagttcatggcgaaaaatgatgccttaattcaaagccaagcttcatccttgaggaaattggagaaccgacttgagcttatggtcaatgagttgtgtgttaaaccccatgaaactttgggtattggtatggaaaattcaagggagaaagaagaaagtgaaaatgtcattttgaggagtggtaatgagttggagatacttggggaaaattttgagcaattacaagagctcacttcaatccaaagtagtgaaaaaaaagataaggaagcaaacattccaagttggtcaacattta

SEQ ID NO: 269374 - DNA, 981 bp, Cannabis indica
aatcttaccataaaagaaaaaaatattttgtcaactaacttgccaaaaaaggactttacaatactgatgagagtcatgtcgatcatgttcggtgtatattgttgtttcacggcctagtctctgtgtcatcataggtagatcaggtatgcactcacttgtaggtgaaagacctagaatctgtacaggaagtgatttgaatctaagtcctggtattatggtggttatcaagtgcgactacctggttttggatgtcgtcttctatgagtggtattgagagctaggggtctagtggacggtgtgatttgaatttgacgcttgattttgtgattctttgtggttctctactttgtttataaattttgataatggtgatgaaatattttttttaaaagctaaccatgcatgaatttttattaaaccaagggtcttttgatatgagatatttttctagtggacggtgtgatatgcatttgacgcttgattttgtgatattttgtggtctctctactttgtttatatattttgataatggtgatgagatatttttatttttaaaagctaaccatgcatgaatttttattaaaccaagggtcctttggtattagatgctttcttattgggctttataagctcaccccctattttctccctttcccgaaactcaatttgatgctagtggataaagatggtaccgttgaggaagaaagtcattattagtttagtctcattctacttattaaacttttaatgaaactgattttgtatttaagctagaatagatggtctggatgacttaaattagctttgtaccagttagaaatgaggaacaaatagatgctagatattatttttgtattttattgacttattaaatcaatctattcggtgattacataattgtggggatattattattctttcatattaaagagtggtcctgattttattactaatattttcttaacgatataggagttaatc

SEQ ID NO: 269375 - DNA, 778 bp, Cannabis indica
gatacatgggcacacctgattagttgatgcaattttcctagtgacgtactgggcgtaagtacgggtgtcagtgatatatgatgagtaccgagcgtaggtacgggctcacctgattaggtaatgttattttcctggcgacgtactgggtgtaagtacgggcatcagtgatatatgatgagtaataagcgtagatacgggctcacctgattacgtgatctcattactcttggtcacatgtagatacgacgtcagtgatataaaaattgccaggttatggcatagaatgaaaccgttatagggtttcctcctagcgatgtgtagatacgggcatcggtgacatatgataagtaccgcgcgtaggtatgagcatgtctgattaggcgattactcctggcgatgtgtaaatacgacatcagtgatatgaaaatcgtcaggttatggcatagaatgaaactgttgtagggtttcctcctggcaacgtatagatacaaatgttagtgacatatgataagtacagagcataagtacaggctcgtctaattaggcaattactcctggcgatgtgtagatacggacgtaagtgacatatgataagtaccggacgtaggtacgagctagtctgattaggcgatgcgatatattggtgccaagttgtggcacgggctcacttgattaggtgatgaaattatatgatagatgggtgtaggttgttggcatgggctcacatgattaggtgatgcaaatatgcgacatacggtgccaggctatggcatggact

SEQ ID NO: 269376 - DNA, 548 bp, Cannabis indica
aacagatttaacaataactaaccatagtaacaataaactaactaatgattagtgaactatgttaacaaaagataggtgtcaacataaccaatcgacaccagcacccctttccatcgactctgtaatcaaggcgaatgtgtgctccagtcactttggaagatgttaaaaatttttaacaccatgaaatttgtcggcaattctaccaaatgaacattcttaagcttttttaattgttggaatccacatgacacctcctttagttgtgggcaatacgattagagaacttacccgattacagaaggaaggcagccccacattggcacaagcagacaggggaaatggggaagtttcagtacagagggtgctaatgtgggttttccatttgaataaattgaataatttactgattattgatttatttttgaatttgtagggaagacacaatgcatcaaccatttttgaatcaatgatagttggtaccttgttgatttgcctgaatatgggtgagaaactatattgatttataaagctataaatatataatttat

SEQ ID NO: 269377 - DNA, 596 bp, Cannabis indica
actgtgcttttcgggcttttcgtgtgtcgtactttttgggttagtctattcgtgtttacgtgtcatgtcttttgtgcttttcgtgtcgtgtcgtgcttaaggacatatttgtcgtgtcgtgtcgtgtcaatttgtagcatcgtgtcgtgtcgtgcccaagtctgtattttttcgtgcctaatcgtgctcgtgtcttcggggctcgtactaatttcgtgttgtgtcaaaaagtctgacttgtatttacagcattatgaacaccttggcagccatgactagtgccttaatataaaaatataattaatttattaataactggtttttataaaattaaggggttagtactatttttttaagaggggttaatatcattttgaatcttgtattttacaaaaattattagctggattctatattttgttaaataaaaaaaatagacataacttaatttttaataatataaccaagggcagaagtatgtagtagcctaggttggccctggctcccaacccaaaactttgatgcatattgttctcattaattttataaaatattattacatggcccctaatcaactatatgttggaaattatttt

SEQ ID NO: 269378 - DNA, 923 bp, Cannabis indica
aaacgacaaggttcataataacaatatgggtagcttgaaacattacattgattctattaagtattgttacactgattatggatccagtttgctcaagttttgacaggttgctgatactctgggttcgtccccccacctgaagattgggtcaagatcaactgcgatgtcagagtcgggttggaatccatgtgtgtggtggcaattgccagagatcatacggaatcaattttgtgggtggcgactaacaagcttcaattcactgactctcttatcggggaagcagcgacttgtttgttagctttggagacggcggccacaatgcatcgcccttttgttatggtggagagtgattctaagatagtaatcaagaacctagagggtatcgattccttttggcagcttgagaactacgcaagacaatgcaagcatctctctacttttttcacttgctgtaatttttcttatatttctagaaactgtaattttgcggcccataatgtggccaagtgggcgtttgccaacaatatttctggtatggtagaagtctctactattccgagtaattttttctgtaatgaccgtgaggtctgactatttgtttccttctaatatatatacgctttaatttcaaaaaaacatactcaaaaacctaccctaaacacaccccaaactcagtttgattcctacagcaacagataagcaaaaccctacctcaaaaccaactcaaaaactagtgttctcaatccaaaaagtaggaaacctacctaaattcacttctaggctgatttggaattgaaattctgcttgaaaaaaaagaaagcttgctaaagaaaatcccttatggtgggctggttcaagcttgcacaagagagagaaggagaagaggttgtgttttgatggttacttggtttctaagtaatata

SEQ ID NO: 269379 - DNA, 959 bp, Cannabis indica
catttcctttaccttgacacgtgtcctccagccgaattttgggtataacagtaatgaattctagtgatttgccctccatgtgttggttcataattacttttggtcaaaacactgttttaccttttctaattacttctttacatttagttccattaattctctagtggaagtataatttaagatccaatctgaatatgtgcacaacattctagtttcagaattaacaattaaagggaacctacattcgatccgttaggaaagtcaggattccataattgtacatcatgttcccaaccatccatgttattagatttctaaaacagaagttgtaagaattatcttctctgagaaactttaacgagtgaatcaaataaactaataacatgaacaagagttcataataactcaggaggccgatctactattgatcatcattatgatatgaattaggtctttatgataaacggcatgttgataaagacaactttattcatatctgcccttgtcatatataatctctattatatacagtaccttcactttgatggctcactacatctgtaatctaaaccaagattatttgcaccgagaacaggcatcagtgaatcgtactagcaaccactgattaaagattccataactttaatatgttgctaactgttttattcatagctaagtggtcttagttctctgtacagctacaagccacaacatcatatatgaataaggatatttctgatatttaatataaattattcaatagtaaatattaataatttaacattaatacatatatcaaatatttgactctttatttaataattagaaatgtctttataggcttttcagggcataaaccctaacaaaattattttctaattgaaaatatataatctcaaaattttccaattttataaattctcaaattataaatttattaagcaaaaaaaatctttttt

SEQ ID NO: 269380 - DNA, 525 bp, Cannabis indica
ttttaagatcaagaatcaacttgttaaactcatcaatctgttctccaatagatttgtcctccatcatcttgaacgaatacaaggcatgtttcagatataagttattcaccaacaatttagtcatatacagactttcaagctttagccagtccctacggctgtggcttcttttacaaccttcctcagaacattatcactgagattcaatatgattgcactatgagcctttgcaagaatctctttcttatccttcttagacaaagaaaggaagatatttttctccaagtagagccttatacaatttttggtgatcaccaccaaggagcatcaagctcactgaaagtataatctgacattaaacaagaccctctagcaacacaatgagcagccttttagcagatcgttttacaaagactaaagacacattttttaataaagaaagtaagcctcgacaatcacaaacaagcaatccaaaccgagaaggcatttcaatcgaacttttaatagcttgaacaacaatcaagg

SEQ ID NO: 269381 - DNA, 528 bp, Cannabis indica
ctctctctgtctctctctctctactgtacacgcccattagggctctacctctgtcttctcttcatctctctcacacgccaaccctaggttggccaccactctaggctatccagcaccctaggttgtccagcatcttaggctgtccaacacttgagatctacctactgattcatactttgtaatcctaagggtgctataccagatcccacctatagtgatatggagagtatttctctctctataaatacaaccaaaaggggagtaggtcattacccgctaccacaagggggtcgaacctctataacaaatctgtgtgtttattcctctttcattctatttgtgtgacatgtggccaacatcagatctatacaaccaagctgtcagtagatcatttttaaaggtcaatagtttggtgctttcattgagagtgtcgatttcgtatcagatcaaacgccgtggttaacacaagaataacaacctgtcgcaccatctgcatcttaggtctccctcaagacccacagactgtag

SEQ ID NO: 269382 - DNA, 772 bp, Cannabis indica
tcgaagacccaagcttgaaaatcgacctacaacctcacttctcctctagtcactgcttctcaaattgctactccaacacctgggtttggtgatcatgatgaatctcattcatctgatcacacattgtcaaagtcttcttcttcgaatggtgcttcaaatgtcgagaaagctatggtgactttgcccacgttgagttcttgaacaaagtccaaggtatccactcctcaaaatcctgaagtggctcttcccaaaactgtctccaaagggaaaaaggtgatgtcttcatcttcataggccaaaaatctaaaacagaatcccccttcggtctcctcttcaggtctcctcttcagattctgaacctgaagaaggaactgaggaggatcacgaatcaaagggttcgtccaattcaagtgaagagtttgtgcccaaagaaccaccctttgctgttgattttgggtttgaaagtgaagagcctgaagttgaacctgttgctgtccctgctgcaattccaaagaaggacaaaggaaaaagacccattgtctctccaagtcctattcttcctcagaaaagaaagaggccctctgggatttctcttgaaaacttaaagcaccattctcattatttttgttataatgatcatgctagagacatgaaattttatgacaataggaagtttactgttgagaaaaattttaatgtcattgctcataagccatttggggtttataacatgttgaaagaaagacaatggatggatactttgattggtttt

SEQ ID NO: 269383 - DNA, 895 bp, Cannabis indica
ctccatgttttgcctatttggcttgcaaacattttatttactagtcgctgataagtggccccagcgttcttcagtccgaacggcatgactttataacaatagagttccatgttggttacgaagcttgtatgttcttgatctgggacgtacatttttatctcgttatatccagaatatgtgtccataaatgacataagctcgtgcccagcagttgcatccactaactggtcgatcctgggaagtggaaaatagtcttttgggcacgccttattcagatcggagaagtcaatacaagttctccaagttctgttaggttttgagacgagaataggattggctatccacgggggataaaacacctcgtgtataaaattgttgactaacaacttgtcaacttcctgttttagtgccccttgcctcttggaatccaggggcctccttttttgtctcttcgtcgggtagtttggatcaacatttaagtgatggcagataatcttagggtcgatccctaccatatccccatgactccaggcgaattgatcctggttcgcctataaaaagcttattagttgctatttgagctgctcgtctaggttcttcccaatgtacacacgttttgtgggatttcttgggtcgagaataacctcttccaattcttcaattggttttaggaggttattttcatcttgaactcggggatcaagatcttcatctttcttctcattttctcctgccaaaatcgtcatcaattgatgactggcctttttatgctacaactctatgcgatagcaatcacgagctagcatctagtcgccacagaccactcccgcgccatctagtgtttggaattttgaagataggtgcttgatagaactgactgcccctagtccgatca

SEQ ID NO: 269384 - DNA, 592 bp, Cannabis indica
aaagaaatttgaatgagaaaccaattcttttagaaagcttttagtttaatgagcctaaaagttattctgcctcacatatcaagttcatttattctcaaaaaatatcctaaacccttaattgaggctcttttgattctcttgacaaaaaaaaattgcttcaaaatttctactagagaatttggaatctacttttataataagattgtgatctatccatatatttaggtaaagaataagaataaagtaaaaaaaatatatttatttatttatttactaaaaaataatgtaggttttacttagtgaatatgacaaattaataattaaaagtattggctaataagatactttaaatgccttttattttaataggtttattttaaatatacatgcatcttttttgttcaactaatgaaagggatgttagaattattattgtggactaatataatcatgagtttaatatcataaacacaatcattaattatgtgtctaatatttactcactaccataatgggatggtcaataattaataggaaattacgtagaatatggcattttttccttaaatttcataaatatggaaaaattaga

SEQ ID NO: 269385 - DNA, 1340 bp, Cannabis indica
aaaaataaaatttcaaaaactaaaaaactgaaaaacacagccaaacaggctctaaacttttgagattcatatgaattctcaaatttcttgaacataaactttaaagtgacgtttggttgggaagaataaaaatataggaataggaatgggaatgagaattggaataggaatggaatggaataaaatttaaaatgcataaaaaaaattattaaatatttttaaatcttgcattggaatggtctttccttccatttcaaaatagaatagtcattccactaaaatgatggaaaggtcattccatcggaatggtattccaatgattttaaatgcaaccaaacaaaggaatgaaataaaaattatttcctctccattccattcccttgcattacctccaaccaaacgccacctgaatccttaaagaatcaatcaaatgtggctcttgataacacttgttagaattttttatcactcataaaatatgcaataacaagattaagtttcatagatactgataatcttaatccatcttgtagagatgatctttgttctgattttgggtgatctttgtactgttctgattttgggtaatgagtttctaagaatacaagacttaagttctctagttttctctcttaatggaggaagatgagaatagagtgtctcttatttttcgaggaccactaccaatatataatctcatagctaggttataactttaagtatttctaatttagcccctcaataaattagaaatatctcttaaaatatctacacattactttaatactcaatgacgcacaattactaaaatgatcactttattttcggtcaaatttcaaatagcaatatagtaatatatatatatatatatatatatgagctcatattaagaatttgaatctaacaattatatggcttcagtctcttctccgcgagttagatgttcctctccaataagctcctactatttattgtgacaatcttatcgcaactcactatgcagccaattcagtttttcattcgcgcatgaagcatctcacattggcttttcattttgtacgagatcaagttcaaaaaggcacccttcatgtgcaacatatatttggtaatgatcaattagttgatggtctcacgaagcctctccctatgtctcgtcttgaggttctctttaccaagattggactagctccaccgccgcccatcttgcaggtttatatagaagatataaacgatacaaagttacaaactagtcacaatcactttcacattagtttcctgttagagatattattacaatggatgaaaatcaagatatatacaactcaattgtaaaaataata

SEQ ID NO: 269386 - DNA, 681 bp, Cannabis indica
ttttcaatttgatcccacaactagatgctatcacaccatactgaaggtagcccttttctatggtagtccatcctcatcataactgttaattacaaagttccaacttactcaaaagatggctttcacacctcagtatgggtagctctatcccagtaaggggcatgacaagaaactaaaacaagaaacgctcaactctgtataagaacattatgtaattccaatcacacataaaaagtaacatgaatgttataaatcaaccacaaaagtatgataagcacaagatcctaaactaattaacatccaaaagcataaacatgatttgtcaaataagaatgaaacaagattagatgcaagtaaagaacaactcaacaatattgtaaaaacaagaacaagagagattaaacaatgcaatctcccaaggattttctgagggagtcaaagcgaattaagtctagggccttggtgaaaatatcagctaattgtttctcagtatcaacatattctaactgcaaagatttattttcaacaaattccctaataaagtgatgccttatatcaatgtgtttacttcgagaatgttgaacaggttttttagaaatatttatggcagtagttgttaggttttatgccctaaataaaactccatttcaatgtaatctattttattcaacatcaataaag

SEQ ID NO: 269387 - DNA, 603 bp, Cannabis indica
ttggcattgtcgccagaaaaataactggaaaaattactggtactagtttcttggtgattttcctggtgattttttcgtcgataatgctaatttcgatgactttgccggtactggcagcaactccgaccactttcccagtgccgacagctactctggcgactttccagcgccttttcagcaccgatgacaactccggcaatcacttaatttcatttgttttatttttttaagaaaaaaaatgaaagaaattttaaaattttgtatggtaattcaatctcatatatattaagtttttattttaaatactatattttttcctattaagtttccttactatatttacctaaattagcttcatttttctcatatttatgtaaatacccctataataatgagtatgtatttattacactgtttaaaagaattatttcaatagttccttatttatttcggcatctaaatattttaaaaaaaaaatttcttataatcgtgtacgatcatttgtaaaattttaaaattttttatataaatttattttttctttatgcgcttaaatagtaaatatttgaataaaaatttataaataatcttaaaaaaaaaaaa

SEQ ID NO: 269388 - DNA, 525 bp, Cannabis indica
aacaatcaatctaccacaaaatatgtcaaaaaccttgaaagtaagagatacaggcaaataattgcatagttatgatttcaaacattttctcatacctcaagtatgataaaacaaatgtgtccatgcacttaaatcaattagatgacaagaattgagactctttggtaagtttttcaaaagtttaagcaaaaacaatatatgtaccaaaaattagttctatgcatcctttttgaaaaattcaattttcataagcttaaacatgattaatatgaagtgtacaagctggaaaaaaaaaagcttcaaaaatgagagatttttgcaagttttactcgttttggtcatagaaggtcattttatgcaacttacctaccaaaaattgattttatgcaaaaatttcatgcaaactcttttctaacagctgatatatgataaaacaaacatgctcaaacaagaaaagcagaaaaatgtcaaaaatcttaacttttcggtaagctttttgatttgcttgaaatctagaaatctacc

SEQ ID NO: 269389 - DNA, 602 bp, Cannabis indica
gatgcttctgagagaaagtttttctcggagtaacccaatctttattctgtgcccttgtaccaatttcctcctgcaaaactagtttcctggtagcagtagcctcaacctgtttagtcctttcctttgtttcctgctcttgcacactagattgagccgagtctctgcctttcaattcttgctgcttttgcttcatctctccctttcgacaatccgccataatgtgtccataccccatacagcttttacacttaaccggaagccactcgtaatcaatgttttgatcaacaatctgcccatattcattgacatattgtatggttctcggaggcgtatcagttatgtccatttcaactaggaccctggcgaattgaacccttatgcgatctttagtatgctggtccaccattattggtttcccaacagtactaactaacgcactaagacaattggttccccaatattggaggccaagatcatggagtctaatccaaagtggcaccgaacgaacaagtttaacagcattgagatcagaagtccagggtcttacaatgactggttttctgtcaaattggagaacccctgcttctaacacctggtctctc

SEQ ID NO: 269390 - DNA, 550 bp, Cannabis indica
cccaagcctctttggccatgcatggccttcgaattaaaaattggccctctccatctcatttggagtccacaagcacataggttttggtttggtgacaccattatccatcaccgttgggcaagtccagccatcttctatggccatccaaactctttcattcaccgcccttaagaatgctcacattttgcttttccagtatgggtaattggcacctttcagcattgggggtcgtgatgtggcttctccttctttgaacatctccattcgtgtacgaacaagggaaaacaaaacaaagatagagagcagtaaactcccagagtcgtgtctggagagggggttagttccaactgagtgttgcagaaaggaaaaaatgcataaaaattaagaattggcaacaatgaatttcagtacactgaatctttcaagaaccctaaggatcaatatttctaacaaaaatagctggctctgataccaattgtaaatcccaagttcttgtctaacctatctttttcatatttagattgattttatcttgatttaagcttgaata

SEQ ID NO: 269391 - DNA, 644 bp, Cannabis indica
agagggagtctatttatgcataagtctattactttgtatttttgagatctatctaatgaatcttatctctgggcgtggcctcgtggtatagtaacaatcttaaaggattgtttaaaccacgtacaaataccttgtgtgtttttaattttctacactgtttgtttttctggttcttctagagttacagagttgttttctgtagttacagaaaaattgttttcagtactagtttcattattccacatttaattaagcatttaattaaataataaaattgggaataataaaatacggaattttaattggtatcagagcgggtcactaaatccttagtgagatcttgagtttattccgtttaaattgttttgtgtgagatgtctttgtttgtagaaggaagctttttcactcgaccacctctgttggatgagtcgaattatccttattggaaggtcaagatgagagcattcatcaagtcacaagatgagaaggctttgagagcaatacttacaggctggtccaacctaccgaaagtgattatgaaggtaatactaaggtaaaaccagaactcaattggactattgaagatgaaaaattatcgggttataataataaggctttccatgctatttttaatggtgttggtg

SEQ ID NO: 269392 - DNA, 1319 bp, Cannabis indica
aggaactcgaagcggaccattaactcctaaaccctaaaccttaaaccctaaaccctaaactctttacagttacccctaagacctaagccctaaatcctaaaccctaaatccctaaatactaaacacaaaactctaaacgctaacttggacacaggcctagaccaatacccataccgagattggaacccaagacccagacccagacccagatcaaaacccaaacctagacctaaactcacgacctaaacccggacccaaacccagacaagaacctggtctgggatctagaccttgagtgggactcgaattgtgtccccgacccggaccctaatagggacttggactcagatcgagacctggacacaaacttaaacttgaacccatactgggacctagactaggacccaaacttgggagccaaactcgaacttgaacttggatcttgactgggacctaggatctggacctagattgggggacctcggccccaaacccgaacctcgacccagatctggaccaaggatcaagacctagatgaggcacttggacctgaaactaggccttaaaactgagatggagacccaaaacttgaccctagactcgagacacgagacctgaccttggacccaaaattgaggacctgactacagggacacaaccccgaacccagacccaaacccaaattaaggacccagcaaaagacccgagattggtactggaacaagaccgagatccataactgagatccgaatttggacctaaggctttgacctaacccgtagtcagtgtttgaatctaggactcggacctggatccgtacctatatctggacccagactcagaccgggatccagacccaaactcagacccagaacgggatcaaaacccgatctcggaaccagaattggaatcataccacgtgtggactagaacccacacatgagacagtaacaggacccaaaccaaaacccatactcagacaagaacccataccgagacttggaccaagaccgggacctagacccagactgagacccgaacctagacccagacctggggctggaacctgaactcagactcaaacgctaaccaggttctggactcggaccatacccgaacccgaatcgaaacacaaacttggactcggaccgggacctaggacccgaacatcaagggggggacccatacctggaaattgggcacctgaactaggaccagaacttgggcgtcagaacttggatcgcgatccgggactcgaccccacacccaaaccttgtcctaggacccacctcgggacttaagatccaagactcgatgct

SEQ ID NO: 269393 - DNA, 460 bp, Cannabis indica
cagcccggctccagttcaagtttttattttggttcccgactgtgggtctcggtttgcgttcaggtcatggatctcgatccaagttcggaggccacagttcttgtcctagtttgtgggcccaattcccaggtctaggtccccaatctatgttcaagtccaaggtcctggcccgggtccatgttcgtgttccggttcaagttcgggtctcgagtcccgatctgagtccaggtcccagtttttgttatggtcccagtttgggttccagtcctagtgcgactttgaggttcgagtccctagtctgagtctggttcttaggtcctaggtccggccccagtttttgggttgggtctaggtctaggttcgggtcccggtcttggtcaatgtctcggtcttgttttacgtcctaagacataggttctgatctaggtccaagtcccggtatgggttcgtgtatgagttt

SEQ ID NO: 269394 - DNA, 517 bp, Cannabis indica
ttgtttatatttttctggaagttatggggctttctgcaatattatttggggttattattggcttttctgtgattgtcttttagttggaatgtgttttgttttcgatgttttatcagagatttatattcaaaattttgtgggtgagcattttttggggtttgttggataactgtgttgttgggattttggtggggtttaattgttgcccgtttagttgaatagagatgttcttcattgtacctcatgatttgttttgtatttgctttatagtgagtttaaagattagtttctactttctgttttgattcttgatgtggttcttcatgaatttgtttctgcattttaagaattttacatctagtttttacattctattttgatttagtgtggttctgttgatttaactggtttaatcggtaggaagacttattttgagttgttgatcacgagtccgttttcttttcaattgttatcatgttgtttttaattgttttgtcaactttagatcgctgtatac

SEQ ID NO: 269395 - DNA, 1405 bp, Cannabis indica
attctcgaccctgccttaatgagtttgggggtatttatagtgtttttgtggggtgatccctagaattgaggtacatgtctttttggaattctcagtaaaggcacacattcccaatggatacatcataggaaatgcatggtctaatccctaggctttgtaggggtttaatggacgtagtcctttatccttcttgactgatgtgattcctcataaagtagccgtcactaggcttactaatcatagcgtagtagctgcagaaagggggttacgccgtcagactttaagacatatggcagttttaatacgccttctcccatgcggcattaaatgtgaggtgactgttcagataggatctgacacctcccggagatgcttagtagtagccttactcttcgggagtatgtgagactcacgtgccttatccaggaggcatgtctaaggctgatccctctggctaaagagacttagctgaattatctaaacgttaaaccctttcagtgtacgtgtcatcatccggttgttccacgtattttggacaaaatcaggggcaacatttacccccaagccttgtttggtgaaaaagtaaacaaggcttgcttagatgcctctggtttccttatcaacttcctggcacgtgccttgggcgcgtggtgacatattaatgaccatcattactgcagttatttactttttgcagacaatgattcgtttcctgtccatttattgatacgacgcattaaatgggtgtcagacgggtactcatacgctttctatcgtcttgatgagtgtttaatccagccgttggatctatagaattcgaaccgattgccatcctgaccgtacgatggtggttgatcacagctatctcacacctgttctggcctataaaagccagccttcttacttcatttggttactttcagcattttaccaaattttcttagagttttctcagagagaaaagaagtttcaaacaccatagatttcttgcttttattccttcgacgttgccaatcttcgttctaccggtgatcaacaccaacctccagccttcaaacttcatgtaagttcttcgtatactgtatacttgcttactgttcatttatatagcatgttttatgatttctgggttggatgtcgaacttctaggaatgggtttgcttgagtttctgtatgatgcgttaaattcctccttttcgcgtttagattacttcttttcactatgtttctgtttaggaatcatcctcatcttacgtaatgacgactttagggcttagagtagatcttgccttttcagctttgtcctttttttttcccttttcttttttttttttttttttttatttgtttgcaatgtcactacctttgggattcttgcaccagactcttgccaaggaaagcctct

SEQ ID NO: 269396 - DNA, 680 bp, Cannabis indica
attgtgttgaaatttttctttatctgcctcaaccacctttcagctaccatgggatcttgacaaccctcaaactcaagcacttggatccgataaaagatctgaaaatgatgactctgttaagcggcaggatccatctgttgagcgggaactgctcttaaggcttcaagaagggcgttcatagggaattcagcttgtggaggttggacattagcttgaggggcgtcttctccaaccattctccttgtcttccttccttttggaggaattttcttaggtttgagaaccaaaaactaatcagttagcgaggattggatgctaataatataaatgtatcttatacgtataaataccaagatacttattactattattatttaaaataaatctaaactatttggtaacccactccaaggtaattaaactcagtgctctgataccatttttctgtcacaacccgagccctatgccgtggcagatatgtaatatccataacttgggtggtcaaaggtcaccctttgacccttgtagaaagataaagcttataaatgatcctttaatttatatcaccaaatactaacttaaaagtaatggattaactcctatattaataagagaataatagtaacaaaattaggaccactcttcaatataaaagaaaaataatattcccacagttatgt

SEQ ID NO: 269397 - DNA, 579 bp, Cannabis indica
agtattatgaaacgattattatcgttgtggctcgattatgatcgagtaaaagataaggttattaccgttatgagtaattactcctgaaaccgcagataggtttcttacttatcatttgcgttatcgggaaacgatagtgacatatatagctcgttgataacgagtggtaagggtgctttatgaagtactgagtttaagtgtttatagtattatgtaagtagagtgtttaatgaagcactgaaattatgtgattataatggtgtatgactagaatgctttacaaagcactgaaattatatggctatagattgaatgaatgtgtacttagtgaaaaggtgaaattattaattatgagttgctatgattattcttatgatgtattatgaatgtgttcgcatagaagtattgatatgtatacacatgttgaatatgtaatgatccattgatatgtataatatgatgtaaataatagtgtttgctgtactttttgtttagtagttttcttgctgagtcattgtgactcacgggtgcttcttggtgcaggtaagaagaataacagttctgttcggccatgagtca

SEQ ID NO: 269398 - DNA, 546 bp, Cannabis indica
ctacactggattgaccactaaaatgggtcatagcatgctctaattgttggatttctagtcgctaactcatgagtgagcaactattagactccacaccacctcaaggtaaccacaatctctagctccacagagcacacctaatagcatttctaatggtaaaattttagaggatgcttagtgaggtggacatattataaggcaaaatattgagatgctatactattggagagaaaaggatgtcattcttgaaatttgcatggatgctttgttgtaacattgatgctattcaattttttattaaaaaaaaatgaatagtatcaatgttattgtagctaaaaattagaatatatattaaataataatgtgcaagatcataattatagtatttttaaagagtgatatacattagagtatttttagaagtaagagtaacaaatatgacatggaagagagataaaataaaatattatatttttaaatgatgtgtaaatttttaacatccttaaagtatgctaccattggctaaggacacaaatccaacaactt

SEQ ID NO: 269399 - DNA, 775 bp, Cannabis indica
gatttttatttgatatattatctctgtttactgatctttattcttggtagtgtttaagactgtttctttctcccatttttatattcttatacgttttttcagttttttatttgatatattatctatatccactgatggttttcttctttaagtagctacttagtgagaatataactaatgctgtctatgagatttgtggaagctaaagtattgttaatgttttattttgtaggataaggatgtatatgttttgcgtttttataatcgcttagatgaggagaagaaaggcgaggtaagttgtagcttacgttctccagtttgtaaattattggtagcaatgaatgctaaagttgcatgacaatttgtgctgcatattccttttagaagttgaaattgttgattctgacctaacttaggatttcgagctgtttcaaactattcttgttcccaagtattacaggacaaatggcttggtcaatggtcaccttaaattaatctatttggagaatactgagttggttttatttattttactactacaagtagctcttttgattcacagcttcctgtttgtggcaattattggtgggtgaagtttcatgttttatggaagagattttagttataaaaagaaaagaggaatgttatataaattttaggccattactcataaaattacatgaagattattaccagggacaaaagctctttagtatagaccttgttcaaaatatcttttcttatgaacaggtgtttccttggagataatttcaat

SEQ ID NO: 269400 - DNA, 523 bp, Cannabis indica
agttttcactcatctcaatcaacttttacaattgttccaacccaaaaccaaaactatataattacaagatgctaaagagcatcaaaccatttcctatcctcctttataatccttttacaagagacttttgtaatcctatttgtaatattgaatttcacaatttgtacaaaaatctctattctttgtattttttgatttcaaaaactatcatttctaattttccaaatctggtacactaaagtagcaaccgttgcacttagtacatgttttttgaacttggacatgcttgctcaagatatccaccgcagcatagcagggagcagtttatcactcaccttccaaccaagccattctttcaaaatacttaaacaatggctgctaaatgtacacttaaagaacagatggctcatcgattccatggctaaaccacacaataaacatgctgaatctttgcagatttgaaaggatactaacctgtctctggtttgtagacaattttagactaccagctaggaaataaagt

SEQ ID NO: 269401 - DNA, 639 bp, Cannabis indica
aaaatttaaggttatgtgattcacagattttgggttttgtttgtgctttgtttttctaggaattagggcattattatctgtaatcatgtgccaatctaacctagaatttacaatcctagaatccatagaatcagactgtcccctatttcctgccataaaatttaaacccaaactctaaaaacctcaaaccatacttgaaattaatgatggaaaaattagaaaccacctaattaagtctcgccagtaagaacttctaaccattataggcgattctaacaagaggttattgagggtagatgccattatttgcgagaagcagcttggcatgaaccttcaaatttaggttatatccccttagcgaggcccatgtttttaccaccagtcattgttgctttttcaccaggtgacttaaatttttaaataatggctcaaaagttcacaaatccaagaccccccataaccctattgtcactttcaaggctgaactgatgaatccaaggttagatccatcaacccttatgtcagggatgtcctgagatcatgtggcatcaaaactagaaaggttgtcgcattaggtctattgcgtagggtgaattcagttgtatccccctgaatgcctggtctgagatgaggattgta

SEQ ID NO: 269402 - DNA, 946 bp, Cannabis indica
aagatcgtgaagaatccaaattaaagagaaggacattcagactcagatcttggtgatactctgcgacaaaaaggatacaagggttagagatctgattggaaggagacatattattccgctgcaaccaatgtaaggtttcctaaactctatatgtgtttattatcattttagaagttcatatttaggatgttaaacaacatacttgctagtaaatccaagatcctggtaaaataaattctaacaaacatgttgaaatagactgccatttcattcgagagaagatcgaacaagccctacctcaactaacgcatgtttcctcacaatagaacctagctgacatttttacaaaagctctacttcctactcattttaatcaaattgtattcaggatgggtgttatcaatatctatactccatcttgaggggggctattagatcattagctttatatcaagattctgttgtaaagttagttaggattcaattagttgttaggcctattacttcatttgcggactttactttgttgcttatatataccttggctcttgtaaaaatcatttaagtgaacaaagattaataagactctatcttcttcacctctcaattctctatttctcataccttcaagaggcctaattatgtttttcatgttaatccctctcaaaatacttcttttctcttcaatacgtatatatttctaagggagtgtatctcaaaaatgattttatttctacttttttttccctatatttttcttcttttctaagaagaaactttttcccattacaaagcctcaaccccaatttctttatatgcttatgatattattttgggtaggattaggggtgttcatgttgggattttatgccctaaataaaatccatttcaatctaatctgatttgttatcaatgaaagtttagaagtcatttatctttacatgta

SEQ ID NO: 269403 - DNA, 1036 bp, Cannabis indica
tttatttatttattagtaattaatcagactctttaataagttaagcacgtgcaagctcttactagtatatatatatatatatatacatatttatgtgtataaatgtttaagtatttgacattaagggtaatgtgtgatgtaggcattttcagatgcctatactattttggagaaggagcttgctaccctatccagtgatgatgatgagtcgtgttcgaaactgtcctgtagactgcttccaaaaattataccaagcattgtattatcataaggttctttcctatgaagcaatcttcttcgtattgtaaggtattatatcaactgtttccttctgaagaattgaaacagttgattagaagaatgttgaaaaattcactggaaggccatattccttttcatactggactcctgttttttatgagcagagcggaaccaaagtaagggttgcttaatgttctgtgtcgaacttaggtagagtttgatatctgtgttctttattattacaacctgcatattatagtctcactttttcctttttgacattttcacttgagacatgaactcggtttgttgtcaactgaagtacagatttgacttcctttgtaagctacatgagttgaagcaaaatgcatacttgtcaaggaatagatggccaaagctaatttgctgtaagcttgtaactcttgttgcataatatttttaaaccagaaattttacattctaatatgtcaattgagacattgatggtatacttttttgaaggaataaattatgaaaattaaaaatgctgattttgatctagtgtatctttatttgaatgtgaatgcacatgatgtgaattgtctgttgttgttgctttaactgattcagtgaatatcattcatgggtggatgtcctgtatcatttttatttgaaaattacattggaaaattcatatttttcttgttcttatttattaactttttagtaatttgacagattcatctgcaggaatatgtccggaaaagaaagttctatacaaattaatatctggtct

SEQ ID NO: 269404 - DNA, 920 bp, Cannabis indica
tagttgaaacactataaaaggaacatgatgctctgatctcatcttcttgtcaacttaactattcaacctaccaaatctagttttcattctctgacaactagtagatgagagacaccttaaatagtgatttcaaacctcctttattgttgatccaattcgaaaccttgagtgacagagtgccatgcccgaacatagctagtcaagtactgaatcatagtgagtaagacggtggtgttggaatattgtttactaggatctagatttactaacaagtatgtttttaacatcctaaacatgaacttctaatacgatataaaaaaacacataaaaggtatgagaaatcttacattggttgcagcgaaattaaatgactccttccgctcagatttctaacccttgtatcctttctgtagcagagtatcaccaagatctgaccctgaaactccttcttgttgtttggattcttcagagtcttacacactatgattgagggcttacttgatatgtgtgggcatccactcaatcactaaggcttgaattttgtttgtgaagaaggctatggtatttttgaaatgagaagaagaagaaggaagaagtctcataacctagattgttcaaaaaaaaaaaagtctcataacctagagagaaaactaggtttttagctttagaagcattagttggataatgagaccatagctttccttttataataaataaaataattatcaaataaaattttcatttataatatttattaattagactccataaagtctcttaattaataaattaaccctaacatactatttcttcacaatcaagccatatcttagtgaaaaattcataaactagacatagtctaattttagaattataagtgattaactaaaatcaatgaactgagtcttataagcagtttg

SEQ ID NO: 269405 - DNA, 960 bp, Cannabis indica
attgaaaaaaaaaaaattaagaaggagaagaacatttcgaagatgatggagatgaaaatatcagtaagtaatgggtttggagtaacatgtatttagctaaaaagaacaagccatataacaacaaaataaccattaaaaaataataaaaaaattatgcatacaataagaaacaaaaaaataccaaatatataacaacaataaataaattaaaatgagtagaaaacataaataagaaaaaaaaaccagaacatctagaacaaaaagaaaaaaatgttaaaacaactgtaaaacaacataaataccttcaacactttaggtatctcaaaattttcatcatcaagttcaaaatcagagtctaaaccttcaatgatcggtttcaaatgttttaattttcgcttttccagagaatgaataattgatttccttttgcgttcgaaactatggaaaatgtagggctatggaagttttctttgaaatatttattacccatttttaatttactaacaaaagcaagagaaaaaaaaagaagaagaaaaagaagaaattcgaacaaaaatggaagatacaataaagatgaagaagaaaaatggaagaataatgacgttaaaggggtcttatttatcactttttttaaaattttgattcttattaaaaaaaaattgtcatttattgtttatcacttctttttttttttaatttgattgttattaaaaaaagaatgaactgccacaaatgtgacaatcaacatcacatcaaaacttttactatttttttttaaaaaaaatttaaatataaaagagagtagaatataagaaagtgtcataatagggttatatcaagtttcatactgttttaaaaaaaatagtataaatatgaacagtataacataaattgaagagttttattctaagaaatagcaagtaaaaaaatgattacaaaggagtaaagggaaaatctctt

SEQ ID NO: 269406 - DNA, 911 bp, Cannabis indica
taattattaaatctgattatattgaaatgagttttatttagggcacaaaacccaactacactaatataaaacaaaaagtgcatttcaaataatctcaacaccttgatatccatatcaagtgtagtatgtagaattctctccataatatgatctgacagtttgtagtcaatacaaactttctccaccattacatttccgtaatcacaaaattcttgataatgtaaaattcctctctatatgtctactcctctagggatactatattgtttactttttgacaactacttctgtgttaatcaagcagtaacactagtagttaattaattattggcacaatgccaaaaatagtatagaactttccatagactgaataagtatgtttcttgcaactttgacgttcagtctcactgatagagttagagacttcaaataagtttttacacttctccaaaatcactgctccacccccaaattaatcgccatcttatcagtagactttcgagcatcaaggcaagtctagaaacctgatttggtgtagtataagagtatcaaaaataccacctttattgactaacatatagttcttcttcttaatcttaagatttacttgattgtcttccaatgttcctttcctagattaatttgataccaactcatttctcccactcaatagcaggtgtctagtctaatgcatacaaagcatatctgcgacctctcattgttgatcctaaggaattccttcatggctttatcttttttggaatgttaaaactttttcttagataaataaaacctatgtctagaagtcgagaagcatctatagatgtggccattagaaaatagctccagcatcttactaaagtaagttgcttgcaatagagtaagtaaattaccaggtataccacaagcca

SEQ ID NO: 269407 - DNA, 501 bp, Cannabis indica
aagtagaaaaaaattacagttttacaaatattaagtatttatgctgctaaaataaatattaaaattatgtaacttacaaatttgaaactttgagtacttataacgttatttattcttttaataattatttattattccaaataatatattacaattgttataccgctaatttgtcatatggtcgataaaatccattttggagattttgttgttcatatgttgaatataggaagcttggaattactcgtatactgtttttttaactttttttttttcaaatttacggtttaggtttttaaagtggttgtagcggtagttgcaatagggatttctgtacgatttttttgttgcaatttagtttgcagcgctagttgcaatagtagtttctatgtagaattccgtaaaaaaaaaaaaaaactgttttgaagtataaaaatgaaaaaggccctaaattttatgtatttaatggtatctagggttagatttttatttttattttta

SEQ ID NO: 269408 - DNA, 767 bp, Cannabis indica
tacaatgcagaaaggtgattatatttttcacctttcatcaatattttcaaaggctgaaatggagcaacttttctgtactctttggaccatatggaatgagcccaaccgtgttgttcatggtcaacaagcacggccagcatctggtttagcttcttttgctgcaacttacctttcgaattatcgaaatgctcaacagaggcacggtacaactgcaacacctgctgcaacaacacatcagcagccacaccagaccacagctacagcagcatcacctcctagctcgaatcctcggccctctttgcaggctgttcctgcagcacagctttggcgaccaccagattacaacctttttaagttgaatgttgatgctgcagtagattccaacagaggtgtaattggagtgggtgctattctacgaaattcaaatggtgttgttgttgctactctttccaaaaagctgattggcaactttcgctctcatgaaatgaaagctactgctctctttcatagcttaaattgggcaattcaacaacaactacccttgtctattgctgaatctgatgctttaatggtggttaatgcccttcgagctcccttcaattcaaactcatcttttagtgatttgattatagatatctcatgtctcttatcctttctccctaatgtaacacccccaaggcaaacgttcggccaatatggctgctcacgatttggcaaagtttgctttaggggtggatgaggcttgttcttggtttgaggaaatccct

SEQ ID NO: 269409 - DNA, 1005 bp, Cannabis indica
aattaattcaaaaaataaagaaaatttcaagcttcatcttcacttggacaatctccacccttctgtccaaccatccgactcaactcgctaggatagcaatccaagtttaagcagctggagctgaaatgagaagaaaacaaacatggttagtagatccagaattaataagccaaggggataataattctctaaaatacaagattttatagcataaataataccttgtttctttgccaaaaacttaggacacttggatttctagtggcccttttcgttgcaatagaagcactttccttttttctttgcatttggattagcagcctttttcttattagccattttaacagctttaaaatgcttcttgctattcttccaattcttctttttgctgggttttgaagtagaggcaatgtttgcctcagctttgcattagcagtgccagaattaggagctttagttcctcctttctgtggtcctccaatcaaattttcaaatgtctgaaggttgttgtttaactcgtggaagtcaagctccaacttgttcatgacataatttgatgtaaaaggcagaaaagctggagtcaaactattcaagatcaaactcacttgagttgtctgatctataacagcttcatgattttcagcctcttggaagtaactagttatttggagcaggtgatcacgcacgttctgatgaggttttagttgtgcattgatgaaattttcggtcgcctcagaacgagcttgaattgacgccatcccaaacagttcagtcaactggttcatgatttctgcagccgtgagagtattgaaaaccttgttttcaaggtgtcaaccatgctggacaacataaagtatcgagctttattgttagcattctgccaacgctccaacttttccttgactgcctttgtcgcattctcacatggctgctcaagagcctcttcactcaacacaaatagggcattttcactaatgagagcaatattaatgttctctctccatt

SEQ ID NO: 269410 - DNA, 725 bp, Cannabis indica
tccttgatatcataccactattggtgaattaagtaacatgctcatataacttaaaaagaataagatttaaggaatatccctaaccaatcatgggtgttgggcaccattgcaatactttttagttataattatgtgatacttgacattaaagttatcattaaaaaaaaacgtaaagtagattttagttaaaaattaattaatatttttttaataaaaaatttaaacttggtaaaaaaataattgaaatattatttcaagtatcacttcttttattattattattattattattattattattaaacctaaatttttttaaagaaaagccaaaaacgtatacattagaattactatttttatattattattattattatttatatagtttttttttaaaacaagatcaaaaacatcaagatatatatattgattgatattttatgtatgtatataaatgaaatttataattaattatatttgatttaagttttaatatttttttttagaatttaatgtttattttataactttcttaaaaatatttaatatttttatagaaaaataattaaaataataataataaaatatcaatttatagatttatgtttttttttttataaaaaaattattaaaataatagtaaaataataatttgtagatttatgttttaataaaatattaaaattgagggaactaaggtggtaagagaaaaaaattattaaaat

SEQ ID NO: 269411 - DNA, 1005 bp, Cannabis indica
caagcttggctcatcaatggtaattttgaattctgagtatgggtagttgttttatcacttgaaaaatgtttattggggtgtattatgcaggtctggaaagtgtggttgggtttggaaatgatttggttagggttttgaattttttggtttctctcggtaaaaccggctaaccgattttacaatgcttgtaaaaccagttacccggatttggcagtagggaaacccaaaaattcaacttgttgtttcgcgtcagtttcaagtttctagttggctgattccctgctagtttggggtattgatatattaagttggagtagataggttttcggtttaaaacctaagtcccggttgtgatttagcgagtcacttatgcgtgttattattgatgttatttaggagcatacaattcgcagagcagttgttccactcagattgacctgcacagttgaattcggaattgaggtaagattggtataatatcatgcatatgttattacatgtttagcgtacatgttgttatgcctgtttgattacattgatagcagtaatagtatacatagagttgtgctgattagtgataaatgtatgttggctaaaatactgatcgatgctgtcacatcaatatggctagagtatgactagcatattgagtataggttgacattatggtcaatagtgttgtcttatgaacattctagactctgtactgtgtgggacacatggattagggttatgattaggtgtatgggcgccagattataaccctagttatttgtatgtttatgttatgcttttcttactgagtctgtcgactcacagtgctatgtttatgtgtaggtaagggcaaggctaaggttgaggagccatgagtacgagcagatgaagattgtttatgtcggggcggttagggcctggagtgtacgatcttgggacatcaaggcttttgctgtaaagtcgctgggcgacaagcgtttgtttatgtatgtagcaaacttttctaaagta

SEQ ID NO: 269412 - DNA, 819 bp, Cannabis indica
gccttagtattttctttgatagactttgcctggctgcgtggttgccacataatccattgtgtacctcagacagaagccgtgtagcttcttcttgagtaacacatctaagtaatggcatggagaatccccttctatacatgactccttctatgatgatgtaccatgcaacctttctcgtcatcttctgagcttcgtttctgttacttgggagttcccagtgttgaggtaggctgctattggtgtcatctagttcagagatttgtcaatcatctcaatttcttccgcacaggtgattctgggttcttcaagaaatttaagtgggattagattagccttatcagttatattgctacttgcaagttgggctatggcattagtagttgtattttcttctcttggaatttgcttgaggacataaatcttggattgtgcaagcatgtcatgtattttgcttagataatctatcatttttttctccttgagcctcgtactccccagatacataatttactaccaattgtgagactacagatctcaatgtgttcgacatgtagttcccgagcaagttttaggccggtaatgagggcctcatattctgcttcattgttggatgctttgaacccaaatttgactgccctgtgtaagtgttgcccccaggtgtgacaaaggcgatccctacaccggatagttgatctgtagccgacccatctacatgtaatttccagttaggtttgtctttattattgctcggctgaggttcttgtactggctttgagttgttttttgaaatattttattctttgcctttacacttaacta

SEQ ID NO: 269413 - DNA, 748 bp, Cannabis indica
tctccaagtttcgttaggtttcgggacgagaacatgattggctatccacgagggataaaatacctcgcatataaaattgttgaccaacaacttgtcaacttcttgttttagtgccccttgccactcagaatccaagggcctccttttttgtctcttcgctgggtagctgggatcaacatttaagtgatggcagataatcttagggtcgatccctatcatatccccatgactccaggcgaattgatcccagtttgccttcaaaaagcttattaattgctatttgagctactcgtccatgttcttcccaatgtacacacatttggtgggacttcctgggtcgagaataacctcgtccaattctttaatttgttttagcaggtttctttcatcttgaactcaaggatcaagatcttcatttttcttctcgtgttctcctaccaagatcgtcatcaatcaatgatcggccttcctatcctgcagctctatgcaataacaatcgtgagccagcatctggtcgccacgcaccacccacacgccatctagggtttggaactataaagacaagtgcttgatcgagctgatttcccctagtccgatcagtgcttggcgacccaacagtatgttgtaagccgagggcaggtcgacaaccaagaagtcttgcataatagtagctattaaaggtgactcgcctacggttaatgcgagctcgattatgccaaggctgccgatgctatctccgatgaatccg

SEQ ID NO: 269414 - DNA, 821 bp, Cannabis indica
tgtataaaaaatgcttgaataggcactgcttcatgttttgaatacacgcgggtattcggacgaacacttcgaatactcgcatgcttgcgagacttaattacttctgattgtcgcttagatctttaggattttgtattctgtaaatctggttgtgagaacattggctaagtctttcaaatggtggatgtatcacggtattctaattgtcatatatgttgttatatgctccttgagatactgagatacacccagccatttgcgacatgcgttaatgttccaataagcgtactctttggctggtagatattctcgaaacggtgggagtacctcagtaacttcagggtcatgcttgagaacgcatgccccttgagtcactgagtttctcccagccgtttttagaggtatatcgcttagctcaagatgcgtgacttattcgcaggttgcgactttagttggactccttgaaatggtgggtgtctcctcatcacctcagggtcatgccgaaagacgcatgtcgctgtggtcactgggacactcctaaccattttttgggactttttctattcgcacatttagtactcgctctgcgattttttatagtttttatgcgggtgagatcacttattttgtttttcacacattcaccacgctgaaaagatcttctatctttcagatgagcgacctgtcggacagtcagctgcttggctcaggaggcaatgcatttgacggtgatgaggaccagagggaagatagctttatcccgacttcgatctcagaggaggaggtcgcacctactgtaggtatagaattaggtccgatgt

SEQ ID NO: 269415 - DNA, 1031 bp, Cannabis indica
atatcgcacgcgtactgaagagaaaaatatcacaggcgtattggagagagaagatattgcgtattggctgggacgtcgataagcttctgttcggtttagtcggccggcgtcaccaatcaacgacggccagtcgtctgagagtggtttcaacaacaatcgtctttagtcgtctgtgaggagttcaagagcagtcgtctgagagtagttcggttcggctcaacgacgttctccgtttcaaatttttgttttcatttattaatttactgttattagtttaattccaattaatgttcttatggggttagaattataaggagttcattccttaataaattttaatgctgtgatcgtatttatgtattgaaactaatttagtttttcccattagtcttgtcttttgacatgattctttaatttttctttttagttcttcccattagtcttgtcttttgacatggctctttagtcttttccttttatttttttttgttggagtcttgtcttttggcatgggttgtgtagttcagaattatcatggtgctatggtaaaagcattcaagaaagagaagattggatgtattcaacccaaaattgctgagataatagacattaaagaagccttgagttggattgcaactcattcgtgggatagagtcatgtgggaaacagatagcttagtgtgtttccaagcgattcagagaagtatttatatgccttcatagtttggtcttattgttcaagatgttcgaaatttgtttttggctttatcttttattgatttgtttttgtaaaacgatccgcaaataagttggctcattgcttggcaagagactcttgtttctctacaggccgtgtgcttcagttggaggactgttcctctgaagtgcgttctattgttttgaacgaatttattaattaatagattgatttttattcaaaaaaaaaaaaatttaaaaattgtactaactaaaaaaatatctctaataaaaattttaaaaaaatttataatatataattaataactaaattct

SEQ ID NO: 269416 - DNA, 612 bp, Cannabis indica
tttttctatccaatcaaatctatgtattatcattttcccatttaaatcatattgaattaattaacaaaataaataaaaataaatagactctaaaaatcaagcacgtaattactcggcactctagtcgtactgatgtgattgtatcaatccacactgcaaatacaattaactataataccaacctatactcaacactctaatcgtactggtgtagtagcatcaattcgtactttaataaattgccaaacatatatcacattgatatccaagtgcaattctatgtacattaataccattcttacataatatattatctaattaattagaaaacataaacatgtatgctaaacatgtgcgtgtgttatactaatctcaccttaacaccacaattaggtgcgtcggccaacctgagtgaaaattattactcgacgattagtggtcctaagtcataatcacgtagaaatggtaagtgtctcgataaaacaattttggagacttaaacttaaaactagaagtttttctatcgataaataacatgaaaatatcctaaatattgagaaaattcaaaaattggtgtaacaccctaactaacttaggcgtattacgtgattt

SEQ ID NO: 269417 - DNA, 684 bp, Cannabis indica
atacttattgggttaaaattaatgattgtatgcttcccaaaaagagtgttcaagaggatcaatgacatatgtagctaggacgtttctctagaaggctacttcaaatggaaggacatttgtagaccaaagaagattgaggagtggggtaataaagaaaatctttgcgtgaagcagattcataatatagtggtaattaaagcccccttagaagaaaatatatagttgaagttgaagacaagatgaagaactattgttctcttcaggatatgtggttagtaatccttacttactctataaatcaggtgtacaagagaatgataactctcctagcttgtttcttttggccaatttagtttggaattataaaaagattattcccaaatactattttatatattgtggttagatagaagagacatgttgaagacatgtagtagctagattacataagtttggggttagtgaacacccaaattgtttgatttgtggctgttaggtctattaattttatgaatttttagagtttattttaatgtatttatatatatatatatattattgttttattatttgaatttatgcttgttatttgtttttgtgtatttttcaagtaaaatattgggagatctctgtttttgcttatttcagtgtttttcaagtcttttatgataaaattggttaatt

SEQ ID NO: 269418 - DNA, 872 bp, Cannabis indica
atatcaatgcatgacttattttttttacactccattataatgctattagggaactgattcaagttttacgtggtgcacaataattatataatattttaaagttactaatttttatattgatatgacaatgtgttatgagatattattgctcatattagagagataaagaaggaaaagtaattgttttattattctgaaaatgtaataataaatgatacaataaacgatgctttatataggggttggatatccaaccctagaatacataccaaactcaactaagaatagccatatcttcatacccaaacactaaatattatttaatatttaatatgccccctcaagatggagtgtacaaatttgtaacattcatcttggaaaataactccttgaaatgagatgggaaaagaggcttggtgagaaggtcggcaaggttgcgtttggtgttgataggaagaagcttcaactggctactttgtacccgctcacgaacgatatggcagtcaatgtccacatgtttgctctgttcatgaaagacccagttttcagaaatatgaatggcagctttgttgtcacaatacatgaggactggatgcggatgagagatcccaaagtctttcaacaaggcgagtaagcaaattatctcgcaagtagtattagccatggtgcggtattcggcctcagcaaaaaacgggaaattgtgttttgtttcttggatttccaagagattaaagagtctcccaaaaagatgtaaaaacctgtcatagaacgtctagtatcggggcaagcaccccagttagcattagaaaaaactttaagttgtacctcattaataaaaaagttactctcggtataggccttgagttgtgtag

SEQ ID NO: 269419 - DNA, 699 bp, Cannabis indica
atgcaaaagaaatctgaaacgtttgagaagttttaggaatttcatgctttggctcaaaaccaactaggtaaaacattaaagatcttggaactgataggggtgcagattatatggatatacagttcaaagacaatttaattggacttggaattgaatcacaatatactgcccctggcaatccacggtaaaatggagttgcacagagaagaaatcgcacacttttagaaatggttaggtctatgctgagctgttcaaccatatcaacgtccttctagggatatgctattcagatggcaaatgacattctaaatgtcataccatctaaatcagtccctaagacacccgtagaaatatggaatggtcgtatacctagtttacgctattgtagaatctgggagtgccctgctcatgtcttaagaaaggaagaaggcaaactagatgcgcgaactaaagtttggatgtttgttagaaagtctaaggagactaggggtggactattttatagttacaaggataataacgtgtttgtttctacaaatgccacactccttggagaagactatacaaagaacttcaagccgcaatgtaaagtagtgttagaggaaatgctctaagaaataaatctaactaaagttccatcatcttatactcaagtagaggatagtcccactccctcagttgaaccaatgcaagttgata

SEQ ID NO: 269420 - DNA, 544 bp, Cannabis indica
tctccagatacaacaattaaagatctgtttaagacacgatattttttgacccagtaaaagcgagaaaatcacaacaacacgattttcaaaatcataaactgcatttacatttcatgatatgtaatcagatcccacgattttagggataatggctgtaaacatattctcgtcgactctgtaatcaactgcccactatgtacttataaatagtggtagccaatctcaaagaagaggacgaaaaactcatatgaaagaggacgtaaaaaaatactcaaaaatctgaataagattgactcgtggactatgcaaaattttgactacaaaaccatgtaaataaaaccttgtgctcatatattatttttttatagcttttattttttctaggtggaattattaccgtgaggctcaaaattggttaacaaaaatatgcgttaatagtttggtgctttcattaagaggctctgtaaaaaagcttagaaaaaaaaaaaaaccttcccttcttttaaagaaaaaccttttctttcatggctgaaaatccagagaa

SEQ ID NO: 269421 - DNA, 531 bp, Cannabis indica
agatgtgtatcaatgatgttttgagaactatgtcgattaagtatggtggactcaataagaaagatgatggaaataatgtgatgttcttggctgtcgtcaagtaaatttcaaggagtagttcacgaagaggaagatccaaaaagagagaagaaggtcccaaagatttaaaatccaaaagtccccttctcggcttattactttatctatatataggctgtagggtttgttagtgattccccacatgtcagggtatctcactaataaatctcgtatactactctttttaatgaataaaatattacaagaaaataaatatctataaaaatctccttgtttctaggcaaaaatcgaacaaacattgggaaagttgttattttcaattgagaatgcaccaatttgaaatggagtgatagaatgtctcctctcggctagaaatgcatgaatttagtgacaagtattgaaacatgtattttagagtgtcaatgctcgcatacaatgccacatgggttatggtagtatccttcaacaacc

SEQ ID NO: 269422 - DNA, 1218 bp, Cannabis indica
ccgtggaggaccgactacatcatcattatcatcaatacttgcgaattgtttggccgactatcgccaacaaactgcaagtatgcttggtacatttgactgtgaaattgttcaggagttaacaatccagacaaaggaacaagaggttgttgtatcagttgctgaaacaaagtaggagtctgttgcggctgttgaaaacccattggctgaaaagatggaccaaatccatttccaagcatttgagagcgagacggttgtggacgcattggttgggttggagctgcatcattcatctcaacatccattggttcccgacgttcacgtgacatttgttgagtcaacatctgtatttgtttctgtaactcaacaactgtttcccgtaagtcaggttgatcagcagttgcaggttgtgagcgtcgtcctgatgattgccctttcaatttgcgacccactcctcgttgatggccacgcctctctctaagagtttgccgaagtatctcaagttcagaaacttgtgaagattcaggagcactatttcgagttgtcaccatcttcctataatataaataagttagaaatcaagcaaagttacaattatttgaaaatatttaaaagttattattttataaagtcttacatatttatttttggcagcctcattgacaaaggtgttggtgtctttcttagtatgacattctttccaagtctcaatgtaaccctttccttgctgataaatataacttgttagaaaattatatttaaagtaaactttataaaatagaaatttaatatattaacttactttttgacgaagaatctcagccatagttaccgacccttgtgttgaagagaatttcatcttttgtcgattgatagagttttgcttcgaccgttgaataaattcatgagttgtgaacaattgacacattagtcgccattggtcttcactaagttcattgggagggttcttgactgcattttcaaagtcttctgggtttttgtaatattctctgaaatgttgcaatctaatattctttctcgttttgtacttcttggccatctcaacaatcaaaatagctattaactttggatggctgtccaactggtaataatggtgcatatgaaattttttttttaaaataacatggtaataatcacatttattaatttagatataaattaataaattattacccgaagtttggttaagatgaggtgttc

SEQ ID NO: 269423 - DNA, 665 bp, Cannabis indica
taattaaattaatctcaacaatttacccttcttgggtcataattaccaaaatgcccctggctcaccaacggggtctttaacatgttaaatttcatataatttcacatatattgaactatataataatataattcctcaattaactcataattatctaattagggttttgctaatccttttcttaatcttgggtattacagttactttcagactttcaccaaattttttcaagttttccagagagaaagaaaccttcgaatcagaaaaccctcaaacaccatagatttcttattgatcttcctttgccgttgtcaatcaactttttactgccgataaacaacaacgcctagttctcaagcttcatgtaagtccttcgcatctcgtactttagtttattgttcgtccacatcacatgctttactgttcatctacttttctaggtttgatgtttgaattttctgggaagatctgtcttgagtttctgcgtaatacattaaattcctcttttctggtggtcgtgttacttctattctatgtattttttgtcaaggacccatcttttctttaagcaatgaccttcaagggttcagagaggactttgtctttctcgatttttacccccttttttttcttttcttggcctattcgtaatgtcacgatctgtg

SEQ ID NO: 269424 - DNA, 604 bp, Cannabis indica
ggcgaacccgatcgaacgagcccgccattaaatcgttttttgattgagcacccttctcttggcccaaaatcacactaccattctccaaaggcccattcggcccaccagaaacttcttggctcaatctttttcttttagtttcaagaaaaatcattctctcctcatcaatatccaaatcagatgccacatcattatatcctttatttcctaaaatatcttctccaccaactccattactatgcacgacacaatctcccacgaatcttgcatggccaccaaccaaatccctattcccatgcgtcactccttgacccaccatttgaggaataacaatctgctgaccatcacaaaaatcagggacattaatgttcctctctcctctcggctggaaatcagcaccactttgctggacagccatcgacgcaccagaacacccaacaccaaaagtcgacgcaccataacccccaccaccagaagccgacgcaccaaaatgctcagtcccacctgaagccgatcggagccacttagctcccatagcgtattgtgttctccgagggaccgccttcatgaaggaaccatacggtttgacaatagaagcaatagg

SEQ ID NO: 269425 - DNA, 1073 bp, Cannabis indica
caaattatcattaataacatttaaagttgatttgcttcaattgatttttatatgtaattataccttcagttgattttttccattaataggaaaagataaaaattggtttacaagggaaagaaacatttttatacttagaaaaaaaaattactttatttatgtcatcctcccatagaagctactttcaattgtcccaaaggcaaaactcatttgaaagaaaggataagctagttatttttgactcgaatattgtgcaatccaataataacaccactgtcctttttcctattctcgtgactttcggccttaaattgccaaattgcttaatttgagaaaaaaaattaaaaaatcactagtgtcaagtattttttgtttcatatcaaaatcaataatgtctgattcctattttgtgttgcataagttgaaaatgactagaaacaacctcccacgaaagaatttcattcttgaaatcaaagtcaagacaatccttgaaagcatttatttttttcaaggtcacttggtgttacattattgagaaagcataagtttcaaatgtataatttatagctagtgtagactcaaaaatgagtcaccattcttccactataaaagtgaacactctcatataaacactttctatattttgctctataaaaatctttactatctctatgtaaacttctaaaatgaataatagataacgtcaaggcatataatttctcaatggccagtcgtaaactgcaattttaatatcacatactatcaaagaatatatatgctcactcgtttaataggccccataaatattgtatgtattaaataataagtaatattatgttttgataaaatattatattatattaattattacgattataaattttaatataatttaaatcgtattatttaatacataataaataatttacattaatttatattataatatttacaaatctgtattagtttgtattataatatttacaaaataaattctttctcaaaatggagagcactattgtttttgtttgtgttgtatttaagtggtgcacacaactcaattggtgcttgta

SEQ ID NO: 269426 - DNA, 597 bp, Cannabis indica
ttggaatctctattattgcaggacattaggtaagacaatagttagcacgtagagttatgcactgtggcgcttatattggaaatgaattatgtgagtaattagtattcgagattagagttattaccctaacatgagcggtttaatagcctagggttattaccctagcgatatatattgtgtaaatattgtgccatgttaaatatatgagtatattgagatttagggttatgtgttcaaggcataactgggttggacttggtagctagaaccgagatgaaccgttctaaggccttattgtatttagacgtgtgagcgcaacacgtagatttatgttacatagacataaataggcatgtgagcgtaacatgcaggtctgtgtcatacaggcatatgagaatggcattaatgattatatagtgtgataaacatgtttatggatattttatgctgtcttgctgggcttggctcacgggtgctctactgtgcaggaaaaggtaaatctgtttctgatcagccatgagtatgagagatggacggtgcatgtacatgttgggttttatgcccgaaataaagttctatttcaatgtaatcattatc

SEQ ID NO: 269427 - DNA, 820 bp, Cannabis indica
tcctctccaagttacaacatgatgtaggttataaaaagtgtaggttaaattcatatgttacatatttatttaccatacacttaatatatattattcacatatatttatcacagtttaatctgtactttattatattataaaataatataacaaatctcaattcttggctcagcatataatgtctcctttaacttcttccctttccgtctaacaccaaccttcgaaggggaaggctcaacttcatatgaagcccaattctcaatctcttcctcacaagcaacttaaattgctctttaaaactaccaaggacctgaaaaatccaaactctcgattaactaaagaacactaaataaaagatcaaaaataaaagatccataacacacttcaagtcactcacatctacttttgatttatctgcatgtacagcagcataagctttgaaattggcttggctgcatgaattaaataaaggaagggaattataaatattgtcttcaaagctaaaaaatattagcgcaaatataaaatcaaatatcatatatatatcatgtatattactatcatatgaaatagtaaatcacataatatataccaccatgctcaccccatgaatggtttttcaaaaaaaattaaatctcttatccttgtattctcacgatcttgatttatctcctcttccatattgaaaagagataagcttttgattttttagagaatctattacaatggaagaaaaaatgaagatacaattaaaactctattgtaaaaataatacaaagattagagtaagagatttattaaatatatgttacaataacat

SEQ ID NO: 269428 - DNA, 774 bp, Cannabis indica
ataattctactataaaagtggtcagtttttgggctttcagatattaaattaccaaaaagttttgatcatatacaaaacatgtgattttttttaaaactaaattatgtgttatacgttgaatgttttggtttgattcacaaataaaactaaaattttatttaaaatatatatctattaacatgttttgatttttttctctctaatatatatatatttataagaataatagtgtacaaaaataaatattttaaaatttttttgaaaagaaatttaggcttaaaatttattacttatataatttactaaaaattatttgttataatttcacattaaaaaaataattttaataatattctattttttgtagtatacattcttattattttatttatttttttaatttggtcttttcttttaagaaaaggaaataagtttgtattaaagattctttagaactacaattaaattgcgtctttttttcttttacgggatttctttttgaaccatttcacagtgttaaatataaatgaattatgttaagttttatcacatatggttaacaaaatgctcagatcgtcttcagtgaaaaaatataaaaattatactatattttatacaaacatttattttgtgatatatttacattaatttttagcagtgtactccaacacacaattataaaattcgattgatgtaaatttattttcaattaatacttctattaaaataccaaaaaaaaaacaattaatactaatttattattatcttattatc

SEQ ID NO: 269429 - DNA, 908 bp, Cannabis indica
ctaatgcatttgaggatttcaaccattgaagggttcaacagtttgctcacggttgtttatgcttcaaacaacaggggagagaggaaagtactttggaaggacttgtgcgatttatcttctaatggaaattggtgtgtgatgggagatttcaatgacattttggctaaggaagagagagtggggcacagggtaaggtcttatcctgattctgatttccttacttgtgtgaatttttgcaagctagaagatgttaaagctagtgagaattttttcacttggacaaataagcaaccaggggctgataggatatattccaagatagacaggattatggccaatcaagcttggttggacaatatgagtttgctgaagctgtatttcttaattagggattatttgatcattctccagctatcctttctttgcatcctcaagttgtgggggggaaaaaccgttcaagtattttaggatgttgaatcccatcctaagtatgactctatgctaaaagacatatggtgcttggaaatttcagggaaccaaatgtatcaagttgtttgtaaactgaagctattcaaagagaggctgaggaagttaaacagggaagattattgtgatttgcaacaacaggttcatgaggccaaggcatctctcgacagtctccaaagccagctgcagcagcagcctcttgaggaaattttacaccagcaggaaagatcagcccgtgaggttttaagtcaaaagcaccaggattactcattgttcttaaaacagaaagttaaagtggagtggattcaagatggtgactcgaactctgccttatttcatgcttgcagtaagcatagaataacgcaaaaccgaatcctctccatagaaaaccaagagggcagcagagttacagatcctgaact

SEQ ID NO: 269430 - DNA, 465 bp, Cannabis indica
gtcgagttgcatactcacgtcagcacgatgttttgcaatgttgatgtggtcaaaggagaagatgaggaaatgaagaatgtctttcatgcattcaatcacaaactttttggtatgctcattcaggtctgagttggtgatcgctgaagctgacactgtctaacacatgggtctggtcgaggaataagcaaatctgagggaactaaatgatgatggaacacccgcctctgctgagacaatcggttctggtagaatggttggctctgcaggcaatgcctcactgtcaaatcctttgttaacataatcatcagacccatcaaagtcgataagttcttcatccctacggctagaagctccaaagcaagtatcagatggtggcatctctaaactctaagtaagtgggaagaagacatcttaaatacgactagactcgtcatgcttgcacacatttcttttgtttgaaatgtg

SEQ ID NO: 269431 - DNA, 1212 bp, Cannabis indica
gtctacttctgtttgatttgggttaaattaactgcgatgtcaaaattgaaagtggaactatgtgtgctgtggtgattgcgagggatcatactaagtctatcttgtgggtggtgacaaacaaactttacttctctgacccgttcattagggaagcgagggctctttgttagccatggagatggtgatctcattgtatcattcttttattttggtggagagtgattctgagattgtgatcaagaacataaaaggggatgactctaattaagggattgaaaactatacaagacaatgcaagtttctcttcacttttatgactagctgtaatttttttttttattactaaaaaccgtaattttgcaggccataatgtgactaaatgtacttttactaagagcatctccaaggagtcggtatatatcatatataccgtgaattttggtccaacaaaactgtatattttgcagcattttgaggttttgtctacagtgcacggtatatatgccgtgcacggtagacactgcatatcttttttttttttttttttatatatataatttaattaatatttattatgtatatatttatattattgtatttataaaattaagaattattttttaaaaaattttacaatgcacatttttaaaagtgatgtacaaatttattcctatttgtttcggtacctgataaacttttttactttatgtttttatatagtcatgtatattatagttaatataatataacaattatttaaattatattagttgaatatatcaattgtggtaatttttgttaattaatatgatattaatttattttattttattaaataattaatataataataaaaaatatttttttagtgtaatttttgatgttgtgactggagtgaaaatattattttacgctaaatttaatgataatataacaccaaattaaatgtatgtagatgctctaataatattaccagtatcgtgaatatttctactattccaaatgttatattctgtaatgactacaaactctaactcttttttaatttataaaggctttttcttaaaaaaaaaagaaaagaaagaagagtatgtaaatgccaatactcttttctgtcgaaaaagggaatgttcttacggacatggtcatcattacacttttacttgatttatgcatttttgtacctttgatgtgatacaaattattttattc

SEQ ID NO: 269432 - DNA, 987 bp, Cannabis indica
gccgcctgacccgagttgagatgaggcaaccgatacttgatccactcgtagaggtgtcacaatcggaataagtttccgatctcgtctttaagatttttgcattcattggtgttgtgcccaatgtcgttatggtactcgcatctcttgttggggtccctccgggaactgtctttgtacagaggaggtggtctccggtagtgtgtattttgcctagtagcaaagtacacacgttcttgggagtccgttaactccgtgtactgggtatattggggagtgtacccccttttctgtcgcttttcctccgtccgggtgctgcctttggaggaccttttactcctcgagccctgggaaggaccggctaggctggcagttggagcggagtgcgagggggcttgtccatttatccccgagggatttccaaaatgggacgatgcgggggccaaggcctggccctggctatatccgggagtagcagagaactgtatgccgctcatcggtggagctgctgctggcacagtgcccgagggctgggctccgggcacatatcccgctatcccggtgggataatatcctccataggccactatttgggcctcttcaaggttaatgtatttttggactctcttctggaaatcctgaaggtttgcagctccttcctgttgtagttcgttccagaatggagtccctgtacggatgcctgcctggagaagggcaagctgttgtccgtcatcaactttcttggttttcgaggcttcctcccggaacctctttatgtagttctttagggtctccgtaggcagctgcttgatgttagtcaaggcgctgacctccagattgacctttcttgcggcgacaaactgtctccggaagttggtctgtaacttattccagcagcccacggatcctggctccaatttcttgaaccactcctccgcggacccgccttagagtaagcgggaagcacagacacttagcgtcattgctgac

SEQ ID NO: 269433 - DNA, 679 bp, Cannabis indica
acctgtacaaagcactggtaataaaacaatcacaattgcacgagaattataaatagagaatgaaattcattaaggataacaaaagcacatattaccggggttaaaagctgcccggtcagcctgttgtctgaaaaatgaaaaataattccaagtttaaagaccacttggccggtcatgatgtcttagaaaaggcccagagcccgaataagatagataaaaatgaagagataaaaggagaagtgtttgaacagctggagtccaaggctcttggttcggttcttcttggccaattggagatggaggatctgttgtttgaacaggaggtacatcagcagcctgaccggaggttgaaacagctgcatcaatttcgccataggccacttgggacgcgcagaattcaaggtacatgtcctaagcatcacccaagtagtcaaagttggcctgaggattaggcttccaaaagtcaaagaagagctcaagactggctgtctccaaggcattgaccttctctttcaaccttggcacctcagatgaaagctccttctccttggcttccttcttgtccttcagccgatgaagaactgctcgaagagaagtcctctaatcctgaagattgttaacttcggcagataaggtctcgatagtctcctcaaaatggtcagctacctcgagatcctta

SEQ ID NO: 269434 - DNA, 566 bp, Cannabis indica
aatctttctctctcatcaaatatgtctaatagttatgctcattctcatatagtattcttcaatctccattatatttctatctctctctatataattaattttagttcatttttttcctcaaaaagatacacataacacatacacatattttttatttttactatggcagattttaatatacatttcaatcatgacttgtgataacatatattcattatgtatttattttaaattcttattgtataaggtttaaattatttggggatcaatgtattttccaaaatggtaaaaataggatccagagcttaatttttgaccacttttttttaatataatcaacttgaagaaaattcttaacacgaatagatacataaaaaagtaaataattttgtcataacacatttagatcagattattattaaattttcatttcacaaaaaatcagttcaatgttctatttgccaattagtaacttttacaaaacacatatccaaaatggtatttaccctttataatattgttatctaatatatcttataatacattttgtttcagcaaatgataat

SEQ ID NO: 269435 - DNA, 593 bp, Cannabis indica
gcttctaaggttaggttattaaaaagataaaaaaaaatggctttaattaatcctttagtggccgaaccctagtgggccctacaagattttaattttaccatcttttaaaacttatctttttcttttcataaatgccatattttaattctaactctttaaatatcaaatttatttatttaataattataattaattatcaaataaaattatcatttaacttatttattatttagaccttacaaaatctcttaattaataaacaaatcctaaattctcattttcttctaaaataagtcattgcttagtgaaaattcacaaacaagacatagtcttattcagaattctaattgataaattaaaatcaattaattgagtctacaagacctagtgtggggaccatggacctatataatcaaactcccaataagtagttataaaatttaccaagtaaatttcctatcttattaatacctcctaacttcactatagattcagaattgtactcttaattacatagaacgctttattcactaagaacaaatacactatgaattatctattatttcaatccgaataatcaaagattctctata

SEQ ID NO: 269436 - DNA, 1117 bp, Cannabis indica
ttaaacaattcaaataattttgttgcatctattttattgcttgattgttgtatgtctttcggttgtgaccgtgttgaccacatttgatgcacctgttctatttttttatatcccaatcagctataaatattcttttccttggtcttctagaccttattttctggtttggtggcagaacaaggataccttttatgttatgtggtacatcccatgttgtgtgattgtgtaccggatatgttgagccggtgtatgtttcaagtcatgttcttgtcgtgtaataatttgaatagtagttgtaaatattcaagttcatctcttttatcacagcaagcgcatgagcacacgataattcgtcaatttggaatcggttgcaactgcatgttttttcctttagattgatcacccatgatcttgctagttctaccacttcaaacatgctctcgttaattggctttatctgcaaattaggtcaatataatcaattgtcaaactatacagtaaacttaaaaataactattaggaaactgtaatgcaacttaaagtttaaagagattttatattttctgtcaatgagttcacaaagttgttgactagcttctctctgctgtaggtgtcaaaaatgttgtggtttttgtgattttttcctgtttgtgtatgtccattgttgtatcaaagctctcaatgactccattagtgttgtgattggtagttctctagctactaagtttgctgcatttagagattcagcaatattagaagtcatagttgaatacctcttgtgtttgttttggtatcttgaccatttatggtatccaacttattgtaaatatggtctaacacgaatgtccaagctgtccagctcgctcatatggtattcaaattttctctctgtgtatgctcttgctgctgcgaagaatggtttatcgagcttgcttgcattcttcttgaaggttgctttcaggttgcttacacaatagccatgcattatttctagaaatacttgagcagctgccttaattatgctctcatgtctgtctgagatcaagcactgttcctctctgatcccatatgtttcccttagttttgtgaaaaatcattgccatgagttgttgttttc

SEQ ID NO: 269437 - DNA, 562 bp, Cannabis indica
aaagatgtctagagttgattagtaaaggtactgcgagcatgccttcctatgacgagatggatacctcgctattagttgtatgtgcttatacgactatcttaccgtgtattatacattaagtggctcattagtcgttatatttcgtcaataatgcgtaatgaggttaatgcctcgtcttgtacacttgaagttacatggtttcttgttaatgcatgaggtaacagtttgtatatctttatctcgcataagactagtcagtcaaccgagttgtaaatatactctgtcaattttacttttaacaagttattccacctcaaatgtaattataattacgtgtgttggttcatattcttcccagtttgacacgtgtcctcctctgatgtgttagctgaatttcgggtataacagtttcttagacctcaaaagcagcatgtatttatattttggggaattatcccatatactatttttttaactatttttttaaatttacgatttgggtgtctaaagttgttgcagtgctagttgtaatagggatttcaatgtagaattctgtaaaaat

SEQ ID NO: 269438 - DNA, 1043 bp, Cannabis indica
cactgcctctgttgtcttaatacaaccgatgaggacaataccagtttagagtcttagacagatagtcacatgaccttgtcgtagtgggagggttttaaggaactcaccctgttatgacttggaagacacttgtgatgaaagtccattgttagtttaaacatgtaatggaaagtctgaataaggaactaagaagtaaagccatgaaaactatggttaaaaccattcatatggagtaaccaaaaggttttctattaaaaggacaagaaaggaaattttgaaaataagtctattcaatggacttaacaaaacttcatgttcctagtgttaaaggtttgaatttatttaaacctatagcttatggtatacttggtgatttaattactctagtgcgagcaacttactttagtaagatgctgaagcatttttctagtgtctaaatcaatagaagcttttcgacttctagacagattttatttatctaagaaaaagtttcaactattccagaaaagataaaaggtcaatggaagaattccttaggatcaacagtgagaggtctcagatatgcttcagaatgcattagaccagacacctgctgttgagtgggagtaaatgagtaggtatcagattaatccaggaaaggaacattggaagacaatcaagttaatcttaagatcatataagaggaactatatgttagtcgataagggtggtattttaacactcttagactacaccaaatcaagtttctagacttaccttgatgctagaaagtctattgatgagatggtgattactctgggttggagcagtgattttggagaagtgtaaaaactgatctggagtctctaactctacaagtgagactgaatgctaaagttgcagggaagatacttatttagtctaaggaaagttctctacagttcttattaacaatttattaactgctagtgttacttcctgactaacacagaagtagctgccaattagtaaagaatctagtatccctagaggagtagacatatagagaggaatttcacaatatc

SEQ ID NO: 269439 - DNA, 571 bp, Cannabis indica
gccttgctcgcataaccttattcatatttatatgtaaaccatacattacgttctttcggtggtttatcctagtgatatataccatgtctaatccagttatgtcttatacacataactcttaacataaatgtgtacactcaatatatactataacatatagaatcttagggtaataaccctagcttgcatactaaataatcactcctacaacatattataggatgctcaaaataaaacctattaagggtaataaccccaactcatgtcttcacttaattaacaatattaccatacatcatcgctttcttatcttcataatattgtagggtaataaccctagaccacatttaattaaactcaaggtgctagtttacagagtccagcttaatgatgccttaggcgcataattcttcattctaacatattaagcatggcataacattcaaaatcattaaatcactagggtaataaccctaggccatataaccgctcactttagggtaataaccctaatcctagttcttaattaatcacaaccataatatacaacatgagcgccaccgcgcttaac

SEQ ID NO: 269440 - DNA, 759 bp, Cannabis indica
cgctttagattgacagatgttgtcccatgttatttgccctacagaaaaaaaataaattttcaattacaattagattggattaaatgttaaaagttagattttaattcgatttattaatcaattattggatgtcaatatcaaaatctaaataaaaaccgatccaatccaattacaatttgatctatacatattaaaaaaattatttatactttttttatatacgataaaaaatatgtttttattatatttttactagattttttttttttaatttgtaatactttgttaattgttttgtatatttattttcatgatattttgttcaattattagttgtagtgttattattttaattatttcaaacttttggttgaattaaacttataaagatgatatatttatatagtattaaacttaactgaaagtttatatatagtttttaagtattttttttcacgtttttaagttaatattaaaaattaggtgtgtaattgaatattcaattaaaaaatgatccaatccaattagtaattggatttgattttgaggtctaattgaattagatcggatgataatttttttaaatcctaattactaggatcggattgagagaacaatattggatcggatcacatgtccaacccaaaaatatagcatggactaaattttacaccacaactaaatattacgtctaattttgtttacttttttttcttgcacattaatgtaattcattgatttttttatgttttttattta

SEQ ID NO: 269441 - DNA, 632 bp, Cannabis indica
gaatcaggttctatgaaactaagcaagggagctatgaccattattacaggccacaagcatgaaggattgtactatttagatggagaaccggtgacacaatgcaacactgcagtcaccagcaatccagaagacttaaaggttgttctatggcataggagattggggcacatcagtgagagaggcctacagatcatgaatgatcaaaggctactgggtaaggacaaagtaagcaaggttgatttctgtgagtcatgtgtcttaggtaaacatcacaggttaaagtttaaaactggcatacataaaactaaacacattttggagtatgttcactctgatctttggggaccagagaaaactccaacacatggtggtaatgtgtattttatgtcaattgtagatgaccattctaggaaagtttgggtatttttacttaaacataaaaatgaggctctatctaaattcatacaatggaaaactcttatggaaaatccaactaatcaaagggttaaaaccctaagaactgataatggtttggagttttgcagtgatgaatttaacaggtactgtggttctgttggaatacaaaggcacagaactgtgaggattactcctcaacagaatggggtagcaga

SEQ ID NO: 269442 - DNA, 1030 bp, Cannabis indica
agtcccagatctagacaccgactactggtctattccaggccccgtattccgaatcccgagtctagatcgggatcattgtcacgagtctcggtgttgttctagtttaggtcccaggtcccgtttttgagtttgggttcaggatcgagacttgggtgcggttcttggttgcgaccctggttctgtgtacctacttaggttccacgtttgggtctgagttcaggttaaggttagggtcctgagtccaggtttgggttgggatctgggtcctgctcccgattcgggtctacgtttgatttggagtccgagtcttgtctggttacgattttggatctaggtccaatttcacttatgattcaaagtctaagtcctagttcctgtcccggtcaacttctttttttggttctaatttagggtcataaggtatgggctcgtgtcaacttttgggtttgggactgggttcatgttcgggtgtgggttctggtgctcgtcacggttcgggtcttgggctgggtcccaaatccagacaccgactacaggttttgtccaagctctgggtcaagatccggatcccaatctcaggtccgaaacttcttccttttctggtgccgggtcatgagctgggtccgaggttcaagttcaagtctttgtcgggtaataggtccatgtccaagttctgtttcccagttccctatcccgattctttgtccaggtccaagttattgtgtgggtttgggtctcggtctaggttcgggttcaattcctagtctcagtttgggtttaggtctctgtcttggtttcaatctaggctcacgtttaaatttagatcctggtccttgtcctggtcctcgtcctaattcggtcttagttccatttgcaatttagatttcgagtttgggtttgagttcgggtcggagttcgagtcctggtctgagttttgggttcgggtcctgatttcagtctaggttcagatcaggctcagggtgtgggtttgcgtcctgggtcttggtctaggtttggtccgagtcccaag

SEQ ID NO: 269443 - DNA, 636 bp, Cannabis indica
cgctccacgtaaataaatgcagtgactatttgaaaatcacacatatgtgatttaatctatttttgaggaagtcaacgctgacatggattaggacacgctgccaaatatatctcgctgaggtgtctcgcctagtacatgaacagcttagtttattcataagtcttccagcaatggcatgagcaccagtgtactgagcaaacttgagaactgctctttgaccataaggccttgcaaactgacaatcatgtccttcaagttattacacttagttattataatgtgtattatacggtaagtgttctaataaccattttaccttgtcaatacttctttacatacagcgaggaagatgcctcgctatgtgtaacgtgcgtgctaagatggcatgttacaagaaaggtgagcccgtgacactatgcgtcgtctatgtcttccctgggattatgccttctgacgcaaaatggtttctcgtcagtacgtgaatcaatagtttgtacatccttgtctcgcttaagaccgtgcagtcagcgagttacaaatatactctattaattctgcatttaatgagttattccattttatatttaatgatataaatatcaatatattttttattcatattccctaagactgaca

SEQ ID NO: 269444 - DNA, 637 bp, Cannabis indica
tgaataacaatataaaaaaaaaaaaatcagttatgaaaactcgttacttaaaataaccagttatgaaaataataaaataatatatgggtgaggaactgattatttaaaataaaacaaaaactgttgttcaaatatcatacaataataaaaatgattttatacaaattaaaaaatatacaataaaatcataaaaatggagcaaccaaactagagaacagttaaaacctgtgaaaccaattttgacgctataaaaaatcataaaaaataataaatgttaaacaataaagttaactgaaaccagtttcatcagataatcaattgaaaaatgaaaaaaagaaaaacacacacaaaaataccaaaaaaaaaaaaaaaactaatcgcaaatataatcaaaacaacacactatgcacaccaataatttgaaaacaaaatataagtgtaagtttcgaacctagaaacaaaataataaaacagtaacttacaataaaaaatttgtaataacatgataaaatagattaacccaattacagaactctcaaaatatgtaacctagtttcgaacaataatttagaaaaaaaaacactaacaaaaataataataaaaaaaacacataccaataatttaagaacataatata

SEQ ID NO: 269445 - DNA, 585 bp, Cannabis indica
gtgataatatatctcataagattattgatatcacttttaaaatatcaccgtatattatctatgatcatatattttttataactcttctagagtatgtgtgaacttctaaattatggacgaagggttcgtggaacatcaatatttatctaacttatttaatcattaatgcatgtgtatatacattgttgttcatacaaaactttgaaattttaagtagatataaacataacacattaatgataatataaattttcattagtgacaatgatggtactccaagaccatattaatttgaatttccatattaaatgatcatatatctataattttttatgcatataaagtacttcaggacttctctactaatgaacaaactatatacatttaatatttctatatatacaaaaagaaataaaagtttattctccagtcatttatataatcataaactctttaagagtctatcacaacgtataatttacgaatttacatacatagacaaccatacgtatttttaaataataatttacttacatgtctttaatttatacaaagattttttttatatagtgcgcgcgactttaa

SEQ ID NO: 269446 - DNA, 1296 bp, Cannabis indica
agagagaaaagagagagttatgagaaaagaaaagataaggttatattcattgtatcaaatttaacacacaataaatactatttttgtagttacacttttgtcattatgattaatgatatactttaatacatatatttatttataatatttataatatttaatttattgatagtgattaatattattttgctttttgactaatttgtctcttaaaatattattgtgcatgggagcataattacaaatattgtgctaaatattatatttatttattttttgtatcaaatttagcacaatatttacaccttgtattaaagattgtagaagatcataggcagagacaaataatgcatgttacatgtttaatttatagcgatggtagaaaatttgcatgtgattgaagtttatatatttgagaagattataaatgcatagaaattggtaatagaaagataatcgtattaaatcataatcaatagatacaattgaaatcgaaagctctaacttttattcattgttaatttacttactttttactttcactattttttattgtttcctagttataattttcactcaaatttatttagccaaatagaagtaagaatttaattttaacgtacttaactacaatcctcgtgggatcgacctcactctttgtgagtattacttgtttaaatgatacgtatacttgcgtgttgcaaattacaacaacagaagtatttattagaccacatttaatatttttaggtcaatccatatccaatccaattatatattggatgctaaattttatcatctgttccaatctaattaattttagtcatctgatcgatccaatatccaatggatgttgaattagatcagttttatccattgatgtatttcatgtatatttattgaattagttctgatttatccaatattttaggtatagttttttggatcggatcgaatcgaatgcatccaatattttagatcatatatttattagattgaattggatgaatccaattcaaccaaaataaagaagaagtaaaaatttaattttaatattcatatatatacatatgggtgcactcttaatgggtattatccatgaatgggtaaaattagaaaattttgagtttttatgcttaattttcctatctaattaaaaaaatctctcatttttatatcatatgagctgagattgttccatcggtaaaaataaaattaaaaaaaaagttttttagcaagaaaaataagaaaaagaaaagttgagtttgagttaaatatttttgtatgaacatattt

SEQ ID NO: 269447 - DNA, 900 bp, Cannabis indica
ttttcaaaatattgaattcatgatatttatattttagagtgattatataaaattattataagttaatatgttataattttctataagtataattattattttaaaaataaatttaattacaatatttttctatgtaaattcaaaattaaaagaaatatataatttgatttaaattttaaatagacataaaaaaataggtttagagttttgttagttgaacttataattaataatatttaagattaattataaattaaaaaaatatattaattatgatatagtttttaaggattaatttgagccattagataaaatcaaagattataaattactatctctattgatatgtaaaatacccaattcctactataatagccccacaaataaatatatatttatatatacatgttaaacatgattaataaagtgagagttatttagaggttgtttattaataaagagaaatattaaaagatactatgggtgcctaccaccttcttacatgtcaatatcgctattggttcagttaagtattgagtcccatatagtctaatgtaataacttttaaggaatatcactaactaatcataaaacaatatgtctagaggtgctagtaaggatgcacatttctcccacggggatggggcccagcggagacctgcccctaatggggcggagattctccgtctaaatgaagaacgggacggggactactttttgtccctgaatattaaacgggacggggacggagatcacaatccccgccccgacggggatccgtttagtattttatcttatatttttagtaatattttatattttataatttatgtttgtatttttttagtatattagtattttttttttatgaattttaagttgtattttagataataatta

SEQ ID NO: 269448 - DNA, 1573 bp, Cannabis indica
tggcaaagctttgaacaatcccagaatattatgggtcaaccattcatttatagacatgacatgatagataccatatgagtttgtttaattcgtacaaaagtaaacttgatagaaatttcatgttacaattatagttcataacatgttaaaaattctcaattttatagttctctaatccgacacagcttaccagggcaggatcacacatggaaaaaagagtatcgaaattcagaatttaataataagtagataatatctacaacccaaaattagataattttttttaaaaaaagtcctaaatatttctaaaataggtgaacgtgaccgatgattgtatccatgttagttgtgaaatgatccaccctatattaatacataaaggcaaagagcctataactaacttaactgaataaaaccagctaagataccacatcaaccatttatcctttttatttattgagtaaaattataatatcattaaaagacatctttcaaagagaacaaaaattcaaatacatctagatcaggccaccaaatcatagctacatcaggagaaagggataacttagccaaattataagctatgaaattagaaaagcatattacagtgaaaaaaactgagaacattaacacttttacacaccaaaagaagatcaataataaaattaccaaattctacaactacatgtgtttttttagaaagagcctcacacacctgagagtagtcagactctacctcaacattctgaaatcgcatagagcagagaatcaagcctcggagaacatccacaactttagcaactggaggcgtcatcgcagaatcagagaaacatccattaaggcaagacaaacactaaatgaatgaaacactgccccacatccaaccttcagattccaacgcaagaccaacatacacattaagctctaggcaaccaactggaggtgagacccaaggtcgaataagagcaagaacgacccttcccctgagcgcaacccatggggtcagtaggagaagcatgtttatgccctaaataaaatttattttaatataatcttatttattaattggctaattagaatttttgccctctgaactttgacatgtactaaatcatgccccttgaacttttaaggttgttaaaaatgccccctaaactattaaggttgttggatttaagggcttttttctaattttagtaaaaaagtctaacatggatgaaagttcagagagcataatttagtacatgtcaaaattcgaggggcatgatttgatagattttaaagtctggggagcatgatttagtacataaacaatcactgaaatagtaaaattgaatgaaattagataaaagtccttaaattcaacaacctcaatagttcagggggaattttaaacgaccttaaaagttcagggggcaaaaatcctaattagccttaataaaagatcaaaaattattttaggatgcttggttcacatattactttcatgattatatgtttaatatataaattctattaaaatctagaacatatagttacccgtgattatagtgttgtctacacagtgaaaaat

SEQ ID NO: 269449 - DNA, 776 bp, Cannabis indica
aaccgccccgatatgtacaatctgcatctactcgtactcactgttgcttagccttagctttacctttaccaacacaagtaaacaataactgtgagtcggtagattcaataagaaaagcataatcatatcgtaacaaaaacggattataattaggtgcccatacacccaatcataaccttatcccacgtcccacatgtactcagtttagattgttcgtacgacaatattattgaccataatatcagcctatactcagcactctagttgtattaatgtgatagcatcaatcagtactttagctaaacatacattcatcggtatccaatataactctatgtatactaatacttggataccgctatatcaatgtaatccaacatgcattcataaacatgcacgctaaatatatattcacatatacatattattatactaatcttatctcgattctaaatttaggtgtgtttgtcaacctgagtgaaactgttgctcgacgctttacaagcccctaagtcacaacatatgccaaactgataagcgatatgctaaatcgcttttcgggaacttaaaattgaaactaaaagttttcctatcgataactagcatggaaaaatcctaagtatcgaggaaacatgagaaaaacaataaaatggggaaactgtcagtttttctagttttgcaccagtaaaaacggtaggtcgtttctgttgaaacagcctgctgttttccactgtagaaaaatataggaccccaaaaatgacctaaaacaaaaataa

SEQ ID NO: 269450 - DNA, 585 bp, Cannabis indica
gttcggtaatagcctaatccttattatttgtattaactcaagaagtaggagaaaggttccttttcttatagctcttacaacaatatctctgaatatgaaatctcagataatatctctccagtaaaatctttcgaccctttgcccagtgaacatacatcactatgtatagggctatgagcttggagaggaagtatttcccttctcgttacaatggatatgagtagaaagattgcataataaatacagaatacacttatcatgggatttcgatagcttgccatatctctacaatctaatccctatgttatagggttttctttgatgactcacgatgtgaaagttgaattcgctaaatgttggtcgctctgtgtggattgttgattacgttgcctcgagcatgcatatgaggtatcctgttcggactatatcttgcaggcagatactcagagttgattccacgtgtcaccatcatgtgattccacgtcagagtgaaaaaatttggataacaatatcattaaatgctaaatggaataactcattaaatgcagaattaatatagtacattcgtaacttgttgactgtata

SEQ ID NO: 269451 - DNA, 957 bp, Cannabis indica
aaaaaaaaaaaagaaaaaagtaaatgaagttgaaaattattataaagtttttcaaaagtaaataaaataaaatgaaagagatatgttgatgtcatgtcattaacataaaaagtaacaaaataaatgaataagtaaaaagaaaaacaatatagaggaggtagatggatgcttaggcaaaaaaataaaaataaataagctagggtgtacaaaatgaaaaaaaaaaaaagtagtgcgccaccacgtatatacctgcccaaaagaaatgtagaaccaaaggtatattttacacgtaaaaacatcagcgttagttatgatatttatttcaaaattttgtcagtaggtgtaaatttctcaaaaaataaagcacaaatttaagcccgtataagaaaacaagccgaccaaagtaaaatatggcacgaatcaaaacacaacacaaatccgaacgcagcacgatacgactcatattcttttatgacacggcacgacacgacacgatcggacctatatttatggcacttgtgtttacaacactagttaggagtaacttgaaccttggagaatcttgcttaactataataatagatcaaatttggtaattttttcctttgactcacattgatcggcttagtcaaatcattaatgtggtttgaagatggatctatcaagaggatttttctataaaatcttaaagagagaagacctgatgtttaagttagtagatgatgtcattatttatgaattataatattttgttaatgagtctaatataaatttaaaccatacaaattatacatagtttcatcccaaagttaggtccagaccccatacacctccttttcactacttcattaggatcaaactctgtctccatgtgaacgacttctctttccattctctacacacactatactgaacttatgatttgcacatagcaagatgtaagaaatagtagattac

SEQ ID NO: 269452 - DNA, 1085 bp, Cannabis indica
gagtcacgggtcctaagtcacaagtcttggcgcaagtctgggtccgggtttgggcctgggtcctggtattgatcccgttctaggtctgggtctgtgttcgattctgcgtctagatccaattttgggtccaggtccaattcctattccagggtcctgattctggttcttgttccgatttcgggtctcgggtccgagtcagggtttaggtcctggtttggaaatggttccaagttcgggtctagatatgattccatgatccagacaccgaatacgggttggttccgagccccgggttgttggtcaaaattcagatcccaatcttgtgtccctgtctcatttcaattcggatcttaggtcccggtctgtgtccgtgtctgggtccgggtctgggatagagaccggggtcaggtcttgggtcccagtccctgtcctggggtcctaattgttgttctaattttgagttttggtccccaatctaggtcttggtcctaggtctaggtttgagcctccaatcccagtctgggtcaaggtccaagtctgtgtctccgttcgcgttcgtgtcccgagtcctgatccgagttttgattaaagtccgcgtcccaatccgggtttgggtctgggtcttagtcagattccagttgtcgaactcaaacccagtctcggactcggacccaagtttggggtacgggtctgggtctgggtccgagtctgggtttgggtttgagtccgggtatgggtcctagaaccaaacacttactacaggtcaggtccaagccccgagtgttgatgtggatcacggtctcgggtcccagtctagttccacttcgggtcccaggtcttggtccggctttggggtcggattctgggtctcagtcccagttctaatgcccgtgtcctaggtccaagtccccaatccaggttcgagtcctaggtcccggtctgagtccaggatccaatcggggttcaagtccttgtccgagcctgggtcagagtttcgatcttggcttgggtctagatctcggtttgagtccagctccaagtatgggtccgagtcctgagttccgatctaggtcggggttccaagg

SEQ ID NO: 269453 - DNA, 473 bp, Cannabis indica
aattagttttctatttttaaaattagaaaagtaaaaatattttttaaaaacatattttatgcctgggtgaaatgggagagtgtgtgccagccgaaatctaagggagggttaggattcaaggattcccagcttatcaagtgtaagcttcctcttccaccaatttgtcaaaggtgtggtgaggaagcagagactccggagcatgctttagtcttttgcccttcattgcgacctttgtggtctcagctgcgggtttggaataagctaattcgtggtagtacgggatctttggcggagttgttggtgtttctttttgaggtacttgatctgaatactttttctttgttggctatggtgtggtggtggatatagtttgataggaactcggtgttgtttgggaaaaagcaatctagattggatgtgattgttgatttagctcgggatgctttggcggaatttcagggggtgggtgtggg

SEQ ID NO: 269454 - DNA, 1323 bp, Cannabis indica
cactgacttgcatttttgtggtccaaaagtcaattggagacacagtgcggtccacgtgactagcagtccagtcaacgtgcgtcaaatatacaagctgctaccaaacaaaagagcatacatatattaccaccgcagtacacgagagaataaaattaccaccatcacaataattcgaaaacttacctgtaaaaatatcgtgcaaccggagacatttttggtgttcttcgtcttgtaccggtgtagagagctcattagatatcgaaacccggcagtcgcccaattcttcttcttaattgaccttgtgtcaactaaagaatgcatgtagctagtgctgacctcggtaccattcttcggcagcaacacagttccaatacagacaaggagaaacttaatgagaaacaggtagtcactgtcgctggtttccttgagctcattctccagcaaagtcagggaatacctatagtccttggccttaaagaggaggtcaaactcaaccaggtcacgctcactttcggttgccacgggttctccgccatcccggattcccatgacatcctcaaacagcttggaggatagttggatcgttcttccaaatatctccagccgagaagtggttggatccacgtgatcgatcagccaactaactatcttagcgtctatgtacggggcatcctcccttaaaaatgttgagaaaccggcatttctcaccatttctttttgagcctcgttgagcagtgggactattctccccaaacgctcgaaggagcaacggccagaaacttgaacgtcccccacaccttcgttgttgtcaatccctggctcagcagataatgtctccttcaccttcttccctttccctctaccaccaaccttggagggggaagcctcgacttcgtatgaagcccaattgtcaatctcttcctcgctaagaagcttgaattgctccttaaaactacgaagcacctgcaatattaagactctcgattattaagtaaagtacgctaaataaaagataaaaaaaataaaagatccataacacactccaagtcacttcaaaaccgccttaaaatttttcttgtgtgcatcagcataagcatagaaattggcttggccgcatcaattaaataaaggaatggaattacaaatataatttcaaaccaaaaaatattaccactaaaataactagccataaataaactcactagtacttcgcccaacgcttccttctacgatccttcttcttttattctctgctgcatccttttttatctgcagcagcccccctcttccgtttataaagcattttagaaacctattacacaa

SEQ ID NO: 269455 - DNA, 636 bp, Cannabis indica
agcttttatatggaagaaaatgtagatcacctattcactgggatgaagtggttgaaagaaagttcttgggtcccgaagctgttcagagaacaagtgaggcagttgataaaatcagagcgcgaatgctcgcggctaaaaccaaacagaagagttatgctgatccaaaatgtcgggatattgattttcagatcggggacatgatatttctcctaatatcgccgatgaaagacattaaacgctttggtaagaaagggaagcttagcctgaggttcattggaccttttgaaatcctcgagaggatagggcaagtagcgtacaggttggttatgcccccagcgttggcagctgtacatgatgtgttccatgtttcaatgcttcagaaatatgtctcagattcatcccatatcctgagttatgaagcattggaactacagccagatttatcatatgaggaacaaacggtgcgagtattagacagaagggagaaagtcttgagaaacaagacgattgaactagtaaaagtattatggagaaacagtaaagtggaagaggcaacctgggaactctagacggatatgcagcacaaatatccggagttattcaggtaaatttcgggacgaaatttctataaggagg

SEQ ID NO: 269456 - DNA, 989 bp, Cannabis indica
caaaaaatttgtaatactttaaaaataaaatatgttcaaaaatctaaaaaaaaccaaaatctaaatgaaactagcaatacgtggctcgacacgtacattcacctagtaactataatatatatcatcgtataaaaatattactatatacaatgtgtaggtaggcctctctactctctcaataatttgaatgattaggtggtggcttttgtatgcaaaaatcatatggtcatttttgtcctaaagaaatatttggcagaacatgtttttttccttaactatatttggcagaacttgagcgtgtttgactgtgatgtgaccaaacaactattcttaatatataatagatgaataatgatgatcgtcacaaaatatacatcaaaattttagatgatgatgtcataaattttttgacatagagttcttttcacatgtgaatatagttgtaatgtatgagtaaaaatttgatggatattatattttaaaaaaaaagcataaataaactagggcataattataccaaaaaaactatattatttattagtataatattttctttatattcataatatatcagctaataaaatattaatacaaaagtttaaaataaaattattgtagcacaacatcattttggtggtgtaatctcagcaccaaattgaaaattagcagttaaattggagtagctcttagttaatcgatatttaagaaaattaaagatataattaagtgaaaatgtgaacacataaagcctcataataatgtaaagcaatgaatataagacaagagaagaacatatgtctatttacttaatgggaaaacgacttataatttcaaatcaagtccaacgtagttagtgagtaccctttttttttaataattatttttttcattaggagataattaattaatttacgtcatttaatttctgaatgatgttctttcaaaaaaaaaaaagccatttaatttttatttccattcttttcaaaaca

SEQ ID NO: 269457 - DNA, 704 bp, Cannabis indica
cataatgcccataccgtgttcgaaatgtcgtctttgctatattttcctctcagacttttaattggtggtacctagatctcaagtcaatctttgagaagacaatcgccccttgtaactaattaaacaaatcatcgatgcaaggcaagggatacttgttctttatagtcactttattcagctctcaatagtctatacacatccgcatactaccgtccttcttcttgacgaacaacactggtgcacaccaaggtgagtaacttggtctaatgagccccttatctaaaagatcttgtagttgagcctttaattcctttaattcatttggagccatctggaatggagcccttgagattggtgcagtgcctggcgctaacttaatcacaaattctatctctcaatctgggggtagccctggtaggtcttccaaaaaaacttcttaaaattcacatactatgtggacattctctagcttgaggggggtttctcttgactaatctactatgctggccaagtatgcttgacatcccgcatgtatcatcctttgtgccttcagggctatactagcggtaggcttgacttgacttcgactccttcaaatatgaatgcctttccagattcagtggtaaaagtcactgtcctctttcggtagtctattgttgctccatgtcgtgatagccaatccatcccaaagctaagatcgtaat

SEQ ID NO: 269458 - DNA, 813 bp, Cannabis indica
tagattctgaagatgaagaagagcttgttgatatgccaccattggaagatgcttctatagaagatgaagagtatgggccagaatacggtgacatgcttgcactagtcaccagacgagcattaaactcgcaagcaaaagaagaggaagaagaggtacaacgtgagaacatttttcatactcgttgtcatgtgaaagacaaggtatgtagtgtgatcattgatgggggtagctgtactaatgttgctagttcatccatggttgagaagctgggacttccaacgcttaaacatccacatccttacaagttgcaatggttgaatgatagtggtgaagtgagagttaccaaacaagttttggtatctttccgaattggcaaatatgaggatgaggtattgtgcgaagtggtcccaatgcaagctggacaccttcttctaggaaggccttggcaatttgatcggcgagtcaaacatgatgggttcaccaacaagtactcattcatgttccgtcaacgaacagtcactgtagctcctttgacacaaaaacaagtctatgaagaccaagtgagattgaaaaaattgagtgatcaaaagaatttaagtgataaaaagaatttgagtgagcaaaagaatgagaaaaagagagccaaaaagagaaaacaatcgaagcaagagagagagagagaaaagaaagagaagagttctatcaatgaaaaaaaatagagagaaaacaaaataatttgtatgcaaaaaaatagtgagattacgagagcttggcatacaaaacaaccaatgcttttgttcgtttacaaggagg

SEQ ID NO: 269459 - DNA, 793 bp, Cannabis indica
tcgaggacgaaatccttttaacgggggaataattgtaatgacagctttagtaatttggattagtaaaggcaattagcactaatgcctgttatttttataattagttatgaatttaattatttgtggaccccattattagaaatggacattagggttataatttctcaatttcggagattttattaaactctagggttattatttgatttatatatgaattacgtaatttttgctcggagacaacagaaaatgcgatggatggctagtttgatcacatgggtaagtttagaaccttaactcttagtgggaaatattttagaaaaaataaaatacctaagttgtaagattaggggcatttttgtaatttgccaagagggtggtttggtggctgcctagggtgtggacacctggtcattttaactcagcaagagaacaattagtttttcattggaagaaaaataagagaaaaataaggaaaaagccaaaattcaagaacaacatctttctttcccttctctctcttcgaaccagccaaaaactaggggagttgctgctaatcttttgtgttttcagcaaggaattcaagtgggattcaagctaaggtaaccctagaatccatagacttgtgttttgaagcttttactttggtttgattaggtgattttaagtattaggggttgtcggggtttaaagattgtgtagtctgatttctaagcttattttgaattgatttaagttctggatattagttttgagctatggtgatggaattgagtaagcttgagctttgaaa

SEQ ID NO: 269460 - DNA, 583 bp, Cannabis indica
tttcctattttatttattatagaataagggaaaccattgttcatgtaataagctcctataaaatagtggcataatctcactattgaggggagacaaaatttagtttagaagaacactcaagagagagaattactcgtagatcaattgtaagagctttagagaggaagaacacgtcatcatttttctcaagtcaatacaacaaaaaagggagtaggctattaccatcctcatggggccgaacctctataaaacctggtgttctttttatcttaatatttttgctttctattaattactttatcttgactccctatcgttggctagaagtgaggtcaacattttggtgctctcattgagagaaagaacacaagcttttgtcttaaagtcttgacaggttcataggatggttgtacaaacgtgaaggggaggcctgactgatcaaggaaattcaatggtgatagatccaaaattaatacacaaccacctgttggatttttaagtccagaacatatgtatttgttcatgagcacagtggaatataatcatgattatatgttcaaaagtttaattccttgatttgtca

SEQ ID NO: 269461 - DNA, 669 bp, Cannabis indica
ctaatttaagtcatccagaccatccactctagcttaaatacaaaatcagtttcattagaagcttaataagtagaataagactaaactaataacgactttcttcctcaacggtaccgtcctcatccactagcatcgaactgagttctcggaaggagagaaaatagggggtgagcttataaagcctagtaggaaaacaactaaatgacccttgatttaataaaaattcatggatggttagcttttaaaaataaaatatctcatcaacattatcaaaatgtataaacaaagtagagagaccataaagaatcacaaaatcaagcgtcaaatgcatatcacaccatccactagatctcttgctctaaataccactcatagaagacaacatccaaaactgggtagtcgcacctgataaccaccataatactggggctcagattcaattcacttcctgtacagattctaggtcttttacctataggtgagtgcacacatgttctatcaatgatgacacagagactagattgtgaaacaacaatatgcatcgaacatgattagcatggctttcatcagtataaccaaaatagacaaataataagaataacaaaagaatatatttctttttattttccaaaaaatccggcagcataacggctgtattttgaataaatc

SEQ ID NO: 269462 - DNA, 855 bp, Cannabis indica
ttgtattgagaattggtgcctctccatgttgcagagtatcgatttagggacccagttgcagatctggcaaatccaacagcaagatttgctgaaatcttggtgctagagtcagctaaattgtaatgtctttccaatctgctttcatgcgttagtaataaagattggatagattcaagggaaagttcatctacaagactagtgacatgcacaacaacagggtcaaattcagggcctaatccattgagcaagtgcattattaagtcattttcgtccattggagtaccagcaactgaaagagaatctgcaagaatttttaccttgtcaagatagtcagaaatggaaatatttcctttctgaattgttgaaagttgagacttgatctgtagaatacgggccttagactgactggcatatctttgttcgagggcgcgccaggcagtgtatgagctttggaattgagcaagtgagccaagaacagattcggacatggacgatcgtagccaactaagaagaagctggtcctttctcttccagatcgtgaattcaggattggtttggccagaaaccaatctttcacggggagagttacctccaaggagtatatcatcgagaccgtgaccgattacggtgggaataacttgagatttccaagcaagaaaattcgatcgatctaatttcaccatgagagaggagtgaagagcgttctggaacggattccatggtggattgatcggagcttgagcagcgactgtgggtggttgagctgcagaacgtggtggattttcagggtgacgaggatccattgttgacgatagtcaagggcaatctgataccatgtaagagcttatctatgct

SEQ ID NO: 269463 - DNA, 765 bp, Cannabis indica
atgagcaccactgcgcttaactctacgtgcatagtactaattcagattactaattcatgaaaatcaaagctccaacttgagcttaattccataaaactcaagctcgagaactcatacatcatacaccaatttaagggtttaataacagaataaaaacacaaatatattcctttaaattctgtccaaacttaacgcaaacaaactcaataaattaaagctcaaaacaacccaacacacttgaacatgcatcacaagttcataaacacaagccacatcactttttcatattctccaacaattaatttttcagcaataaatcaaagattaaaatcatagaagattacctcaagctcaattcaagaacaaacccaaagatcctcaaactcaaagcttaatccaagccaatatcaagcaaattctcctcaagaatcaaatttggaaaaagaagagggtttgagggagagagggtacgggttagaggaagcgaaaccataattttccatttgatttactcaaaatttcatctttatcaattaacaaataaaggtcaaaagaccattttgcccctaggctaaaatcacacacatattcactcacaagggcaaaaatgacatctcacatataataaacccaattaattttcagattattcatcaacaattaaaatgccaataattcaactcaaattgtattttgggcccgaacccgattcggcctgaaatacccggttgtgactataccgcgccaacctgtcagaacacacct

SEQ ID NO: 269464 - DNA, 698 bp, Cannabis indica
tttacttggtaaattctagatccttattggaagcttatataggtccatggtcccctcactagttgagataatgctgcttgcagactcagtcaattgattttaattaatcgattataattataaaattagactatgtcttatttatgaatttttactaagcaagggcttaattgtgaagaaaagagggtttgaggtcaatttattaattaaaagaatttgcatggtctaattaataaataatataaatagaaattttactttttaattaattataattattaaataaatatttttgacatttataggattgaaattggaaatatagtttttttgaaagaagaataagtggttaaaataaagtggcaaaattgtaactagagaatggtcttttatgtggctggccttagtgttgattttttcccaatatttattcttttttaattcatatcattcagccctaagccttagttgaaacactataaaaggaacataaagttctcttctcatccaactgttcacttaaaccaaatcaaatctagctttctctatcagacaactagtagacgagagagttccttccatagtgatttcagcctccttcattgttctttatcatattcgaacccttagtgatagagtgtcaggctcacacatagtaagtcaagtactcaatcatagtgagtaagacggtggtaacc

SEQ ID NO: 269465 - DNA, 908 bp, Cannabis indica
tctgctgccatttgattaatgaaatttttctaatttgtggttcttccttgagatttgcatgtggtatttttggaagattatttacctaaataataataataataatcaaacttggtacacctttaaactatctattaacttggtcatcaaaattcattaaatcacatacaagaatcaacccaaaagaaattgacaagtaatatatataacacttggcactcttttttctaacatgtaaagctaatacaaaaactttgataatatacttactttgttctattactctttgatattgagatgatcttgatttaaagcctttaacttgttctattacttagtcaactcaaccatcactagtttaaaaaaaacactagcaaaatcccaaaataaaattaaaatttaaaaaaaaaaaaaaaacctacatacttaaactcaaagaatcctctaaaatttgatcagttggaacatcataaccataaaccatagagtagtcatccaactcatcagaagtaaactttggaatcctccaacttcttacaacttcagaatcatggccattggttaatagctccaacacctacaatattagaaaatgtatatgtcaattttttatgtaggacccgatacttaattacaccaataataatataaaatttggaagagtactaaacactactgatgtctttcagcatttctctaaaaaaatgaaagaaaatctcgaatatggaatactataggggttgtgtttagttcggtgggaaaataaatgttgaatctttttcatgtttacctcaatttttaaggtgaaaatttttcgatgttttgtgggacgcacatgttttttagtgggtaataaatttctatttgaattccctttccactcacacccaactactcaaaacaaacgc

SEQ ID NO: 269466 - DNA, 661 bp, Cannabis indica
ggtaggtttaatgtaatttacttaaatattatatatgggttttctacttaccgaacaaattctccatgtattattttcgtattaaaccttattattaattgtgatttatattttgtatataattttactttgtaattgttcatggtttgcacatatatttctcttaattataatgccataggaagagagtgatgagccaatcaaattttttaatttaattgcctaattaatgcatacatatttttttggaatatttcttttattggttttgtaccaaattatacaattggtttccgtttaactagaaatgtggaatcatattgtattaattataccaataattaagaatttttcacgatttaatacaatattttacattttagaaagttaaaaaaaaaaaataagtcattcgatatatattaattatacatgttaactttcctatataattcaaaatagattgatatttgtattcaataaatatatctctacaaggatataacaataattaaaatacatatatttatgtgaaaagtgaatcaaaattatttttagggaatatcaaaaaaaaaaaaaaaaaaattaaatgatatcatgttttaattaattctttacaaaagaatattattaacttccataattgttaaaagataggattagt

SEQ ID NO: 269467 - DNA, 530 bp, Cannabis indica
caatatcaataaaaaaattgtgagtaaattaaaattatgtaaattattttaattttaaaaatgaattcttaaaagctctttggaagtgctacaaatcataacttcttacaaaagacataaattgaaaaaagacttttcattatttatcaaagtaccccaaaaagaacttttttaattctgaaaaccaagcttaaatttatcttacaaataataagtctcttagaccatcttcaatggaagatgtaaaagtttagctatattttgtacaaaaagtaattttgtaatatttttacattaacttttactattataatttaatacatttgttttgagttgcttgataggactcaattatattttcacactaaatcctttttaagaaattttcaaaactcttctatgaaaaatgacacgtattcctactaattcatcttcttcacactgccattttaagttttatcttcttaattttatttttttggttttttttaatttttacactttaaagtaattttttttttacttttacg

SEQ ID NO: 269468 - DNA, 645 bp, Cannabis indica
gataccatcaatcttgctggtgatgaggatgattgggttctcccagaacacatcaagaatatgaaagttacggtacctatgaaaaagaagccagtaggtcgtccaaggaaaagcaacgctggaagaagacaggatgaccgtttcccgtctggtgataaaaaaaggatctgtacctcaaaactgcagccgctgtggcagttcaggccacaacagagtaacatgcaaagcccgtatttgaggcgtactatacttattagttttaataacatgttttgtatttcttattcaaaactgctttaaaataaggttgaggttgataattttttgttgtgaatcaaagacaacgttaaataattttacaaggggtgtttactaggggtacaacataaaatataaagttagtacaatgtaaaacatattttaatactatagtacttttttatcgctatgtactaggggtgtttataaaaactgaaaaactgaaaccgatcatcaaaccgaccagaccgtaaccgaatttttggttccacgtcatcaccgaatttggcggtcggtttggttttggcttttttgacatggcggttgggttcgatttttgaaataaaaaaatagtttaaccaaaaaactgtcaaaactgccaaaaac

SEQ ID NO: 269469 - DNA, 650 bp, Cannabis indica
cttaataacatgaactaaactaaaacaagaatttgagtaatttataaattaatatgaattaattgtgagaaacctagttagttacattgtgtaattagtaactagctataattagttactaaatactgaatttttttggataggatttttgttatggataaatcatggatgcgtgaggagagagacacactgcgatttcaagtagggttcgatgcatttttagagttttccttaaagaattctaaaaatcacgatcgtattcattgtccgtgtgtagattgttgtaatgtatctaaagggaatattacaatgattaaggaccatgtgtatttacgaggtttcaatagaagttatactacttggtattggcatggcgaacgtttacctgatgatccatatccattaggaaagcggggggtagatgatatcgagggtaatgatttcgatgatcatccactggacttgcttaacgaagcacggaggaatttcttaatgatcctgagaaattcgataattttctaagtgatgctgataaacccctgttcgagggttgtaaaaaattaagattaccaacaatggtaaagtttgacaacataaaagcagaaaattgagtgagagataaatatttaactcaatttttagctgctttt

SEQ ID NO: 269470 - DNA, 741 bp, Cannabis indica
tggaatacattctgtcaataattaaacaaagtcatcttgcgtagcatatcaattgtttaagggttctaaggtaatcaagcaaggtcaagcaaagagaaaatggctagccaagggagtttggtcagccagtcctaaaaatagagctggtcgactagcacgtgcagatagctttgaaaagagctaaatgaatggtggggtccacaaagaactttctggaagattctcaagctaaatttcaattacgggtgagatccaacaacccaaagatatgcatattccctcaagatagtatccaacattttaggaatttaagtattcttttttgtaatttaaatataagagaaagagttatttttcttaattttgagggggtatttacctatttgaattatgatctttcgtaagccctacactatataaagtgcattaggcaagatggaaaaggacttgaattttaagtcacgcatgctcatagcccttctaatccctacacactcctctatgcttccaagacacttagtttattttcttcacaaagtctcacaagctctgaatctgtaacactcaattctctatactgtaatattgaagagagccatagctagaaactataaggttcaagtctgtaatctgcgtggtattatctcaagaatacaactaaaagaggagtaggtcattactcgttcatcaagggggttgaacctttataaattcatgtgttactttcatcatttattatta

SEQ ID NO: 269471 - DNA, 496 bp, Cannabis indica
cttttcccctaaacgtaaatcggacccatcgggccaaggcatcagacccatcggacccatcgggcccaaagaatcggacccgtcgagcccatcggaccctaagcaatcggccccatcagaccccatatatcgggccatcgggcccatcggattgtcatcttcaacctccagccatgcccccatcggacccgaccatcggacgggcatcgggccccatcgggcccgattaaaaaaattccattttcgacaaatctcttcctaatcttcctaaatctaaccttaactaacagatttcacacaaaattgcaacatattattctatttcatgaatttaagcaccaaaaattaaaggaaaaaattgaaaaaaaaaattatcttagacattttgggtggtctgggcggtcggcgtgggtgatatgggttgaggggggcggtcggccgtgggtcacgtagggcggtcggccatgggtgggtggtctgcgtgggtgggtgcggc

SEQ ID NO: 269472 - DNA, 1169 bp, Cannabis indica
taggctgtgtttcttatgcagtctggaaaagtgattgcttatgcatccatgcaattgaaagagtatgagcagcgatatcctacccatgatattgaacttgcaactgttattttcgcactgaaggtttggcatcattatctatatggataaagatgcgagatctatactaatcacaagagcctcaagtattttttcactcagaagaatttaaatatgaggcgacgacgatggttggaactggtcaaggattatgactgcgagattctctaccatcctagaaaagtaaatgtggtagcgaatgctctaagtcgaacgggcccagggcaagtttgtgaattaaagaagatttcagcagagctagctaaagatatgaccagagcaaaaattgaatttgtagtcgaaaacttgctaacattaccctacagtgtgatttgctagaattagaatggctcagtaaggtgattctgagttacagggtcacaaggagaagctagaggccaaatcagtaaaagacttttcactttcatctgatgggttattacgatacaagaatagcggttgtgtaccggcaaataaaattatcagacaagagattcttgatgagtctcatactacaccgtactccttacactcgagaacaaccaaaatgtatcatgacgtgaaagctttatactggtggccgtgtatgaagagtgatattgtggaatatgtgtcaagatgtttaacctgtcagcaaatcaaggcagaacatcagaggcctgcgggtttgcttcagcctctaaagattcccgagtggaaatgggaagacatcaccatggattttgtggtgggattgccaaggacaatagggtattatgactctatttgggtgattatggatcgatacacgaagttcgcacactttctaccagtgcgaacaatgtatacagtggatcagtatgctgatttatacatcaagaaaatagttggacttcatggtgccccgaagtcgatagtttcacatcgagatccaaagtttacatctaagttttgggaaagcttacaacgagcaatgggtaccaagttaaagttcagcacaacctttcatccccaaactgatggtcaatctgagagtacaattcagatacttgaggatatgctaagagcatgtgtaatggattttgaaggtt

SEQ ID NO: 269473 - DNA, 809 bp, Cannabis indica
ttaaatatgccaaaaatggaattaacacaatatgtcgaaataaactaataggtttattagcatatatgatgataggctatatgaaaaggctattgttatgtaaatacgaaccttatagtttatttttgtcagtttattatggtagtgatgtatggtaggctataggatggtaggttcatgtttgaagcttttagtcgtggggttattatttgaagtgataagaagaacgatagagatgaagcatcgatgatgataatgaagattttgtaattatcgaccacaatgcgaaatgtaaagttgcattttgtttcatatttttgatcaccttgctgtgtcgactgtttggttaatttgtcgcttcgtggtcgaagttgtaatttccggtttacgattgaagctttttatcggttttaatggagtttttccgatgaagttttggatcaatttttttaaagtgttgattgaattgttcttttatccagcaatgatttcgtctcaaatttttcaggtattgtcggtagtttgtggtacgattttagttatgaactcatgatcgatcttatgttgtttatggatgaagcttttttttaatcattaatggagtttttttggtggaaaataatttttgatttgtgatttattattttacaagaagtaaatttataagttttcattttggttggtgtttcatgcactgattcaaagtcttgctattgtaattaatggagaagatagtatgttcttggtgcgaagtgactgatttgtatttttcattacagtaagtaattttttttttatatacggtatat

SEQ ID NO: 269474 - DNA, 731 bp, Cannabis indica
ttaaaatattttttattttttcactcgcatttttctcattattatatatttatgatctatattttaaagaaaataaaataaatgaaagaatcttattttaatgggacattatctttcttaaacaattccaaaaaaaaaaaaaagaagcaaattcagcctcaattttttcatttaaacaatattattttaatgggacattatttttatatacattttctacatcttgctaatttattaataataagagtttgatttaatatattacgtttgtaaaatttaagaggaggccttgtcgtcccttcggggaaatccgataaaattgaaacgatacagagaagattagcatggcccctgtgcaaggatgacacgcacaaatcgagaaagagaaggccttaccaattttatttcaattgtataataaattgatttaaatttaatttttgcttacttcacaattcaaataaattcaaaataaaccacacaattctaaaatttaaaacaaacctcttataagattttatgatagtatcattgggtcacccgctgttttcttgttagaaacttggcttctggacttttaatattttcattataattagtcattaatatgctcatctttagtagctataaattagaatcttcagtacatttaattaatttggtaaaaaaatccattcaatgcgataagataaataaaaaatccttaaggaagaaagtatttttagttaatg

SEQ ID NO: 269475 - DNA, 1109 bp, Cannabis indica
gggccaaggctcccttttttggagttttcccctctgcggacctttcgtggatcctgcacctttttctttttccgaggagtggaagtagggtttttcttttggttcccttcggagggataccttatagggctaggttccctagacttctgcttttgggtacttggtgaggattcttctggtctctctccaagtccagcagggatggctttaggatgcacgtggattcctgctgcctccatggctttttgcatggccagcatcacctcttgcatcttttggttttgttctttttgggctgcgatttcagcttcgtgatcggcagccttttgtctcaagagtaccaactctgtgtagctgccttcgtcgtaggcgtcgtactcatcgaagtttccttcatattcatcatcgtgggttccttcttcttcctcagagcccacattcgctcttgaggccacgtcctcatcgtttgggtcttgagcatcttgaagaggacgaggttgacgtgtgtttcgagtctccaccattgttgttttgtaatgtactgtctactttcagacgcttccttcagctctcaatgaaagcaccaaaatgttgaccgaggttttcggcaaccaatataataataatatttaagaaagctataaggaattaatgagagagatttttacgtggttggggcattaatgagccttagtccacgagtctgtgtatttatgagagtatttattacagagaatgttcttggtggttttcctctctagttcttatgaaacccagaattctcgacccctgccttaatgagtttggggggtatttatagtgtttttgtggggtgatccctagaattgaggtacatgtctttctgtaattttcagtaaaggcacacattcccaatggatacatcataggaaatgcatggtctaatccctaggctttgtaggggtttaattgaagtagtcctttatccttctggactgatgtgatttctcataaagtagccgtcactaggcttactaatcatagcgtagtagctgcagaaagggggttacgccgtcagctttaaaacatatggcagtttcgaatatgcattctccccatgcggcattaaa

SEQ ID NO: 269476 - DNA, 599 bp, Cannabis indica
gatctggacatacagcccctgtgtgtcactatcggttcgataaaaactgggtggttcctcgcaacaatccctatcaagcacgggcaaaccttgcagaagttgagttcgaatatgacccacaggcctataccacaacgatggttcaagattttggcgatgacagctgctggtatgctgacactggggccacagctcatgtaacatttgatgccaccaaccttgacagccagaacacttacaatggcacagaaaccttagccgtgggtgatggtaagaaattattaatttctcatattggtcactctacaattccatcttctaatccctcatgtcctcttcaattaaagtctgtcttacgagtaccatctataactaagaatcttgtaagtgtatcgaagcttgttgatgataatgacatatttcttgagtttcacaaacattgctgttttgttaaggacaagcaaacaggggcacctctcctcaaaggaaagcgtaaagctggtttatacatgctaagtgaggactcagagatttctacttcagctttacaatgtcacttaactactacatctcagtttgatcaccattcctattgtact

SEQ ID NO: 269477 - DNA, 616 bp, Cannabis indica
tatactaaaagaccgtattttattttatgtaaataaaatcgaaaaaatattgaaaactccatacaatctatatttttataatttttttgttatttttgtattttttttgaaattatccctaaaatctttgtggcttctacaccgtctcacaaaagaaggttacaataaaaatgaaaatcgggagattatattcaaaataaatataattttttgaataaaatacatattaaatataaaatgtaccttctcatcaacaaatttggcccaaaatcgtgctttggctctttcataagggtgttggggaagcaaagggttctctttccaaacctcatcaatgtattcaagaatgactaaagactcagctataggtttgtccaagtgtaaaaagacaggaactttcttaagaattggattgtacttaagaagaattggacttttgagaaatactcatactctacaccctttagcttcaacgcccactctactctcgtacaaaataagctctttttcgaaccgatcagcttcaattcttccatattattcctcgtctaaaatctacaacagttagaactcattaggaataagttttatttggcttcaatttgatctagaaaac

SEQ ID NO: 269478 - DNA, 838 bp, Cannabis indica
accacatctcttttcatcccgtaccaccagaagtagggttttaaatcctagtacatcctggttgttcccggatgcagggaataaggtgtggtttgcgcatcatcaagaatctctttcttaagctcatcgacactaggaacacacactcgagctctatacaacaacattccattatttaagactgaaaagtctttaggccgaccagccatcacctcatctcgtacattgactagcttaggatcttctggttgagctattctgattccctctaatcaatcagattgaattgttaagttgtgcaacttttcaaccacaaactcaatccctgcactaaccatcttagaagctagttgaggggctatcagaagtgtggtgcaaacatgcccgggacctcttctacttagtgcatttgccacaacattggctttcccagggtgatatagaatctcgcaatcgtagtccttaacaagctctagccacctcctttgcctcatattcaagtctttctgggtgaaaaagtatttgagactcttatgatcagtataaatcttgcatttttcaccataaaggtaataccgccatatctttagagcaaaaactacagcagcaagctctaggtcatgagttgggtagcgttgctcataatctttcagttcacgagaggcataagctatgactttgttagcttgcatcagaatccatccaagaccctgtttggatgcatcacaataaacaacaaatttctcttgatttgatggcaaggctaacaccggagctgttatcaaacattgcttgaactcctgaaaacttgcttcgcatttgtctgaccacacaaatc

SEQ ID NO: 269479 - DNA, 1059 bp, Cannabis indica
ggcataaaacccaacaggtgcacgtgtgcataacgaggcctcaacctcgctgcgtgaaagagaaacgataacactaaaaacacttagcgtatattatacgatatataaactgagtatagatagtgtggcgagtcaagatagcagacagcgaggcatttatctcactagaagatggtatgcatgcaaggaagatcatctcgacaccagaaaatatagttattgaagttaaaacaatattagtctcgagaagtcaaatgacaagcaactgctcaccatcaaagttaacttggctccattctcggtgaggcatccctatgggataaggcttactgtatatctttaattacgcgttcatcttggcccaataaaagtgggatattcacagctgtgtaaaaacctcatttatttagcttgatttgtaatcaaatcccctgatttgagggaataattgctgtaatgattattgtcaacttttgtaaattactgtccactatgtatttataaatagtggcagacaagataaagaaaggaggacgaaaaaactcacatgaaagaggccctaaaaagaatgcttaaaaatctgaataagattgactcgtggactatgcagaattttaactgcaaaaccatgtaaaaaaccctgtgttcatatattatttttctatagcttttactttttctgtgttgaattatcatcgtgaggctcaaattttgttaacaaaaatctgcgttaacatcgtgaacctctttaaaatcttgtgttctttaatgtttattggttcttaccttatcttattatatttcttatcacttattaactgactcattttcattggctaaaagtaatgtcaacattttggtgctttcattgagagcaataatccaagtttgctctttgcattaagttttatcagacacacaaaatggtggtgcaaactcgcaaaggcgtggttgatcaggttgatccactattggcaaatcctacattgcagactcctagtaatacaagggtcccaccagttaccaatcctgaacaaccaaacatgcaaccacctactg

SEQ ID NO: 269480 - DNA, 1204 bp, Cannabis indica
taataaaatcttcggaattgagaaattataactctaatatttatttctatatattggggcccacaattaaataatttcataaataataataaaataataaaaattagtgctaattgccttttctaatccaaactactaaagcggtcattacagtaggcaagcatctatttgccctttttggcctctggaagcaccgacaaaggtggaataggggcccgcacctgttcaggttcacttctgactgggtcagacccacccttcggtggtttagaccagtctgagcttcctccccgagactccttggacttagcagcttttagggtagaggggtttgcagccgttagctcctcggaaagatcaatgacctccccagcaggcctcttttccttaaaagaggacccctcaccgcctttagacttcttggctggaggagaggcgctagagcttctgcccattctcttcttcagagcgtcaagcatctgttgagacatgtctgtacagaacaaaaaataacatgattagagaaaacagatatcagaaacatgaggcataatagtcaagaagcttaaaaacaagacgaagtggcatgcaaagtgatggcccaattaaggatcaaaagtccatcatcacctaacatcgttcttatttcagacataacaactttcccttttccaagcacgggaggggacggccgagcaggtgagatgggttcccttatgcgaattgcatgttcaacaggcctgggcgaggctcgaagtttcttcctcctcttgagcagagtcacctgctcttccccagcctcatcttcaagattcaagggctcctgagcatattgcttggcccttgcacctccctttaacttagcctcacgcttcagtagaatcaactcatcctcctgatgagctcgttcaacccgtccagcatcagatttcctcttcctccccttcactggtttgggaatgaagtccttgggatagagcccgtacttcacaaagttatccttggaggttaaatggatgatttccggtcttcccccggaagtcgactaaacttttgagatctatcccagagagcaagagtgagaagagggcggtgatatgtcggaatctgctgaaactgagtgcgagtgatgcccatgccatccaccatggagtactcattagtaaaactcccaattttggtgatggctgaatcatcggtgccc

SEQ ID NO: 269481 - DNA, 865 bp, Cannabis indica
gctcccaaaactcctcaacaaaatggagtttttgagaggaagaatcgaacattgcaggagatggcaagagtgatgttaaatagcaagaagctgacaaagcgatgtgggcagaagctattaacacagcttcctatataataaacagagtgtttattcgtcaaggtacctcaaaaacatcctatgaaatctgaaaaaggtaagcgtccaaatgtaagtaattttcatgtttttatatgtgtgtgttatgtttttagagatcgtgagcatattggaaattttgatgctaaaagtgatgttggtgttttcattggatattccttaaatcgaagagcttatcgtatttacaaaatgagaactcaaactgttttggaatcagctaatgtggttgttgataattttaaagatttttcagaattttccacagaagccgagatagatagctttatggatactccactagaagcaacaaaagtagattctgatgcagtagaactcaattctgacaacgcaaatggcgaatctgccgctgcaactgatacaggagaaccagaacagcctatctcgactcatccaaacatcatcactggttctatccagaaggaaccaagcaccagagttaaactgaatcatctcaaggatctcattctgggaaatcttgaagaaagcatggtaacccgaagaaggtatgttaatttgattagctttctttgttttgtctcacaatttgaaccgaaaaatgtgaaggaagccatgacttttgaagaatggctcaatgcaatgcaagaagaactcaatcaatttgttcgcaacaaggtttggattttggttcgaagaccaaaaggtatcaatgtgattgttacaaagt

SEQ ID NO: 269482 - DNA, 643 bp, Cannabis indica
caccttttggagataattaattctccgccatgcagtagggttccaaaccctttatcaaaactatcaaacggtctacctaatttatcaagaattctggcagccacatatgaatgagtggccccaaaatcaaatattatagagaaataagagtttttaactgagagctgacctctaataattaagggactagcttctgcatcagcctgagtaagagcaaacacccttgctagaacaggttttgcttctgtattttactattctttcttgagttgcgggcaatctctcttttagtgtccatgcaaactacactggaaacatcttcgccctttacactcacccagatgatgcttcttacagttggaacattccaggtaagtgtaccgggtttcagaagtaccctgatagtttccacgactctggttttgagggaacctcttattctgatttgagccaccaggtgcagatggtgcctttcttttgtaatcgatgatcgagtcactaccacccccaccataacaagaagtaggaggagcagtggctccaccaacaacctgtcccttgggactcctatatgcactcaactgcgccttcagctcgcagtgcttttttcaccatatcagcataagtggtatgatcatcggtt

SEQ ID NO: 269483 - DNA, 899 bp, Cannabis indica
ctattaccgaactgctcggggctaaacctctataaaattcagtgtcttgttgttgctttattacatattctcattacaacatatcgtttatcgcttatcaaaaagactcattgtcgttggctaaaagcgaagtcaacactctttttggctctcttttttctcattcttttgctcactcaagttctttatatcactcaattactttttaccactcaaatttttcaatgtcacttggtctttatagacttgttttggtgtcaaaggagctagagtgaatgttcgctgacggaacatgaatgagtacttgttggtgaacccgtcatgttggactcaccgatcaaattgccaacgccatcctagaagaaggtgtccaacctgcattgtgaccacatcgcacaatacttcatcctcatattttccaattcggaaagataccaaaaactttttggtaactctcacttcaccactatcattcaaccattacaacttgtaaggacatggatgtttaagcgttggaagtcccaacttctcaacaatggatgaactagaaacattagtatagataccctcatcaatgatcacactacataccttgtctttcacatgacaacgagtatgcaaaatgttctcactctgtacctcttcttcctcttcttttgcgtgcgagtttaatgctcgtctggtgactagtgcaagcatgtcaccgtattctggccgatactcttcatcttctatagaagcatcttccaatggttgcatattagcaagctcttcttcatcttcagaatctatttcaccattttcccaaatcgccataactctcttatttggacattggctagctatgtgtcctcgcccttgacatttgaaacactttatgtcactagaacaagatgaaa

SEQ ID NO: 269484 - DNA, 902 bp, Cannabis indica
ggggatagttgtaaagaccgcttagctttaatttagaaattagaggttaattagggctttattatgaaaattatttattaatattgaattaattatttatgatgatttatttgaattcagaatgcatttttatgtcacatatagaaattttataattttgcatattttggtgcccggcaacattggaatgcggaatatggctttttgaatcacatattagtactgttttagtatagcgggacaatagttagacacttggaatgtcgggaatagacgggattttagagtttcccaaattacccctaagtaccctttttatgttattttatgtgggaggagcaaaatggtcattttgccccatttggccttttgtcttttgtgaaattattaagttaattaaatcagtttttttaggttaataggctgatgtttttaaataaaacaagatttatttactcattttcctaaaaagaaaaaaatttaaaaaaacaaagaaagctttttgggtctcttttctctctccttcgaatcccttggggaaggcagcttcttggtgtatttgcagctggtttttactgatttagagtgattcttggaggatcttttgaaggtatagcttcagtaaccttctcttgtactttctttggttttaaagaaatgaattttttttgcatgaggtgttgttgttattgttttcagtagttaatttatggttgtataaggtgatctgggcaggttttgatagttagttagttggatgagcaagctttgagtttttgaactcaagcttggctcatcaatggtgaaattcgtttctgtttatgggtagttattttatcacttggaaatgtttattggggtataatatgcaggtctggaaagtttggttgagtttggaaacg

SEQ ID NO: 269485 - DNA, 658 bp, Cannabis indica
atatagtaaccctcacaatcgtagcaacacaagttatttacacatttttaacagttctttttgattctcacttgtactccattattgagataaacaatgttgtcaaaaagtaagtcgtatgagcagtactttgtatattttagagatcaacaaatataggaatatcaaatatatatttgattataaaagtattaattagtactatgcaagtggaaaaacaatcaacggttttgtttattgaagaagagtcatactgaaaagaagaacgttcatcatcttcataatcaaataatgttgaaaaagaattccattattgaaaagaaaagggggaaagttgaaaaaggacataagctttctgtacgataaattttagagaggacctaaagcagagcatgacagcaattaagattccgcaaaagccaaaaacagcatatttgaagcagacagctttttatttttaaatgttgtgaaatgaaaagcagcacaaaacattttgtctcctctatatgatttttctaaggccaccaacggtacaagccattgtactgtacgatggaaaatatacatgaacttattgtctcatatggccactcgttcattgcataatgaaatggttgttttttgttctgaaacattgatacacagtgtcaagattagt

SEQ ID NO: 269486 - DNA, 1746 bp, Cannabis indica
gccttaacattatctatacaatattatttacaaactcccaaaccattccttatcttttagctttacttttttagacattacaagcactactctactctttacactccatttaaactgctgtatcaaatctgacacttgctgttagtaattataatcttctcattccatatccaatcattccttgcttgttagtaattataatcttcaatttattcatgtataaaataaataaaattgagttacatatatcttgaaacgttaatgtgttttggtcatacaaaaatataaattattgatttattgttaataagttggaacaaaattgatttctttaattgcttgtttgtaattataaattttgttttgataaataattatttttccttaaaaagataaataaagtttattgttgattaattggttaatttatgcaattaaaatatttttatacatgtaaaatacaagttaatttaagttcttggaaaatgtttagttgatttgtagaaaaaatagaatcaatacttgttctagttcaaagcaatggacattgagatgagaacaatcagtacactggtttcgaagctactgggatatgcatccaagaaaactgcaaatacacataattattggacaaattgttgagaaaacataactgcaatagaaacacaactaacctacaaatgcagttttaggtacagtttggatatccagcattaaagatcacggatgatgaagcctagagttttacttgcagttaaaatcaagagcaaatgacatgtcaaaacattctttttacataaatatggtccccaacacaaataccctttttttttaatgaggttgacacagggtaagaagtccacatgcttgaatatggtactcagttagggggaacaccaacacatcaacaaaaagaaaacacaaaagaagataatgatgtatttgactttgttgactatgcataaataattgctgcagaaatgatggaacaactaatacgacagacaaatgatcaacaagaaattaatgatgaagaagcattggtcatcacagataaaaaaatatccaaaaattgagaaagggcagatgtacaaagataaggaaactttgaagagcgtcatcagcaactttgcaataaaacaaaaatttcaataaatgtaaaaaaaaatcttgcacaaaggaatttcaaattgagtgtttggaaaaagcaacaaagaatttcatagtaaggaaatactatgaaaaatacacttgctcactaagcatcaaatttggggatcaaaagcaagcttcaggaaagataataggggactgtgttaaatacaagttcttaaacataaaaataacagccacaccaacagatattaaatttgagatgaatgataaatatgggttacaaatgaattacatgaagacatggaggggtatggaacatgctcttaacatagttagaggaaaagtaaaggagtcttatcagttgctgtctagttatatctatatgctccaaaaaacaaacccaggatctgtagtgcacattgaaactgaagaaaagaacaacttcttgttttgtttcatggcactaagcgcttcattgaaagcatagaaaaaatgcagacctataatagtagtagatgaaacttttctaaaagctacatatgggggaacactactaacagctagtgcacaaaatgcagcaagtaaaatattcccactagctttttgtgtggcagattcaaaaaatgatat

SEQ ID NO: 269487 - DNA, 835 bp, Cannabis indica
gatcttctcttcctgtgtacattgcccatgttggcattttaaacttgtggggcaacgccaggagattgttctcgggagagaaaggagtgccacgtgctcggtccagctcgagatcattgtttctttgtccagctatgccttggaacatatttttcagttcatctagttgtgcctgtatgggtgggctaacttgctcggcattctggtcaatttgaatcacgtctgcatctttctgtgcaggaatttaagcacgggctccaggctacacgatcttcgtgacattctaatcgtctactcctctccttccattcagatcattccttaggtcatgagttgtccccaatctttcgaatacagaagcgattggctgccttagggattgatttgcttggttcaggttgaatggcaccgttaatctggttggaaccatcaggtatgatctctcctgatgaattactagacaaggtctacccgcctaccgcttgacccacaagtggaactcgtgaccggggattgggcggttgaccttttgtagtctggaaagtattcatcgctggatcttcatttgtctcacccagggggacgacattcggaggttgctgacctacagtttggtaagcttttcgtattagcattgtagcttgccgactacgattttaatctctgtatgatgagctcttaacgcctccatctctctgtctctccactcggtaaacatacgcctttgttctttgaacgcgagattcaccgcagcgcggagatcttcctgatcatgaggtagggtattgttatgaccctgcatgagtccaagaacgtcacggagatttttgtaact

SEQ ID NO: 269488 - DNA, 1043 bp, Cannabis indica
aagatatgcctgtgagagaaaacccaactgttaattaatacttatgagtcttttagtaaaggcaccatatctacaacaactcatgtaataacctgattctataaatcatcaacagcagcgttttatctccataagagtttaagtctaatcatatttatgaatatgatgattaaatttatgaacttttacattgccaaaccaccttattgactggaggatgtattttcttgtaaatttatgaatgggataatatttggcacttttgaagatgttctgcttcacttaacagccctgagtaagttgaaaactcgagaaaatttacatcaaacacaagtcattttacataattttcatagtttgggtgtgttttatgtgaaatgtgcttggagtgtaagtgatcatctatttagggtttagggtttagggttgagtggctatatagacttctaatacaaaggattctaaagttcctcattttccatgctttttaatgacactggtcattatggttgtacgaaaatccatactaagctaagctattcttttcaataatatagatttttaaataggatgctactttgcaattcaaacgatctctcatcatcctttataagaagcaaatcaacctaaccaaatgagccaaattaagctatcatcacatggattcagcagccagagccgagaatcaagagtctaagcttgtgtttggttggagttaatgaaatgaaatagaatcgaaatgaatcaatttttatgggtgcattttatagtattagaatatcattccgatgatggactgacttttctactattttggtggaatgactattctaattctattcctattctcatttccattcctaattcgatgctttcattccatccaatcaaatgcaacttaagtgttgattttcaacttctttaccttagtattagagtgttctactcttacaaagtgtgggaaaattcaactatttataaagagattagttttcaagttgaattctatgattcttatatcatatccaccatacatttatact

SEQ ID NO: 269489 - DNA, 523 bp, Cannabis indica
tgaatgttggatcgatttagatgactgaaatgaattaaattagatcagatggtaaaatttaacaaccaatatataattagatcgaatctgaatagacctaaaaatattagatgtggtctgatacatacccataagtgtcataagactcataactttttctcaattgcatttttgcaatatgtgaagtaatattttagtaaccagttgttctaaatcctaaatctttatatgagactcataaatttttctaattaacttggctttatggaagcttagttattaatttttttttaaagaatttattttttttaatttgttaggatttatttaacttctttatactaagttaatattgacgaaaattaagactgcatttggaaatatttttttaaagtatttttttaaattaaaaagtaaaaatattatcagtaaaaataattgataaaactatttttcattttttattgttgaaatcaagaatcaacattttagaaaaaaaaaacaagttgccttcaaattattt

SEQ ID NO: 269490 - DNA, 1175 bp, Cannabis indica
  modified_base (1122)..(1122): a, c, t, g, unknown or other
agtaaagatactcaatctctacgggtgtgggacaaccccaattcataattttgtacaaaactttcaaactagtgagaatcgtataagagatgggattcagctggaatgaggcaaccccaatattgtttatgtagtctttgaagtagtcccgaagagggaggatggcccctgcacaaatatgctcaaggctccaggcgcccaaactagttgaatcactagtacaagtcttaccactagttcctgggttactactagcaaagcgtgcagggggtgaaactgaattcaccctctcgtactgacctaacctggcatgatttcccaagtgcaattccataggtcttcaacatctctcccgtattgcgtgagatagatcacaccttcaattctatcaactcagcctcgaaggtgaagttgggatcctgaggagttttagacctacgtggcttgggaggcataatttcgaaatccaagtcacctgcttcaaaagtagttgtgatgttaagtaaaaacaaaggctttgccacaagaataaaggacacgctaggtgattctggccaggctgcttctcacaagaatcggcatctgccttcgaatatttcttgcaagaagcgcctatagcgtctagaaatatcttcctgttgggttctcactgtgtgttccctagccctagcatcgtttagctctaatttggaagtggcttttggtgggttgggtttatatgggatggccgattcagtaggaaactcaaactctaaaacttctagacgataaattcttgaaccagagtgggacattgctgccagcaaaaaatagtcccaagccctgaagagaattttatcaaaccagaaggtaatgagttggagatcttaaaacaacctacacattgcctcaatcctagtatgaacagttttaaccctaaaaaaaactaccaaaaccagatgagatgataatgatacaaacaaatcaagtaactaatccacactatgtaacaaacatgagaaagaagaaagtaacttaccgtttgaagttagggattggagcaatgcctggggattccgtcttcaaaccttcaaatgaagcaaggatcgctttgagaaaatgaaagtcagaggaaaactcgcnggaaaaagggtacaaggacaaggaatggcatgcaagctttggatggattaatg

SEQ ID NO: 269491 - DNA, 836 bp, Cannabis indica
tgttaaagcaaaattcgagttttctagttttcacaacttagctacaactagagctctacatttaagtcgaaatttttagcatgataccaaactaacacaaaattaattgttacaattataacacaacacgaaaaaaatatgaacttataagattcaacataatacaaaaaacaaaaagacttagtgcatgtttgatatcgtaattaaaaaactgttttttttatttttaaaacagaaaattattttttaaaaacaaattaggcttgtttggccttgtttttttaaaaacagtttttagaaaacaaagttacaaaaaacaattcacttttggttaatattgcttttagaaaacactaactaaacatgacttgtgttttgaaaacttcaaaaactattttttgttttaatttctaaaaatacttttttgaaaacaaaaaacagaaaacaataacaatcatgctcttaggcatgatataaaaagtataggcttaaacacagggctacatgaaagcacgaaaacaaagcacaaaatgaaaagtaaaagattttttatttttaaatccacaaatataattcatatatattttttcaaaaaaaaagtatttcaaaaaatataaaattacaaaaatattttcatttacatttcaaaaattaaaaattatttaaaaaaaaagtactaatacttgccattagcccataatagccctactaaaaaaaagggtcggaccacctaacaaaaacgggctagcctggtatagctcgacacggacataataagggcccaacacaaacaatttgtgcttatgggtcatgctaacctaaactttaaaaaaagt

SEQ ID NO: 269492 - DNA, 711 bp, Cannabis indica
aaaaaatagtaataaattcaaactatgaattttatgtgaaatatttgtcttttatcagggccggccagagggtgaggcagccggggcataggccccataattttcgaggccctaaaaaaattaaatatagtatatatacatatataaaagtttgcaatatatatatatattttaatggattactggaagctcttgtggcacaagcggtaaatagaatgttatgtgatttgtgagatcaagagttgtgtctaaaaggaaaaaaagatgataataaataaattaaatattttaaagtaaactgttttaaaaaaataaaaaattattctgtagttcgtttatttttaagatatttatgtacttttttaatggtactattaataataaataatgtatatttattatgtattttttagaaaatctatatgtatgtaaaaaaaattatatatatttttttttattttttttttaaaaaaaaatgctaaaatatataacacaaaatgttcattgtaattaaatattactttattgagttagcttgtatggcaaaaatttatttattacatagagataaaataattaaaattgatattatgttaaaatttaattaatatttaattttaattttattaaaaaaataagacctctttcaaatttcgccctacgcctcttcttatcttgagacggccttgtcttttatttatatatatatat

SEQ ID NO: 269493 - DNA, 614 bp, Cannabis indica
tgaattttaatatgttaaagacctcgttggtgagccaggggcattttagtaattatgacccgagagggttaaatgatgaaattaatttaattacgtgcttaatagaactatattattatatagtatgcctgtgttgtcttttcaggtgtgttctgacaggttagcgcggtatagtcacaaccggaaatttcggttcggacccaaaatgtaaattgaattggttatttgccatttttatttgatatgtgataatctgaaattaattggaaattatttatgcatggaatgagtaaattacccttgtgagggtgtaggtgtgaatttaagacatgggggcaaaatggtcatttaaccataattgatttacattgaattaaatggatttttgagggaaaatgaataaaatttctggatttttctccctctcacccgaactctctctctccctttaacctatttgatttcaaagcttgaattgttgaagaaaacttggttttggttgtgattgcagctcttgttcttgagcatggaatttgcttagtttaagcatgattttgatgtgtttctcaatctgaaattttggtattttttttatgaggatttggatgcatgaa

SEQ ID NO: 269494 - DNA, 950 bp, Cannabis indica
aattgttgagggggtatttttggagtttttgaaaaaaagttcatagtttttttaggggtttaataaaaatttttaattttttaagtatataaaatcaaatttccctttagttattacaaaaaaactagacagatggtcgaaatagaatcagaatcaaataagcagaaacccagtgcaccaggctatttgccaacatgggcgctgggtgcttttttcaaagcttccgggatgttgttttgatacttccaaggtttcagaacttgaggacgaggtctcctaccccgttttgaccattccagattgaatgcttggataatttggcatttgaatgatcgaaactagcgcactaggttgattgtcaacctgggtgatgggcttagcaccaagtcaacatgggcattaggctttgcttctatggcctcgggtttgtggttttctccctgagtttgcttgaatcttcactatttctgatgacagaaaaaatactcaggacaatttttcaagaacttgattggaaatagcccaggttgacaatatgtcaacttgggcgctaggtcccttttatggcccttcgaaagttttgtttgggcccaaaaatagttgaatcttaatctttgctgaaaacatagaagatgctcaaaagaattctcggaaaacatcattgaaatcgacctaggtttacaaaatatcaacttgggcgcttggccttgcttctagcacccaatacgtgttgtttcttcctcagaagtatctatttccccatttttttatgaagacaaggaagatgaaaaagtcggatcgtcgatctaatacttagaaggtgcctagattgacaaattgtcaacttaggcactgggtgctcaagcgccgagtgctctgtgtgctaaaaatgaactttctccgaatctgattatgatgcctcaaatatgtctgtggtatgtctagttcat

SEQ ID NO: 269495 - DNA, 466 bp, Cannabis indica
ggcagtaagtacaacttttcttttatataaaatgaaagtttagcttcggatttctcttcaagaaatctgatctaatcagaatataccagctgattagataaaaaaataaattgtgtaattaaacttaccatttttacctcaatttctataaatagaaaagctagacaactttccttccaaatttaaatacacaaattatggacaccataatattaaacattccagtcaaaaatatacaataaataataaaatatttttatcaatttaatatgtcaaaaatagaattaataattatcaaagtgttacaattacaaaataaaagagaagtatgtatacaagatgtaagaaagttagttacaagggaaaaataagagagtaaactaactaaacagaattaactaactctctcatctaacattaaaaatttataatatgtaattaccattatatatccaaacacacattt

SEQ ID NO: 269496 - DNA, 759 bp, Cannabis indica
aaagcgatctaggttcagatattgataatgctctgctacaaaaaggaatcaagggctagatatctgaacggaaggagtcatattattctgttgcacccaatgtaaggtttcctaaactttatatgtgtttatttcatcattttagaaagttcatatttagggtgttaataacatacttgtgagtagatctaagatcctggtaaaataattccaacaggcacaacatctattgtctatttgacatagacctatgtgtggcgttcacacctctatttgcaataagcccttagaacgatttatctcgattctgattatcgagtctaacctaattatgttttaaccatataattctttatatcaacatacataacacattattgctttcatactcacatatattctaggataataatcttggaccatatattactaaacttagagtaataacaacatacatgagtgccactgtgctaatttctttgtgctagtttactatcttacttggtaatccaagtatgtagagattccaaatctttgagtgttcctgagcaagcacatgtaattctagtcacacattcttgagatttcacaaatagggttaatcttaaactcatgttcatacatgtatatgtaatttgaactctaattatagattaacacatagacgccaaaacgagctttccaacgatatcaagaacgtccaaaacgaaaattctaaaatcaaaaagttaatggcaaaaaatgaagaaaaacaacaaa

SEQ ID NO: 269497 - DNA, 732 bp, Cannabis indica
tttggattaggtttggacagaaattttaaggatttatacttgtgttttattctattgttgagctctaaaaactggttgtgtgaagcatgagttcttggcttaattttgtaagaattcaagataggaatttcatggaattaagctcaagtttgagctttgattttcatgaatttgtctgattttggggggtttattgttggattttgatgcataagtatgtgtttaagaccctataatatttgctagtagctgtaattggtaaattgataatttggttgtgaaaagcaagcttgagttcatggaactcaagcttggagctttaacgacactttttaatttttagtgaaattattgtgtttgagctatggaatttgttttatatgtcatatgttgatgctctagaaagtttggtggtgtttggggaagatttgagtaggttatgggggcttaaagattgagatttttcgtgttgttactgtccagacaaccaaaattccggttggttcagggttgttccaactggaattccggttggttgtatcgcggaaaatgctgaattttgttttggccataacttttgactcgggactccgttgtggaagttctttatatcgttggaaagctcgttccgagctctatgtgattatctatatttgaaatgccatgattatattttatgaatgtagaattgggggttaaccctttttgtgtaaatcccagtattgtgactag

SEQ ID NO: 269498 - DNA, 656 bp, Cannabis indica
ggatccgcaatctgaaacacttagaaaaataaacacttctcattctttgcaatcaagagcctgttcttgacttttgcaaatcagatcaataaaactcaaggggagtaggctattacagacatccggggtcgaacctctttaaattcatgagtcttttatttacatttattgcgaattccggtgttattaattgcatttattattctgattttggtttaaatctcatttattaagactccgcgtcggttggctaaaattccagtcaacattttggtgctttcattgagagctttagccaaaatctttaagtttttcaccggaaaaaatggtgttaacccgaagatctcaagagcgacctgacgaagagatggaaatgcccaccaagttccatcaacgtgcaacctcgccggaaacaatagagaacggcccccacgttcggggaacggcggcactaccaccaccgctcaaaccgctggccatggagcaactggtcaaactgcagtcactgtacaaacaactactgggcgtacaactaatgtcactggtgcaggaggcggcgctactgatggcaccaccgaaagaggtaatactagaaattttgtcccacctactgacggtgcgggccaagtttagactggtcgtggccctggcatctt

SEQ ID NO: 269499 - DNA, 902 bp, Cannabis indica
atatggactttggatttataagcatttttttttagtattgagacattactatggactttatggactttagattttcattttatggactttagatatggatattggatatggatgtattttgaaatattttagttttcacttttatcatgattcatgaacatgaatatgaactttgatttgatgaacaggttgtttgtttcttggtaagattgattaatgcatcttttcttcaatagtatataaacaaattgttatatttatatatgcttaatttaataaataagaaaataaataaaaaattaattttttttaaagagttgaccgggtcaacctgccaacccggtaaacccgaccaacccaaacccgccaacccactaaatcgtgccctattcgggtccgggttcaggttcatttttttgaacccaaaacccgtgaacccgaaactcgccaacccaaagctaattaggattttgtttctctcgaactttaagatgtaccaaatcatgccccctaaacttttttggccgttaaaaattcccttaaactattgagattgttagatttaaggacttttgtctaattacattcaattttactatttcagtgattgtttatgtactaaaccatgcttcccaaactttgatatctaccaaatcatgcccctcaaactttgatatgtactaaatcatgccccctgtactttcatccatgtcagaatttttttactaaaattagacaaaaatgcttaaatttaactatctcaataattcaggggaatttttaacggccataaaagttcagatgacataatttggtacaggttaaagttgaggaaaaaagaacctaattaagcaaaaaaaaaaaaaaaaaaaaaaaaaaaaaaaggggggaaacgttcttta

SEQ ID NO: 269500 - DNA, 870 bp, Cannabis indica
tagttttattctagtatatatatatttaaaggaaagcattagagagttgaggtggcaatctatatgttctttctatccttttctttgctttctaattttggtcatttatttattttttcaataataattttagctaaaaatctattattattattattattattattatcaataaaataactcacattcacatttattattattaattaataatggtgtaacttataactacatttaatcactaatctcctacaatttcacaacccaaaatcacccataacaacattcaagcatagtcaagaatacaataccataaaaacacttaaatccaaacacatgcatctcaagagaacacacatcaatctcatgcttttctttcaaataaaacccagcaacaacttcaactaaactagtaaaagaaactacctcaagtattgcaagactctccttgattttccaccctctaaaggtagcaagatcaaactttacaaccaaaatcaaggctagaaaatttagagtttaagagagtgagagagagggttcggataggagggcaaaaaaaccagaaaaatctcttccattttaccaaaattcaatttaattagaattccattaaatggccaaaagacccatttgcccccaagggccataaaagcatgcataaacactcacaaaggttaatttagtcatttcatgcataatttaaacccaattaattttaaattatccacacataaatataatgccaataatttcaatccaaattgcattccgggctcgaacccggttcggtctgaaacacctggttgtgactatatcgcgccaacctgtcagaacacacttgaaaaagacaacacatgcatactatat

SEQ ID NO: 269501 - DNA, 1713 bp, Cannabis indica
caagcccaaagtacctagggcaatcactcttcttcctcttcacaattcacgcagctagcttcttcaacatttttttcaaccatgaaactgttgccatcatgatctccctgtagcaattcatccttctcaatgtgtgaacccacaaaatatatgtattgtatgtatattcatcttgcagcaaaatagtaaacataattgagtgtatatatatgttttctacaaatcgatgaatagaggctaagattttcttcaactcaattgcttcgatgtgtttctacaatctggcgcgaccgtgctttcgtctgcccggtagtgaccacagtcctttgatgaacttctactatccagtgcgaccacgattcccatctcccttctgtgctctaatttggaccacgcccaatttcctccaccaaccgacggtgtacctctattgcagtggtatttagtgccatctctgtcttctctggcgttggagtttttcaagctaccagtgttgatgtagattaagaatccataacatccgatgaagttgcgccaatcttcttcgccttaggtgttcttcgagttgcctttttttcgtagattaattcagaattgattgtgatttacctagattgatacggagaggagcctcactgccatccatggtgttgcagaaaagatcatcgacactgtatacatctccaataagaatcaccaatgaattctcctctctctccgattcaagtggaccatcaatgtggttgtcaaccttgagagatgtaggtggtgctggagaggtgggaaccaaaggtgtctctattgacgtaagatagctcttaaacttggcatcttgtttctcaaattgagcattgagaagctctctaaaatgcagtttcattgccttcatcttatatggctgagagttcttacagtgaatctctcactgtaatgtttctcaatgaaagcaccaatgatagataatagtcctctttgagaaagaacaaatctcctaaaatacacttttcgagatagtatcaatctcccaattgaactgaaattctattttctcattacacatttatatatttatagtctttcacacattttacaaattactaataagcccctgcactatttcatagtgtaacagatttacagcgctcttggctagagccacccaagtccagcatgggtcgtttggctcgaaccgagagaaatgagaaactcccggatggtgccctagcaaaagatagggaaattaaatccttgatttcctaaaagaaaatatttgctttatacactgttttcaaatgataattatatttttttattttattttcaatcttgtatatacactatgttatttaatatcctatcttaaatttatttatttttttgaatttatttggttaaatcatagaaaatatttatttaaaatttgtagaatggataattttattaatttttgtatcaacatgttaaactaaaaaaaagtaattggggagaaaaaaaatatactaatcctcatcacacacacacacacacaaaataatgctttaaattttgtatatgtttataatgtattattatcattacctttttattatattattcttttggtaattttgcagttcaaattctaggaccaagaacaatatttggactcttatttatcatcactcttatcatttataaatggaaaagacgacacttgtcaatatataatggcat

SEQ ID NO: 269502 - DNA, 508 bp, Cannabis indica
gaaagatttaaacatgagacaaatgcggtggaaaaccactagttttactttgtgacaatacttgtgccatagccaacagtaaagagcctcgaagccacaagagaagtaaacacattcagatgaagtaccacatcatcagagaatatgtggcaagaggggacatactggtaagaaaaagttgatactgaagacaacttagctgatccattcaccaaaattttgacagtcactacatttgaaaaacacagaacgtatctaggattaattgaaatgaactgattgttctatgttagtgcaagtgggagtttgttgggttttgtgccctaaataaaattctatttcaatgtaatcttgaacattcatttattaataaagaaataaatttatttcattaattgtttaatgtgttatttggttcacatgtttattttattatcatttgattgatttataaattcatccaaatctttatcacactgatattcttgtttattgtgatgtcaacaca

SEQ ID NO: 269503 - DNA, 1185 bp, Cannabis indica
tacaattcagcatattgatccactgcataagtaactttcattggcagaaagtgagctgattttgtgaatctttccactatgagccatactaaatcatacattcccgtggttctaggaaaaccagttacgaaatccattacaatgtcctcccacttccacttaggaagggctaatggttgtagtaaccctgcccacctttgatgtttagctttgatttgcttgcaagttaagcacttggaaacgtagtctaccacctctcttttcatgccagaccaccagaaataggattttaaatgctaatacattttggtggttcttggatgcagggaataaggtgtggtgtgagcttcatcaaggatctctttcttaagctcatcgacattaggaacacaaactcgagctttatacaataacattccattattcgagattgaaaagtctttaggtcgacctgccatcacctcatctcgaatcttgattagctcagaatcctctaactgtgcctttcttgttctttctagcaagtcagactggagtgtcaagttgtgcatctttccaattaccaactcaattcccacactgaccatctctgaagctagttgaggagctatcaatacattggtgaaaacttgcccgggacctcttctactcagtgcattagccataacattggctttcctggggtgataccgaatctcacagtcgtagtctttaaccagttctagccaccttctctgcctcatgtttaaatcttcttgggtgaaaaagtaattgagacttttacgatcagtataaatctcacatttctaaccataaagataatgctgccatatctttagagcaaacaccacagcaacaagctctagatcatgtgttgggtagcgctgttcataatccttcagttgacgagaggcataggctatgactttgtcagcttgcatcagaacacatcccaaaccctgtctggatgcatcacagtaaacaatgaacttttctcgatctgatggtaaagctaacaccggagctgttattgcttcacatttgtttgaccatacaaatagctgatttttcttagttaactcgattagtggcatagatattttagggaatccctcgacgatacgtcggtaataccctgctaaactgaggaaactttgaatttttgtcactgattttggcctcggc

SEQ ID NO: 269504 - DNA, 744 bp, Cannabis indica
cgatttatgcacacccctagtaatgctcggttacacacactctattgtgaaggagaattgttaaagggtaccattgctccctaatattttctttagtgtcataccgttattggtataattaaatagcggcttccatataacttaagaaaataaattttaggaaatatcgctatcttgtaagaataattattgtcccctcacatttactatagtattattttgctcctatatagtaaagttagtattattttacctctatctttgatattgttaaatttttaaattaatattttttatgaacataataatcttttactattattaacatggttaatgttttagcagatgtattaaattaaaaataattgtatgtagagttattttttagtatgtattattattttcttttatcttcatatttaacgttattttcttatttatttataaaaatcattatcattcttctcatcacttatctcttttttttctccttctctctcttaaagttcttagaagttattcctcaaatgacctaaaattgtaatcaaaaggctttcgtatttcttttcgaaaaaaaagaattacctaatatactgtttttttaatttttttttaaatttacagtttgagtttctaaaatggtttctccagtaatttctatgtgggttattatacgatttaggttgcagctttagttgtaataaagatttttatatagaattctataaaaaatgtaaaaaaaaa

SEQ ID NO: 269505 - DNA, 888 bp, Cannabis indica
aattcccttcatatttatttttttcaaaaaataaaactatagcgattgccgaagttgtcactcatgctggaaaagtcactggagtttactgtcggcaccagaaaatttgtcggagtagccgccggtccagaaaattcgccggagttgttgccggcaccgaaaaattcgtcagaattagcatcaagaaaccagtttcttggtgatttttccggtaattttaccagtgacaatgccaagtccgacgactattctggagtttgatgtcggtgccgaaaaagttgccggagtagttcctggtgttggaaaaatcgccggagttattgccggcgtaaaaaaagtcgtcagaattggcattgtcgccagcaaaatcattagaaaaatcaccaagaaagtagttttttcatcaagaaactggtttcttcaccaagaaagtggtttcttcatcaaggaactaattttgttacacaacaataataaagattatgaaaacaaaacaaaaatgatatacactgaaaataattgaaaccagtttcatcaatcaaccaaatagagaaaaaaaatacaaaaaaaattaccaagaaactggtttcttcatgaagaaaaaaccagtttcttggtgatttgcccgataatttttccggtgacaatgacaattttgacgaatttcctagagtttactgttggtactgaaaaagtcaccggagtagctgtcggtgtattagtcgtcagagttgctaccaacgccagaaaattcgtcagaattgccattgtcgtcagaaaaattaccaaaaaactggtttcttcatcaagaaaccagaaaccaatttcttggtaatttttccggcgactatgccaattctgatgacttttctgaagtttaatgtcggt

SEQ ID NO: 269506 - DNA, 938 bp, Cannabis indica
tggagataactaactctccgccaggtaatagggttcaaaaccctgattcataactatcatgcggtctaacaacacataagaatgagtggccccagagtcaaacaacacagagaaataagagttgttgactgagagctgacctattaccacagaggggttggcttctacatcagcctgagttatcgcgaacaccctagttggagtgggtttcgttacagtctttggtgtttcggtcctgagctggggacaatccctcctgtaatgccctggcatgccacactgaaagcacccctgccatttacactaccccagatggtgctttttacaactggggcactctgggtaagtgtatcgggtttcagtgccactctggcgattgcctcgaccctagttcccccggaacctcttattctgacctgagccactggttgcagtggacgcctttcttttctgatctatggccgaaccactacctcccctgctaaaacttgatgcaggaggggttggagccccgccaacaactggagtcctaccagactcaatcatacatcccactgtaccctcagctcgcagggccttatccaccatttcagcataagtggttttgtcatcagttgtaatcattagatcatgcttgatctttgcatttaacccatccatgtatttttatttcttactaaagtcagttggcataattcccgaggccaacctcaccaaacggtcaaattgtgttgtatactcagtaacattcatattttctttctgagtcaaatgagtgaattcttttctcttcgcacttctaactgcttcattgtaatacttagcattgaaacgttcctggaatttctctgaggtcattgttgtaacatcgtgaatcatggacaccatgtcccaccaaactaaagcatcttcttaaaattgaaaagtggcacagacca

SEQ ID NO: 269507 - DNA, 1123 bp, Cannabis indica
cttcaatccattcacattcttctttctattactgccacttatgatcatgagatctggcaaatggatgttaagactgcttttttaaatggagatcttgatgaaaccatttatgtagaactactagaagggtatgtgctaccaggggaagatagaaaggtacacaaatttcttaaatccatttatggattgaagcaagactcaagatcttgaaatatcacctttaataagattattaaagagtacggctttgagcaaaatgaagatgaatcatgtgtatacaaatacattaaaggtaatgtagtggtattcctagttctttatgttgataacattctacttattagaaacaatgtagaaaggttattagatgtaaagaagtagtcagctaaaaaattccaaatgaaggatttgggagaaacaagctttctcggaattaaaatctgtacagatagaaagtggagaacattagcactttctcaagcaacttatatcgataaggtgctcaaaaattaagaagtccaagaaatgacagttatcctccagacatagaactactctatgcaaggatcaatgttcaaaggttcctcaagagatggaggacatgagaaagtacccttaaccctcagcagttgggagcttaatgtatgcatattgtgtacaaggcctgacatatgctacattgtagggtttgttagttgttaccaatctaatccaagtttggaacactagatagctgtaaagcacattttaaagtatattcagagaatgagagatcatatgcttgaatattctagtggagagttcaatcctactagatatactgattttaattttcaattagacaaagatagtcaaaaattgatatttgggtcagtattcactctttgtggtggagttataatctggagaagcattaagaaaattagtattgtagttcaaccatggaagccaaatatatagtagcttgtgttatagtgagatttctctcacctagaaactcgagaccagactcctatttaaaggacacgtgattcagatttccaatgaaagttgaattgtccatgagagactactcgatgttttaacctcgcccaggataaaactagtgagatactgcgagtac

SEQ ID NO: 269508 - DNA, 1063 bp, Cannabis indica
aaaaaaaaaaaaaaaacctatgagattatgatataatatttttttttataaactttttatttttttcttaaaagaaattacattggagagatttagatataaaactcttaggtgatttttacatgtgatgtaatggaaataataataagaatataaatagtaatgtaataagaattataataaaattagtattatgatgtttagtttaacactaaaataaaaattgtaattgaataaaataagagtatattgacaaaaatatttttaattttattatttttaatatttaaagttaaataaaagtaaaaaaaagcaaaataaatcttttctaacaatataatcactagttttataatataatttggttttataatataatgagaattacaatatatgatgtaaggttaattaagatttttttctccctaaacatcgacatgtaccaaatcatgcccctgaacttttaaagtggttgaaaatgccccctaaactattagattgttgaatttaaggatttttgttcaattttagtaaaaaaaagtctaacatggataaaaattcaggggcatgatttattacatgtcaaagttcaaggggcatgatttggtagatataaaagtttggagagcattgtttagtacataaacaatcactgaaataatcaaattaaataaaattaaataaaagtccttaaatctaacaatctatatagtcaagggaaatttttaactgccagaaaagatcagggagctgttagacttttatttgggcttacattaaattttattggttttattaaaacttgggttgattggatagttctttgctgtattagcccatgttgttggtgatcaattgttaatgggcttagcatctgtgagtaaagtctaggtgaagcagaagtgtgggcttttctagttgactgaagcctttgatgagcaggcccagcccaactagggttttgtagctaagtcccctccctaactctataaatacatattgtctcatcacaattgtataccttttgataatcagagaaaataaactgcttctgatttagaga

SEQ ID NO: 269509 - DNA, 1380 bp, Cannabis indica
tttttcatttagggtaagttttaaaaccctaaaatagtttctctctctccattcccaagcgcctccatgttgtttctctctagctttttcatcttctctcatccttcttctccctttcagatatgtaacttaacaaaaaaaataagtcagtgttgtccacctcctccattgaagacgacgaccttcaaggccaaggagagctccatcgacggacgacaggcgcttccaaacgccgagcccaagccatctccttctgctctatcgcggtatgtccacagttgacgtcttcgctgcccaaacgtcgactaagttcacccataccgctagcttaatcggtatatttattattttgtacacctaatgatttttctctccccctctctttgtctttgatctatgcaggtggacgacgtttgaaggtcctcgtgggtcttgcctttaatgtttttgtggttctgggtacacgatcgacgttcgtgggttcgaccagcccggtgtttgatgttcgtggttgacagtgtgggatttgagttcaaacatggacttggggttatttcattcttaagccatgtttgacagtagtgtacactttagatctgatttttttttttaagtttattttgttcaaagtgtacactgtaatattttgaaagtgatttgagattatttcattaacactggataaataatttgatctgtgttttttttttcttcatgtttttgtattttttatagaaacagatgtgagtttctattaagtttcatatcagttgtaatttgagtgtaaaattatgtgtaaagactgtattattttagttaataatcttaatacaaataaatattttcagcaataaaaatattttgtatttgttttttagttttattattttaattgaaatttagtattgtttataattatatttagttaatttaaattattatttatatatttaattgtattaatatataattaattaaattattgtttatattatataaaatttgaaataaaaaaaattcaatattatatttttttagtaaaaatatatagtggcattttatgtgtgtcactatatcttcaaaaatagtaataaaaaaaaagatatagtgacactttttgtgtgttgctgttaatttctcagtctgacaagtgacacgcagaaagtgaatgcgaaaggttttagtgacacgtgtgaagtgtcactaaaaattgtttttccagtcaccctcattagtgacgcgcgttgaagtgtcactatacacttttagagttactcaatgtgtgtcactaaaatccaattttctagtagtgttcttacaagtatgctttttatctgtttggtgctttgggtttgaccaaaccttttgtacgcactggat

SEQ ID NO: 269510 - DNA, 776 bp, Cannabis indica
gtcacattctattaatgggtcattatttattttttttacgactagaatggtatattagagactattgtgctgcttcggagtgaaacggtgccatagagaggggtgttcaaggatttgcttaagtggtcgtaacatatgcatgtgtgtttaacgtcttaatttgagtctcaaattatgtattgtaatatataaacgcttaatttaaaaaaaagttcaaaagttagaaggagcataacttaataacttaagctaattttttttgttcataagtaccaccttaaaataaaaatatacattttaattaattaaaaaatatatatatttttcttcttaaaatacataacttaagtttctcgtatttgatgtaaatattattatagtatctccaaccatgcatattctctaaaatagggagtgaaatttgaaaaaaataagctctaattatataaaaaataattctcaacaatagagttttttgctaaaaataattctcaacaatagaattttttgctaatttttttaatagtattttaatcaaaattactattaatttattattattaaattaatttatatttaacaaattcaaattataaaatattattaaaataatcaaatactaactaaagagcttggaacaagaataataaaaatgattctttattttaattttattttaactattttacttaaaatttagctaaaaaaataaagaatactattagagaagatcttagtagtatagcagtggacaaacttctaccactatgattata

SEQ ID NO: 269511 - DNA, 1674 bp, Cannabis indica
aaggagtcttgaggagggagttcatatagctctgaccaaccgagaggtgggtctgagctgatgcagacccctactccacctttgccagtgcttccagaggccaagaaaggaaaggagatgctcgcccactatatgaactggttggttcctgaggttagtgagcagttggccggtgctgacaatgactcttctcttgagctactgatgggaggagtcttgaaggaattcacaagggtaagtctttcttgacgatttccttgaatcctctttacttggctcgaatactaaagtttttcctctatgcaggccgaactgaagttggcttacacatacttccgggctgagtctgctacttccaagaacgcggctttgtccaacaccatgagggcggaggtggacttgtccagaaaggatgttgtggatgccagggcagaactcagagctgtttggatggagttgggtgaagccaacaagaaactttttaccgcctagacgaaaatagctgagctgactaaggatctcgaggcttctgaccgacttgaggagaccattgagactttaattatctgctgaagtgaacagccttcaagatgaaaggacatctcttcaagcggtcctccgtcgggtggaggaggaggagcttacggccgaggtgacgaggctgggagagaaagttcatgcctttgagacagccggtcttgagctcttctacaacttttggaaggctaatcctcaggacatgtaccttgagttctaggcttcccaagtggcttatggtgaaaccgaggcagctgcttctacctctggtcaaaatgcttatgtacctcccgttcaaacaacagattctccaactcctgccggccagaagacccgaaccaagagcctgggactccagctattttaatacttcttcttttatgcttttatttttatactatcttattcggccttaaggccttttctaagacatcatgaccggccaagcagtctttaaacttggaattatttttcatttttcagacaacgggctgaccgggcagcttttaatcacggtattacgtgcttttgttatctttaatgaatttcattctctgtttataatcatcgtgcaattgtgactgttttatctttaccaaatgctttgtacaggtataggtgcccccaagtgaccgagcagacttatgactcttggtcacttgtttcttacaagtatactttttatctgttcggtgctttgggtttgaccaaaccttttgtacgcactggatggtaaattagaaacatgctgataatttcgactcaatttgaattttgaaataactatctttattcatttattgatcgaaaaatgtgtttgttaccgtagtaacttacatcagagctatttgatctaatctaatcttttagcttaacacgaaataaaacaaattgcagaaatagaaattgtactttaaatggtggtcacctgacctgagtacttttttccttttgtcgaaacctttgagcgtagtccgcccagcaggccattcacttaagagtaaatgttcattcagtacttagcatggtcatccgacctggtactttattggtagtattttcttaaatgttccccattccaatacccatgtactagaacgagttgcattttttcattatacttacctaatttgtatg

SEQ ID NO: 269512 - DNA, 827 bp, Cannabis indica
gaataattcgcctgaaactaaaatattaccacgattatattttttatgcttttaaaacaatgaaacttaaattaattttatggatcaatatagtagaaataggtataaaatgctcatatctaacacttaatattcaacaaataatacacattttgaactaacaatcataaaattaacctagattacaaaacccataacagtataaaaaatgtgagtacaaccccagattataggaaaaattccataactatatataaataaaaacaagaaataatattgtcaaatcccattccatatattactaagccactccgtccacgaaccaccaactgcgggcaactacaaaccaccatgaaccgccaaccacgtgtctacgaagtactagtaacaaccatccatctacagagagaagatagattaagaatggtttcaatttgtgagaagctttacaatggagaagaatatttcaacatgaaaatcaaaccagacaaaattcctgaggaaggcttctcccccatcgagctatagagaaaagagataaagagatatttcttctccactagagcaccatccatcgttcatctttatcagcgccaccatccttgtcgttcctctccaccaccgtcgagattttgggggttttttttttttttttacagagtgagatatcagatttatggagagaaaatattttttttttcgactgatatggatgtttcgaagggtgttgaactcatattcgatcacctagctgaatttggtcgtccgcctagtcatcgatctgcttgttcgtccaccttccttctacccagaccgagagaggaaaa

SEQ ID NO: 269513 - DNA, 830 bp, Cannabis indica
agtcaatctttattagagattatccacactgacattagtggaccttattcaaatacggtaaggatacaagtatgccataactttcataaatgattttctctaaatggcttcacttgattcaagaaaaatctaacgctcttgagaaaggcaaaatctttcaaaatgttcttcagaaacaattagaaagagtcatcaaaattattctttcagatcgtggaggagaatattatggtcattattcaaaatatggactacacatgaggccttttgttgaatattttctagaaaatggtgtagtttctcaatacactatgtcaggttccaagtaaatctgttcccaaaaccccttttgagttgtggattgggagaaagtctagtttgaattattttcatgtatggagttatcccgctaaagtaaggatttatgatcctaatttgaaaaaattagatccgacaacagtttgttgttatttctttagttatccaatgcactcaaaaggctatcacttttattgtcatactcctggtacgcaaatttttgaatctcggactgctaaatttctagaatttgatgttgctaaaaatattctttcaacatctcttgaaatggggggagtcatctaaaggaagtttttattcctatgtctttttttacaagagatgataataatagcaagtcttattcttactctagttgaaaacgttctcattgctgtcctaatatctaagatgacgaggtcctattattgatgaggaacctattattgaagaaggttttgttgttgatgagggtcatgttatcagagaaatccaattgtagaatatgtcat

SEQ ID NO: 269514 - DNA, 579 bp, Cannabis indica
taaaaaaataaaattattaaaaagtgagctgagggtcctatttgtacaattttggaaaatacagagtctattttatcacttaacaaaatagagtgtccaattggtaacttttacaaaacaaagggcccaaaatggtatttacccataatattatctcatttacatttttgttacctaccaattaattacttttaaaatcatattgttactaattagttacttttaaaaccataattttatttttaagttatattatattattgatcaagatgcatttgtgttacttttacatataatatatattatatagctcctttacgttacctttaaacatatttgaaactaataaattacattaaagtataattaaattatgatataacttattagcaaaatttatataattttttattttattttaaattttttaaaaatataaacttaagatactattagtttctttataagtaattttaagggtttttttcagttttaacaaaaaaaaagtaacaatattacaaaaatactttctgctagccaataaacaaatatatagcccaaataaaaaaaattacacaa

SEQ ID NO: 269515 - DNA, 957 bp, Cannabis indica
tactttggtacaaagaatcatataacgtattaaatcaaaaccattacctgtcctgagcaacgcgaatataatgcaaaaatttgttgaattgtatgcaaagaaccctcatttgcatctaagaagagtagactatcatcgacaaagaatagatggcttatactgggagcctctcttgcaactttcagcccaaaaatttctttctttgattctgcctgcttaattagcgaggagagtccctccgcacatattaagaaaagatagggagaaagtggatccccttgtcttaaacctctcgttggcaccacttcaccatgaatagagtcattgatttggaatgaataacgaacagatgaaacacatttcaagactatattcacccattcggtcttgaaacccatttttaacatcattttctcgataaacttccattctactctgtcataggctttactcatatccaacttcattgctacgtaacttcgccttccgactttcttgcttttaaattatgaaggcactcataggcaataaggacactatctgttatgagtcttcctgggacaaaagcactttggttctcactaattaacagtggtaacatatttttgagtctatttatgaggactttagagattattttatataatacattacataaactaatcggtctaaattcactaatcgattcaggttgttgaactttaggaataagtgtaattagcgaatcattaatacttcgcatatctgccacccctgatatacagtctaacactgctttagaaactagagggccaacaatatcccagtgttcttgataaaacaaggcactcattccatctggaccagggcttttatccgcaggcatactaaaaactgctcgttgaacttcttccagtgcaaaggtcttcgtcagtgtttcattcatgccatctgcaaccacttgctcgacagcttgta

SEQ ID NO: 269516 - DNA, 1002 bp, Cannabis indica
aacctagggcttttgtaatgctgaccaagtcattttattaaaaaaaaaaagatttaagaaaattgggcctttttcttgtgtggaccatgtgtaataggtttgcctgcacatcaatagggtcgggcttgtggatggttgggaacatgatcgacaattatagtatcctgactttcctaacggatcgaatattggttccctttatgtgttaattctggtactcgaaagttgtgcacaaattaagatgggatcttgaattatacttccactagtgaattaatggaactaaaagataaagaagtaattagaagggtaaaatggtaatttgatcaaaattaattacgaaccaacacaaggaggcctaatcagtagaattgattatatcaattaacactgtagttaaacacagtaaatataattctataattactaagagctcaattctatatttatagtggagtaatcatggaattaataaacaagagattattcagttgatgagactcaataaataacctagtttattagagcttagaataataggtccatgatccccgaatcgctaccttgaaacactgtaaagggtagggataaagagttgtataaagatgttcaaaaaaaatatattttgaattggaaaaatagtaattatttaaaaaaataaataattttttcaaattaattaaataggaaaaagacaaaatttgtagagacaatattttccaagacaaaagacaccaatcttgtcctaaatagacatggtaggcacctatagcattatgctatccctatggaatttgtctttttggcttaattaattcaatcaggtaaatatttaatttaaaaagttgttatagatatttcaaggttgttgagatattctcttaagtggttgagagattctctcataaatatcagtaaccgaattcgattatagatatttatttatttaaacaattgaataataattcaactaaatggatttaactactataaatagaagcc

SEQ ID NO: 269517 - DNA, 747 bp, Cannabis indica
ttgttgttagttaattgagttttgtacttttttttggcaaaaatatttaattttagttgggttttaatttgctaaatttgattaatctctcaaattttatgtatggtgcaggttaattgactagtatatatctgctttggaagactcagctctacaatggtgacaagctgagtgaaaaaagcttaaaagataagttttttcttattaaaataataattgagttttttccttaatttaaaaattcacaatattatcgttgtatagtgtgttaatccactttctatatctatttagtttgtaggtagttttcgtccaattagttattttttcagatgcttcttaaaggtggcctcgagttgttttgtctaaatttctgagataacttggtcttatataagtcgctttgtagtctcatattctgactttgtatatctttggctagacaattagcttgttgactagaagtttctatgcgtcgacgactatcatagtgtgattcggagcactctttcaaaatatatatatttatataaccagggccggccctgaaaatatatgggcccaagaagaattaaattttgggacccttaaaaatatattaaaaaaatcccatgaccttagacattatgtcctccacctcaaccaactaaattatgaatatttgttgcttataatacacttaaattttacttaaataaaaacctaataaatttttttattttgaacccccggaaagtgtgggcccta

SEQ ID NO: 269518 - DNA, 1075 bp, Cannabis indica
attcttaaaaaatatacctatcaaacaaaaataaattatattttaaatattatgaacaaaaaaaattttaaaaaatatgtgtgtgaaattttttaaggaaaaaaatagaaaaatgtatacatgagttagaaaagattatgaaaatgaaatcaaaataagtacgttgctagaatggtatctattttagatgagttaactactttattcaatgaatgatatctttgactctcgccttaacaatacactgtatcagtttgttgaaaaaccttaaaaattatttaaaatatgtttattttgtattttcacacgtctttcttatttgctgaatgtatgataatttttgaatgtgtatgaatttatattgaatcatgttattttctgttattaattgttgtagtataaattttgaatctgcattgttggtctaatttaatttgttgtttttaatgggacaaatcccaaaggatcgtcatacataatagtgatagatctcgacaaataagtatttgtaaatacaacaactagttgtgcatccaaagatgacaacttagactagtgtttacaatatgaaacaatgaagaaatttataaaataagaataactttgactcttgcctaaacgggacattgttggattttattttaatcgaaattatcctttattctttttctcttagctttttcatttagaatttgcttagatagtatgtcattggacagaaggattataaatcatctgcttatgatgccattttgttttcttctatgaaattgaattacgcagatgactatatttcagatattctatcccaaaatgatataaattcttcgatcttagaaatcacctacttgtaaatgtttactaaaggcaacttaagcttagagttagattagtagtggtggtccaagctagaataaaactcaaaaaatatttggtataaatttaagtccttgactttaaattttagattccaaataataattttaaatttcagtttccagaatacattgaacattacaatacaatttccacaagttttaatatccattttttgtcaatggattcgaactgtatg

SEQ ID NO: 269519 - DNA, 883 bp, Cannabis indica
tttcaaatcatgctatctacctacttttaaattgactcgcattaagtaaattaactcacactaaaacaattaattttagaactaaaaatttaatttaaaaatttaaaatttaagttcaccccaaaactaaagtgagacattgtcctcaatgtgacatttaaaactaaagggaggggaacttacctaagcaccatgtcagtatggcggtggtggtggtggtgggtagaatccacatcttgcatccatgagagcccttgtgcctaatgaagaaaattgtccttcaatgttgcaattattaaagttgtccttagattgagagtcaccttcagaatcccacacaacagtcttttcatacgttgtcaaatagttcgaaatcgttctttaaacttccctttcttcttgttggtagtgacttctcaaccatcccttacaacttccagtcgactacaagtaggaatttcagttgtgataaataccttgaaagtttcttcttccttttgaacacgcagctttaactcccccttctgtacatcaattaatgttcttcctgttgctaggaatggtctccccaaaatgataggaatatactcatattcctccatgtcaagtattaagaaatcagtagggaagatgaacttaccaacatttaccaaaacatcttcaattataccctgaggataagtcaaagaaagatctgccatttgtaaagttactgtgatggccttggcttctcctaattttaatcttttaaacattgataggggcattaagttgatactagctcccagatcacataaagcttttgtttgtatcgaaccccctatcgagcatcgaatgttgaaactactcgaatcttttagcttgggtggtagtttcttttgca

SEQ ID NO: 269520 - DNA, 1032 bp, Cannabis indica
caattccactggtattttgtctcataattgccggtttgagatcgtcttctctgaacacggtacaccaactaaaatggcatccaaaactgtgattttgcattctggacaatttcagaccgtttctctatgtttaatctactacttagggtctcttaaactcaactacaaccttctttgatccccaaaacaactaaaacacgttcgaatccgggttcatttcaagaacgtatctttcaagcttcaataatggtgaaactcgaaatagtgatcccttttcctttctacaccatataataccttttttagatcataaataagagatcctaaacacccaatctacacagactgtgcccaacccgaagaacgaaaagttcgtagaatttttactctttattttagtcccgatcacccgccctctctattcttcctttcgcatgacttctaaactataggagtcaatcactaataataataaaatagatcagtttgaactaaaagtggaacgattctcattccacaatgttcagtcttctagttacgtgatatacgtacactataatactaataataatatttacccatattattatacaaaataattaatgataaatatcaatattattatatcacacatatcactattatattatacccatataaataataatatttatcaaagttaaataagtaacccaatcgtttcttatctatatatatagattaggcattatgtgttgggctttatgacttaaataaaactctatttcaatgtaatctctataatttgaatatcaataaagagatagaagtattttcatcacttatttaatgtgtcatttaattcatgttatcatttatatgtttatttgatttataaattcatccgaatccttatcacatttatgttcttgattattgtgtcgtcagcacagtggaaagtaatcaagattgtatgattaaatgtatattcctagatttatcagtacattgtgtttatcggatatgataatctacaacatagttacttgcacc

SEQ ID NO: 269521 - DNA, 738 bp, Cannabis indica
tatagaactaatcctgatgaaaccaaagaaatacaacggaaagttgaaggattgatgaccaaagggcatgtgagagaaagcatgagcccttgtgcggttccaataattctcgttcctaagaaggatggaacatggaggatgtgtgttgaatatcgagccatcaacaacataacggtaaaatatcgacatcccaatcctcgtttagatgatatgttagatgagttgcatcgttcttgtgtgttttcaaagattgatcataagagtgggtatcatcaaatacgtatgaaagaaggagatgagtggaaaaatgcatttaaaactaaacatggatcgtatgaatggtaagtcatgccttttggactaactaatgcacctagcactttcatgcgattaatgaatcatgttttgcgtgctttcattggaaaatatgttgttgtgtattttaatgatattctaatttatagtaagagtttgcatgatcatgcttcacatttccaatcagttttggatgtgcttcgaaaacataaactatatgctaaccttagtaaatgcactttttgcaccgataagattttttcctaggatttgttgtgagtgctacaggtattgaggttgatgaaaaaagatcaaagccaccaagagtggccaaccccctcaactataggtcatgttcaaagttttcatggccttgctagtttttacaagaggtttgtgaaggatttcagcaccatcgcagca

SEQ ID NO: 269522 - DNA, 690 bp, Cannabis indica
  modified_base (686)..(686): a, c, t, g, unknown or other
aatcagatcaacgagagacacggtgatttaagggatcacttggacaaaaagaaacacgtatcggtggtctccgcaggaacgctgaaagaaagagtcctggctgagctagccatactgcgcaaggacattgcccgagtctctcgaagacaaaagggggacgactcgaactctgactgtgaggaccgggagccatgcgccagggacattctagaggcaaagctccccaaaaatattaagatgcctgaaatggcagcttacaccggggactcggacccaagtgatcatttgtctcggtttaaccgagtcatgacggtcatgagagtcagcaatgacgccaagtgcttatgctttccactgacgttaagcggttccgcggaggagtggctcaaaaaaaatagaaacaggatctatggattgtaggaacaaattacaagtcaacttccgaagacagttcgtcgccgcgaggaagattaatctcaaagttagcgccatgactaacatcaagcaattacccacagaaatattgaaaaaatttcataaagaggttcaaggaggaggccttgaaaactagaaagttgatgacagacaatagcttgcacttctgcaagctgggatccaaactggaaccccgttctcgaacgaattacacaagaaggagctgccaatctctaagatttccaaaaagngggt

SEQ ID NO: 269523 - DNA, 587 bp, Cannabis indica
ctctaatggatgttattctaatggctagtaaaaaggtgtcaaaaagatctacattctctctctatctaaaacccttgactactaaacgagccttgtatttgtcaacagttccactaggtttcaatttctttttcaaaatccacgtacaacctatagtcttgcagtctggtggtaagtttacaacacgccagattttattggtcacaagagagtccatttcatcatctatggcctcttgccaaaggtccgaatctaaagaagacaaagcttctcggaggttagcagggtcctcctctaaggtataagcacagaaattagaaccaaagtctttagctatccttgctctcttaatcttctaggttcaatttctaaatcctcagtatgttcattactcttaattattggaagattgctagttaatgcgctctcactatttctcaatttaaatggaaatctatcttgaaaaaaaatcaatgtcataagattccattatcacatgcgcattaagatcatagaacttataggctttgctattgacaatataccctaaaaatacacattcataggctctacttgctagcttaatt

SEQ ID NO: 269524 - DNA, 634 bp, Cannabis indica
ccaataacgatactgacacataggaaggtgctaggcaccactggtgccctttagcatttctcgctagcctatggtcggtcttcaatatttcaacaaatagaagccacgtccaagcaaaacactaatgggccacgtctgccacttgttcctcatatgttgcaaatcggtgtcatttctctagttctctcagcttttggagccactttctccactaaatgaagcattaaagttttaatttgtgggagcaaatcttcactataaatagtagcattgtaaaaaatcatcagatttttagagtgaaaaatacagtttgtcattttgttacttttcttttattattttagtttacttattttaatgacaaaaatgagtaaactagagtagtaatattggtgaggttagagtgtagcttttgtacttcttattttaattattatattgattcttttgtgcttcatctcatctccatatctcatttattaaattgttcttcatcttctaatttttcttctaaagttaatagtatcttttatataatgtcagtcatgcttttcttatgtaagttagactattaattgttgcgaaaaattataaacactacgcaagtatacgcaatcaagtagtaaatctcaca

SEQ ID NO: 269525 - DNA, 916 bp, Cannabis indica
gtttctaagaaaccgatttcttggtgatttttccattgacaataccgattttaacgactattctgacgctagcagctactccggtaaattttctggcgccgacagcaaacttcgaaaaagtcattagaattggcatagtcggtggaaaaattaccaagaaattggtttctggtttcttgatgaagaaaccagttttttggtgattttccggtgagttttctaacgacaatggcaattctgacgacttttctggcattggttggtagcaactctgacgactaatacaccagcagctactctggtgactttttcagtaccgacaataaattttgggaaattcgtcgaaattggcattggcgtcagaaaaaattaccgaaaaaaatcaccaagaaactgattttttttttcttcatcaagaaaccaatttcttgatgaagaaaccagtttcttagtaatttttttttctctatttggttgattgatgaagctggtttcaattattttcagttctatattatttttgtttctttgatgaaaaaaccactttcttggtgatttttctagtaattttgctggcgagaatgccaatttttgacgattttttttgtacacttcgctaataactccggcgatttttccgacaacgacaactactccggcgacttttccggcaccgacatcaaactccagaatagtcgtcgaacttggcattgtcactggtaaaattacttggaaaccggtttcctcatcaagaaccagttctggtgacttttccagtcgacatgctaattctgacgactttttcactgccggcagcaactctggggacttttccggcaccgacgacttttccggtgccgacagtaaactccggtgaccttttcggcacgagtgacaacttcggcgatcactatag

SEQ ID NO: 269526 - DNA, 1017 bp, Cannabis indica
agttgagctctactctttacagacaagcgataactttaattttgtttagtgtttacaaatctcgaccataaacagtccgactctactaatgacaattaactttttgaaaatctcaaccatatacagtcgagctcaactcatacagttgagctatatactttataatggtcgagctctacacattatagtcgagctatatgatttaatatggtcgagctttcatatttactttagataaaattatatattttataaatattataatgtctattgccgcattctctactaataaagaaaattagtaacagtcttgatgatttaatctatttaagaagaaaattatgtttttaaaatattattgtgacatttcatatttaccatagacaaaattttatattttataaatgttataatgactattgccatattctctacaaataaataaatcaataataatcttgatgatttaatcttcttaagaaaaaaattatatttctaaaatattattgtgacatttcatatttatttcagacaaaaccatacattttataaatgttataatgcatattgtcatattctctattaagaaagaaaattaataataatcttgatgatttaatctatttaagaaaaaaattgtatttctaaaatattattgtgacatttcatatttactttagacaaaactatatattttataaatgttataatgtatattgccacattctttactaataaagaaaattgataataatcttgatgatttaatctatttaagaaaaaaaaattatttctaaaatattattgtgacatttcatatttattttagacaaaattatatattttataaatgttataatttctattgctacattctttacatttcataataatcttgataattttaatctatttacaaaatggtataatatctattgtcacctctaacctttacaaaatttgatcaatataaaaatcaattagattaataattatgaatctcaaccatgaatggtc

SEQ ID NO: 269527 - DNA, 701 bp, Cannabis indica
attactctattttaatttgttaatttttattttacaaataattataacaaaaatttatataatttaatttttacatcttattataattatagtacaagttcaaaatatatattttattattatattggagatagaaacaataagggacaagtattaaagtagatattgtagattgtttgaacactcctttttataatctaaattattttgaatttcttaaaattttgcagaatgtctttaacaactattatgtacacgaccaatgaaaaaaattaaaagggggtacatcaatacattcgttttagggagtgcaccataaaatagcttcctacgatatatattattaaatttttaacctgtaatcattttaaaaaaaactaagagaaaatttgtaataccctaaacgggtgttgtagtaaaaagtgtgttatgatttaatagatacaagacaagataaacttctataaagagaaaagttttaaaatattggtattattgtaattttataattttattatcgctagcgagatttttaaaactgtgaccgaacttgagaattttaaacggtctgtattgaccaattgcaaaatgacatgtctagaggtactatgcactactggtgtctaatatcaattaatactctagataccataaccacacactcaaaaaaaaataccattaccacactttatttcaaaata

SEQ ID NO: 269528 - DNA, 1221 bp, Cannabis indica
tttgtagtctaagaggtcttatttatagtaatgggaaagttagttgaatcctattagaattaggattctatttatagtggatagataaatcctcttagaattagaattctatttataatagtattaggaaatatctcggataaagataactcatcttttaaacaaaagataaaaatcgcaactcttctggaaaatttatctttattttcgctatttttttttagaaatttcctactgcgacgactgatagtattttggccataactctctcgatattactcggaattggacaattcaagatgttctagaaagctaagaacgagatctaaaactctcatgttgagctccaagtccaattctgcctttaagttcgtccgaatttgcaattaagttccgccttgtataatcgagctcgccgactttcattattttccaccaaaatatgttaaaatccctccaaaagactctaaatggatgaatagtatttaaaataatctaacaaattaaaatcacactaatcaataatttaaagaatcaatttaagaatattaataaattaattaatcatatttataagataaatatggactcatcaacaccgttgcttcttataatgaaaccttgaatatggaattacgtggtactaagcgtaaaatggataatgaaaaatcaagttccttatggcacaaacggttaggtcacatctctagaaatagagttgagcgacttgtgtctgatggaattttagattcaattgatttttcagactttgatgtttggattgaatgcatcaaaggcaaacagaccaaaactaagaaattgggtgcgaaaagagctatagatgtcttagaattgatacatacagatatttgtgggccatttcctacaccttcttggaatggtcaacaatattttgcatcattcatagatgattactcaagatatgcgtacctatttctgcttcatgaaaagtcccaagtattggacatgttcaaatcttttaaggctgaagttgagaatcaacttagcgaaagaataaagcaagtcatgtctgaccgtggtggtgagtactatggcagatatgacggatcaagtgaacaacgtcgaggaccttttgccaaatatctagaggagtgtggaattgtcccacagtacactatgccaggatctcctagcatgaatggtgttgctaaaagacgaaaccatactcttaaagatatg

SEQ ID NO: 269529 - DNA, 728 bp, Cannabis indica
acaattatgcgacgacttgggaattaaaaaagcattctctgcaattgcttacccgcaaaacaatggacaaattgaaccagtcaataaaataataaaacacaccatcaaaggaaaactcgaagagcgtaaaggggtatggctagacgagcttctgcaagttctatggtcatacaacacgactccccgatccacgactggcgagactcctttctcgctctcctatggatgcgaggccatggtaccagtcgaaattggggcaggctccttacgaagagacgttttcaacgtttcataaaacgaagaaaaacaatcgctctacctcgaccttctgaaaaaaaagcgcgatcaggctcacctaaaaaacgcgacttaccaacaacgaaccgcaagatatttcaattccaaagtgaagacaagagtcctgcgagtaggagacttggtccttcgaagagtaatgccaaataccaagaacccagcacatggggtcttcggggataattgggagggaccgtatttcatcgcagaaaagattggtgatgccacgtaccgctcgcagaactcgatggtactgcgattcaacgggcttgaaatggcgagagcctaaaattctattatcaatagtactcgcattttctagtttgtactcaccttgtatttatacttagtcattttttataaaaaatacctagtataggggtagtataccatgatgtactattgattatata

SEQ ID NO: 269530 - DNA, 760 bp, Cannabis indica
cacttgggaactcccagataatcagaatgaagctcgaaaaataagaaggaacgctgcacggtatatcataatagagggaatattgtacagaacaggattctctatgtcgtttctcaaatgtgttactcaagaagaagctgcacgactcctatctgaggtgcacgacggattctgtgaaaatcatgttgccgggcagagtttatctaagaaaattctatggcaaggttatttctggccaacgatgattgaagattcaaaggcctatgttaagaaatgtgacaaatgccagagattttcaaagatacctcgagctccacttaatgagttaactcagatgcaaagtccgtggccctttgccatttggggaattcacctgatcggacaattaaccaaaggcaaaggagaagtgtactatccaatggtagcagttgattacttcactaagtggacggaagcagaaccactcggaactattacatcaaagaaagttcaagactttattgtgaagaacataatcttccagttcggaatgtcgcacaaaataatttcagataatggcaagcaatttgacagccaatccttcactgacttttgtgtgaaccatggtatcatcaaaagtttctccgcagtgacacatcctcaaacaaatggtcaagttgaagtagtcaacaagaacttgaaggacacactaaagaaaagaatcgaagatgccaaggaaactggtcgagaattcctgaagttctatggtcatatcgaacaa

SEQ ID NO: 269531 - DNA, 750 bp, Cannabis indica
ccgcctttccttcctccggctcccttggctcctcccttggttgatttagtagtttccattgctgaaacgaaatttggaagcttttctctgaaacgattagattcgagttttggagggaacaagagtttgttgagtattgagtttgatgagattagtgagtaagatatgttgatgcagatctgtatttatataaggggatgagtctgccacgctggcaatccgcgaggtttaatttcgaccaatccaattagagcgatttaatattattattatttgctttgtttgttgagcataattattggagcattgatagtgttatctagcaccttctaaacgtatatattgcgattggctagcgatattttaaaaaattattatattaaattatataaaatctgatacttaattatgtcaatagttatatttacagtaagagggtgttaggcaccaatgttctagtacctccaatagttatattgacagtaagagggtgttaggcaccaatgttctagtacctttttgtaaggtccccacttcaagtcctacgtcactctagctacttcatggattgatgactgaccctacataccaacacgagtgtttccagcgtgctttgtcctcactcgcacgcttcctgggaaaacatcccaggagatcacccatcttgaaattactctcaggttaagctcgcttaactatggagttctttcgtgatgggctaccggaaaacaagatgcaccttgttgatat

SEQ ID NO: 269532 - DNA, 638 bp, Cannabis indica
taataattctctaaaacacattattttataacaaaatagaaggaccttgtttctttgccaaaaacttaggacactggggtttctagtggcccttctcgttgcaatagaagcactttcccttttgctttgcattgggattagcagcctttttcttattagctgtgttaacaactttaagaggcttcttgctattcttccatttcatcttcttgggtttcgaaatagaggcaatgtttgcctcagccttagccatacatttagcagtgccagaactaggagttttgtttcctcctttttgtgattctccaatcaaattttcaaatgtctgaaggttgttgattaactcgtggaagtcaaaagtcaacttattcattacataatttgaggtgaagggcaaaaaagctggagtcaaactattcaagatcaaactcacttgagttgtctgatcaataatagctccatgattctcagcctcttggaagtaactagtcatctagagcaggtgatcacgcacgttctgatgaggtttcatccgtgcattgataaaattcttggtcacctcaaaccgagcttgatctgacgccatcccaaacatttaagtgagctttgttgttagcattctgccaatgctcgaactt

SEQ ID NO: 269533 - DNA, 703 bp, Cannabis indica
aaacaacagtaaaataacactacaaaacagtaatttgttgttgatttagtaaatttttctctttgccagattttatagttttttcctggtgtttctatgattctggtgttgatttgtccgtccccaaccacgaaggagaggtgccgttttgtgttttgttactgtttacagtataaaagtaaatgcattgggcatggacagtataaaagaaataaaaatgggtttagacagtaaaaatgtaaagtttgctgcgtcacagtatttttgaaaatatttgaccaaaaaatagtatttttgtaagttttcctatactaaactatgatcaataactatttagaatttagcattagaaaattcaaacaaattattacaaatatgcctactaagttgaatcattcaaaaataaaaatacaacacacctctttttgtggtgtataccattagcataaatggatagaatatagggaaaaaattacaccgagtattgtatttccaattttttttatactgttatacattgattttttacttttataatatattttatttaatttttctactgccatgtactaacttttattaacgagaacttacacatttgttcatcagtgtaacgcctttatattttgccttactttataaaaataccattttaaatgcataatttgaaaagataaaaaaaaatcctttaaatacaacaatg

SEQ ID NO: 269534 - DNA, 568 bp, Cannabis indica
ttcattgaattaaaagcattctgaatacaatagagcctttaaatcaggccaaacattatactcaaaaatgctacagccagggaaaaatcgagcatgcctagcaacagcatgagcaactcgatttgctgatcgtttaataaaacgtaacttaacatcaattagagacaacaataaagcatgacagtctttggtgattaaaccaaaagttgaggacatattatgatcacttctgatagcctgaacagcaaggaggcgctatcggtctctatttcaactttttgccaattattgctcttaattcaactaagagcttctttaattcccaacgcttctacaacctcagcagaatagttactagccttgtaacatgttttagcttcaattagtttacccaaatcatcccttgctacaattccaaaacaataggaatattattattaatgtaattttagttgatgctcaaatattttaaaatagaaacatgcttgtatgaaatatattgtaccaccatgcatgcacacatacaaacatgcatgaccacaaacaaattattaattaaagggatcaa

SEQ ID NO: 269535 - DNA, 760 bp, Cannabis indica
ttgacaaaaaatcagttcaaggtcctatttttaccattttgaaaaatacaaagtccattttatcatttaataaaacagaagacccaatcaataatttttgcaaaacacagagtccaaaatagtatttaccctatataaatacatgtggcagtagatcaaggttatagttttgtgtatataaggttttattatgtgtattttggcatatttcatatgcacacttattttatttatttatttttttttttgcggtacacttttagtttgtcatgcgtttcaaattaaaagtgttttgtcttcgaattaattttgggttctaaatttttctttgtgaattcgattgcattgattgtcaagtatatgattgaatgatttacatatttgatgaatgccaaattttataatgagtccactcatgactaatttggattacatgatttttgatactacaatcataccatttataatatgtaattatatataaaaattgtatatataattctatgtagtttatgtccgaaaaaatttattaaagtctaaagttaaagaaagtttagattaattttgttcaaatttgatatactaaaaataaaattttaaagtttgtctttcattctaaatgagttagttgaaacaagatgttaccaaagcaacttctcttgtgtagattgctcatgaagaatgttagatgtttgtgtgtatttttctcatgtaagtattgatcggtacaaatgaaagttatattcattttgagtgcata

SEQ ID NO: 269536 - DNA, 567 bp, Cannabis indica
ttgggtttgggactgggttcaggtcatggtgtgggttttggtccttgtcagggttcgggtccacggctaagtcccaaatctagacaccgactactggttttgtccaagccttgggtccagatctggatcccaatctcgggtcccagtctggttccatttttggtgctgggtcacgagcttggtcctaggttcaatttcgggtctgggtcgggtactacatcccgatcctagttcttttttcccgatccctatcctgattctggttccaggtcttggttattgtgtgggtttgggtctcggtctagtttcaatttcgagtcgtagtctcggttcgggtttaggtctctgtctgggctttgatctgggttcgggtttttgtttaggtccttgtccttgtcctagtccttgtacggttctagttccatttgcaattctgagttcgactttgggttttagttcgggtcggagttcgagtcctggtctgagtttggattcgggtccggatttcagtctaggtccaaatagggctccaggagtgggttcgggtcgtgggtcttggtctaggtt

SEQ ID NO: 269537 - DNA, 900 bp, Cannabis indica
ttttattgttttattggataataatgtattataatactctatttcatatatttagaattgttttatgcaatatatacattatatacgtatatatataaacacgtaaaatttttagtttttcggtccgtgtctgttctgattttatttttttcgttttcggtatttatttcaattcctatatgcatcactacattcatatagtattgaaaatcgttctaagcatgaaaaccttttttcgaaaaaaaaaaaaaaaaaaatttgaaaacaccgttcagacccgaaaattttgtgtgaatttaaagtctttattttatgggttttcgatgcatgaaatctatatggatgccttaatttttttcatttagaattgatttggagtcttttggtcgtcggaaacgaaatttcagatcgagtttgggtcgagtcctttagacccgagttgcagaaaaacaggtcaaaacgacctagtttggctgaagaagacgacccaaacgacccgtcgttgtgaaaaacgacgtgtcgtttgttgcaaacgacatgtcgtttttcatactgtggaaaacaacatgtcatttttcgtcttgtgaggcagcccttcattgagtaaaatgacgtgtcgttttccccttgggtatgcttagcccttcgaaatggaaaaaacgacgtgtcgttttgctttttgcaaaaacgacatgtcgtttaggcagtgtaatttttcaaaaagaaaaaagaaaaaattctgaatttatttataaatttttatttatttggaatattaattattttcctattttgtgttaatttagtcaacaaattacatttagtcaattttacgtatatttagtataaattgaaagtgaaaatttgtttaatttggtaatttattacatgatttattta

SEQ ID NO: 269538 - DNA, 1157 bp, Cannabis indica
aaaaaaaaaaaaaaacaaagggactgttgttagatgtacacgggtcgctgaaatatttttcaaatataccgtgtacaaaaatttattctatttatacagttaaatgatattttatttgtaaatataagacactttcttaaaaaaaacttgctattttagaaaaaaatctgctattccaaaatacctgctattctaaagcttcacaattcacacgacatcatctctttggctccggcaagattttaatatttattgccggagctactgaatttaaaataggctatctttctctctcgacaatccaaagaataaatgttcaaccttctaatttttcttcgattagattaaagttggcaagaatttcaacaatttgaggaaaacttagatctattggaaaaaaaactttctatcccttcaaataatatcagtagaggtcattaaatttaagttgaaggattattacagccatactaaattctaattgaggtaattgaaagcttaaaattctcttttattaacattatgagtaaatatgaatttgggtgttaaactttgttcatttttcatcttgttcttaactttgaatatggttcacacggttcaatttgattgtttcacttaatgaattgtttttgttatattttgtgcatatgagttgatgttaaagttgtaaatatatagttgctatagtgtttctgcacatattgctataaggtttgctgtaatcaattattagaaagttgctataagtaatactgcaagagttgctaaattgattactgtattttataattatttctatttacatagggttgttggaagtgtttctgtaggtgttgtcaaaatagttgttgtattcaatcttttgtttttttttaaaaaaaaaaaactgttgttggaagtattggtatcaaggttgctgaatttctttctttgttctttgtacatatagttgctgtaattattgtgaaaagggtttctgcatttaattttttttttttacaaaatggttgttagtcagggttgctaaagcagttgctgtaagtgttgtgaaaaggctttctgcaatttttttacatatgttgttagtcagggttgctaaagtaattgctgtaagtgttgtgaaaagggttgctgcatttgtttttttttttttt

SEQ ID NO: 269539 - DNA, 899 bp, Cannabis indica
ttagtgttgatttggattagagagacaatcggtgatggtgactatggtggtagtgtttttgggaagagagagagagtgtgaagataaaaaggacaaaaaaaaaaaagaaaaaaaaattatttttaatgatttaattttcattttaaattaattttatttttattttatttttaaatagttatttatgtggatcaataatattgtgccatgtgtacattatatccatgtggacaatgtcctatgtacacatgaatagtccaacatggcacttaacacctaaaaatggatggaaagagctaagtgctaacagaacatgaatttatgggattttactacaaaaattttagaattggggttagttacaataaactaaatacttatgggagttatgccgcaaataactctattttttatttattaaaaccacttatttgtacttaatattactgaccgaataagactttttaagacattaaatatctttctatgctattaaactctctactgctattttattgtagctccatcatgtcagtaggtgattttttttttttgatttatttatatatatttatgtaagccaaattatgtaattcctaatctactttttagggatttcatccttcacaaaggacaaaataatagcaagttgctttatttgatgtgcttgataggtgtactgtagtttcaagtcactctaatcggtcatggttataaaaaaaaaagtattttatcaaatgaaatttgtagaaggttggatttttttgtaatttgtcaacttatatgtacaatattgtaagttaattaaatattttttttataaaaaaaaaaagtaaagagaattgtagctttaagttgttggattgtatttcctaggaaaagtgttttttttttttttt

SEQ ID NO: 269540 - DNA, 506 bp, Cannabis indica
tcgattgaattgctcaacattttttattgtttagattgaacttagataaaattagcagtagtaaaaatttatatattcatattgattgactatttatattatactaatggaaatcatataccacctacaatatatataactattttttgctcaaacaaaaaattaataaacctaagtacctaagcaacacattgataatcagagaggtagtttcgtactaaaacaaaatgtatattatttatgtatgtgtattcattttcaataaccatggaagtttgtcctcgtggccacatagtgatgcaagtaagtgaccaagtccaaccacatgacaaatttgtatttgaaaggtatcagaattgaaaaacaagagaaattttcttccaaagtaaaagcaactgtattaaccataaagaaaagaaaaagcagccggtagagaacaacatttagcttaatgatttgaacaggacccattacaaaggaaagcacaccgagcagagcaaccatgg

SEQ ID NO: 269541 - DNA, 762 bp, Cannabis indica
tattatttgaaaatcacacagctgtaataagtatgcttttaccaggtcaatgcatacgtgtattaaatacgctgtaaagcgcatcgctttgggacatctcgctagaaatatagcaacaataaccctagtagtgagctagagcttttcccatatctttccgaggttgataatgtaaatctcgtcatttttgtgcttgaagacataatgctccatctgacaatcgcagttcttggtgacaagatgaacctcaacaggcaacatcatttgaatgttaacttctatctgagagatctgactcgacagaacagtgagtctcattgaaagatgtttgaagctgattagtgaaggtaccaagagtatgccttcttataacgagatggatacctcgctatttgtcattcaagttcatccaactgttatgcttagtttgtctaatgtatattatacgctaagtgttcttatagttaacatgtctcgcttacatttcttcatacgtagcgaggttggtgcctcgctttgtattaataatgtcatcttgtgatcatatcttcatatacgatatggttttctcgtcaatacgtgaattaatagtttgtacatctatgtctcgctcaagacttttcggtcaacgagttatagttatactctaccagttcagcatttaatgagttattccattttaacatcttttaatataattactattatatttgttgattcatattgttccaagttgacacgtgtgcttctctgaagtgccag

SEQ ID NO: 269542 - DNA, 506 bp, Cannabis indica
aacttgaaaaaaaatttaacaaaagaggtgtatggccggctccaccaccagggttccccgaaggctgtcgtcgctgcaagttaggttattttaatcgtaaacaagtgaagtctagatctttatgcaaatattgcaaggctcatcgacatggcaaagaattttaattgttgtaatgtatgtaatcgctaaatgtcgctaatgtaatcgtgaaacgtcgcaagatatcgaattttccctgaataaattaaagttccatctatatcgcaaaatgtcgctactgtaatcgtgaaacatcgcaatttttcgattttttccagaattaataaaagttcttcctatatcgcataatgtcgttagtataatcgtgaaacgtcgcaatttttcgattttttttagaattaataaaagttcttcatatatcgcataatgtcgctagcataatcgtgaaacgtaacaattttacgactttgtccagaataaataaaatttccaaacatatcgcaaaa

SEQ ID NO: 269543 - DNA, 916 bp, Cannabis indica
agagatgactggaacagggccctcgtatttgtgtacgagtctgatgtccttgtcccctcggaatctcaattgttctggccttactttgatcaacactaagtcacctaccttgaactccagcggtcggcgtttcttatctgcccacttcttcattctccatgaagttttctctaggtatgcttgggtaatctctgtgttcttcttccagtctttcataaaattaaaggcccacggattccgtcattggtattcatccattgtgtggggtaacagtgggtgctgtccattcacaactacaaaaggcctcttgtttgatgaagaactcttctgagagttgaaacaaaattgagctacgtctagtaggtgcggccaattcctcaggttggcattgaaaaagtgccgcaaatactcctccaacatcccactgaatctttctgtctgcccatctgtctgtggatggtagctcgaggagatgttcatctgtgacccaagaagcttaaataatttggaccagaaggtcccagtgaatctttgatctcggtcacctactatattctggggtactcccctgtactttactatatgcttgaagaaaagttgagttgtcgcttctgtcggacactgcttcgacactgggatgaaggttgcatacttaaaaaatctgtccacgatcaccaagattgcattcaagtctccagtcttcagcaaacttgaaatgaaatcaagaaagccactctcccattatgtgcttgggacagacaaaggttctaacaaccctggcgtcatgtgtctctctactttgtcctgttggcagacgagacacgtccttgtgtagtccaccacatcctcctgcatctgatctgtggccaatagtacccatgcttcaaaagggcatgtgtcctatgccacccttgat

SEQ ID NO: 269544 - DNA, 535 bp, Cannabis indica
tggagataactaactctccgccaggtaatagagttccaaaccctgattcatatctatcatgcggtctatccaatttactaaagattctgggtgccacataagaatgtgtggccccagagtcaaacaatacagagtaaaaagagttgatgaccgagagcagacctgtcaccactgcaggactggcttctgcatcagcctgagtaatggcgaacaccctagctggagtgggtctcaccgcagcccttggtgcttccgttctaagttgagggcaatccctcttgtagtgtccgggcatgccacactgaaagaacccctgccctctacactcacccagatggtgccttttacaactggggcactctggttaggaaaattgggtctcagcactaccctgacgaccacctcgactctggttccctcggaacctcttgttctgtcccgagccaccgattgcagtggatgctttcctcttctggtccatggccgaaccactacctcccctgcgaaagcctgatgcaggaggggtaggagcccc

SEQ ID NO: 269545 - DNA, 608 bp, Cannabis indica
gaatctgatcctgaacccgagttggccatatctaaaccattaacaaacaaaatttgagaacctttcaaatatgaacattgacattgataatcatcctactaatacgaacatgttttgagtcaattgagattctccttatactacatcttatactaaatttaacataatttttaacaggtggcaattgagggagtactttgtggttgaagattaatgtttatgagagatgagaggagtagttgtatgaaattcacagaaatatccacattggaataagtgcctatcataactcataaactcataaataggaaccaaaaacaaaactaaaccaaagccacactaatagtacacactccgtactcatctcccacaaaatcacatgtgcaaacacaacattattatttattattatcataaatacttcttctttctttctttttctttcaaaccaagaaaagttagaaccttcccaatcttcttcaacttttccctattttttgtcatcattattatccaatactatgatttatttattaaaaaatagctaaaataaatacaaagaaataatgtaatatcaaatatgagaatagtcctaccataccatacca

SEQ ID NO: 269546 - DNA, 659 bp, Cannabis indica
agaaagatactaagcatcaataatacattttagcaattctcttaataaaagatacagtacttaacatttattttttctatctgaatattctcttcttaatgttatattatttgtatgaattaatatattctcttcttaataaagatgcaatacaaaaaatatattattatttttatgaaaaatataacatagattaaatgaaatatgagaaaataaatatgtgataagattaaattgaggtaatttttgtcaaatgttgtaatatttttagtggttaaatatttgtaacttttaaaatatcaaaccttattaagagtgaaaaagatattatactttttaatttaaaatttttatgtttgctaagtttataactcttgactaaccatctctctaactggaaacacaatttttttcggatattggcggctaaaccacttgaactttacggtttgtaacactaaaccacaaaaactgaatttttggcggctaaacaaccaaaacccggttacgttttgctctgcacacctccgtccaaaaatcacagttaagtgctacggtggactttccacgcatacacacttgtacacgtggcaaatttttagtggtccacgtaatattagttttaaacaataattataaatatttgaaaaaattaaaaa

SEQ ID NO: 269547 - DNA, 1382 bp, Cannabis indica
taatagatagttttttctctcaaatttgacatctctttttctcttaattatgcccctatttataggtgtatagggtggcagttatctttattgggatctaatcacttacattcttaacgttttgtttttataaattatttaataactacccaaccgctcttttctctttatccttaaacggttatgttgattatgcaagttgtttctcgttgagtacgagttgtccttctttacagtctttataggaaaaaaaatactaagtgtagatatacttctccttgcaatattctcgtattataatgatattagcgatgtagttattccgtcgtataaaggacgagatagatgaatgtagttattctctccatgtacaatatgtgggtcaatgagttgcaagctcttattcccatgtatttggatcaatgagctacaagttttttgttatcttgtcttgaacagtttattgtatactctatctatcccgagatggacaaattatcttgtcagttgtccatgttaatagttattattcttatctcgcatatgcttatatggcagcaagtttgaatatttctatcaactgtaacttattgaaacgagttattcaagttgcatttaatgatgcaatttattattataatcgttgagcttattcatattccttttgaaatacacgtgtcagcttctggttgatagctgaattttagttataacaattgtcccctaaaagtgctttttaattaaaaaggactttttaaatattttcaagggtataattttatttttctcgtttaaaacttgcatgcttataatttggtagtttaaaaccttgaagcacattgttgacttcgcttttagccaacgacaatgagtctttttgataagcgataaacgatatgtcgtaatgagaatatagaataaaacaataacaggacacagaaattttatagaggttcagccccgagcagttcggtaatagcctaatcctcgttatttgtattgacttaagaacaaggaagaagtttccttttcttatagctcttacaatagtatctctgaatatataattcttagatagccttagcttactgttacgaaaattatggttactacacaagtatacgcaatcaagtagaatctcacgcaagtgaggtcgaaccacagggaattggattaagtactactaaattatacttatgattctatctggtaaaacaatactttttgcaatttaaagaaaacaattcaaaaaattaaaaagaatagatgagagactagggaggtgaatcctgttgttaagttaccaatgttaatacctaattgctatccttttctcaatgtgaatgacagattatgaattaacctaactcttttcagatctt

SEQ ID NO: 269548 - DNA, 1182 bp, Cannabis indica
aaatatagtgtcttatagattaaaaatagctaaaaaaaggaattgaaaagttcagatacatagagagaatttattataattagctggtgtgtgttcgagctgcttattgtggttttttataattgcttgtgattaatgaagttctttccttcttgataaaaaaaaatgtgaatgtgacatacgattttcacctgataaagcgatatgatatatggattttagattgtgaaatgggtttgcctgattaggcaatatgatatataagtacacctgattaggtgatatggtaccgagttatggtataggcttagcttgcctgataaggcaatgcagtatacgaatgttagattatgacatgagcttgtctgattaggcaatgcaatatatatatatatatgatgaatgttaggttatggcataatcttgcttgagtaggtaatgagatatgtggatattgatattcaggttgtgcatgtgaggcaaccgttataaattcatgactatgaactaaaaactttgttaagtttctaactagcagcgtaccttattagatacggacgacaataatatgaaaatgtctggttatggcatagattgaaaccgttgttaggtttccaactggcggcgtaccttattagatacatgcgacaataatatgaaaatttccaggttatgacacagaatgaaatcgttgtagggtttcctcctggtgacgtattaggtgtaggtacgagcgtcagtaacatatgagtaccaggcataggtacgggctcgtctaattaggcgatgcgttatattggtgtcatgtcgtggcacgagctcacttaattaggtggtacaatggtattatatatgaatatgatattacattatgacacgggcttgtttgattaggcaatgcaaatgtatgaacttatctatttttatgcatatggctgattatattacctattgttaaatgttatggtataatcattttatgataatgaaatatataattagctatttaatgtatccttcttgattacttttcttgctgagtctatgtgattcacgggtactctgtgtgagggcaagaaaagttagaacagccatgagatgacagtcttctccagcaatgtacgtattgaccctaccggcctgtgtgtcgagttgtcaagaattattttggactggttgcat

SEQ ID NO: 269549 - DNA, 459 bp, Cannabis indica
taaaaaattaaaactaaaaattattattgctaaaaaattaaataataatgtgtgagattataattatattatttttgaagagtgctataccattggagtgattttagaagtaagagtgctaaaatgttatggaagagagatcaaataaattattatatttttagattatgtggatatttttagcatccttaaagaatgttactattatggtcattaggaccctgtgagtgtgagtgtttggttccaagtacccggattccttagtgtttgatacttttcctgatgctaacgacaagtatgatgaattcaaaggaggttgaagagttaataacaaagacaaactcgatgaatatggcgaaaagggaaggaagcgaggaggatggagatgtagtggaaggaagagaagtggaagaatcaagtgataagagtaatcaagaggagaaggaagactcagacgaa

SEQ ID NO: 269550 - DNA, 862 bp, Cannabis indica
tttgtgataaaaaattaagtctgaagcttcaagccaatttttgactatggtgcgttcactttgaggaaaaatattgtgaataaaagttctagatctctcttatatctttctaaaacatattgaatcgtccaatttcaaacaatattgaaagattaatgatcaaaatattatcagtctatgtaataggaagctcgctaccaaaaagcgtgcttcaagggccacgatactacaaggtagtatcgtggccctcctcttttaaactgcagaaattatattttttatatatatattttagctatataaatgcctcttttcaacacttttcagcagacaatttcgggagacaaaaattagaggcagaaagcagctttggatactttcaacattctttttttcgacgagttctttcttctattttattttttatgttcttaattagttgttatcaattattcacaatgattatgagtagctagactttttattagagtattaatggagattgtttgacactttattttggttttaatatgatttagttctcccccaattttctatgtgcatctatttcattcatacttaattacttttaattgtctgatcactaattaattgtttaatgattttaatctaaaatctgagaaataagtgtttattatgctatagtgaaatagacatagatttcgatataggacgagagtacctatatggttcgtgtagcatttaagatttttatacttaaggccttctatatgtttaaatttatcacgagagtagaaaatttacataaaggttgaaattatatgctaagcctaaatataaatttttttagtaaattcgctatcacatgaaaattgaaatt

SEQ ID NO: 269551 - DNA, 528 bp, Cannabis indica
ttattaaaattagacaaaagtccttaaatccaacaatctcaatagctcaatggcatttttaacgaccttaaaaatttaggaaacatgatttggtacacgtcaaaattcgagggtaaaaatcttaatttgtctaaattttagtaaacagatgattgtaaccgagctttccacctataaccaaagccattaaaatgaggaatcaccaaaaacaacaacttcaaaaagtaaaattaacaaaataactttctcatttttacactaagcgaccaaaagggagtctatttatgcaacttgctaaatttaaatttaatcaaattcattattccactaaaaatgaaatcattcaatttaatcaaatccgttattccgctaaaaatgaaattatttaatttaatcaaattcattattccacaaaatgaaatcattaatgtaatcaaattgcatatggtaaaagggtagattttggcccaggaatgattcaaggaaagatttaaagtgaattggtgtattatttaagaggattaagga

SEQ ID NO: 269552 - DNA, 948 bp, Cannabis indica
cctcgatcataatcgagttacaacgattaataatttgtttcctattatttctctcgatcataatcgagccataaccaatacataacattaacctcgattgagattaaatcacaacaacatataccgagatttcaaatcttaatagataccgtaacaatcataatattaaccttatacagtatttaatacttttcttacctcagtccaaaagtttagcgtgcatcccgtctaaatagaatcaaagcttgacaatcccgggtcctatgtcacgacaacaacactcaataaatactttaatcgaaatctccggaataaacttaattcctaaaaccggacaatccttatctttaatagttctaggttaggctttacaacttctaaacattccaaattaaacaccgaaatccaccccgagccctaaaaccagcctggaggaaaaaatttgaaaaactctcctttgatggcaaccggtcgaccggttctgatacaccagaaccaaccggtcgaccagttctggcagggcagcagcctagagttttctccccaaactcgagccaaatccgaaccacacctgcccaacacctccagatcaaaccaatatcaccaacacaacatagtccaaccatcatttcacaacaatttatccatttaatcaaaatagcataatcacttaaagtttaagcttaaaaaccctaaaattccattaactcaacactaacagctttgattctaaccaaatcaagcataaaaaaactccaatctaagcctagaaacttattctaatctcagtttaataccttaatcctgaaatcactaaaaccccaactaataatcaaacccaaaaacctaacgaaaatcatcaaagaacacatgaagaacacttaccacaacttgattagctcctagggttgaagatttttctcgaaaatttagatgaagtgagctaag

SEQ ID NO: 269553 - DNA, 551 bp, Cannabis indica
aacttcaaattgtatccaaactttccccccagaaatttggattgaatattgatgaaaatgaaaggtctatgattagttactagtagctgcctaagtccttttagagaaatatcctagtgataggaaaatctcagaatgatggaatggtcatatacttagtgtacaccattactagattcatgatgtcctgatcatgaacttaaaaaaagctagaacggttaattaaggtttacatgtttgatagctattctaaaatgattagggtggaccatcctatggtaatcaagataagaaagtgttttctttttgaaacaagataagaaagtgtttatttcaacaaatactacctttcgaataatatgactaaatctgaaaacaaagtagcaaagtagaagagatattttcaattccaaaagtattctatcatcttattctatataagatggtctcactatctctgttattttgacacaactgatgaagataataccattatgttaggttttatgccctaaataaaacttcatttcaatgtaatctattttattcaa

SEQ ID NO: 269554 - DNA, 510 bp, Cannabis indica
gcatttcaccaaaatttctcaagggtttttcagagagaaaagaaactttaaataccattgatttcctgctcttattccttcgacgctgccagcctacgttttacaggcgaccaacaccaacccccagccttcaaacttcatgtaagttcttcatatttcgtacacttgcttactgtttgtttatataacatgcttttcagtttctgggttggatggtgaacttctgggaatagttttgtttgagtttctgaatgacgtgttaaactcttgcttttctgcgtttagattacttctttttactacgtttttgctgaggcaccatcctcatttcccgtaatgaccactttagggcttagagtaaacctcaccttttcgattttaccccccccccccttttttttttctctttactgttttgcaatgtcactacctttgggattcttgcacccgactcttgtcaagaaaaaccctttggagctttcttttttttggcaagtgtccggagggggc

SEQ ID NO: 269555 - DNA, 655 bp, Cannabis indica
taattattacttttattgataatatagcaataaaaaatctcaaaaattgtgttaaacgtaatttttcctttaaaagaattgatatttataacgttttaactaactaaaaatgctaaaaagaaataagaatctaattaagaatgataaagacattttttatgacataaaatgacaaatttaattagtgatattcgatctaaatgtataatattttaacaatttttatcacattttaaaattaaaatcagtcatattataaaccatactactaattaattttagtggaggagtcaactttttttttttccaactaccaaactataaaattcttcaaaataatttaaaaataagagagaatatgagaccactttgataatgaaaaaaaaaaatattaatttatttctttcaattcagtacaattttcgtactggtttagccccaccattgaaaatttgatgttagaattttcattaaaaataaaaaataaaatagaaaggtggtgtttggttttggggtgaaagtggacttttcaccatgaaattcagtgtttggtgaatgtgataacaaaagatgtcaaaaaatatatatatatatatataaataaaatcaaaaatcaaaatcaattaatacttgtggcttaggctacaccaaccat

SEQ ID NO: 269556 - DNA, 907 bp, Cannabis indica
catataggtcactttcatagattctttcttgattgtctcctaatgttcattgtttgattacatcttagatgactcccactcaacagtaggagtctggttaaattcgtacacaagtgtacacttaacctcttactattggttcttagggacctcttgttgatatattatatcttagtctgaaacaataagtctcttctagactaagtcatcaacgtagtattctagtattaacatagtaggctatcattagtgacatccaaataataatgggctagaattttaaaattctcccactaagataaggtactgtgatactatgtccaagaactttattggtatcaatctctattactacagtaacatgttaattagaacacttatagaataaagaataagttctaatagtttgcttgtttgtttattatattatatccatgtctaatcaaaatatatgtgccatagagatactgtggtgtattgagtatagtctagagttcaaagttaaaaatgcttgaactacatatatcaataacttcttccacccctaagtgttatagagatcctgtggagttctaaatataatctagagttcaatagatgtaaaagatttttgaactgcatatattgtttcttaacttcttccacccctatcagatcaaaagattttttattaaacaaaatcttaataattgcttaagaatttacaattattcataaacatttgaatttaatttctaagtgtttatgtggtattatctctttgaagagaataatataccataaaatttgcatcaataataaagcacaaaacacatagaacatgataaacatataaatacaatacggtataatacaatacggtattagcatacaagttaaagtaaatataaaactcaaatttcataat

SEQ ID NO: 269557 - DNA, 634 bp, Cannabis indica
actagcaacaatcatgacaccactattttgtgtttttctggcatcatcacgatctttcgtgttaaattgagtattatttatgtagtatgattgatactttagtacactaagtgaaggaaaatgcgatatcaaaagtagcaactgagatacattgctcggggagtcactcatttccacaatcacctagcataaatgaaattaattagtagttacataaaatgattatgaaaaaaataccaatttcaaatcacttggtattgcataataccttttctttcaaccatgtactaaaatttcgaaattgttcatcttgcacccatttatggttcctcgacttactaggataagtagtcttgatccaatcaaaatgtttccttcaagatgtagttatatatcattcttattagtacacttttgatttgaattgaatattaaaaattaaattaaaattactcaatgtacggttgaacctcatcacattttacaaaacgagtcggtgtgcttcatctcgatcagctcgacttacgtcgcagaaagaaacaccccgaccccctttactaatttcattatcaatccgaggaagacacgacccaacactagctacatttgacaagtagtctgaacaaaattctac

SEQ ID NO: 269558 - DNA, 497 bp, Cannabis indica
tttccatgaaaatattttttttctctttctgaaaatattttatttggattccttgtgaaaaattaagcaactttcgttcttacagaactcaattccgataaaaaatgagagagttatggaggtttaaaaatcggggtgcattgagtgtcgagcgaggtgctcatgcgcaccagaccctcgaagaaggaggcccagcgcgcgcagacactcggacaaacccgtgtattcatacacggttgctgcgttcagacacgtctcacgcccgtgtgcaccctgtagctcacccagggacatgctacagctcacccagctctccgcgcgcgcgtctggcccatttgcagcctcatttggctacacgtgcagcctcctgggcagcacagtcccaaaccaattttttgtgggattttcccacaaattttgattttcccaacttcaaaccctaaaattaaaataaatattattttttaaaatattagaacttaaatatcattttttta

SEQ ID NO: 269559 - DNA, 515 bp, Cannabis indica
ttcatacatattaaataatttaatattaaaaagtaaccaatacaaaattatgtaataattattactggtaatgtaaaatttcatattaaaatgtactcatgtttgcctagtatgataattttaggtggtgctaagctaatattttttgaataaaaaattcaattttgtttcataagaatttatatttactctgttacatttgtatggttctcttacatttgtatgcaagaatgtttttttttttttgaagtggttacaagatgttgtttgagtgattgcaatattaaatcatatattaatatttataatcaaacgaaaaaacatgtatttttttttatcttattagattttaaatttattgaaatattaacatttttattcaattattcattttaaaattaatattaatttctagaacatttatgtttgaattttgaaaaaatttctaggacgctaaagttaaaacttaattaaaaaaatgttattatatagtcccaaaataaaatgcattagtc

SEQ ID NO: 269560 - DNA, 625 bp, Cannabis indica
ggtcccaggggtagggcacgtggccggggtgatgctaacccgccacaggctgcccaagctgcccaagaatgggaaaacaggtttgcataaatgcaagctagaattaatgaacaagaggaagtgattcggcagttaagacagaagggtgctcctacattccctactccaaaaataccagtagctcctgcccctgctgtgcaggccgaacctgttgttgcaatgaactggatggaacccctgtatgaaaggttccgtaagcaggcacctccagtttttctgggaggtcctgatgtcatgatagtcaagcaatggctaactgtgatcaccaggatcttgaactttatgggcgtcactggcaatgatagagtggtccgtgccactttccaatttcaagaggacactctggtttggtgggacatggtgtccatgattcatgacgttaccacaatgacttggagaaattccaggagctatttaatgccaagtattataacgaggcagtcagaagtgccaaaagaaaagaatttactcaactgactcagaaagagaacatgagtgttactgaatacacgactcagtttgatcgcttgacaaagttggcttcgggaattgtaccaaccgattt

SEQ ID NO: 269561 - DNA, 397 bp, Cannabis indica
ctccagcataaactcggattcggaccccatctttaagccccaatatcccagacagggtccagattcaaaactgagttcagatctaagattcgaatcaaaagctgggtttagagttgggggccggagtccgggtccaagtcagctatacacattaataaaccttattaattagaaattaattttttaaaaaaaattatgaaagggatttggatcttggaccgtttttcatatatatatatatggattagttataaatggatcccacgccattgttggagccaataaaatattattattttgagcattgacaaaacgggtaacttgctataccaagtttctaataactttaaaaagtcaacttgttgaggtaatgttaggctatttttagccaacgttt

SEQ ID NO: 269562 - DNA, 632 bp, Cannabis indica
ttatttttaatttttttaattaagaatcaaaattttaaaattataaaacaaaaaaaaaaattactttcaatttttttaagcagatttttttcttaattaatattttggactccgacctcaatttgtaccttgggatccggactccgaccccagtcctagtcctggactcgaactacagccccgactccagactcggaactggacccgacttaaataaaatcaaaaaataaaaattatagaacacacttttactttttgtttttaaaattaaataacaaaaatagttatagaatgcattttattttttaaaaacacaaattttacttgtgataaaaaattaaaaaataaatttctttaaaaaaaataaaagtgttagcaaacagtatcaaaatgatgttatcatcctatgatttaccttttaatgaatatttatattttctctcaaaaaaaaaaactatattttgtcaaacaatttttttttaaaatgtatatgagtagttttcaaatgatttatatatatatatatatatatattaattttatccttcaaaaattttatattactgtcattgttttaaaaattctaaatgtatttgtattgcaaaagtttttattaaaaaaaaaaactttaa

SEQ ID NO: 269563 - DNA, 932 bp, Cannabis indica
gtttgggttcgggatcgagactggggtgcggttctaggtcctgactctggttctgtgtccctagtcttgttccatgttttggtctgagttcaagttctggttcgggtcccaagtctaggtttgggttgggatctgagtccggctccgaattcgggtttaggtcttatttggagtccgggtcctagtccagttacggttctggatgtaggtccaatttcagttatgattccatgtctaagtcccagttccagtcttggtcaactaccagtttttgtaccaatttcgggttagagggtacgggttttggtccacttttgggtttgggactgggtttaagtccaggtgtgagttcaggtcttcatcagggttcggatcccaggctgggtcccaaatccagccaccaactacgggttttgtccatgccttgggtccagattcggatcccaattacgggtcctagtctagttccatttctggtgccaggtcacgagctgggtcctaggttcaagttcgggtatgggtcggatactaggtcccggtcctagttcagtttcctaggtccctatcctgattctgggtccaagtctcggttattatgtgggtttgggtcccggtctaggttcgggtttgagtcctactctgggtttgggttttggttgaggtcctggtactagtcctagtcctagttcggctctagttccatttgcgattttgagttcgagttctggtttaagtttgggtcggagtttgagtaatggtctgagtttgtgttcgggtctggctttcagtctaggcccagatcgggctccgggtgtgggtttgcatcctgggtcttggtctaggtttggtctgattcccaagttccaatcccgatctgagtttgatttagttctgggtctatgtccttggttctgaagaaaagtctacactgt

SEQ ID NO: 269564 - DNA, 756 bp, Cannabis indica
agccaagagatgaagaatttgctgagaaaattcttgaattgctgctgctatcctagggcacgaagggaaagaaagaaaaaaagaagatggaaccttgtatatacctgatgcttctaatcctttctaaccctttttcctatatttcatttcatttattaacattatctttttttaatgatcagccactaaatctaattgtaaaccaaataattatctaaccccaaaagattattttaccctttatgatacccttaaccctaagacacatctagggacagcttagtaattctagctattcccaccaaaccgacatcttaaaattctaacttgttcggaatacttccaatacaatccatagtcgtcgtgcccgaaaatattatttatattatttttttctaaaaatggtatccacgatacccacatatttcaataaaatctctgtaattaataaattacgctttatttgttcctttaatcgcatttcactaataaattcataattagcttaagtaggattataatcctactctgataccctctaatcacatatttaataaaatatgcccacttaactatcattataattttctaggatattacattaccactcactaaattttactaattatcacacatttagcttgagtaagatcataatactatcacatatttaataaaatatgtccaattaattaccattatattttcggaatattacacttgcgatactagctcttaaaaaaaatttgccggtgg

SEQ ID NO: 269565 - DNA, 552 bp, Cannabis indica
tatgtatatatctacatataaaaaaatttgatgtatatatttgagtgaaggctttagcccacacatgggctaaagtccctccgtccctggtgaggtgagcatacgagctctaatctttccaatgggaaacggtataatgcattaatttcaacataataatataatgcattaatttcttgaaaatattatttaaaatttaattaattttgtattcgtataatattaagtatgtaatattttggcatttaacattaaatctagagatactcatggagataccttaatgttataaattattgataattttaaaataataatcgtgatggaaacggtactttagaagagtctccctaaagaagttagacatattatatttgatcataattgaatcattaaagtggttctatataggtacctataaatgatatacatatttgaaaaatatataatttaaagagatttttataagttatgtcaatatgagaggaaaatatcatataataaaaattctgttgacaatagatgttaaatgtttgcatatgcaataaacta

SEQ ID NO: 269566 - DNA, 904 bp, Cannabis indica
gcccaaccgaagccagttgttccagctcccaaagtcagcagaccaacaattgaatcccacccaagcaaagactgcttcaagaaccatctttgagtacctgcaagtgaagaatagatgctgatggtttttaaaatgtattaatttcatttttcttaccaatgaagtctttttatctaaattttatgtgatataaattgcaatatttttttaaataaacttaaattttgttcgttaaggttttttttttttttaatcgataaatgaagtataatttttatttttgaaaataagaaatgtattgtgtaattatttttgtttattaattttgaaaatataaaatataagtatattttataattatttttgtttttcaattttaaaaaaagatagttaagatataagtgtttaaaattttgtgtttgtaaccgatataaatttaatgaattttttagtggtgtaagtattcaatgtttgttcagacgtaactatagtcttatattacatattttcatccagacttaataatttagaatctgcgccttataagtattgaaaactctcaatgaaaacatcaaactgttaattcaaaaattcgttaacgttaattgaggcttgataattaatacttcaaaacaatatttataatgaatgcaatgcatttaaatactagatagtgaagaaaagacataaatttgcacttggttttataatttattctacatactccatgagtcaatattatttttgagatttgataaatgagaataaaatttgacaaaatttctttaaattggaaattggtcgttcccttttacaatgtttgctttgttatttataagagtaggataaaagttatttttgatctaatctattcaacaattatgaagcgtgaacattcatcacg

SEQ ID NO: 269567 - DNA, 741 bp, Cannabis indica
atacactctccctcactttaaattttgggtctggcaatgactatataacttaagaaaataagcattgttattaggtattagtaatgtcaattaccttctataggtgacgccccgcgattggttaacaatattccttaaaaaatattttttttaggttatatggacatgatacttaattacaccaatagtcgtataatacggagaagtgtgctaggcactaatagtgcattttaacaattctctaagaaaataatttttcaataatatcactaaccaatcttaaggtatcacctataaaaaatactagacaccactagtacctaataataataattttcttttcttttctgttttaatcacttttatctattagttttttattttttatagggtaaataccattttggaccctgtgttttgcgaaagttactgattggaccctctgttttgttaaatgacaaaatagaccctgtattttccaaaatagtaaaaatagaaccctgaactgttttttgtcaaaataaaatttaataattatccgatctaaaggtgttatgacaaaactgtttacattttctatatctgtttgtattttcaagttggttataattaaaaaaaaagttgattctaataaaaaaaaagttgtcaaaaattaagctcagggttctatttgtactattttggaaaatacagggtccattttgtcatttaacaaaatagaagatccaattggtaactttt

SEQ ID NO: 269568 - DNA, 601 bp, Cannabis indica
gtatgactcctatgtatattatggaaaactgtcaaaaacaatgatctgacacttgaacatttatttcgtttataatttagaaatggttttacacgcgggtagaaagatgcaaactgatcatgtctatccttaaattgggcactgtttatttttaaacaagctttcagggcttattttcgttgcacatcaaacgttttgtatatgaatctgagaattaataagaagtaaaaacaaaaacaatgatatccctatatttggttttctagaaagctaagaaagttgagtcaaaaagtaggggaatattagaggctacaaaagatacatgccaataaagggaaaagaaaattaaaaggccaaaggaacccttttcaaaagatctatggaaatgaaaagggttccgaaatagacatttttaaactttgagaaagggaactaaaatatattttcttcccctaaaatagaagagacctacatcctgagaaagtgacatttttaaaatttgataactaaagaatatgacctatcacaacaaaaaaacagaacagcagttgctttcaaaataacagtcccccttctaaaatcctcagactccattatatac

SEQ ID NO: 269569 - DNA, 1234 bp, Cannabis indica
atgaaagtatttatttttattttgattcccaatacaatatatgcttatgattttcgctgcttaaagtaatttatttcatctttaatatcacgtatcttttatagttagaaattatttatgcttggttccacattttataaaaaataatattctttgattttttgtatttacattaaattttttcacatttaatgcttagaagttataattttaaagcgaaggaaaaattttttttttttgttagaaaataatgggtttgattactgattaaattatgagaatcaatataaacataaatatttttatatacactaaagtggattctgaacccttaataatatccccaaatatcactgaaaatatctgatactgtcatttttatcgtttaaacactttattttattttgttaccaaaaacctcacaattttcggaactaggttagaattttattagcttagactaaataagtattttcttcgatctcacgcaattctcatggttcgacctcgttcttcacaatctccatactacaataaagattcgtgcacttctgagttgataaatgtaaaacgtaccactttcggtatacaacatctacaggagtaaatgttgtaatctccacttttgccgcttaggttggcgtgtacgaataatttttaatattttgaaaagtttttacaggatccagaaacaaaaatgtaatcttttggatgtttgtaaagtttgataattacaagttatgattttaccatgtatttggtttaaagtttaatttttgctcttagctctagtaattctggtttagcgacattagcatatgttaatcacagttcgtgacattcctattgttagggcattacaccgacaactattttggtgacttttctgacaccaaaagcaaactctggcgacctttccagcaccaataataaataaaactgcctaaaaacaaataaaaacattaaatatggggctttaaaaacctaatttacataaaaatgacatatcaaataccataaaaatacctaaaaacaaaaaatagccatataaattggtcaaacctaaaaatatatcatattaagtaaataaattttaaaatacctatagtgagtgcaatttcctcttgattttatatatatatttttgggaaatttgcggcaaaagtccgcaaaaagattacattgatgcagaatagtccccaaccctccaaaaatagcggtaatagtacctaag

SEQ ID NO: 269570 - DNA, 793 bp, Cannabis indica
aagggaaagagaatcttgtgtgcaagcttagaaaaagcttatatggactcaaacaggcacctagacagtggtacaaaagtttgattccttcatgtcgagccatggatataccaaaactacttctgatcattgtgtgtttacaagaagttttctaatgatgatttcattattctcctgttgtatgttgatgatatgttgattgttggccatgatgtcagaaagattgagaagctaaaggaagagttgagcaagtcttttgctatgaaagacttaggatcggcgaaacagaaacttggaatgaggatttcccgtgacatgaagaatgggaaactttagttatctcaagaagcttatattgaaaaagttcttgaaagatttaacatgagcaaagctaaagtagttagttctccacttgttggccatttcaagctaagctccaaacaatgtcctacaagtgagaaggataaataagaaatggcttcaataccttactcatctgcagttggcagtttgatgtatgctatggtttgtacaaggccagatattgcgcaagcagttggagttgttagccgattcctctctaatcttagtaaggattattaggaagcagtgaaatggatattgagatatctacaaggtactggggagctgtttcatggcaatcgaggttacagaagtgtgttgctttgtctactacagaagctgaatacatagctgtaactgaagcttgtaaagaagctttatggatgaagaattttctacaggagttgggcttgcaacaagaaagatacat

SEQ ID NO: 269571 - DNA, 577 bp, Cannabis indica
aaataatttccaacaggttatgataatgagagccatcttattctttatgttgaattttatctagggttaggatttaaattatatagaattaaaaaagataaaataatggctaaaaataccattaagtgcccgtccatgtatgtggaccccactagttttaattttgccattttatttaataatttatcttttctttcacaaatgacatattttaatttcaatcatattattatcaaatatatttatttaataattataattaataatcaaataaaatttttatttgatttatttattaattagaccttacaaagtctcttaattaacaaataaacccaaaatccttttttcttctcaattaagcccctacatagtgaaaattaatgaataagacatagtctaatttagaattcttattgattaaataaaaccaattaactgagtctataagtcaatattatctcaactagtgcaaggaccatgggtgtaacgccctaaataattaggcacgctacccaaaactgcttatagaatcctaatcccctaattcgggattactaatcaaaatagcacagaa

SEQ ID NO: 269572 - DNA, 726 bp, Cannabis indica
ttcttaaaatagttcaagtggattttggtcatagaatacaaaactcataatcgatacattaacatacagttaggatccattgacagaaaatggatattaaacttgtgaaagttgtattgtaatgttcgatgtattcaggaaactgaaatttaaaatttctatttggaatctaaaatttaaagtcaaacacttaaatttataccaaatatttcatgagtagttattctttcttagaccaccactaccaatcttactctaaatttaaatttcctatagtaagcatatacaggtaggagattatctaagatcgaggatttatatcattttaggatagaatatctataatatagtcatctgcgccattcaacttcataggagaaaatagactgacatcctaagtagatgatttataaactttctgtccaatgatatataatctaagaaatttcataatgaaaaagataagaggaaaaataaaggataatttcaactaaaataagaatcgaacgatgtcccggtaagagagagtcaaagttattcttattttataaatttcttcattgtttcgtattgtaaatactaataaaagttgtcatcttcgaatgtagaactagatgttgcatttacaaatatttatctgttgagatctaaaactattatgtttctctaacggatgacagtcctttgggatttgttctattaaaaataacaaattaagttagacaa

SEQ ID NO: 269573 - DNA, 787 bp, Cannabis indica
aatagaatacatagaaactgggggcaaataaattatattaataccataaagtaatatcaaacaatatccatctaaccataattaagtgtgtagctacacatgttcatggaagtaaaatcacacatattaactttaagaaagagaagaagatagagaataaaataatgctgaaaactctctgtagaatgcctccagtattgactttagtctctgaaattcgtactccttttgtcctctaaattgcttccctcaactcaactccagttcaccatttttataggctttcaaggactaaaaaaatataaaaacgcacatgttaaatgcctatttgaattaggaaacaaccaaaacgcacgtaagacaaaaatacggtatttgtcctgtttaggggggcgggccgcggcccgtgttggagtttcaccagatggctttgtttcgacggtaatttttctattgtgttggctgctagtatttgggccataactctttcgatatttcttgaaattggatgattcaagatgttccggaaagataaaagagagatctagaacttttatgttttgaccatttcgaaaatctaatcagaagactgtcgaattcaggcttgaattttcagctttattttttgcataattttctctattttaaatatcatctttttgtgagatattttcaactttttttttttttatcttattgctttgatattttctaatattcttctattttaagtttgcaaaaataaaagataaaaattataaaattgcttcaaacacgatttaaacta

SEQ ID NO: 269574 - DNA, 1210 bp, Cannabis indica
gttcattgcacgctaaggacttttacggttgacacgtgttgctttctccggtgtctcgctattcgcatttagcgatacatggcttctcactaatatactaagcaccagcttgtacattaattcctcgcctaagaccttacagttagcgagttacaaatatactctgactcttatgtaattaatgagttattccataaaagtaattgcattgattcacattcccttcatcctgacacgtgtccttcattgaggtggcagccgaattttgggtatatcaattgccccttaaaaagttatcttttagtaaaaggagctttttaataattacagagggcatttttgccaaaatcctttcttcgaaaaatcgcatcctttgattctggcggttgtacggttttgaggatcattatgaatcgtctcttcatattctctcaatcttccaaccgttagatttcccaatttttaactttcttgtcactggactttgtgtataaaagggcggcttaaacttgttattttccacaaacctctggctttttggtggaatccatttttagaatggatcacctctttcctgctagaatgtcccttctgagttcagaagttcatcctcccaaacttatcttacccaacccagacgcaccaaccaatttccatttgttcccaaagacttcaagcctcaactggagccagaaacgatagattccaaggccgaggagctttcgaacaatccaagtcaggggaaccccatagcctatcatggccgatcctcacaagtgatccctgggggtatagatcttgtgagcgatcttaaaggtcctcctcacgccgataaagaattcaagtggaaggttggcatggttgcggatgaacctgggaagaaagttggcgtgatttctattagagagtccagccaacccaggacccaaacctgggccaaaagacctttgcaccatcctctttctggtattgaggaatttcttgaggctgggaaagagatctcggcttcaggaaatgggatatgatcatgaggagaataaggtctgtgcagagatcaaggctctctacgtgtagccggtctttctcgtcctacgtgtagccggtctttctccaagctatgtgtagacagtctttctctctcatccttggtttgggaagatgacttaatggtttgcccctagtggcatttttttaaagacaagtttgtaac

SEQ ID NO: 269575 - DNA, 853 bp, Cannabis indica
ggggcttctatttttagtgtatccttttgtacccaaaagacccaagaaagaaaaggagagatgaagtacacctccatcatcacaaagatggcagctgccattttttaggggaaccaattgcagaaagtacagagaggaagaaaagagaaggggcacccaagtgcaagagaagagaaggacaaaagctctatttgtttgcatttctcttcccttttcttttatactttgttcttttctttcttgtctttaaataccgaaaacttgataatttttaataagggcagcagccatggaagacaaactttttactttggattttattttctaacttgaatatgagctaaactattaaggcttgagtggctatgaactcctatattgggtatggtcaattttaaagcttattttagcatttttgcctttgttcattcaagtgagctctcatttttgaattgattgttgtttcttggccattaataacaatttgctaagctagatcttgttcccgaagggctagatctagtaattcaacttgaatggagcaagagaaatcctagatttaggttttctttgtaagtggaataggaatatttcatttaccttgcataacttaagaattgatgcataattagtgttctccaatctggttttatataggaatatatgaaactaggtgttagaacttaaattgtgagttttgaaaaattctcacaaacacataggaaattttgttatcactggcaggaatgctgaggtaatgctgtagcaactggaaaaatcagcataggaggaattagctattcaagccacttttaccatattatatattttttttctttttgaaagcattttt

SEQ ID NO: 269576 - DNA, 640 bp, Cannabis indica
aataaattcaaaaaaattataactaattggacaagattgagatattcaatttcaatcatccatgacaaaataaagtgaatgtaagattactttatttatagcttagaaatacaatagacacatcatttgcaacccatgtgagacttttgttaaaaagaaaaacagaaatcacaaaattatactaaattcaataattctaataaaatagatatatttatatattttatattttaaaaaagttaataatgttatacttatatgtaaataaaattatacaccacccaaaataatttcataaacttattattttattctgcccaatatttagtagtattaagaatgtgagaatatcacaatctaatttatttttttctatcttttatcttatttgataagcacatgatacaattataataaataatatcatgtaaacgattttaattttctttagtatcttgaacttattaacaaaatagaacttacacatattttttctaacgaacttaattgtactataaatatttttatatgcgttttcaaaaatatttttaaaaatataataaaagtgataagtatgtatatagtgttttaaaaaaatatatattgttgttacactatatattgtattatttttctaact

SEQ ID NO: 269577 - DNA, 1364 bp, Cannabis indica
gtatttcaagttggctcctggaaagtttaattcatggaaaaccttttcttcggaattccatgcgcaattctcttcctcacgtcagctcccattgcatttgggagatttggttgaagtaaagtaacgaccaggcgagccactccgggcgtacatcagcagattcatgacggaagcgactaaagtcttgcgggtaattgaggatggaaagttatccgcgatactggggggcattgaagtccttggtgaactatggaaggatataaggaagaacgggccggtagactcaatgagtgatttccttgactgagccgaaggcttcatcaaggtcgaagaagccattcaatgagcagaaggtgagcaaaacccgggcaaaatgaaggctccttccactggaacatctgcccaacttcccaactattccaacaattcaagtggcaagcgctcaagcaacaaccacaagcaaggaaacggaagaaaggaaagttcactgataaatccggacagactccccgttttcttgccaaacacactgcattcactattctaactgaagacatagagagtgtgtatatggcaactcattcgttagttccgtacagaaagcccgggcccatgaagaaagataccaacaaaagggacatgaccaaattttgttctgttccacggagactacggccacgacaccaacgaatgttataatctgaagtgggaaattgaatttctgatcaagagaaacaacccgtacctgcaaaagtatgtcaagaccaaccaaggtcaaaacaaccaggatctgctacctccacccatcgatggacacttacaggtcattattggaggcccgtacatcgctggggattctggcaaagctcgagagaggtatgcccggacagctcagtacgagcaagaagaagtcatcctggccgtggaagaacggaagcccaaagttccacgagcaggagagccaaccataactttcaacgatgaagatgttgtcaagattagatttccgcacaacgacccgctggtcgtggaagtccagatagcaaataaaatggtggctagaaccatgatcgataatggagcttcttcaaacattttgttcaagactgcttacgagaagatggggctccaactcaaggatctaactccatgcctccagcctgtctatggtttctccggtcaaggagttgcacctctaggacaaatccggctacccctcactgttggacaagctccgacgagcataactatcatggcacagttcctaatattggatgttccttcagcctttaacgtaatgcttggccgaccagccctgtatgacttaaaagctgtcacatcaatatttcactcgtgcctgaagt

SEQ ID NO: 269578 - DNA, 783 bp, Cannabis indica
gagtaagagtgaggggagggcggtgatatcttggaatctactggaaccgagtacgggtgatgcccgcaccatccaccatgaagtattcattaacaaaacacccaattttgctgatggccgaatccccgatgcccgtcaaccacttgaagtcttgttgagagaaatagaagtaccccgacctgccttgcttaggggtggacttcaaatcaaagaaccagctaacctcgtggggagaaggcatatcccacttctgggaggcataaaggacgaagagggcagatatatacttaatgcccttgggagtgaactgggccgggcagaggccgaagaagtctgccacattcataaagtattggtgcaaaggcaacaatgccccttgctgggcatgagcacccaaccaagcgcacatcaccctttcagggtttgcggctcgattattgtgggcaggaatgtaacagtccagttcgcccaggtagccaccctggtcgagagttcccaggcgcacctcgataaccctggacggaggactcacccacagggcacccaaggaactttaccttctgtgagaaaccgcagcagtaagctcctcactaacatagtccacgccctcaaccaggacgtctccatcagcatcgactggctccccagcctcattgtatccccatagtttgggggttcaacctcctcctcttcctccgcctcggagggattgctaggacgaatgtcatcctgctcttcaatctcctggagctcaacgtccccttcatgatcccccctcctcct

SEQ ID NO: 269579 - DNA, 642 bp, Cannabis indica
ttctcaaacttcaaacacctaccaatatgtatgctaaaagcattagcaaatgaaaaccatgttcaccacctccaaattaaacgaatccttctcccaatcaaagtattaacattcagtgatagatagtcttctctctgacccacgactctttcactcaaatataaaacttccatacaaaaggaaaacacaaaataattaacacaattattgttgacaattaagttacaaatataattcttaataagaaataatagtaatgacttacctcaagacttggcttatcttctctttcatgatcgagcacctatttggcaagtttcctttctagtctactctgtagaaatctaattctgattctgcggattaggatctttttaagaaagtttgtacagttgtagaatcgattttatagttgtctttagggttgctatgttctataaatagcaaccctagagagcagccaatcggttcaactcttgtagctttcattttcttgcatattttctttggtgaagagagattctttctctaggcgtgacctgttgggttttatgccctaaataaaactccatttcaatgtaatccattttattaaacatgaataaagaaacataagtatttttcattcatttgtatgttttg

SEQ ID NO: 269580 - DNA, 650 bp, Cannabis indica
ccctaatgcctagtgggcgttggatatctctaataggcgctctaggtttatgccggttaggatcgaagatagggagttgagcgctgactttataaaattagaattaacagagtttaacattatactgggaatggattttctgtccaagtgttcggccagtatagattgtaagcagaaaatggtgacttttcaacccgaaggtgaacatccatttgtttaggatggagcagtccaggggtcttggatctcggttgtctttgtataaagggctagagatttactatgcagtgactgtgtagaacttctagcagtagtaatcaatttcagcagacctgaaatatttgggacagaggcagtcaggacagtgaaagattttctcgacgtattttcagaggagttgccggggttgctgtgccgtcacaacgagaaattaatttcgtaattgatatgacacatggagtcgaacctgtttctaaagttcctgaaagaatggctccagcgagactcaaggagtttaagttataactttaggggatgcttgacattgggtttattcgacctagtgtatcgccctggagagtttcggttctgtatgtgaaaaagaaaggtggtttcctcagaatgtgtattgattatcgggaactaagcaa

SEQ ID NO: 269581 - DNA, 529 bp, Cannabis indica
atataactagaaaaaatacttcaagcaaacagaaaatatctatctagactttcactaactaatttttattttctaagtataatatattttagtccatttattttaattaatcattcataaaaatttatttaatttaagttgatttaaaattaattaaaataatttatcttcaactttaatctattttttttaaaaaaaaattaaaattatctgcatttaagaaaaatgcaatttcgaatttattaaaaaaatgattaataaaataaaatacattttgaaaattattcttaatttaagatgttctcaaattaaaatctccaacttaaaataattttctatttaattaaatattctaaaaataactaatatttaagtatcaagaataaaattaacttaaatatttaattttcaatttaattaaatgtattaaaaataagaattaaattattaagtataaaaaaacgtaattattaattctaatttaagttggtcaaaaattaattaaataaataattaattttcaactaaa

SEQ ID NO: 269582 - DNA, 1085 bp, Cannabis indica
ttgatacacattttgaccagatctttttcagccatggtctcatcacaatcaagagcttttttcctaaacttttggacgtaattaacgagtctttctccaaagttttgtctttctcctgataagtcagctatacttcatttatcttcaatcataaagagctttgcacaaaattgagagaccatgtcatcccaactccttatactcactgatggcaaactcacgtaccaagagtatgctcgatcagtgagagactttgaaaattctcggattcttaatttaaaatcatgcgcataaatacccaaatcatctataaattgaatgatatgttctttggcattgccaaatttcccattatatttttgaaataccgaactcatgtaaccgtgagggtaaggtttgactgcaacttctagtaggtggatgaaagtcgatggaagttacccatgatgatgatttaccccttttggctttaaggagaccaatcaattcgtcttttgtgatgaactcagaggaagactgagcctcttcactaatcttttcagcaatctcaaaagtctgattccacgaacattatcatgtgccgcctgagttcgttgttcaacaatatgtacttgccttatcaaagattcatttattacacgttcttcaggtaagccgctcctttgaacaaatgcttcttggtgtgtctgcggtagaagcgaactcagtagttgtatcatgccgtcttgggccttttggagcttttctaatatggctaacacaacctcatctgtgtttgtcagattagtattattgttattgttgttgttgttgttgttgttgttatcatttcacaaggtatttgttcggatccgattatcgggctcttaagtatcagagatagacatttggatttagatgggagaaccgaatttcttttttatttcaagtgaacgaatttagcattttccttagtatatctatataagtatatttgttgatatatataagtatatattaactatttaaagaaaatgctcctcagcagagtcgtcaaaatgtttaggggttcttgctaaacatttaattataaatatataataaat

SEQ ID NO: 269583 - DNA, 640 bp, Cannabis indica
aaccgattagactgagcataacaccaacaaagtactattagtgataataaaaattgttactaaataaatagtagtgataataaatcttgtcatcaaagataaataatttgttctaaagggtggttgtgactaattgtagtgatattttaacaactatttgtcacaaaaattaattgtgactaaaaataatttttattgattattatttttattgtgactaaaacttttagtcatgaactttttaatcacaatctcgttacaaaaaaaaaattatgactaaaaccttttgtcacgatattttttacttttaatcctaacttgtttttttttaatgaaagcacacaatcattaacaataatatgtaaaatgtttttggaaaaatgtatatattcgccaactaaaaggatggttaaatcatggtgatttttttttaaccaaatgtcactgaaaactattactattgacatttatttttgtcccgtccaaagcctatgtagctcagtcaaatcgtacaattaattaagatttattataaaataatataaaataatatagaaaaaataagaagaaaagaagaagaagatgaagagggaaagagaaactgaatgagaattttttagttatttattttaatggggtg

SEQ ID NO: 269584 - DNA, 624 bp, Cannabis indica
gccaaaccctcagtaggaggtgccaatggtagatctaccgtgggtggtagagtctggtcattgggactaaccgggttggcagtgtcaacctgacaaggtttattggtcaagtttgttgtgcctgtcgagttgacagggttggccacatccatcggatttgtggatattctagtggtggctggaacatgaacatcaggattaacaatcatggtgtcttgaggaaaacctgatgaggtagcagttgtagctggagttttccttattacatccatggtgatagagcagaccaatcgacaatgctctcaatgaaagcacaaaattgttgaccatagatttagaatacgatagtggagtcttatttatgactgatatcaccacgtgtacacaataagaataagaaagtaaagagacatagtatttttatagaggtttccccccttaataaggaggtaatgatgtactccccttttggttgaattaataccagagatattaacactcatatctcaagtgttgtggattttgaagtggctctcttaagattacaataatgaaaatcaagaggcaaatgtcaagtaagcaagatgagagagacttagtatcttctacaatgcttggggcatg

SEQ ID NO: 269585 - DNA, 1265 bp, Cannabis indica
aaaaagaaaaaaaaaaccatacaatccctagaaaataattaaagaaaatatcaagaacaaatacgaaaaaagaaagtaccagcaagaaaatcatcaacagacaggaaggaatccgaataaagagtcgattgagattgagactctgcctcaaaaattaggttacggaagtctgcgcctttggattttggtaaaacaacatctgggtttttctttgataggtcttctaaaccagaatcattctcttcactgtaccgatcccaattggaaggtagtgcagatgcagccttaggctgaaggtttttctctctaacttgtttgagagacggtttgttcgccgctccaacagcatcagttgatggagatttcaacttttgattgggatgatgtttcttactatgctgctgagaatgagctcttttcgacttcgccaaagattttgcatccatcactatatcttacccataaaataaatgtctatctaagagaatttgttgtgttagttttcacataaacatgttcaaatactaacaaaaatgctgaagagatgcaaatgaattggtaactattcaatgaagcattctctatttttctttttctcctattaaaacaacaaaatatctctagaaaatcaacaacacaacataaattacaagattttatttggagagaagtttctccatgtcaccaaatacttcatcaacaccaacatatagaataatcctaaagttaaacacagtacttaaataccatttcacatgaaagaaaaaaaaaatctcctatacaatacatattctgatattcatataacaatacaaacaatttctaaatcttataactactaggacaaatctgactaaaaaaagagagaattagatagataatataactaaatcatatcccaatatacaaaacagagagaatcacttgagaaaactcaaacaacccgacaaataaatgtcttttttttaaaaaaaaaaaaaattaataaaatatccattctgataaaagtttgataatgaaattataattataaccttgaataattaagtatttggtatagttattttgtacaataatatatcgtttttatgtgcaataatatattaaaaaaattgtagtatatatatatatttgaaataactgaaaggtagtatattagtttaagattgtagtatattattaatgtgcaatgatatataatgaacgaaagacgaaaattaaaaaatgtgaaatattagtttaagtttgaggtatagttatatttc

SEQ ID NO: 269586 - DNA, 681 bp, Cannabis indica
atacttagctgtcacaaaacatgccgtgagtgctgtgctaatcagataagagaacaacgtagaacagccagtctacaacatcagtaaaagactcattgaggccgagggccgatgcccattgatggaaaaactcgcttactaccttattctagcaacaagaaagttaacgccttatttccaagctcatcctgttcgggtatagactgaccaacgattacgccaaatattccaaaagccagatgcttctggacggctactcaagtgggcagtagagttaggccagtatgaaatcactttccaaccccgaacagcaattaaaggccaagccttagcagactttgtggtagaatgcataggcaagaaagaaagcatactagaaagcaaccccgagctagtacaaacacctcagccaagtaacaatgaagataagctgacctgtaaactacatgtagatgggtcagctacagatcagctatctggtgcaggaattccccttgtcacgcctgggggcaacacctacacgctggagtcaagttcggattcaaagcatctaacaagaaagttgagtacaagctctaattgctaggttaaggctagcccaggagatgaaggcctaacacattgaaatctgcagtgatttacagctggtggtaaatcttgtattcggagaatacgaggctc

SEQ ID NO: 269587 - DNA, 835 bp, Cannabis indica
gattattctaattttatgagctttcattattgtttcatactttataaacttatttctaagcagtcatcgtaggggagagtctaatagaaatgaaaacttacaaaatacatatcatacgagatcttacggtgttaatgcttcaaaggataaacatatccaaaaaggggatgaattctagcatctcgaggttacattgaaactattaaccatgtaagaccaacaatggagatcgaatgtccttttgattaaagctcattatttaaaataatgtattgttagttaatcattgattttaatctatatattttaataatgaaaattacttaatttaagttggtctaaaattaaaaaattatttttcaactttaatttaattttcaagtttaattttgaaaatctatatgatataattttgaaattatttaaaatataatcaaacaaatacctcaaaatatctaatttaagttgttctaaaataactaaattttcaaaatttaattaaataacaaattaagtatcttgaactaatcatcttaatttaaaataaaatatctcaatttaagttgatctaaaattaaaaaaatttcaacttaaatatatttttaaagaatatctgaataactaattttctagaaaaatctacttaattattcatttcaaaaaaaatattctaatttaaggttatccaaaatctatttaaaaaattaatttttaacttaaatatattttctaagaaaattcaaataattaagtatctagaaaaatctaattagttataacttctttatttgattaaatacagaaaaatacatatagtttatcttgaattaatttc

SEQ ID NO: 269588 - DNA, 671 bp, Cannabis indica
cataatgaaggacttgctacatatgagtttggggtttcgatgggatataaaaaggcttggagaacaagagaaaatgctctagaattgtcaagaggaaagccaaaagactcatactagcaactaccaatatacctccatatgctaaaaatttcaaatccaaggatagattctgaattgattatggacaagaagaaccggttcaagtacatgttcttagcattgtaaaattcaatcagaggatggatacattgcaaaccagtaattgtggtagatggtacattcttgaaaacaacatatggagggacattgtttacaacctcaacaatggatgctaataacacatattcataattatatttggaataggagactcagagaatgattcatcatgggagtggtttttcaacaaactaagaaaaacattcggagaaagagaaggtaagaaactagttcaaacaaaaatttacagttaatacatctactttagtgtaagagttttcctattattgttagacttacttaacataaataaccagtttcaaaaataaaacaaataaaccggttaaaacagacataaactaatatttgacaaatattgacttgtaagcatgacaatcatctcagatcggcacaaaagcatagaaaaagcagtagcaaaagtctacccaaac

SEQ ID NO: 269589 - DNA, 1101 bp, Cannabis indica
ctttgtcaatgccctggaaaagacataacacttatccaaggtgtaagtatatctatcactgattatcatgccagtctaaatccagtgaactgacaaatcggggaattaaacttttgaacatataatcatgattatattccactatgctgacaacactataatcatgaacaaatgcatatgttctagacttaatagaatttatacattaaaaataaacatgaaataaatcatgtgaaccatgcaacataaaatgtgatttctgatctttattaattagtaagtctgattatattgaaataggttttacttagggcacaaaacccaacacagacatcgtaataaaggcatagaataacctcttatgtataatttccctttgactatcgtgtagcgaggaattgaatataagagttggcatgcctcggttttatctgtaagaagttctccacttaacagatacttggtgattagtgtcatccatgttggtgaagtatctatcatgtcgacatcttcctcttcacatatgcttggctcgtctaatacctccactggtaccaagtttaacttattgagattaaattgagatgccagttttgctagggcatctggattagagttttgttctcttagaatttattttattttaaaataatcaaacttcttcaagttcttctaaactttctctaagtatttggccattttcaagcctttcgcttggtattctcctaagacttaattcactattagatgcgagtcactaaagcacgtaatacttttgacttttagtgcctcgactattcttaatcttgctaacaaggcctcgtactctgcctcattatttgaagtttcaaattgaaacctaagctcgtagtggaacttgattttttttggtaaacatcattattactcaatgttccctaagccattctcatttgaagacccatcaacaacagtttccatgttctgcctcacttctattccaaagtcttctcctgagttctcattctatcaaaaagtcagccaaagcctaccactttgattgaagtcctcgggtagtaagttcttcaaattttcctaattcaattgaacatttattaatct

SEQ ID NO: 269590 - DNA, 1388 bp, Cannabis indica
tagtgtgtaagactgtgaagaatccaatcaattgaaggagaattgggctcagatcgatcttggtgacactctgctacagaaaggatacaagggttagagatatgagcggaaggactagtcatttaattccgttgcaaccaatgtaaggtttcttgaactttatatgtgtttaaattctgttgttttagaaattcatattgaggatgttaaataacatacacggtagtaaatctagatcctagtaaaataatccccaacataggcatgtgtgacttgaggaagagataatgaggaatttaaattccttatagtcaagtgaaacttgtatctcaagtacagaggtgtgtattgaggtgtggtatgactgagagctataagggtctattcatagtaatgtcttagggttagggttagaattaaatatacttgaaaaagataaaataaaatggccttcaattgaagcatcagacgaacccttataggaaagcccaatgtgttttaattttaccattttagtcgtacttatctttttcttaataaaaccatttttctattccaagcctttaaaagttaattttatttatttaataattataataataattaaataaaattaccatttaacttatttaaaaattacacttagcaaagtctcttaattaataaatacatcctttatttctgttttcttctcaaattcgcctatgcttagtaaaattcacaaataagatctagtctcatttagaattgtaattgattatctaaaaccaattaattgagtctacaaggcaatatgacctcagatagtgtggggaccacgggtctgtataatcaagctttcaataagtagttttagaattcaccaagtaaattatctatcttattaattcttcctgattccactattgattcaaaattatactcttgattacatagaacgctctattctccaagaatagatacgctattaattattcattatttcaacttaaataatcaacgatcctttatagattatctacattgaataaggactaaaattaccgtgttacccttcaatgtattttatccttaaaacacttggcttcctataatcaagaggttatggatgaagattcgatagggtacgacagatgataaagaatgataatggtacgatggggtacgataaggtgtaagttgttgcttaaaatttattatgccataaatcttaagcacctatcgtatcctatcatacgaccatcgtactatcataacttcatcaaccatctactaccatcataccctatcgaactttcatacctaacctccaaattacactaccatcgtacccaatattgtaccctatcataccctatcaagtattcacaaaaatttaccaaacttta

SEQ ID NO: 269591 - DNA, 1213 bp, Cannabis indica
aataaatgaggtgataacaagatattaatattaatgagagaaaaatcatcttatcatatcttatctattctctgtcctcattattattagttattacgggtccatactccatggatgtgaccatatattaagaggacatgaatatgagataactccatatatatatataaaaatgatgaaacaaaaaattgtataaggaaacactgaatcctatcttcattttatcatgcgacatacctttaattaaggatattgcgatcactaattcaatataattctgatccctaggcctagtacatatgaaatcctataatacaccataagagatgtatccttaaaacaataaatgaatctgagttttaaaatggaaataacatggttcttcacaatacaactcactagtaatcttaaagatgtaatcaaatattgatttacgtgaatgaatataactagtgaagataacttaagtaattagctaaatttctaaaatatcagttcatctaaataaaatatgtacgtatgaatggttctccaatggtaaattttgcttatgagggttttgtttgattttattgcatagattctacctattgtggtgtaagtaggtggtcttgaaggttgggaatcattgggggtcgaatttttgtgtttttattaggggtttctgcactgaaccggttcagtgggacctataggaactagaattctggttggtccccaggcagaccccacagaaccggtcttccggttggggcattttacggtaccctagttttttctgtttttacgatatttagggtattcccatgttatccatcgatagggaaacttttagtttcaattttgaatccatgaaaagtgacttagcgcgtcactcatcagttttacgaatattgtgatttaagggcctgtaatcgtcgagcaactgttccactcaggttgaccggcacacctaaattttgaaatgacgtaagattagtataatgatatacatatgtatttacatgtttaatgttcatgtttataaaacatgtaagattacatcgatagcggtatcaatatacgtagagttgtattggatattgatagatgtatgtttaactcaatactaatcgatgctatcacatcggtatgtctagagtatgactagagtaccgagtataggctgattttatggttgatagtattaatgtatgaatgttctagactcagt

SEQ ID NO: 269592 - DNA, 846 bp, Cannabis indica
taggaagggccctggacaagtttttcgtaccaagataatttctccctagttagccactgacatggtcaacacaggtattgagtttgtggtgggaaaacttagtaacttgacactccattctgatgtaatagaaagaatcaagtgtgcccaactggaagatcctaagttaatcaaaacacgagaggaagtcgtagctggacatgttaaggacttcacagtttctgatacttgtatgctactttataaggatcgagtttgtgttccaaacgatagtgggcttaagaaagagatgatagatgaagctcacaccactccatattcattacatccgggtaccaccaagatgtatcaagatttgaaaccctattatttgtggtgcattatgaagagggatgtggtagattatgtgtcaaggtgtttgacttgtcaacttatcaaggctgaacatcaaaaattgacagggttactacagcctttgacacttcgtgagtagaaatgggaagatgtcaccatggattttattgttggattacctagaactaccggaatgtatgattcagtttgggtaattgtggatcgtttcacaaagtcaacacactttttgccagtgaaaaccacctttatagtggatcagtatgcaaagttgtatgttaaggagatagtgcgtttccatggagctccaaaatccatagtttcagatagagatgcaaaattattttccaaattttggcaaagtctccagatgtccatgggtacgaagctgaagtttagtacaacttttcacccctagacaaatggtcagtctgaaagaacaaatcaaattctggaggacatgttacgagcctg

SEQ ID NO: 269593 - DNA, 528 bp, Cannabis indica
tactaattattaaaaatctgtaacaatgcaaaacaataaccaatatgcgaaaaattttaatataagaagacaaaaagtgttaggttatttttattagcaattttagattaatttatttttaatttaattttactcgtgtttggagcaattctacgctgttatactttatttttgaagatttaaaataaaagaagattaaaaaaatatcagaggaaacagataaggaaaaagataaaagattgcataaaaggataagagtgcagatggagcatgtcgtgcacgtgacgaagcttgccttgaagacgtaggaaaaggctacacgggccacggcccagcaaagtgggcgtcgcagcccgcccctatacaagaaccaaaaacatatcttttctcaacgtgggttttgtggcttcctaattcaaagttgaataggatggttagcatgtgcaatttttttatctttttaatccctcaattgctatgtaaggagagaacttcaattgatttcgtcaagcgatttgggggaggaaa

SEQ ID NO: 269594 - DNA, 512 bp, Cannabis indica
attatgtcatgaaatgaagcatcttttaggtataatttcatgttaattatattcaaatatactataaattgtattatgcaatacatatatgtatatataaagtctatttttatatattggtgcatgtattatatatatatatacgtaccacatgcaatattataaccttgttgcctaagcaaccgaaagcaaagagcatcagcataaaggttattatcaccaaaatcaattagattttgataattattatgaaattgctccaaattttgttcaatttcattttcaaaataataagacaaccccaatcgttgaatatcatcaatatattcaagtgtctccaaagggttttccaaaggatgaagaccatgaagtaatttattcttcacttgttccttcatctcaataatcttctcataactctctttgttattattctccatagtttccttgaacaaacacagttgaagaagatataaatcaatgatggagactatatatattttaaatttatg

SEQ ID NO: 269595 - DNA, 642 bp, Cannabis indica
taattactaacaaaagtaaaaaaaacaataactaagatgtatgacattaagtaaggaaacgggctcatgtattttcatagatgtatcatcataaattttattatatgtatatttatatatatatattaactttttttaacagctatatatatttatatcttttaactacctttttttatttatatatatttattatatatacttttaaagttaagagaaatgataaaaagcacctaattgtttaatatttaatatctttcctatgtttcaatatacctattgattcaattaattagtatcagtttcatatagttttatgtacactacaaaaaactgctatttttagtgattaaatgtgatttttagtcacaacaaaatattacttgtgactaaaacatagtatttagttacaagttgtcactaatttaattttagttacaacaattattgtgactaaaaatacatttagtcacaacaaattataatttttgtgactaatacttttagccacggttcttttaatcacgtacatagaaattataatttataattagtcacaattttttcactttaagttacaagttttgctgtgactaaaagtaagattttttttgtagtggtaataacttttaaggagtatcg

SEQ ID NO: 269596 - DNA, 718 bp, Cannabis indica
actaagtgtcccaagtattcaatggtcctctaaaaaaattgacacttattgccttttgcaaaaaattgatgctgccttaacaattgtagtacccgctgaagatgaatcaagtgctctgcccaagtcttactgcagaccaatatgtcatcaaagaatacaataacacaactacgaagacaaggctgaaaaatctgattcattgctgcctgaaatgtagatggggcatttgtgagatcgaatggcatcacaacaaactcgtagtgaccctcatgggttctaaatgttgtcttgtgaatgtcccttcgatccatcctaatttggtgatactaggctcgcaagtctaacttagaaaaaacctctgctcctcccaattcgtctaggagttcgtcaatggtcggaatcggaaatcgatccttaataatgacattattcagagcgcgatagtccacataaaacttccatgtaccatctttctttttaaccaacaaaactggggaagagtagggactagtgcttgtcttgacaaaggcgcaacttgtcaaatcacgcaccatcagttcaatgatatctttttggaaatgagggtactagtattgtttaacattaactggggcagaacccggcttaaggagaaactcgaaagagtaccctacacccgacaacaagaattgcctgatccaattagctgttcccgactttcactccaccccactttcga

SEQ ID NO: 269597 - DNA, 1082 bp, Cannabis indica
tttgctttttcttatatttggctgattctctaagtcatctttctcttggtgctagagcctccaggattgtcagccttcgtcgagacagtgcttgctgagacaatgctcggtttatttcccaagctagtctttatcaatttcatctctttctttacttcctctttttgttacgaacacctgagctctttcattgaactcactaatgtttttcagtgggcgaccttataagtcatcccatagctcacctccagccgtttagaggtcagtcgtaatccctacttgaagagcagtaagttgtatattgtcattcaagtttctaactctagcagcggctgtactgaaacgacttaagtaggccttaagtgactcgcccggttgctgatttatgttagtaagggaagactcttcaggtcgcctgtctcttccttcctgaaattgtttcgtgaaatccgtagactgttgttcccaagaagtgattgagttgtgggtgaatttattgaagcatctgctcgctgccccaatcagcaaggtggggaataaaatacaacgtaaattattcgtgatattgttggctcgcattatagtattaaaattgttgagatgagtgaaaggatccgtagtcccatcgtacgacgagacgtgagggtttttaaatccttggggaattcagagttcataatgattggatgaaaaggttcgacctcttcatctaagttgtaaccaagcagtttcccatattccccatcttggtatttcttgaatttgttttctaactcactgattcgcaattggattggagcattttaattaagcgctcgcgcaaattaggttgtctccgattcaaatgttcacgaagatctggctgtcttcgtttatggttgctcacgggcctcgtgtctgagtaactctcagattgactactccttgtatgactcatactttcacgatcattactacgtcgaggtctatcccctcctcgcgtagatctactgtgatctcgagatcttgaacatcccgagctaaaacttgcctcgtcatgtacatgccttctcctttgggaaaggtttgatacatgtcccctg

SEQ ID NO: 269598 - DNA, 1117 bp, Cannabis indica
tagggccggccacttttgtagggaatttaaactgatactttcattattttaaccgccacttcttctctctcttgttcattgaaatttcaaaattcttagtgtgagaatagtaagatccttgtaaaataatttcgaacaagatactccctgcatcatctcttcgtataaagggtctcattctcggagacccttctcgtgaattaggactcccacgtgtcaagctcacaaaaatcaggacaacatttatcccccaagcttccatgacgtaacgttattctagagcttgtagtgcttcctcattattggattcaaacatgtgggcaaatatgagtttctcattacatcatgcaagtagccgtcagcagaagtgtcactggcagaaggtgttatttccattactcgctcatagaactttaaatgctgacttttacacttcccgtgtgtacaaggcgcgtgtctggggagacaccaaaatgacagctaatagattgagtagacctttcatttcataagcattttttataatgcatgttatgaaggaggttaactgtttgaaaccgaagtagctcctcacagtcccattcgtcaggttttcaggtaccattttagtgaaagatctgcctcgtttccttctcatggaaggcacggcttcttcgcttaataaatactcatagcatctacaattttttaagttttaactttttcctccgttcttaccagagctttggcatttggtctcctctcctcgccttctttgcgaaaattgtatagtttttatactttaaattttcgaactcaataaatatattcgcaaggaaatttttaagttgctaattagtctaatttaattcaacttaaattaattttcttaatatttatatttaaaattactactaagatggaaataattaattttatttcaatcacaatctaagtataattttataaatattatattaaattcttaatttttttttgaattctaattctaaatttcgaatttaatgagatatatttattagaataataaagaaaatacattttaaagaatgagctttattattattaagatattcgatctccattgtgggttttacaccgcgtttgttttagtgag

SEQ ID NO: 269599 - DNA, 609 bp, Cannabis indica
agaaaatacaaaaaaaaaagtttatgttgaaaaaaaagaattttttcttaataaaaaaatagtatttaaaaagaaaatacaaaaaaaaaaagtttcagatttaacaaaaattgtaattttctttggcttaataaaaaaaattgaatttactaaaagaaaatacgtaaaaaatgtttcagatttaaaaaaaaaaagaaaaaaatttgtacgtttcttttgcttcataagaagaaatttatatttaaaaaaaataccaaaaaaaaattcaaatttaagaaatgaaaaatacattttttttttgcttaataaatttataatttgataatttataaaactgagaaattgggaatttatatattttcaattagagaataattttagaaattagttgtatttaaaaatttattgtgaaagttaattattaaaaaaattattgtgaaagaaaaaaaaattaatagagactattggacaattatttgaggtccttaaatattattggagaattattttaaatttatttataaaaatttaatttttttaaaaatcaaattccattctaaaaaattatatttaatagaagaaatttatatttaattaaaaaataaaaaa

SEQ ID NO: 269600 - DNA, 645 bp, Cannabis indica
acaaaacccgtagtcggtgtctggatttgggacccagccctcgacccaaaccctgacaaggacccgaacccacacccggacctgaacccagtcctaaacccaaaagtggaccccgaacccgtaccctgtgaaccaaaattggacccaaaaccagaagttgaccaggactggaactaggacttgtactgggaatcataactgaaattggacctagatctagaaccgtaactagaccaggacaaggactccaaattagacctaaacccgaattgggagctggacccggatccatacccaaacctggactcgggtccagaacgcgaacctgcactcacacatagaactagggtcgggtcctagaatcgcaccccagtctttatctcgaacccagacacagaaatgggacgtgggacctgaacctgaaccagaccgagacccgtgacagtgaccatatcttgactcttaattcgggtaacgaggcctggaacagaccagtagtctgtgtctagatctgggactcagactacgaccagaacccagacgaagaaccaaaccagaacccagacctagaactgggacccaaaattaaaacctgacaagattcgccaaaccaggaccctacaacaagacttgggccgtgaccag

SEQ ID NO: 269601 - DNA, 574 bp, Cannabis indica
gattagtaacctgactaatcattgtaccatatgcacttggcaccccataagcactagtgttggaagaattagtaacctgactaatcattgtacaatatgcactcagtaccgcgaaagtacgagtgttggtaggattagtagcctgaataattgttaaccgtatgcactactaccccaaaattactagtgttggtaggattagtaatctgactaatcaatgtaccatatgtactcaacaccccaaaagtactagtgttggtaggattagtagcacaagccattgttttaccatctacactcagtaccctgcaagtactaatgttagtaggattagtttgtactttctaaaacatgcatgttaaacatgtacatatgtgcattttttatactaatcttacctcacttccataatcaggtgtgtcaatcaaccacagtggaaaatacttctcaacaattctaaggcactaagtcccaatcacgtaaacaggtaagcatctctttaaaacactttcaaggacgttaaactcaaaaccaagagttccctatcaataaatagcatggaaataccttaaat

SEQ ID NO: 269602 - DNA, 645 bp, Cannabis indica
atttggtacatcagtatcaatttttttcttctataagtaccacttcagtgctcgagaactcgagtatgaaatctgccaaaggcttgccccttaatcgcaggtcttggtttgtacttgatatcgaactggcttagttctactaaccatttcaacaaccttcctgatgcttctagtttcgctaaaacttgtcttaaagggtagtttgttagcacttcaatgctatggacctggaaataaggtcgcagttttcttgacgctattactagagcgaacgccagtttctccatttgagggtaacgggtttcagcatccagcaaacgcttactgacatagtaaaccggatattgcctaccttggtcttcgcagattagtactaaactaatcgcatattcggataccgcaaggtaaatggataaaatttctccgggcattggttttgataggattgggggccgccccaaatgtgttttaagcgtttggaaagcttcttcgcacttttcggtccattggaacttcttattgccttttaatattcgaaaaagttctttgcatttatcagaggatcgtgatatgaaacgatttaaagcagcgaatttacctgtcaggctttggacttcttctagcttagtcagagatcgcatctct

SEQ ID NO: 269603 - DNA, 637 bp, Cannabis indica
atataccatactccaattataatcgaaaaacaaactgatgtaccacaacatgataataccttatatatagtcaagggtattttaggtagtaaaaagtaaaaaaggacatttgctttattattctaaaaaagggacatgcattaactttcacttaagagagaaataaggccatttactagcatttctcatttttatactttaaaaaagtaaaaattacacgatttcaaataagaaaaaaaaaaaagtacaatttacactagtaaaattgaggaaattatgttttatacctattttattttacttgttttaatttttacttctatttttatattctttaagatatactcacttttatagatgatgtctttattagaccccttatattaatttaaattatatgttatacttaagtagaaagtgacggtatattgggcaatccattcaaaaagtgggtatattttaataaaatataatatgagagtatttttgattaatggatacaaacaagagatatttctcaacttatcccctcaaaatttgaaagttttgcctacgacatatttttttcaaggaattcttaaaaaatatttatttttttttatttatatttttacttgttatacttttgattttataa

SEQ ID NO: 269604 - DNA, 866 bp, Cannabis indica
ctgattttgagtccgggtcctggttcggttacggttctggatcttaagccaatttcagttatgattccaagtccgagtcctagttccagtcctagtctaatttcgaagttttggttacaagttttgggtcacgagggtacgggttcgggtccacgttttgggtttgggactgggttcaggtttgggtgttgtttcgggtccttgtcagggttcagctcagggctgggtcccaaatccagacaccgactaagggtatggtccaagccttgggtccaaatctggttcccaatctcgggtcccagtttggttccaattctagtgccaagtcacgagctgggtcctaggtttaagttcgggtctaggtaaggtactacgtctcggtcctacttctatttcccatgtccctatcctgattttgggtccaggtcccggttattgtgtgagtttgggtcccggtgtaggttcgagttcgagtcctatccttggttcgggtttaggtctttgtctgggttttgatgtgggttcgagtttgggtttaggtcgttgtcctagccctagtccttgttcgtttcttgttccatttgtgattctgagttcgagtttgggtttgagttcgggtcggagttcgagtcttggtctgagtttgggttcgggtccagatttcagtctaggtcaagatcaagctctgggtgtgagtttgcgtcctgggtcttggtctagattgggtaaaactcccaagttccgatcccgatctgagtctggaattagttctgggtctaagtccttggttttgatcctggactgggttagagtttgggtctgggtctaggtctagctttgggtctgattctaggtgtgggtgtttg

SEQ ID NO: 269605 - DNA, 503 bp, Cannabis indica
tgtatgttcatcatatatgtttttcacaattattaagttatttaagcaaagatttattgttttaatttaaacatatattagctaatatgtatagaatattatttgatgaatattagctaataatgagattccttgtatatattcatcatcatatgatttggcgccttataaggctttagcacctattatatggtttgacccctaattatttagggtagtttgtttaaatttttacgtttttcggtattgaatgtacaagaaaattttgacacaataatattttaaagttaataagttatgcactatacagatttattagtcggaataaaatgattattttagttaaggtatgatttaaagaatattttaaactagtttaagagggtttactttaaacgctaattcctattaactatgtttggtttatctttttttaggaattttcagtataaaaggaaagtgtttggaattttagtattcagattctaatattataattaatt

SEQ ID NO: 269606 - DNA, 397 bp, Cannabis indica
taaaaattcttattgcaactagcgctgcaacctaaattgaaacaaaaaaccgtatagaaattcctattgcaactagggctgcaaccactttagtagcctaaactgtaaatttgaaaagaaaaaagttaaaaaatatatgaagtgattctcctttaatatattatacgttttaacttttttttggttgataatgaaattggtttaaagtttttttctaaaagattagtttacaaatataataaagttagttttattatattttgagtaatttgttacataaatatctaagtttaactttcggttacaaataaatactaaagtttaatttttggtggtaataatacttaagttatatttctagaactatgtaagtacctgaaagttaaatattaagtca

SEQ ID NO: 269607 - DNA, 690 bp, Cannabis indica
acatcaatgaagatccagcactacggatagacacgaacggagcattccaaaattggaaaaaacaaaatttggaaaaagaaatataaaaacagagctaaaaacagattaaggtctcgacaatataatgaatcaaaactagtagcaaaactagatatcaccaaaaatgaaacaaactagtaacaaatagaagaacaataaaaagatttacagaaattgaaacaaaatgataataaacaaaaaaatctacataaaaaaacaaacaataaaactaagatggaacaatcaaaaattattatcaactaaaataataataataaacaatctcatttatcacagtaaataaataaattatactagcagcaaaataagtttaattcatgaaaacgtcatataaactgtaaaaaggtaagacccacggtacaaaaacataattacactcttaaggttatttttgtaaattaaatgcaaaattaggtgccacatgtaaatttccctttttaatttccatcttatttctttttgttttgaaaatttttagggtattttgacaaattttagtctccatagtccacatcatataattttatttacaccccaaaaatttataaagacaccatattttaataatttttattttatataaaatttatatctttaattatactaagttttttttttaacttttttctt

SEQ ID NO: 269608 - DNA, 571 bp, Cannabis indica
agatttttccttcttcatttttaaggttttagaaataatcaagatcttacattttcttttacaagttttgcaggttgagttatccatgcttctcaggttcaagccatgtttttaattgcagcttacccatcaaatttgtttacaggttgttggtgtaacatcgagagcttgaggatgcttgcgatggaggctcgactggggcagctcggaagacggcggaggctagattgttgtctccattgacctgttccttttttttttttgttgaggagccgtgactatagtgagaagagaaagtcgaaacccaacctccgtattatttgaaaacaaaatgtaaatgtggttagatttttatattaaggtatatttaaaaataaattaaatcataaatgtaaaagtgaaaactcccctagtttttttagtgtgctttattttttaaataacttctatgtataaattttttatttctattaatagttttatatattttaagaatatagagaatgataaaattagcaaaatatgaaatattaattttttaatatttaattaatgattataaatatcaacc

SEQ ID NO: 269609 - DNA, 755 bp, Cannabis indica
ttgaaaaaggaaaaaaataaaaatcttaccaaggacaatgatcctattttcactgcacaaacttatgtttgacaagtgaattcaagtgtgtaagtctcctctactcaactaaaaattatcccgattcacactatttgtaacatgcattttttttctcaacatgtgctaagtatggtttgttcttgagatactaattagttattctcttttgaaggcataacttgtataattatcatttgctatgaaattatattagttacttgctctagaataccttatatttattgtacacattttacttagttttaattatttcaggttttcaaaaataaaataataaaaaaattaataaaataaaaaaagggaggcggttgtgacttggcttgtgggctaagaaaattttgtgctttatttgtaagtatcaacatttaatctaaattgatttattttgataagttaccttttaaagtttaatatcatattcattgtattttgtctttgatcttgaagaattttcttaaattgcctatttttagaaagtatctgggttattctagtttccttttatttatttatttttaaaaatataattttaaaaaagagtggggcgatttctttgtgttcgtgggctggtagtttctttttaaattttaagttggtttcctcttttgcttctctctcacatgattatataaaccaacttcttttgtcatttattcttacaacctacctgattcctattcttttgttttctg

SEQ ID NO: 269610 - DNA, 1055 bp, Cannabis indica
aagtggaaactgttaataaaaccttcaaggatactatcaagaagaagttagatgctgcgaaaggtagctgggtcaacgagctaccacaagtactttggcctcacagaactactgagcagacaataacagaacacactctcttctcgctaccatttggctcggaagcaatggtacctgttgaagtgaacatatcgactcacagatgagagttttataaacaagaagaaaatcaagaacttctaaagttatctctagatcttcttgatcaaaaacgaactgagtcgcaagtcactaatgtagtgtataaacatcaagttacaagatatttcaacaaaaaagtcaagaaaagactattcaatgatgggacttggttctaaggcaggtatttgcaaacacaaaagacatgtcaggaggagtgttcaacccgtactgggagggtccatatgtaatcgaagcagtattaggagtcagagtttacaaattggctcggtaataaagaagtattggaacgtggaacatttgcgaccctattaccactaaataaatgatgtaactcatattgctgatgtaatattttaacttcagttatgaataaagagaattatttctattatttaagtaattgcaaagccttactctttaaaaatacttaaggggaatttgtgtatgattaaccaggattaatttggtcaaacctttctgacgagaaagggataaaaccatcataactttttcgtttaaacctgtctgacgagaaacgaaaataaaaagttataaatgatatataactcataacttgtgtacaaagcttaatattaacggttcgcacaagatatgaatgtattaaacgagacatcgagatgtcttgataaaagtacttaaatctagtgagtggatagataatctaactattcattcaagcaatcaaaaacgtacaaagtgataaaatcattagaaatatattcaagtttgcttaagacagactataactgccattacaaggaagatttgataactgctcgtaaatgaaaagtctagtagattactaactactt

SEQ ID NO: 269611 - DNA, 553 bp, Cannabis indica
caaatatttgctaatcatcaaaacaaggagatcgaaaagtttgagttaacagtacaagcagccaattattcagcctagtttttattttttccaatactaccagtatagaaaatatcattgaaaacaaaagtagacgtaaaaagtggaaacaactcttcacgtttaatggtgttataagtaggcatcttcatattcatcttggtagtacattagttcaaaataaacttgcaaaacacagtgtcctaaaaaagtaacttagaacaattaatatagttattatttgaatagtgaacaacatcaagaattacacaaaaatttattgtatttattaaaaataaaaaaggtattgcagttcaatttcaatcacaacaagtgaagaaaaattaactcatacgttcacttacttatgagtcatcacacaatttctcatctccaaacaacaatagtacaacaagaaaaaaaaaatcattagatgtctaatgaaaatatatatgatataaagtgtcttcaatccctacaccattcaaattttatcaaaacatttaatgcaata

SEQ ID NO: 269612 - DNA, 1057 bp, Cannabis indica
ttttttgatataatgattcacttggtgatgcagttacctaaagaagcgatacttgggggaccagtgcacttcaagtggatatccaattgaacgagccatgtctgtgtataaacaatatctcaaaaatcgatctcgatcggaaggatctatttgtgaatccgttaacgaagccttaaccttttgttcaatgtacttctgagaagttaaactcgatttaaccgtcaagatcgaaaatagtgttgtcctcccaaataatcctgaaagagaattctctgtatttaagcatgttgggcgaccaattggtcagaggaccatcgttactttaccaatgcaagataaactaaaggcagagtgatacattctgaacaatttaatgaagttgagaagtatatcacgtaagatattttttgcatactcaatttagttatcttcactgatgacattctctaacattttctccattttgtgtgtagtaagcataggaacgagctacaacctaggagtgatcaaaattttaacacaattcaagagaatgagttttctagttgattcaagtctcgagtaagtaatgctttcaagcatgttgcgttattcaaatacagtttattattctagtattgattaaatttattaccgaatgatagatcaatcaacttcgagcagataatcctacagaattatcagatgagttgtacgccatcgcaaatccctctaatccaacatgttattgttatcctggatgtgttgttaacggtgttaaattcttagttgaggatcgggatgaaaatcataacacccaaaatagttgtattttgtgcttggagaggatggtaacaatttttatggcgtactcaaacaagtgtacaagttcacttacttgaaggattatagtgttattatttttaggtgcaagtggtgagacacaaacggtaacaggacaaaaagtgatggttttttcattagtgtttgtgtttcccgtgaatggtaccaaaatgaaccattcatacttgcatcccaagcaaattcaatgtattacattcttgaactgaagaacgga

SEQ ID NO: 269613 - DNA, 3264 bp, Cannabis indica
gatcccaactattttgaaaagttttaaatatattacagtttattttcagtctgtttaatataaaagtttaaattctgcgctattttaattagtaatcccagttaggggattagggctttataagtattttgggtagcgtgcctaattatttagggcgttacaactgtcatgtccactccgggtacagtcttcaggatagctagctcttccatggaaaggagttccagctgactagttatctacctcctgaaatgatagatcgggatagtcgactacaacagactttattctatccggaagcgtcttctgcaagtgtccttggttcgcaagtctggaagctcgtttatgttcttggaggccttggcacttaaactgatgtggagacttcgctcaaaaaagagttggttgagttagttatttttaactgacttaacaacctcgtctcttgcagtcaccgactttaggatcttaatcctaagcctataaataccaccttcacttattattttaggtatgactgaaaattacgagttggagaactctgttcaagatcgagagtttgagagagaaaaaaagattgagaggtgcagagaaaagagagagattgggtttgggttttgtaagaagactcttctctagatgaagaagattcttgggtgaaaagtgtgagagttgaaacactttgtgagaactcaatagagaatctcctctcaactgtattgtacctagggctgcacacgcgtcgggtattcgggttttcggatggtcgggtttgggctttcggattttgggtgtttaaaatatgtaagcgaaccaggttttcgggtggtcaggtccatcggatttcaggtcgggtatggcgggtttgctatggtcgggttcagattaacacccgaatcaatatttgcataaaaatcttctatggtttggtgtcatttcactctcacaatgaacaaaaaaagtacaaataatactataataacatttttatttttatttaaatgaaaatataatttaaaaaataaatagtaaaacaaacttagtttcccaaagaaaatgacttgaacttttttcagtagctatttttatacccacgtgcatgatgattatggcctacttttgtacgtgacacagttacaaatgtgaagatagatagcctcttttacacatttttatttcataataaaggaaaaaactgtaccttcaactttcctattacgaaaatctatgccattgtgcctaattttcgagtttcggattaacacccgaattaatatttgcattttattaaaacccaaacccgacacccgtgtggagcatttttgggttggacccgacccgaccacatgggtttttaatttttcggcttttttcagcagcgggtcggggcgggtggctgggttttcgggtttacgggtctaaatgttcagccctaattgtacctattcttgctcaatcaataaagaagaattacagtggtgttcaagaactggagtagagccattgatcacgtcgatctatcagtcttaaaccaatatatatcttggtgttgttttctttattttctgcatttaatgtttttggtctttttaatactctgtttgctcttgtttttcatccgatcgttgttctcaatttattaatcttgtcattgctaattatttgattgtttaaagttgagttgattggattctacacatttagtcgtaattttcccacaaatcagagcttggtaatcaatcaagaaggcagattcaagattctttccactgcaatcttgaagaaactttgaatgtttttaatggcgagatttgaattgaagaaattcgatggaactggagactctgcactatggagagaaattctaaaaggaatcatagtgcaccagaaagtctccaaggctcttggagacaagaagttattggtagtttagaaactagagaaaaaagaagaaatacaagagatggcgtactgcacgatcatcgtgtatctatcaaacagtgttcgaagaaaattcatgcagggaagacgacagaaggagtttgggataaattggaaaaattgtacttaaatccatcaattgctagcaagattaatttgctagaaagattatacagttttaggatgatttcttccctttctttaaattagaatattgatagattcaatgagattattgtaggtttggctaacaaaaatcacaagattaatgaagaaagccagatcatcatcttattgagatcacttccaatcacatatcaagaagtcaaggctaccatcaaatatggcagggatgttatcacattggaagatgttcttgccacacttaaatcagaagatttccaattacagttggagaaggaatccacgaaagatgaagtgtacttagaaagaggaagatcatccaagaaagtgagttcgaagaataaacaccatcattctcaatcaaggtctaagtctagagagaaggacacaaggaagtgttacttctgtagaaggtctggacacttgcaaagatcttacaagaagtacaaggagcaataaggcttcaacaaatctcacaatagagataggaaggacatttgacaccatcaccacgggaaagattctactgcaattgcagaaaatagtgatgactactccatagacgaagaaattttttctatctcgaagtcatctatgaacagggagtgaattcttgattccgaatgcacttatcacatgtgtccaagtcaagagtcattttttttttattataagtcaattgatggaggtaaagttttaatgggtaatgatcattcatgcacggtcatttgaaccagaaaggtggccatcaaacaatatgatagtagaatcaaggtggtgacgaacgtaagacacattcccaaccttagacgaaaccttatatcccagggtgcttttgaggatgaggaatttggatacaagtccatgcacagaagcttaaggatcaccaaaggttctttgatagtaaggaaaggtgaaaagagcaatggtttatatgttctccaaggagaaactgtcccagctggagagacaagtatggtgaaagggctagaatcggatatgaagttatggcatcacatgcttggacatattagtgaacaaggcctcaaagaactacacaaacaatgtatgattgaaaatttaaattcttgtgtcttaccatttttgtgaagcttgtattttagggaaacaacataagttgaaattcactccaacaaggcacacaactaaaaagatact

SEQ ID NO: 269614 - DNA, 723 bp, Cannabis indica
attaaaaaaatgaagagtataaaagttaaacatgagtctaaaattaattctttttagaacgattattaattggtatatatggttttatttttaattagttatcattaccaactcttacctttatatttaaaatatttgtttaaataaattttaatattttaatatttttgtatgttagtttaattttttttgtggattttttagtcttctctaaataaaaaaatattatttttaaatgctattaaaatattaaattttattagttactttttaaatttcttaatcattattcttactttataatgatattaataaaatctctccaaacttatttatttatattctcattttttttaaaatattttcacaaaaaaaatccctccacaaatatatataacgatgatatgggtaatttaaaatctctcaaaattatttatctattttttaaaaaatttcacaaaaaaaaaaaatcaaaaaatgatatagtttatataaagctaaatttattaataataatataaatttaatatctcattaaaaaaaatataaaaaaaaacaaaacaaaacaaagttacatgattttcatttcaaaaaatacttgattttttttcttcttaaaattcgattccaataattagatatatttattataatttggtattttattttaataataaaataatttatttatttttttgtaatgaaaataaattttattagaca

SEQ ID NO: 269615 - DNA, 689 bp, Cannabis indica
aaagtccttaaatccaacaatctaaggggtatttttaatgaccttaaaagttcaaggggcatgatttgatacatgtcaaagtttagaggagaaaaatcctaattaaccattaaatatatataaatatgttaatcgcaaaagaagtaggagttagcacaataagggctcgtggtacgccgtattgtattgtattgaattgtgttgtgttgtattatattgtattactattatttaatacaatgcaatgtttggtactaacttatattaataaattgtgtaaagttataatatatttttagactcgaccccaataccaactatagggtcgggtctaggtccgggtcctgggtccgagtcctaggtccgagttcagatcggggttcgggtcccgggtccgggttcgggtcccgggtccgattcttgggtccaagtctgggtcctaggtggtgggtcccgggtccaggttcgggtcggcgccctgggttccaatcccagtctgggtctgggtctgagtcttgagtttggtctgggttcgggtcggagattggtgttgaccccgaatcttttgtaaatattataatacaagctaatacagaccatttgttatgtattaaataatacaatatacattgtattaaaaaatttagtcgtaataattaatacaatacattattttatctaaatataat

SEQ ID NO: 269616 - DNA, 816 bp, Cannabis indica
agctttttaacgtggtataaggggcggaggtcctcgtttcgagattcgccatctttaaagcttcgaaggtgcggcttagaaatgcactcgaattcgaacatgtttaagcttgttcttgggtcaagggaggttatatatgagtgcatgggaccctaaggattatttttgacgtaagaaaacgaagctttaacgtccaaatgaaaaatcaatattttgactccattaaagacggtacaccgccaacgaagaagacaaccccgatctgccttctcggaccacttttcttgatcgttttgaggtcctgagcactgtggagagcttccccaatcgaaaggacgcttcaagagcaatcggagacaaagttacactttaccggcgacgaaaccgacgagaacgccggcgaccacgttctgaccgtttctgaggtgtttttcttagatatttttgtatattttgattccttattttattctaaggtgtttggttaatttttgataattttctgaatttatttggaatgattttgaattaattagtttatttcataaattaattatgaaaaatacttaggttgcggagaaaaatttagatttattttatatgatgggctatgatatataaactgttataaaatttgtagattgaattttcaggcgattatgtatttttcatgaattattgatgctatttcttattttaattatgaaaaaatacctaggtttgcttagaaaattcaaagaaaattatttgtgacttagtacagaatataaactgtgttagaagagttagattcggtttttaatcaattttggtatt

SEQ ID NO: 269617 - DNA, 605 bp, Cannabis indica
tttgatgatctttcttgtttcttaactttgtttctagatgttgttgaatcttcttgcttccccgagctttgataccattgtaggaaataaagcattccaaaaatgcccctacacctacacccgaaagatcaaaaaacaaagttcaaaaaggacctttaccaagcttgtgaggatcaagacttggtccctcaaaacactgtcgttctgatggctttaaaaaccctcttattgttggctgaaaccctagtagccaccacaatcacttctccttctgttctaaccctagcagccgagatacccccttcagcctctcttcttcttctcttcttctagctttgaaaacctagcagttgaaaaccttgttcctccttcaaccttcgaaatgcagcagccccttagttcttcttccttctttcttcttgctgcaaaatatagctgttgaaaccttctttctccaagctttaaacctgcagaaaaaaaccaaagaacaaaactagagacacccgaaaataaaaccagcaaaagaaaaatctatagacaccacaacaattgatttcggagttccctctaaatcataggtacgtctccgtcaagcgaccctcaaa

SEQ ID NO: 269618 - DNA, 1583 bp, Cannabis indica
atataattttgtaagtatggtatacttatttgagacacgattttgttccgttattgtactttcacggaatgtattccgtgatgtacgacagccgttagatgtgtgagttatttgatctgaggggtggggttgatctaggggtaattagggttaaaaaatgataacgcaccctgagacccattattatgtaacatgagacccatctaaaggctgtcatacatcacctaaaggcttaagtacatcacggaatacattccgtgaaagtacactaacgggacaaaatcgtatcactacttattttatggtaaaatataattttgttaatatggtatatacaatttttttctataatattatagtattttgttttctatttttttattattaggtatatatattttgagttttttacgggctaaactactctcaactatcactagggccggtcctaaggtatatagggcctaaggcgaaatcgaaattttagggcccctatatatagtttaactattataaaaataataattctagtgcttagtgttatataattaagtttttttttttacaagtttccggggccctgagcattcgggggcccgaggcgcacgcctagcccgcctaccctcagggccggccctgactatcactccacttgcacttaaccctctaaactcaaattttaacgataaaacccttcaaactactgaactacttgcaaatttaaggtatcatccattttttacaattaatttccaatatagactacttatgtgtacacttttatatatgtgtcaaatttatattggtacacctaatattattattttaaaattttaaaaattatttcaaaatttataattctttttaatttttttttaaatatattatttttatatattataattttatttaattttaaaatgaattttcaaaataatactattaggtgtaccaatataaacatgtcatgtgtacaagagtgtacacataagcagcccatagcgacagttaattgaatgacaccttaaatttactactaattcagtagtttggagggttttactaccaaaatttgagctttgagggttaaatacgagtgaaaggacgactgagaaggttttgctacaaaaaactctatatattttattgtatggtatatagttttagttgtgtattttaagatgattatttagtttttattttattatatataatgattatatattaattttttagtatgcatacatattttagtagtggcatatataatttattagcatgatatatatattgagtattaatttagtattattataatttttttgtaatatataattttatgactacggtatattagtttttagtgatacaatatatcaaatattgttatatatatttaatgatctaatatatttatttatttttgttacaatatattaatatgcaatcaaaaatttttttataacttaatttaattattatatatattttttaaaaaattaatatgtaataaatatattttaattggagctttttattttacacttcaaaacagtatttttttgcattttatggaattctac

SEQ ID NO: 269619 - DNA, 522 bp, Cannabis indica
taagttactttaggtattacatttatcaactatgtacctacataatgtgctaatgaaataaaataaagtgaacaaaaaaattatatgtatatcatttttattgtgagtgtcaagtgaagactttgagttgtttatatttttcatattactttgctattattgttattgttttgattaaatatatttagttgtgaattttttgaaattttattataatgtgtaattattaactttgttggtgaattattaaaaaaaaaaaacttagttggtgattaatgcatattgttgttggaataattttaataacaactaaaatccacataacaactcatataaaatttattgaagcaaccaaagtgaaataaaaaaaaacataaaataattctccatttttaattgtacactgttataccgaaattaaatacagtgaaattggaacgaattaccgatagaataatctggctgagtcgcggacaatgtcgctctctttaagacgtttcgcggctctgcccgaagtgtgca

SEQ ID NO: 269620 - DNA, 539 bp, Cannabis indica
ctttgattttttacttacattttttattgttttatttttatactaatatactgcttttttattaagaaaatttgttttatttttaacacaaacttgatagcttagatgtctttttattattattatattttaaattcttaaaaataatttgatttgacttgatattgtcacatctctgacatttattttttttattcttttcatttaatttaattttgacgataagtatatcagaccctacactattttttattacttttcattattctctctccttattcattttcttcttttgggtttttttttgtttcaaaatctatcaatgtcttcttcataaaaaactctatctttctctctattaacatatatatttttttatgtttaaaaaaaaaatatatatgttttttatttgatttctttgttcaattcttctttttcattttgtttttatttttttctttaatttttaaaatcttcagtcatgtttttgagaaaaataagagtgttattttttattctgatttttcagaattggactt

SEQ ID NO: 269621 - DNA, 561 bp, Cannabis indica
attcagttctatttcactatagcataatcgacacttacttcttagatcttgcatcgaaatcataaaacaattaattgatggtcagacaattaaaagtaattaagcaccaatgaaataaaatacataaaaattaggggcaaaataaaaccataaagcaatgtcaaacaaatccatctagagcctaatcaagtgtttagctacacatgttcatggaagcaaaatcacacatattaactttaagaaagagaataaaataatgctgaaaaccctctgcagaatgcctccagtattgacttctgtctctaaaattcgtattcctttttccctcttaattgcccccccaaaactattgaagtccacttcttttatagccaaaaaatgataaaataaaataaaaattgttgaaaaagaaaagctattcagcttaggattagaaaacctattctacttaggattagaaggggtggtgagttttctgctgcgtcgactgatagtatttttaccataactctctcgctattgctcgaaattggacaactcaagatgttccaaaaagataaa

SEQ ID NO: 269622 - DNA, 539 bp, Cannabis indica
agccttattgacactatttccactgatgagaaatctgctttcacttcaacttacttaaaaatgccaagtaatattgatgtttctgccatacccaaagtcctcccagttcagcaatagacagatttgatgtattatataacataattattgctccaataatgtttatccctatcccaaatatatctctttagggaatttttatagacaaaagtgtgtctaatactgatctgtgctaaaagcactgaccatttataataataaatgtttttagaattctaagatttttgccttttattcgacctctcctttgtttaacacaaaccttaataactcaaagaaaacaagttaatcaaaggacattaggcaagtaaaaagttagccttagtttgatgatcactgttggatctttgtggatacccgcgttttacactaaattaatatcaagtcttatataatttaatttaataaataatgtaaaaggttattaatcaaaagccgtgggtaaatattatagaataattacataagatactattttt

SEQ ID NO: 269623 - DNA, 549 bp, Cannabis indica
agttcaaaagcaaccaaaatgttatcggttataagcctattggagagaaaggcgctttgagtttctgagattacaagcggtaaagcatccttcaaacgcagcactatcattttagatacaagcttgtaaatgacattacataagcttatagggcgataatccgtcatagcagcaggtgagttggtctttggaatcagtgtgataatggcattattaatcaattccatgctttgtccctcattgagtatccctaaaacaacatcagtgacggaattacccacaatgtgccaataattttgatagaacattgctgacataccatcgcttcccgggctcttatcaggactcattgtctttagagcatttgtaacatcggctacagtgaaaggctgagtgagtgtgtcattaatttctgcattaattgttgttggaatggtggctgtcacaagatccaaggcttgaaaatcaatcgctgaggctgagaagagatcattaaaataatcttgtattatagtggtcattccagcctttgatgttattttatttcca

SEQ ID NO: 269624 - DNA, 1058 bp, Cannabis indica
ctaaaaagaatggacggaaccatggtgcctagggcctggaatgctgatcacctccgaaagtataaccaatagtcgaaaaaataaaagtttatgctctgtaaagtaaatttgtaccagacaagtatatgtaacctcgaaattaaaatttgtaaaactaagtgacctaaaacaaattttcatgtcactcaagggggtagtaaggcataccacatgcacagatgtaaaacagaccaaaagtttaaagttaaaaagtagaatatgtattcaagcatgaatgtaaagtgttcaaatcccaaagaaaagctcaaaaataagataagggcctggggacgggccttaaatgtctccccttaagaaaaaatataaattgccttgaagggggaagaaggactaaatatatatataaaaagagataatgataatggcaatggcaatggtgacaaacgactggcttaatcaattcagggtggaaggcgaggacccctacgctcctcccgcaaggcgtcaagtctcttcttcttctcccagaagcggacgagaacctcctcaggctttcgatagaagtcgagcttaaggttttgacagttagtctaccaggccataaagacgccatcgtcgaagcgtttggtgcactgctgacaggtaatggaggtcaggagctcatctcttttcaccttcttttgagcctaatccttgaaatccagaagctcctccacctcaacggttaggttggctgttgtcttcaagtcagcctggtgcagctcctccagggacttcagcttggcagttagatcttcaactgcctcctgggcctccctaagctctcgcctcgccttggtcacgacctcatcccgggtcttcagggcatcatccttagcctttaactcctcagccttggctttcagtgcctcctggtgcctccgctctgcctaagcctccctctgctgggcctcctcccggaaagccttcctctcagctgccaagtctcttagactcttcatgacctcgtccatgcccccaaattcggatatgacgtacccatgatcaatcaaagtctt

SEQ ID NO: 269625 - DNA, 601 bp, Cannabis indica
gccttgcccatacctacacatgcaaataataagtcgactgccccagtaagaaaaacataatcatgaacataaatataatccagattataattaggcgcccatacacccaactataactctatccatgtgtccaacacggtatagagtccaaaacattcatgcgacaatactattgaccataatatcaaccttactcggtactctaggcattgtctagtcgtaccaatgtgatagcgtcgataccactatcaatatagcaggctccataaatatgcacgctaaacatgtaaacacatatacatatcattatacaattcttaccttgttttcgaatttaggtgtaccggtcaacctgagtggaactgttgctcgacaatttataggcccctaaataacgttattcgtaaagctgataagtgacacgctaaatcgctttttggggacttaaaattgaaactaaaagtttttctatcgatggataacatggcaatatgctaaatatcgcaaaaacaagaaaaactagggtttcctaaactaccccaatcggaagtctaatccaatgggtttcctggggaccgatcgaaattctggttcctacagg

SEQ ID NO: 269626 - DNA, 568 bp, Cannabis indica
ttgaatgttggttcccttttaagcgttagttctgtaactaaaaacttttgcacaaatttagattggatctaaattatactttcactagtaaattaatgatactaaaggataaagaagtaattagaagagtaaaaaataattgaccaaaaataattacgaactgacagaaggagggctaatcacgaattgattatatcaatggacactgtagtaaaactcagtaaatataattttataattactaagagttcacttccatatttataatggagtaatcatgtaattcatcaacatgattatttgattgatgagaattaataatctagtttattagagcttataattatatgtccatgatttctggatcactacctttaaacattgtcaaggaaagaaataaaagttatatataaaattttagaaaaaattattttgatttgtcaaaatagtaattatttattttgcaataaataatttattttttaaatttgttaattatcgaaattggagaaagaaaaaagttttccggacaaaagacaccaccaatgtcttgttaagacataagtgg

SEQ ID NO: 269627 - DNA, 525 bp, Cannabis indica
agacatggatgtttgattttatttgtttaagggtaaaattggatagaaaaatagtgtgagtatattttgcatgatgcaaaatatgctagcatatttttagtggataaattaattttaagcatataatatcaaatttcccttctattattgctttattaattaattaataaaaactaattgagtgcacctttttattttgtggatcataaaaatccttcttaatttttgtcctaattaatttattaatttataataaagtttagttatactttctcgattaattcaactaattaaccaatatatacccagaatttagagccggccattgtccactaatattgacctttactttgtcttcttctaattgttattcccaaaatttagctacttaattttattaacaaaaattaaattcctatactatctttacaaaaattattattaagtactaatagtgcttaatacttgttaaattaattattttatattttgttagtgatagtttttaaattatatgggacaatt

SEQ ID NO: 269628 - DNA, 981 bp, Cannabis indica
gactcgggactccgtttgggacgttctttataccgttggaaagctcttttcgagctctatgtgattatctgtatttgaaatgccatgaatttattttatgaatatgaaatcaggggttaaccctatttgtgaaaatcccggattgtgtgactaggattaccggcacctggtcaggagcacccggggattcggaatctctgcctttgcgggacaacaggtaagacagtagttgcacgtagagatatgcacggtggtgcttatattgaatattatattggtgataattagaaaccgagattagggttattaccctaaagtgagcggtttaatggcctagggttattaccctagtaattattaatgtgtaaatgctatgccatgctaaatatattgtaataaagaattatgcgcacaaggcataattaagttagactcggtaaattagtaccttgagtttgatagtaatgcggtctagggttattaccctagaagttatgtgaaggtaagaaagtcatgatgtacaataatattgctaatcaagtgaaagcatgaattagggttattaatctctataagtgttattttgagcatgcaatgatatgttatatgagagactatttggtatgtaatttagggttattaccctaagattctatatgttttgttatctattgaatacatacatatatttcaagagttatgtgcataagacataacttggttagacctagtatattactaggataaaccactgaaagaacgtaatgtatggattacgtaaatatatatgaatagggttatgtgagcaaggcataaccaggttagactcggtaattataatcgagataaaccttactaaggccttattgtaaatagacgtgtgagcgtaacacgtaggtctatgctacatagacatatatagacgtgtgggagcgtaacacgtaggtctatgctacatagacatatataggcgtgtgggag

SEQ ID NO: 269629 - DNA, 628 bp, Cannabis indica
ttagttgaagagataaatctaatttataaatgagactcttcattatttgtagtgggattaatttaattttattatgtattattactaaaattttagtcatattaataataatcttaatagcagttatataattaaagaatttctaatataaatgagagaattagactactaacaataatatatttagttaaagtgttttatctaccacatttattgttttagagcaatataagaaactaacagtatctatatatatatatatactagatgagagttacgtggcgagccacgtaaatattagttttatataagttctagtagtttttgtttaagaattcagtaactaagcaacgacaacaacaatggtagatagatctatttaagtttttcatatttgtaaagattataaatctaaacttttaattttcttgatttgagattttgaattgttctgatttatttgtttatgaatttattgaaatacttgaatatttattggttctgattttgaattgttctgatgtattcatccttaaatatttatattgatgattgttaatgaaattagtctgtagctttatgtttctagaaaaaaaaagtatttgttaatatagagtttaaattttat

SEQ ID NO: 269630 - DNA, 741 bp, Cannabis indica
gtacataacaatgatcactgtcaaatgagacaatatacctttggtcacaaatttaactaatgctaagtaaattagcccttagtccttcaactagcattacatttttcaatctgggtaacccttcaaaattgagagttcccattccaacgacttttccagctaagccattgccaaaagtgacttccccacactgcataggcttgatgttaatcaaaaagtccttctcacttgtcatatgtctaaagcaaccactatcaaaataccacatttgagaagcaacactttatcagaaaaaccagctagacattttttcttaatccatttttgtttcatacatctatgtttcttttgagatttttcaaacttaccaacattaatttgttttatacatattttgcatggtgaaacatttaggtctgatatgttccttgttaccacagaaatgacaaatatgcacaaatcttttacatgagatcttactcaatttgaaattcctggagacgttgctttagcagaaacagcttctccaacgacaggttttgaatctgttacaacaagctttaaatttgcagcatcaggaaagttcgttggaacactatattttacaaattttgtgattccagaactttcaataccatttgatccaatgccagcaaagcctctttgacctgcattctgagcttcttcaaaaatagaagatccgggattaagcatttgaacatttttcttaaaattttcaag

SEQ ID NO: 269631 - DNA, 895 bp, Cannabis indica
agtcacattgatatttaaaagtttgaattggtcttaaaaattattataatcgttgaaactcaatttataagaaagtattaataaaaatctatgaaagaaataacattcaaaaaatatcattagtggagtatcaatcaattctccaaaaataatgaaataaatagcaatcaattcataaaattgtatacaacactcaatttatttgaaaataaaaaaatagcactcagcttatagttatgttatagagaaagtagcaatcatttaaagaaataggttgtaacaccctaaccagcataggcgtgttaacgtgatttttaacgtactgtgcagctcgttgctaatcaacgaggttattggaaaacgtgaataattaaaattttgctttttaattaaaatataacatattatacttataaaattccgagatcccgtttacaaaatataattacaaaagattgctactcgtttacaaaagatttattgcccagcgactagatagcaaaagccctgatgtcccgaggatcgtacgctccaggcctaaccgccccgacatgtacaatcttcacctgttcgctctcacggctcctcagcttagccttgcccttacctacacattgcaatagcaatgtgattcgacagactcagtaagaaaagcataacataataaacatactaaatcccaggttatcatcacgcgcccatacacctaaccataaccctaactgaatcatgaacgttcttgacaaagtatgactaaccgcgaatccagcctatataaaatttgcatatcatatatctaatatgttattctgacgacaactaacatgtacgctaaacatgtataagcatatgcatgacattgtactaatcttaccttgattccgaattcaggtgt

SEQ ID NO: 269632 - DNA, 489 bp, Cannabis indica
caactccaaaacatttgtatctttttttttaaaaaaaaattaagaaatattaatataactaattatattataaagcacaagataatggttcaaagcagagaaagctatcagttgaggactttctttacttaatgcgaaagaactttcaaaagcttaaccgatgtacagaataatattgtctggtaaaatttatttgccaaagatttaaactcaagctttataattatttgcttcattgttcctctcatacaactactttttattattattgttaattaatattaatctatgaaggtatatttaaaatttaaagtacacattttcgtgtgataaagaagaaaatgtagaagctttttaattttcatttttcattacagaaaagaaaaaacaccattttcggcccaaaaaaaaatcattttccgccaaaataaaagtaaagaaaaaaaaaaatcaaaaactcaccaaaatgaagcttcaatcagttctcaa

SEQ ID NO: 269633 - DNA, 700 bp, Cannabis indica
caatttaatacccatttgataaccataacacaattggtcacttaattttgtatcacacttaataatagcatacattatacatatgtgcccacaataggactttaatccaacatttagagtatgtttgagtctataaagtttttgaacaattccttttaatccattcactgatagaggcttaacccaacttcccttcataacaatatccttgaacttgttatgagcactccacatattgtaaaatctaaaaggctttatgcctaagttcctttgtttgtgagtcttaataaaacaaaaccaatgatcagaaatcacatcccaatagaattcaccatccgagttgggaacttcatccacccaatcctcatttggaaaggcatgatcaattttttaatagaccctatctccaccttcttgcttattagaccaagtaaacttagagccaaggctcttaagtgaggccaccttgtttttgagcaatccatgctgtgaaatcattgatttcagtagagctaacaaccttccctccaactctgtcatcatggttaaagatatcatttaaattccctactattagtattagctacgtcttaattggtagatgtagcctggagagacctgtccatagctccttccctctcatccagactattaagaccatctacaaacatgattagaaaggagtgctgaacactcatga

SEQ ID NO: 269634 - DNA, 766 bp, Cannabis indica
ttagtagtaatatcaaaacaactatttcaaattacataatgattatttagagttattataatttttggttcacctcttgttgtttgaatggaacctttaccatttctcataactaagtttctacaaatataaatacaatcttcagcacttatccaagttgtctagctccttcatatgaaattcaaactctatttcgatgtaagcttttactacatcgaagaaagttagtttgtaatgctttaatttttttgaatatggttttgagcttggataagtggtggaaggtgcactacccatgtgttatttctaggaacatgtaatgaccgcctaattttaatatgagaattaacaaaattagagtttaattcagaattagacttttaaatatgatttatgaatttatggatatatatttgaattttaggtgtgctatttatattatatataaaattttatgtttttcatatttaatgtccggtaatagtgaaacacgacatttggctgatagagtcacttttcttatggtttagtatttcagaaatagcggagaaattcagattgactttgagaatgttgagaatatttgtggttttgaatttgacaaaaatggccttaggtggcaaggttacttaatgaggaagcaatggtaaaatgatctttttccctaagttagcttttggcttttgtcctttagtgaattaatggtttaatgttgttaattaatctaattttggtgtataatgttaggaaaataatagatttattt

SEQ ID NO: 269635 - DNA, 565 bp, Cannabis indica
ttaattatttatttcttgaatttaatacattttattaaattgaaaattaaatatctaagttgattttcatcatgatacttaatgttgtcgagtgaatttcgcaacaccaaattatatgatattattagtgacaagaaataatttacgtggaaagacaaatgcgagtattcaacctagaatggcgagtactcaactgggaatgagaaataattaacgaaagctggaaaataacaataagacagagaattatagtggttcagccatattactgtctgcttagtccactgtagcaagagattcgtatgtgccatttcacggtggatcacccctttatatacaaagcaggtgtccaatcggttatacaaggattgcattcattgttaatccgttatttacacattgaattacaataattaaaccaagcaacgttaacatagataaatgaatgacagttacgaaatccatcaacgtatgcgtcttccgcatctgcgagttgactgttcatgttccgatgttaaactcgcagggttattattatgttagggatgtctgcgtccttaggtag

SEQ ID NO: 269636 - DNA, 791 bp, Cannabis indica
atcctggtaaaaaatttccaatagagttttctgctgacccacagatggttgatgctctggagaacccaatagtagttggggctaacgatctaataaaggcattggtagaaatatgagcatgactgcgacggtaggatgaagagtttgcataggctcaacatattaggtcgctagtaccaattgtgctacctcaagcacataatgaaaggtactagtgtctaaataaatacggatgcatggaataggatatgtcttcgaacagtttagaaagcagtctccacgcctagatattaaatgaagcttgacaaatgagaaccagtgaatgacttggaatggtggaagctatactggactaagatagatattctatgtaactaatttattaaagaagaatgaaagaatagatatcgaaagaacaaatacaatcttgttgggtattctagggttacacactcttaaattagatggtaaacatatgactagtatatgtgaagattttagaaagaagtttgttatacaaaatacaattagtccaaagaggactatgccatcatgtaggaaggaatgtagactgctgaatagtatctagaataagaagttagaaagagaactgataaaatttctggaagtaatggcttatgaaggtatcttgaacaccgaagagataagcagatcaacaaatattggataacaaaaggaaaattgtaatcttcaaactcaaggtcaactactttgtggaggagacaatggaataaaatgcgcatggtattgataaagacaatttcaaagga

SEQ ID NO: 269637 - DNA, 1388 bp, Cannabis indica
gttgcatggaaaattggacacctaaggtcatccctgattccttgaaggtccatttggattttgaagttctccacatgagttagtgggtcttcactacctgtgtacttgcaagtgggcatcttaaactttgctggaatagggaggtcattgatcatttgggagaaggcagaccctcttctcctttccagatccaagtcagtgggttttggagcagtaaggtccttgaccaatcgggttaactcgtccaaccgagcttggatcaccggatctgtgactgtttgaggttgagcaatattgacaccaacatttgcttggtccctttggaccggctcaggtgggttcactatgttggaaccacgattgtctctatttctgttgagggcgtcccgcaggtctctaccccctcgggggcctacccgttcaaaaactaacccagttcttggccttcctccggcgttctgactgtcagcccttccatctgccgggggtggtacttggtcattcctacccctttggggtggattttcaggttgatgttgcctatttggggcatacgaccctctggcttgataaccccccagctcaggatttggttggttgttagcctgactttcagcttcatcatctccatgaccgtcagggtagtttggatggtagtcactgttgacctcagggtcttctcttctccccctagacctacaatttcttgggcgatcatcgccatctcgtggttggccacgttgatcgcggggttgccactccctacgttggggcgtccttccactgtttctgccacggtcaccattgttgtttctagagtttcctccaccactccgccttagacggacattgtgggagtcatcacgtcccatatgatgaccggttaggacttgctcatcggtcgggggtggtcgattattattgcggggaaccctgttggaggggtgactcctagtcctctcttggttccttgggcgctcttcaggtccatagaccaccctctccctctggttccttggggtaggaacctctcgagaataggtttgaggtatctgttgattgtgggcatcagtacccatcccttgagtgttttggttgaagtagcttcgtattaagtcggcagcctcttgggtgcgaagatcttggtcgtcttggcgcctcctcatctcacgagcataatcttccagccaagattggaattctctcctttgattagcaagactttcagtcaaggccactcgagcttgattttggtctggtgcacagtttgaaactggccttgcatctggcctatcgcgtctcgcagctgatccatctcggggtcaattccctcgatgtcaacatggggttcattccgcgcgtaaagcgccagggccgcgaccagtctc

SEQ ID NO: 269638 - DNA, 931 bp, Cannabis indica
cagatagcaatttacctaacacgtaatagtacctacagaaattctataattataaattagatattattactactaaaaattaaattaaaatatttatttgcaattaaaaatcaaacttaagtatttatgctgtaaattattctttattaaatattaatttaaaatcatgtactaaattaatttattcttttttaaaaaaatataacaaaattatacttttagaatgttagttttaattttaattattataattaatattttatattaaagtcaatattcttatcatattaataaaataatggctaattaggattttgtcccctggactttgacatgtaccaagtcatgccccctaacttttaaggtcattgaaaatgtcccctgaactattaagattgttggatttaaggacttttttctaattttagtaaaaaagtctaacatggatgaaagttcaggaggcataatttagtgcatgtcaaagttcaaaggcatgatttggtagatatcaaagtctggggaacatggtttagtacataaacaatcattgaaatagtaaaattgaataaaattagacaaaagtccttaaatccaacaatctcaatagttcagggggcattttcaatgaccttaaaagttccgggggcatgatttggtacatgtcaaagttcaaggagcaaaaatcataattagtctaaaataatataataatacagaatatattttagtgtaatttttaagaagttgaaaaatgaaaaaaatttagtggtaaaattagtttctttttttttttttttttttattttttttttcaactattatatgccattacctcgtataagtaaacaatagcttcacttagcttcttctctggtctatcgtttccactccctttgcccagatgatgatacagacagacacggcaatgaag

SEQ ID NO: 269639 - DNA, 2063 bp, Cannabis indica
agtagctaggttttgtatctctttcacacacttagaattatattcatatcttaaggaaagagtgtctttgttatgttaactcttttattcactttcatatcttaagaaaagagtgtctttgttttgtagagaagagttgttctactcttactctgtttatttgttgtttgtattgtcttgagtctgtattcaagtctacaacgaagaagaacatcagtgcaccttcgggagaagggtatttacaagctttcgggagattgcttttgaagtcttgcatcgggaggatacaagcacacaaccttcgggagatggttgtataggctttcgggagatagcctttaagccttgaatcgggaggattcaagcactcttcaaggtgatcgaagggagttcgagctcttggagttttatcaagattcggttagtaggtggaatacatcaagcttgcggcatacaataagagggagtctatttatgcataagtcaattactttgtatttttgataccgatctaatgaatcttatctctgggcgtggccccgtggactagtaacaatctgaaaggattgttgaaaccacgtacaaaaatcttgtgtgtttttacttttatgcactgtttgtttttctgggtttctctggagttacagagttgcattctgtaactacagaaaactgttttcagtaccagttttattattccgcatttaattaatcatttaattaaataatcaaactgggaatattaaaatacggaatttcagtatatatatattattctcctgttatgtatatacatattttatatattacatgtgttattatcttcttctatatttcttatatataatatatgtagtgtatatatattgtatatgatgttgttgtaacatttatttaatctctttgttggtccttgtattgtattactatagagttgtaatatcttgattttcttccattgtaataaaatctctaacagattaaacttagatttttatgccgcaaattactctaataataataatgggtgtttcaaattataataataataataataatttgagataaatacttggccaagcaagcttaataggatgtgaaccctccaagacttcattgtgttatcatgtcaacctactaatgatccaattaaaatatgatgaggtataaaaaccctataactcaaaattgactattatttcattatatatatacatataaaaaaaaagtagggttgaaaatttgttttcgtattatacacattcaattttaacatgactcatatatttcgtgtcaaaaaatttcaactctgacctgtttcattgtgttctcatgtcaacttatcatattcatgtatcgattatacttatatcttaccattgattaatatagtatagcatataaaaaaagtaatttattataaattatcaatataatgaataaaactcttaatattaactataaaaatagttttttttttcaaatttatatatttatttatgaaaataaatattactttaattttaagaatatattagatataaacgaatcaatttgtgtcacatgtgttaattctaacccaacctaagtaattaattatatcgttctggtttgacttaattttagcctgtgtctagacatagtgattagaaatactcatgaatttacgatgcaaatatttgcaaactgcacaggaatctccttgaaccaggataactcatcgtctaaccgaaaggcatgctttgtcaaaccatgaattgctaaataaagtgagcaacatgagacaaaattacccccaaaatttagataataaagctataacgtcctcaaacaacacaccaaaataactagaacttcaacttgtaacatcgcaaactacacaacaactcattaacatatcaaaatgttccacaaaatatctaaccaaacaaaataaagataaagaaaagtggattaacccctaaagatgatataaaaaactataaaaaaaaatctcaaatagtaaaaagatgacaactctcaaataaattatatctaaaaaaatttatacggcaaagtctcta

SEQ ID NO: 269640 - DNA, 654 bp, Cannabis indica
gtctggttccatttttggtgtcgggtcacgagctgggtcctatgttacatttcgggttggggtcggctactaggtcccaatcccagttctgtttccaaggtccctatcctgattcttggcctaggtcccggttattctgtgggtttgggtcccgatcaaggttcgggttcaagtcctagtcttggtttgggattaggtctcaatctgggttttgatttgggttcgactttgggtttaggtcctggtcctagtcctagtcctagttcagttatagttccatttccgattctgagttcgagtttgggtttgagttcgggtcagagaaagattccttgtctgagtttgggtttgggtccggatttctgtctaggtccatatcaggctccgggtgtgggttcgcgtccttggtcttggtctaggttgcgtccaagtccagtgttccaatcccgatataagtctaaattctgttctgagtcatagtccttaattcttatcgtggtctgggttcgagtttgggtgcgggtttgggtctagctttgggtctgattctaggtgtgatttgagttagggtccgagtctttctccgagcttgtgtccaagtctggaccccgatctgtgtgtaggttctggcccaggtccaagtttgggtcccga

SEQ ID NO: 269641 - DNA, 484 bp, Cannabis indica
atttcacaaaatacataaaattaaaaagtttataagaaaactattaaaaaattaataaaaaataaaaaggattttcaaaatttataatagatgatcgataataaaagttaaataaaataattaaaaaggaaaaaagattttcaaactcgtatacataactaaaatatatgttaaaaaaattggaatagtataaattttcctctttgaaattaatttatacaaatattaataataaagaaaatgaaaaataaaatatcatcactatattttattttaataaaaccgatcattcataacgtaattactcatttaccacctatagttgagatagttttataatcaaaatatcatcatcttcttcttgattgattagtcatttgtttaaaaattcaacacatattatatttttaagaagagatagatctcctccaaaactcctcactcacatcttttatgaatttaaagaaactcataacaaaatcat

SEQ ID NO: 269642 - DNA, 687 bp, Cannabis indica
gtaaaattaattccaacagatataatggtgtaaatgagtattattataaattgataatgccaactagaaatttaacatgtcagaatcctttttctaaagtgtttatggtttgattctctaattaattaacatattcttatgcacaattaatttgaagaataccaatttaagcacagttctttcaagtcatataagaaaaatagcatattcatatgttatttacaaatcacacttttctagggtaatattcatgcattattcaagtaattccactaatcttattttttctaaaaccaagattaacttgtaacttactaatggtgatcaaacaaaagtaagcaattacacaataaatactcttgaatgcacaaaaccaattcactaaacatagtaacaagaaaaccaaatcacaatttttagtcaccaaaataaatttagcgaaaaaaaaaagaaaagaaaagaaattaactcaattttaccccaaatcaaaccaaaccttctagaacacctaattaagccacaataagcataattcaagcaataaaaatagttatagaccctagaatccaagacctccactaaagacctaagtttgagtttaaaaactcaaacattggtctttctcaaccatagtaactaaaattagttttaaacatcataattaactgagatttaactctaggaaac

SEQ ID NO: 269643 - DNA, 621 bp, Cannabis indica
aaaaccagtaatgcataaaccagtaatgaaaactaaagtttaacataaataggcaaataatcaatggcaagaaaaatagagaaagagatcaaacacaatcaattacgaggttcgaacaagtgatttgttaatcacttgcctactcctcggccagaacaaccccagtggctttgtatctttattgatgccagttgggagaatttacaagttgattacaaggtgttcatgaacacatacactcatgaagcaaagcttcaattgcaactcatctcactggaattctctctctgatttcaacctgaactagctctcaaaatctctctcatatttcttgttgcaaaagattgcagctaatggctttatatagcctttggtctagagacttgatcctaactgtcataactgacagttaggtaaattagttggagttagttgccaacttcttagccaaaagaatagttctctattagtgaccaaactcaacaattatccaccttggtcattaatagagaaatgatgatgatcagggactgaactggacttgaatcctcacttaacaatttaagatgtttagcaagtctaggcaaagcctaaacttggctaaactgacatatttgtcat

SEQ ID NO: 269644 - DNA, 684 bp, Cannabis indica
agcttcagcatctttcagtaaaatatgcataactttcacatacaaactccaaatgagttgattcaagatgcgttggaaagaagaaaaagaaatctaaaacttttatgttttgactttttccaaaatctgattagaacatagtcaaatttaagcttgaagtttcagctttattttcttgcagaattttctctattctatagcttgttattttccgaaatttgatcaattgataaattccaagtgtgaaacctgaaatcaaagaaaacaagcgtaattctattccaaaaagaataacaaagaaggaaaacaactataaaaagtgacccaaaatgtaggctaaaaatagcctaacaattttgcactatcacttacacaatcagacagtagttgctacgtgttgcacggtggttgcatcagacgaaggttgtagggtggttcgtcgaaagttgcataagacgaaagtttctaggtggttgttgggtggttggctgaagggttgcatcagacgaaagtttcatcagacgaaataactattagcaaaatgtttgtgcaactattatgaaacattaaaaatcagaatagtgtttatacatacgaaactctatctacatgtctttttataatttaatatgaacaaattcaccattaaaaaaaaataacgaaaatacaccagtataaatattt

SEQ ID NO: 269645 - DNA, 1035 bp, Cannabis indica
acttaggacctactcatattaaagaatttaaatacaaaaatattaattatctttatagtaagaatctaatttttttttttaccaatgatccatcaaaccctgtttgggatcaaaattcaagaaataatgtttattgattatatttatttattgttttgtcatcaaagatagaacataatctttctctttacttgtttttgacgtgggatacaaaaaaaaagtgcaataaaaacaaaatcagcttaatttatcaagaaattgaagacaataaaatggatgtagtgtgcattattgactactcttcagactactttgtctagtccaacagatgcatgaaaagactatacattaagtgaaatataaatatcagtaatttgtggtaaaaaatacttaaatttaattcagttataaataaatatattagtttaatttttgacggcaataatacttaagttatatttttagaactctagaggtacataactgttaaatattaagttattatccacatgtcattttcttattaatatatttaaattattatttttttttaaaagaaataaaaatttatgatttagacaaattaagaattgttacgtggtaatttacttaacatttaatagctaagtacgtataaaaattctaaaattataacttaggtactattactgctaaaaatttaacttaagtatttatttgcaactaaaaattaaatttaaatatttatgctgcaaattacactataaatatatcacagcattcatatttacctaatattttttattttgagaaaaaaaaaacccaaattcaccaatcttgagaatactaaggtctaaagaaaagggatggggattgaaatttatgcattaatgaattcagctaaaactaagtttctaatacataaaggctaatcaggccactacacaacactacgagacaccgaaatgacatatttagctaatagatttacttaaaggatcgttctagtagattttttatttttttcagcattcagaaatttttttagtctaattt

SEQ ID NO: 269646 - DNA, 663 bp, Cannabis indica
attgtcatttggtaagagagaaaaggcaaaaaggggtcatccaaactgttcatgtctcaacaaaagaccaacttgctgacattttaactaaaccattatttcctactcaattcaagggcttcaaagacaagatgggactgagagatatctatgctccatcttgagggggaatatcaagaattagttagttaatgttagttggtataagctgtcatagttggtttgtttgttattttttcttgttatagttgttacaactgtaactgttttcctttgattgcttagctgtatatatagcctttatttcttgtattttcattagattgtattcattctcaatctcagtaataaagactttacttctttttcctctgttttctcttcttctggtttatgcttactgttatggtatcagagccgggtttcgagtaggcttctccttcgttgttcttctttcttcttgcttccgcttctgtgttgtgttcatggctagaggaggaggagttcgaactcgaaacaaccgtgatcttgaaaaaaattcgaatgattctaatcacttttctgttcttggagagaattcaagatcaacaaccttcaatgatcttctaatccatattttctttctaatggagacaatccaggtgctgtattggttcccaaaaa

SEQ ID NO: 269647 - DNA, 1041 bp, Cannabis indica
tatgccaaacatgattgagcaaaatggcagtaaaccaaaacatgaaaaatggtttcttcatcagaattacaaaacacacagcgaggatcaacaggaacatgttttgtacgcaattgggtacgagttgggagacacccagagatagctttccaagcgaagtgaagaaccttggggggcactttaactttccagagaaccttccataagtcagactccaactgaacaccccattcacctttcagttcttgaagatagcggtagaagctcttaaccgagtaaaacccatacgactctttaccccaaaaccaagaatcaacattaacattatcacttagaggaacctgcattatcaactcgatatcccttgcctcaaacaaatcatgcaatacctcaagatcccattgcttacaatcgatgtgcatcaactgcgagaccgtgctatgagccaacacaggatgtctagaaatgacacaagggttcacataagaaaccagccaagggacattaagcacaggggtagacacaccagacccgattctccttctagcaccatcacgaaccagtcgttgtgattcaaacacactccgccaaataaaacttgggttcggacctatctcagccgtaagaaaattaccatttggaaagtatcgggccttgtaaatacgtcccacaagagaatcttcatacagaagaagacgccatccctgctttcctaacaaggaaagattgtaatcccgcaaattacgaaagccaatcccacctgaattcttgcttctacaaagccgtcgccaactaaaccaactgacaccttttgttctattattagaggacccccaccaatactttgacattaagctctcaaggtgtgaaacagtcttaaccggaagaagaaacacagacatcgcataggttggcaacgcttgagccaccgttttgagcaaaacctcacgaccagcctttgataatagacgaccttcccaactctgtattcgcttgagcatcttatctttaagaaaacccaatattgcatctttattcctc

SEQ ID NO: 269648 - DNA, 687 bp, Cannabis indica
atccttatagtgtcatcaaggatatcaataagaatctttcagatgatcagaaggagttgtttcgaaagtctcattttggccactttcttgatgttagtaacttcaactatcagatatagctcattcatcttgttcttttgcgtcagattcacaatgaaagggatgatgttcagttgtggtttaaattgggaaacaaggctgtgcgatttggaattgaagagttttccttaataacgggtttggattgtaagaaatcctatgatgttgatctttttcaaatcaaagaagttacttggtttcaaggaggatattttttctatgcatgggactactgagaaggttactttgagggatgttgccagtgttttctttagcggtgcattgaaagatgataaagattaagtgaagatagctcttgtgtagctcttttctgggtatttgtatggttattcccaaggcaagaagattgataacttcattttttctatggttgatggggatgattatattgaagtgttgaataggtttggatagggaaagttattgtggaaaaaaactttttatcacctcaagattgcattgaatgatggaaacgatacttttgaacagcttgctaagaaaaggaagattgagaagggttacaagcttgaaggatttcctatttcgttcttaatttggctgtacgag

SEQ ID NO: 269649 - DNA, 805 bp, Cannabis indica
cttcaccacccatgtaaaccaatagggtgaaaaaaaagtgggaagtgggcagttaaagagtagagatagtctattgatttggctcacttaatttgactgattattattttatttattattttaaaattaattattcctttttaattttttataaagaaataattataatataataataataatttattattctttttttcgtcaacagatgcccccctcaagcaagtgcgtgtcatttatgtacacgtgtcttgtttgagaattttgtatttgatttttctgacttgcttttttttttgtgcagtatgtctaattttgagggacttggctctcaacgagctccaaataatttaggaagagaaatagaaattggaccatcttatcgacgctccattttattgactgaagttaaagcattcagtgatcatcaagaccctatttctttatgtaaggttgaagatgtaaattcaggtgacttacaatatcattcttcacttgatgataatgttgtctagcacaccccgaggctttggtgccaatttccaggctaaagttcttgggaatattgacaataaaagggatgttgatatagtttaccaagtaaatgtggacttttatccaagccttcatcgtgttttagcagagaaaaaggccaataacaattttttctttcatggacatactgtatttgtgacatatcttatcgaatggacatacattattttgcgtacaaatcaagatactttgaatcgggttggaatttatggagctgttatatatcaagatatccattcaactatgagag

SEQ ID NO: 269650 - DNA, 589 bp, Cannabis indica
ataaaaggtactttttaaatgatggtgtcttaagctgctcgatcaaggtggtttgagagtttatatattattgtgtgtgtctcaacttgtacatctttcaattggtgtgtgtaaacaatatttcatagtgaagaaactcattgggggagagctagagtaggactcacattgagatccgaaccaagataaattccttgtctcatgcttttaattttcctctgtttttatgctttaattgtgcctattacttgtctggttttaaacttagtttgatatctggtttgtatgaaattgttatgcatgtttgtgtgtgttgattttgtgttgtaggaatttacaagagtgatatcagagcacgattcttggaggatccaagactcaatattgaagctgccaagaatcaagaaaggttgatcaatggcttcttcatcaaccagatttgatctagagagatttgatggatcagtggacttcagtctttcgaaagagaagatgatagcaatcttgatctaccagaaattggattctgcactagaagaaagggtcgaaaaatttgaaaaggaaagagatgcaataaggaagggtgaag

SEQ ID NO: 269651 - DNA, 1075 bp, Cannabis indica
aaacttatgtctaataatccgaattggaagatccattccagtcaagagatttcgtttagaattttgttgatttggattgacaagcttgttaaagtggatattttgatggaagataggcaactcatccattgtaaactcaaaatggtgggttacaaggaggagttttttctcattgcggtctatggaagtaattcattaaacgagaggaaggatctttggaataagcttactagcattgggcacctaaatgctccttggattatacttggagacttcaatgccatgtttgcatacaaagatagaagtgggggtagggaaattagaggcctacaaagatagaagtgggggtaggaaaattagaggccttgaaatctaggatagtcaaacctggcttgctaggggtcaggttgaagagttgaagacttctggctccttttttacttggtctaataaccacgaggagggcagtcgagtgtactcaaagttggatagagttttcactaatgaaagttggttagatcacttcccgaatacagaagccaacttcagatggggggccctcttggatcacagttactgcctaatcaaacacgtcaaggttggtaaccgtgggaccaaacctttccggttttgcaatcattgggtgtttaaagaggatttcagagataatgttgtctctacttgaaagaagcacatggtcacagatctgcattcgttacaccagcaactgtatagggtgaaacacatactgaaaacctgctatgttaagaagaaagaggatatcacaggtcagtacaatgaagcccgagacaaatttatcgaagctcaagaagccttggccatcaacctgaaatgtcattcagctgttttaactgaaaaaatgagccgtgcgaactaccaagatgcccaaaaacagtactttagctatttgcatcaaaactctaaagcttgttggttaaagcttggtgatgaaaacacaagctattttcatgctatcatgaaaaagaggagagctgagaacaaagtgttgggttttatgccctaaataaaaatctttacaatctgattagttatc

SEQ ID NO: 269652 - DNA, 676 bp, Cannabis indica
agtgttattaactgtatttattactggaattttggtttaaatttcatttattatgattctacgtcggttgactaaaaattcaggtaacagatataaaacaaaaccatgcataatcataattaattaatcaattgcggtaaaatagaattccatgcagattgatacaatttgaaagcaaatgtaaaattggataaatacccatcaacaacaagataaaagaaaatgtgaacgagtaattaaaagaccactaaagctgaaaacaacgtaaggaatattgttcagtcaattaaaggaataaagccaataaagaatcatatatattttgataagaaaggatattatatacatagctttatttaagtgaattgtctaatgtttctattcattttgttaaacggtcagcaaattgggttgctcatagctttgctagagccagtattttataccctgatcatcgtttcaggttggagtctgttccaactgatttgttacctcttttggtaacgaagtttaatggttaataaagatgaattttccattcaaaaaatatacatagcacactatatatatatagtcactattacaattatatatagctttcatttcacatacaataatactataaattataagaatattttattttaggaaataatatttctatttaaggaaataa

SEQ ID NO: 269653 - DNA, 393 bp, Cannabis indica
gttgcttgcagaactaagaaatgtttcttttcattttgttaaacgttcagcgaacgtagtggctcatgctttggctagagcttctagtttatatcctagatgtactttcagtatgggaaatatcccaactgatctgttatcttgtttggtagcagagtttgaaatttaataaaacttatgaatatttattcaaaaaaaaaatactcatatattaataaatatatatatataaaaaataaatatctagttttaaataaacatttcacaaataataataaaagtcttaagggcttggttattacacaataagtgaagctctaaactctagggttgttcaacaaaatttacaaaccgcccaacccgaataaaccgtctaaaccaaactgaataaac

SEQ ID NO: 269654 - DNA, 720 bp, Cannabis indica
ataaaatagattacattgaaatggatttttatttagggcataaaacccaacaggcttttcgcactaggtatgggcattatgaatttctggttatgtcttatggacgaaccaatgctcctgcaacttttatggatctaatgaattctctaaaataatagaatttaaacacatataaagttaagaaattttacattgattgcatcggaataatatgtctccttccactcagatctctaactcttgttcatttctgtcgtagagtattatcaagatctgagctcaattctcctttaggtgttggattcttcacagtcttacacactatgattgagtacttgacttgctatgggtgggcatgtactctttcattataaggcttgaaatttatgaagaagatgaggaggatattcgaattctatagaaggaggttctcaagtctctagttgtttgacaaagaatgaaaactagaatgactaaggttagatgagaatgagaaccatcttattccttatataggatttctcctaggaatagatttaaattatatggcactaaaaaataataaaaattggctaaaattacacttaagtggccaaccataagatgggcccaactaaattaaaattttgccattttattcaataatttactttttctttcacaaataccatattttctaatttcaaccctttaaatgtaaaaaatatttatttaataatt

SEQ ID NO: 269655 - DNA, 500 bp, Cannabis indica
gaaaaaaaattaaaaaaatattcaaatatgtgagtttgaacacataagttaactataagagattgtaattagcactcctcaaaatatttggagactttttttcatcaaccaaactatagaattggatgattttttttattcaattctaattacactaacaaaacattacatagcactggtaaaaagaaaaaactcttcagcaaaaaacttgcaaagtaaagtattgattgggtaggcaaaagtatagtaataactaataacaacaaaattgaattaacgtacggtatgtaatgatcaaatgtttcgctctgaaaacataataataaatagcacatgcagtacatgtttctttattttttttagtcatatgttcattagggaataaatacatttttttaaattttatttatattttaaggctaatattttttttacaattatataaatttcgcttttcaaaatatagttttaaattttttaaaattacaaaaatttatttt

SEQ ID NO: 269656 - DNA, 584 bp, Cannabis indica
ttgattgtacatatcttaacggtcttcactggacaacctgctggctctcataccaaactaatgcctgtatttgaaatttactaaatttgaaaactaactttaatatattataattacttaattataaagaccgggatcccaagttatgaaacatataagaaactatatttgttattacaaaactccttgtagatttttttttaaacaaatgacaggcaacacaacatacaactcagaatattgaaagaccgaaaccctccaggttgcactgtcgcgatatgtacaatcactgccgagctccatctcattgttcctccagcttcgttttcctttacctatacaaggaagcaaactgatgagtcaacagactcagtaagatatgcataaaatatatataagcaatgcgatatcgactttatgttgaagccgctatgagctctataactaagcctaccaaatggttaagaacgttcttaaggaaagtacgaccactgtaccaaatgcactaaagtaccaaccctgtactcgtgttggtagagccattattgtacccccaaaagttactaaatgttgtaccgcatgca

SEQ ID NO: 269657 - DNA, 690 bp, Cannabis indica
ctctatcatctctatctctcaataatagtgatggtggagccgagctttggactaaacctgctgaaaaactacatcaagattaacatagatgttgtgctttttcagcatgaaaattcctatggttttggaattgtagcgagaaacgatttaggaaagcttattgaagctaaaacttgttacaaagccagtacctattctgttaagagcaaaaattggcaaaaagttgagatagacaccgatagtcttcttgctgttcaggctatccgaagtgatcataatatgtcctctacctttggtttaatcaccaaagactgtcttgagttattgttgtctctaactgatgttaagttacgtttggttaaacgatcagcaaatcaggttgctcatgctgttgctaggcatgcttgattttcctctggttgtagcatttttgagtataatgtctggcctgacttgaaggctctcttgtattcagaatgcttttaattcaatgaagttgatatttcattttcaaaacaaaaaaaacactttatgttggtagatataactaaaacatgagctaaaagtagaacaaaataaacaaggttcacaaaggaatattcatataacacaataataagttcaagtaatagcaatcttatctcaagataccaaacacaccattaatatcaagtctttggacagtaatat

SEQ ID NO: 269658 - DNA, 535 bp, Cannabis indica
aaataaattaatatataatattatttttttatattttaatagttttaattataacactataatatttagtattatatttaagttttattattattgtaatttatttataattgatacattcatatcttattattattattattattattattattattattattaaattataagatttttgaatatgtcgtgccgtagtttttgggcttgtcacgtgtcatgcctttcgggctaatctattcatacttatgtgttgtatacttctcgtgtcgagtcatgcttaatgatatatttttttgtaccatgttgtgctaatttattgcatcctatcgtgtcatgcccaaacttatatttttttgtgcctagccgtgctcgtaccttctaaacttatatcaatttcgtatcatgtcaaaaagtacaacactaattataatctcaattttttttatatgatattgtaactgtttaagataactatgctttttaaaaaattcataataatttgcaatagagaatgtaggagttcaaacaaaat

SEQ ID NO: 269659 - DNA, 666 bp, Cannabis indica
aaaaaaaaaaaaaaaatccataatctcatggtattatttatttatactataaaaaagtaaactcttataatttgtccatatattgtgtaatttctactttaaaaaattgtaaaatagccataagcccaatagtattaagaataattaatttgaacacaatatttattatatttattaatttgaacacaatataatttttccatatattgtgttaatacgtctttattgaatataatcgatatgtttcttgaatatgttatgtcaatgatctcactcccagacattctcgacttgcttcataaagtgcaagtatgttaacatgattcaaagttgtctcgttaaaaatcttattaggaaaatccagtaggacaaaacctgagataaggaaaacagagtgcaatatatatttcatattcgtaattatttgcaagttgccttattaaaaatcttatcaggaaaatctagtgggaaaaaacatgagctaagagaaaaagagtgcaacatgaatatgtctttccctcatgcacatatgatccataattattttaattggttataatatatctcataaaattattgttatcacttttaaaatatcaccatatattatctatgatcatatattttctataactcttccagagtatgtgtggacttctaaattat

SEQ ID NO: 269660 - DNA, 585 bp, Cannabis indica
ttccaaattaaaacataacagaaaatcatctccttcgatctctctctccctaatctctgcgatttctctccacaattctctgtgaaattcactctcataatagcacgaaaggctatagagattgaacaatacacaattgcatctgcaaatcgatctcaaacggaagcatcatgcgccgaaaatcgatctcagaaccaagaattttcatcgactgaagacagagcttcagcaacgatcatcgacctccaatcgtcttcaggtaagttcttcaattgcttttgatactcttccttatctttagaacctgaaaaatgattgctaataaaaatcaaaaacgaaatactgaaaaaacaaaccaaaactggaataataattgtcaataatacacattacaggtatataagcattactggtatataaacattacacggtattttaatgaacatatattaaaaaaaaaatcggttaaaacaataaacaaaatcaaggtcaaccgtatgaatcacatacataacatgcaaaataaatatataccagtacaaaaataaccagttaaaaaactaacttagacaataaaacataaaa

SEQ ID NO: 269661 - DNA, 595 bp, Cannabis indica
tatgtcatttagtgattttcataattttccatttccggtgcccggtaacatggaactcgatgtttggcctagtaaaatcacaacttagcatgatagtattcggggacggttgttgttaatttctgtggctagaacttgatttaaaatgttgattcaagcatgatagggttggtgattagttggatttatcaagagatgaaaattttactcaaagctatggcttttcaaagtgaaattgttcgttttgttgctgtgtttgttgggctcgatttcctgggtttacagaggttatattatgcaggtttaagtaggtttgaactgatttgaatgcatgatagtgctgtctaatcaagtttgagtttggaactcaaagctttatgctttaatggtgatttcggattgtttgcatgaagctcggttttgatgctttagaaatgttccttagggtctaaatagcagtctggaaggttttgtttgaattggatttgatttgagcaagttatgaatttttgggagtttcctgcatggaactggaattccggttgtgcatccggaattccagatgagggttcaggatttcccagaaccggaattc

SEQ ID NO: 269662 - DNA, 725 bp, Cannabis indica
ctggccggagctgacaacgagccctccctgaagctgttgatggaaagaattcttaaggagttcatgagggtgagtcttcctggcagtttcctttaatccttatttacttggctcaaattctaacgttttttctttgtgtagactggtctgaagatggcttacacttattctcgagctaagtctactgcttccaagaacactgccatgtccaacaccatgagggtgaaactagacttggctaggaaggacgttgatgaagccagggtttaactcggagccatccaaatggaactgggtgaagtcaacaaaaagattcttgctgccgagaagaaggtggccgagctgaccgatgatttagaggtttctcaccaacttgaggctgccatgacctccttgtccaaagaagtgaccgacctccaggaagaaagggaggttcttcgaactatcttttgtaggttggaagcagagaagaagtccaaggaggaggagctgaacgctgaagtagagaggctcaaagggaaggtgaatgccttagagacaactggtctcgagattttctactacttttggaaggctaatcttcaggcgaattttgactacctgggcgatgccaaagacatgtatctcgagtactctgcttcccaagtggcctatggagagtccgaggcaaccgcttctactttcgttcagaacgttgacatgcccccgcccagacaacagatcct

SEQ ID NO: 269663 - DNA, 747 bp, Cannabis indica
atttactttttttttatatatagtacaatactataaataaaaaataaaattataactatttaagtactaaaaacacaaaggaattattacatggaaaatacaaattgacactttattaaaaatacttctataatgtgtggacaatatttataccttttatgtacttttaatcactaaaatacctcttacactattacttaaacaatcagacgatggttgttgggtggttactgggtagttggccgaaagttacatcagacaaatgtttcaatcagatgaaataattgttagtaaaatgtttatgcaactgttatgaaacattaaaaatcagaatagtgtttccacgtgcgtaactctatcaacatgtctcttcatgatttaatatgaacaaattcaccattagaaatttggaaaacgacaaaaatatactaggataaacattttactataatattgatgtaattttttttggattatatttaagttggattatttgggaactccaattcaactttttgagatcttcatttcatgaattagaaaattaaagtctggacattagttttatgcaaattaaattggatttccagttgaattttagtttcgtagtatttttttctacacttttttttttccatgaattggaaacagcccctgtttagattgattctggttgtcttctcaggtggagtcgctagatttaatggtggttctccttctagttgaattttcgtttcgattgtgttg

SEQ ID NO: 269664 - DNA, 640 bp, Cannabis indica
cattctaagttctgttggcgatatgtgaggtatatgtgaaaacctttgacacttatcacatttcttgacaaactcatatgtgtccttgttgattgttggcaagtaatatccttatctaatgattttttagactgactttgccaacccgcatgatccccacagaagccttcatgaatttctctaatgattttgtttgcttctgcatacacaccaaagtaggggcattgaataccctcttctatatagtttgccttcgatcattgtgtagcgaggcactgtatacaatagttttcgcgtctcgtttttgtcatttggaagttgcccgtcgagttaatatttgataataggtgtcatccacgtaggagagctatctatcatcttgatgtcttcggtttcacagatactaggctcgctcagaatctctaccgaaactagattgagttcatccggtcattctgcgaggccagttttgctaaggcatctgcattggagttttgttctctcagaatttgtacgattttaaagtaatcgaatctttccaagttcttctgaactttctctaaatacctcgccattttaagcctctggcgtggtattccccaaggacctggttcaatatcagctgcgaatcactatgaca

SEQ ID NO: 269665 - DNA, 940 bp, Cannabis indica
taagcctaaatgaccattttaactacccttacctaagcctaacactacaagcctagaaagatcttcggattcttagttgtccattgatttatattagtggagaatagtaggtattgtaagtatatggaatattttgggttagtggattgatggttaaaattggcatgcataaagtggttcaattgttagttaattgcgttctatggttttgtgagctgaatgaaaataaattgaagtgtgtcaagggcgtaattaaattgaaattctggattgttatgcataagtgaaaattttcataatcatgttactgagtctacttgaaaatcatgttactgagtctacttgaaaattagtcatgttctgagattgacttgtttaacttttatttttcactttagtgttttactcttggatgagtaaatgtttagtttggggaaatttattaggttgtttttagtattatgtttaggttaacttttagtgtgtttttaatttagttctactcttgtttggagcaattttatgtttttatcttttatttttgttgatttaaaatagaagaagattagaaaatatcaaaggaataagatggaaaaaagataaaaagatctcacaaaaagatgatctataaaatagagaaaattgtgccaagaaataaagctgaaacttcaagcctaaattagactatgttttgttcggatttttggagaaagtcaaaacataaaagttctagatctctcttttatctttctggaacatctttaatcgttcaattccaagcaatatcgagagagttatggccaaaatactattagtcgacgcagcaaaaaactcactgcccaaataaagggggtcatgccgcggcgcatgatgagcatgtcgcggcccaccccatctaatcccaagaagaatagatttttttcagcgttttgtatctttt

SEQ ID NO: 269666 - DNA, 585 bp, Cannabis indica
tgataatttccgtgagttttacttaaattcaattacaacaacatacacataaatgacatattttttttaaaaaaggaaaacacataccttccggacacataaaaggcatacacttccacgttagtgggaaatgctaaaactatatgattctagtagtaattcataataattaaaggggtaaatactattttggacttcgtattttacaaaagctattaattggatcttttgttttgttaaatgataaaatagactctatattttccaaaatagtacaataggatcctcaactgattttttgtcaaaataaaatttaataataatctgatctaaagttgttataaaaaaactgtttacattttttgtatctgttcgtattaggaattgtcttcaattggtttatattaaaaaaaattgtcaaaaattaagctcaaagttctatttttaccatttcagaaaatataaggtctattttgtcatttaataaaacaaagagtccaatcgataacttttacgaaatacagggcctaaaatagtatttaccctacttaaaatattgatattagatataggtagttttttttt

SEQ ID NO: 269667 - DNA, 682 bp, Cannabis indica
cattgcaaaccgtatcgttttggttagtctccctgggaatacagctgcggtaaccttgatagcgagctaaagcttttcctatttcttttcaaggttgataatgtaaatatcgtcgcttttactctggaaacctaacaccctatccgacactcacagtttttggtgacgaggtaatctttttcgtgtgcatgtcctcctatggcgaggtggacgcctcgctatcacttgcttttgttcatctgtctattatacttagtttatatactatattttatatgctaagtgtcttcacagtcattatatctcatccatgtaatcgaggttggtgcctcttcttatacacctgaagttacatggtttctcgttgatgcacaaggcaatagttggtatatctttaccacccataagactattcagtcagccgagttataaatgtactttgtcaattatgctttagcgagttattccacctcaaatgtaattataattatgtgcacttgttcatactcttcctagcttgacaagtgttttcctctgatgtgttagctgaatttcgggtataacaataatcaaattatagacttggatccaactgttagcacacccagaattaacactataagaaaaataatatttgatcctaaaagcttagattctgttattgtataacatattctcaacc

SEQ ID NO: 269668 - DNA, 639 bp, Cannabis indica
atagtaaaaataaatatatactttacttttttttttattgactgtaatatgacttgaatgttgaagcatatcacgaatgtatgttagtacatatatagtaaccacattcgtaattgtatgcttgttttgaacaaacaaagggatatatttgcggtccctttgggccaaatacaatagtatttgaactaataattgcatatgtactcttaaagatattaaaaaaattataagttaagcatttagaatttaataattgatgattatattagaatgaatagcttaaagttctaaacttacgtatttatcatcttagcaatgattgtcaggattttagatttaagcgggtttaagaatacaactcttctcgatgtcattgctataatcaacccagtgcttgctgaaaaaagtgacaatgttatattaatataaaaataaatattatagcgaaagtgaaatagaggtgtgattcttaccctatgttccatggtgtaaaaaaatattatcctacttgagtcatagtgtttaaccacaatgataattgattgatggctatcaccttgtcctgctgattattataactaagaagctcgacatcataaaacttgtatctctttttgtctttgatttaaattttcccaa

SEQ ID NO: 269669 - DNA, 634 bp, Cannabis indica
accacttgagcagctagccttaagttaattgtaatttaagactttccaattcataaaaagacaaaagatgggcatgaggcatctaacaccaagaaaaaaaattaaagcacgcatatgttaggaacatacttgtccaagaagcaaatcacgcacatatgcacccattgtggtcattcgtccactggatccaggagagaattcctgaaaaacattagcacgaaccttaagtatcagcaaataattcttaaaagataataccaagaatttaatggattgacttttggaaaggaagggtacttgtgctaatgggagcacatcgacatagctaaaattttcaaattactaactagtagtactaaaataggagcagcagcaacaacaagaactaacaatgagaattaaattaatcaacataatactaaccactaaatagataaaatttccctagagtagtagctagagaaagttgtatactatacaaggagatttcttcaaactttagatttcctttgtcaaatacatcaacctttcctaaactcactagaaatattgacgagacctaaagtatattcaatttcacagtcctaacttaaatagtgcttgttttagcactcatataaattaaccatataat

SEQ ID NO: 269670 - DNA, 556 bp, Cannabis indica
tgcatcatcaactttaacttcttgattatcatcctgaaaaaataaaaaataaaacaaaacaaattaataaaacacaaacaaacacaaaaaaccgattttagataacatactcaaaatcaggaactaacatataaaagataaaaaccaattttcgtggaacaaaataaaatgagtaaacaacaatgaaacataaaataaatgcaaaactaaattcagtaaaatttaaaacatactttaagtttctggggagattttcttgttggtgctttgatgggaatatcttcatcaacagtagcagccttaaacaaaacaacaacaaaccagtttcatccaaaaaaataaataaaggaaaaaaatgaataaacaacaaaaaacagattcaataaaaatatagaacatactttggatttacgaggagatttcctcttttcaacttgaacaggttttcttcttcaacagaaggatcctaataaaaaaattaaaaccagtttcatgaaacaacaaacacaaaattaaaaaccgaatttcattataaacataaacatactttagcttt

SEQ ID NO: 269671 - DNA, 1017 bp, Cannabis indica
tgagattgtacatgtcaagcagcgtgacttcgagtgttcggtctcgggacatctgggaattgtattttggtagtcgctgtgggacatgtaatacgtatattttggaatgttaacttttaaaagtttgaaaacgggatcccgacacttgtaaatatattagtatattataaagtttaataattaatataaattttttaatttgacacgtttttcaagaaaattctttgattagcaaagattgcactgtaattgaaaaagcactgtagcgtgccttaacattagggcgttacactgtaggacacccaggatgagcttgtatggccgacaagggtttgagaacaagccggccggccaaaaggtgactttcaaagcaagggagggtctgttcgactaaggaagcttgacctttacaaggaaaagatgtacaaagacttgcctccacctacaaatgctagcctccaactgcaaaggctggcctccacttgccaaagctggcaggaacatgacttgcaagatcctagcaagcacatggctggccaaccctgacaggcacatggccatccagaccttggcaggcacatggcccgccagaacctggcacgagcatggccgaccaaacctcaacctgcagacattgtatggtcgactagcctggatcctgtaagtgcatggccaaccaacttttgcctagtaggacattgatgcagccctcatttgtggacagcaagtcaagcaatggaatgggccttaacagccacaaaaatagagcaaaaatatctatttttgagggtcaatttagtcatttgtatttattaattaaatatgtaaataacaactttctttacccatttctaagaatattaggcatgtaagctctactatataaaaagcattagcctatctctaaaaccctaagtcattaagcctctaagctccctaatctctcctctttaagtctaaaaccctaatcttctctcatcctctctactacacacccaaagggctctctctctctct

SEQ ID NO: 269672 - DNA, 1498 bp, Cannabis indica
ttgtaaatgtttttgggatcccaacttttgtaacttttagtttataaagtttaaaatattacaagtctatttccattcctaatgttattaaagtttaaattctgcgctaattttattagtaatcccgtttaggggattagggtttcataagtatcttgagtagcatgcctaattatttagggcgttacaatgatcaagatctgaacctggattctccttcggttattggaattctacacaatcttccacactatctttagtattgatttgaattgtctaggcaactcctcaatcactatagggcacgaaaatttgagggagagaagaagagggtttcgaatattacgttactcttttctattttctaattgtttggcaaaaggagtctaatcatgttatgaaaataagagcttataatatctatatataaagaagtatgaggcggtgacatgacattctaaaatcacttcaaaactatttttctcttctctccttaaatctctcgatttcaatattttattaaagcataaatctacaaattgatattttactattattttaataatttttctatatataaaaaaagtataaatctataaattgatattttactattgttttaataaattttctataaaaatataaaatattttaaaaaaattagatattttactattattttaataatttttctataaaaatataaaatattttaaaaaaaaagtttgaaaataaaaaataaattccaaaaaaaatttatttaaacttaaatcaaataattaatcgtatatttcgtttatatacatacataaaatatcaatcaatatatataccttaatatttttggattttttttaaaaaaaatataataataataataataataatataaaaataataactctaatgtgttcatttttggccttttttaaaaaaaaaaattaagatataataataataattaattgtacgtgatacttgaaataatatttcaattgctttttatcacgtttaaatttattattaaaaatattaattaatttttaataaaagtgtactttatatctttttttgaaatgattactttaatgtcaagtatcacataattataactaaagagcattgctattgggcatttgtggtgcccaacacctttcatatgtggcactctacgattggttagtgatatttcctaatcttatttttttaagttatatgggacctgctacttaattacaccaatagtggtatgtgttaacgcagattttcattaactatatttgagtctcacgataatgattgcacacagaaaaagaaaaacctatagaaaattaatatatgaacacagggttttttacgtgattttgaagttaaaattttgcatagtccaggagtcaatcttattcagatttctgattgtgtggttttttagggcctctcttgtatgagttttttcatccccttcttcatcttgcctaccaatatttataattacata

SEQ ID NO: 269673 - DNA, 581 bp, Cannabis indica
tttaatttgtgtctcaaattaatattgtagctgaactcttattgtatagaatgtaatcactagaaaatattgatcttattattctaataagtcatcttaaggatgaaccaaaatactctttaaagagcaaattgttcaacatgtatgttatttagaaattgtaagtgattactaaataacatgacttattagaattttattaatgacttatggatgattaatgattaattatggattctcaataaccattcaaattaaaggttattgtgaatcataattaatcttatacttgaggtgtaagtttgaatgtttgagaaaataaatgatcttttctaaagaaactagatttctagatcgatcgctcccactaatcaagtcaattcttaattccacagttctagtattgtgagatagataataaaatatgtaacccttagaccttatagcttttatgatgaaatgctcatttatggtatttgggtctagatctttttttttacaattgtactctaactatgtacatgtatttataaaatgtgtacatgtcatcaagtcggttttcaaccttatcacaactcaaa

SEQ ID NO: 269674 - DNA, 1567 bp, Cannabis indica
tacaaagaaaacaacgcgtctggctgacgcatctgaccctcaagttgctcagcccgccacttttcccagcgccaaacaagatccagccatttagatggagggggatcatgaagggaacgctgaggtccaggagatcgaggagcaggacgatgttgaatccccaaactacggggagtacaacaaggctagggagccagtcgatgctgacggagatatcctggttgagggcgtggactatgtcagtgaggaacttgctactgcggttccttatagaaggcaaggtgccttgggtgccaggtgggtaagccctcagtccagggttactgaggcacgctttcagactttcgaccaagacggatacttactggattggtacattcccgcccacaacaatcgtgccacaaaccctaaaaaggggatgtgctccaggtcgagtgcccatggtcaacaaggggcattgatgcctttgcctcaatacttcaagaatgtggcagacttcttcggcctctgcctggcccagttcactactaagggcatcaaatatttgtctgctctcttcgtcctctacgctttcaagaaatggggtatgccttctcctcacgaagtttcctggttctttgatttgaagtccacccccaagcaaggcaggtcggggtacttctaactctctcaactaggctttaagtggttgacgggcacagacgactcggccatcagcaagattgggcgctttgttgatgagtacttcatggtggatggcacgggcatcattcgctctcggttccagtagattccaacatatcaccgccctcccctcactcttgctctcaaggatagagctcaaaagcttgctcgactaccgggggaagaaaaggaaatctcgtgctggacgggccgaacgagctcattcagagaatgagttgattcaactaaagcgtgaggctaagttgaagggaggtgcaaaggccaagcagtatgctcaggagcccttgaatcctgaagatgaggctgaggaagagcaggtgactctactgaagaggaagaagaaacttcgggccctgcctaggcctgttgaaaatgccttcgcataagggagcccatttcacctgctcggccgtccttgttggaaatattttaccaggatctagatttactactaagtatgtttcattaacatcctaatatgaattctaaaacaatgaaataaacacataagagtttgagaaaaccatacattgggtgcagcggaatataatgactccttccatttagatctctagcccttgattccaatctgtaacaacgcattatcaagatttgaatcgggatctctttctcttcttctttgatgatgattctccacagtcttacacactatgattgagataccacttgatgtgtgtgggaactactctattactgaaggatttcgaaattgaagagaggaaaagagagagagggtggtgcatagctttttctgaaaggaacaatatgcaaagtcatagtttcctgaagccaacactttctatttatagaatgcgaactaggtttaggttagaattgtatg

SEQ ID NO: 269675 - DNA, 855 bp, Cannabis indica
taattttcttttaaaatctaatcatatttaaaaaaaattattaaaatgtgatcaaatgatttgtttttaatatttttttattttatgaaacacaatttttttttcttttgatatttgaaaaggtatgcgaactaaatacttctatttatgatgagaagtataaaattacgaaactacatttacaatctatgatcatataaaatttaaattagtcatgatgcaaaatatagtattcaaaattgttattcgtgtttttgatagggtgacacgtgtcgtttcaaaagtatgattaattcgggatggcttggactaatgcccttccatgagaaggcccagtccaaaggaaagatgggtttgaactattttgaatcctagaaggctcgccttcgaaggcgagactcatccgaactcagaaggtcccatccaatccttctcaagacgaaataaataaagccctctaaatgaatgtttggatgcatctgaagaaggtattccaaaaggcgccttcggaagccctttgtaaggtggcatggctgccctcaaacgtctggtcccactatatcagatcttgtctcctatctcaaaacatggtagtacgcgcaccaccaaagaaaaacctcccttttcgtctaacgacgcgtatctaataatacagtacacaagcacatcatctgtcccaaaccgtgtggccccaaactgtacggatatctttaccccacgagccaaaatactgtcagtggacctaaaagttatgtatttcatgtatttaccccaatagtgggcctagtttgtatgggtcacgggtatgcctagtgagccaaagtactaaggtagcgtttggttagaggtaatgaa

SEQ ID NO: 269676 - DNA, 610 bp, Cannabis indica
tactcaacagattaaaagaacggttatgtttgagaaaagtcagaactcaagaagtcaaatattttctcgagttagggcaaaaaagttcatgaagcttagaataagcaagatgaaagatagacgttacgcaattcagaaacaaacattatgactgtaaaatcgcacgaagacatgataaagaagaatcgtagaggtttctgaacctagggtttcctaaacatttttctacagcaaatgagagggtgcatttgacatataaacatgcaaagataagcataaaggaaacaagaaacttactcgagagtcaaatgtttggcttcgagcaacgtcaatccaacaagcagttttataggaaggcgcttcggcaactttgaagccaagaatctctcttttcgctctgaagcttacttagcaaagaagggtgatcaaaatgagtttatgtgccaatgatgtttgatatttataggcaagtcacaaaaagaggtaaacatctcaaaggaacctcagatgcctcagtttccctcctcaaaagaaaatatggtaaatcaaaaatgatcaagtgcagccatcagccatggagagagaaaattggatttcaaaatattaattg

SEQ ID NO: 269677 - DNA, 649 bp, Cannabis indica
ttataaaaacacatgtaatttttttgttccattctaatatttttcacaaaatcattatctttctctatattttaaaaataacaaattatgtttctaatttcaaaatattatattttagattatatcacttgataagtacaatatatatgtatgaaaagattataaaatttggcggcaacaccgcgcaacgcgcggcttagttccctagtataattataattatatatatgcattttttgtaattacattattgagttcctaaattaaatttttacctcttaagtgagtatagcataaactgtagcgtgtatatgtttagtttataaaaagtcttgatgtacattcttacagttatagtagtaaaatgtatgcattttgtcccttgattattatgggatccatatctttgctttttgtgaaccccgttgttgatttgccctagaaatccttctctagtccaattaatataaggtttttcttttattttcaaaaaaaataatataaggtttttcttttaataaaattattgtaccatttaattaaagcttttgtggctcaaaatttagggagaaggaaatcaacccaacgttaagttcattcccagagatactcttaacagataggacaatagttagtttttttttttttt

SEQ ID NO: 269678 - DNA, 498 bp, Cannabis indica
ggtacaattgcgcaccaagcatctgcatgtgagctctccatgccctatttggcaaagtgaagatgagactatcctttatagactggtctcttctcctgaatctacactttgttggaatcgggtgggaataggcactagtagtacgcctgataacacttttcttgactggtgtattatttcgtttaaggctttggatgtggaaaaacgttgtgtcttagccatgatttgttgggctatttgggaagctaggaatgacttggtgtggaacaaaaggtaacgcgggttggtgacattgttgcttcagtaaatagatatcttgatcaatggagacatgctcaaaactctactctagaggtatcatggcctggtattcaggcgggtgatggggctgagcattggattttaccacaggttaatagtatcaagatcaatgtggatacaactatgtttgagagggagaatggctttggattttgcatggtggctcgagattcaaac

SEQ ID NO: 269679 - DNA, 586 bp, Cannabis indica
cttccccaggcgatgtgggattgcacagcttacccggtatttccccttacggatcacgggactactgactgtcacactcatagaacaagctctttatgaggtctatcaagtcatcaacaagcacactcacactcaatcattaggtgggagactaggtattttgaagagtcttccattctcatcactaaggtagttggtaatggagcatacaaactccaaacaaatgaaagacacgacatcaacagtagctggtaacattgttcatgttaagcagtatcacacttaaaattccaaactactgttctgttctctttacatttattttgtttaacggtctcatgagacccactcttctccacacactacttctaacaaatactcactcataaaaggggaatatatgcagctttatcgagtgcagtcccttatcataaccattttttcctctttttaagaatgacattcagtgagaaagtacgtgaggaagtttgagaaagttgtacagagaaggataacagagcatatcttcagtcccgtttcattattccttttcaagaaaaaacgtctctgaagcttaagtattacc

SEQ ID NO: 269680 - DNA, 1818 bp, Cannabis indica
actcgggacccgaacctgaaccctgacacgaacatggaccaagacccagacccaggactcggactgagattggagactcagacctggacctagtactagagctagattggggacccaaactcaaaattagaaccagaatcgggacccaggattgggattgggacccaagacccaaccccggtctcggtcccaaacccagatcccaacacggactaggatccaggatccgaatcgaaacgagacggagacccaagattgggatgcggattttgaaccacgacctagggttggacccaacccgtagttggtgtctagatcttggaatcgtaccaggaccctaacctagaataatttgtagacccggacccaaacctagactcaaacccgagacccaaaatcgaaacaagaaccttaataaggaccttggaacaagaattggacctggacccaaaactagctctagatgcgaacccggaccaagacttgcgccaggacgtgcgacctaggacccgtgactcgggacctggaccagatgccaaacccgtacaagaacccaaacccaaacccagacccaaactcaaacgaagacccgaatccaaccactaactgaaacctggacccagaccgagactcggactcataccagaactctgacttgaaactgggactcagacccaaaccaagattaggattgggacccagacttggacaaaaaccgtgacctgaacttggactaggactagaacccacactgggaccgcgattgggaattgggaacgggaccaggacctgatacttagacctgggatctaagaaccaaaccgtgacccagacccagaccaggccatgactggagagaatgaccagtaccgaacaaggactgggacctacactcgggtgggacgctaacccagactgagacctagcaccctgacctgaattggggatccaaacccatgactcaggacccaagaccgaaacctagacccaaacctggacctaagacccgaaccaggacccaagacatgagctagaactagactaggatctagatttgtactctagacaggacccaaggcttgaggcttggacccaacccatagtcggtgtctaaatctcagaattggaccttaacccgaacccagacccggaccagaaccagaacttaaactagactcgacatcttgttggtgtttggatttgggaccaagactcggacctgaacccaaacacggacctagagcatgactaggtctcagaccgagacccacacccgaaccttaaatcatacccttaaaaccaaaactctaaaccttaaaccctaaatcctaaactgatccctaaaccctaaacactaaacccaaaaccctaaaaccctaaatacccataccgagatcggaacccaagaccaagacccagacccagatcttgtcctgaacctagacccaaagtcaagacctgaacccgaacccaaacccagaccacaacgttgtccggcacctagaccttgactgggacacagatcgggacctcgatgccgacccaaacagggacttggactcagagcggcacctgggaccaaactccaaactgaacacgtactgggacctagacttagacccaaacttggggtccaaacccgaacctgaacttggacctaggccgagacctaggatccggacctagataggggacttgggccccaaacctgaaccttgacgaagacctggaccaaggatcgggacatagatgggggactttaacaaaaattaggtttcagaactgggaccgagataaaaaactgaaccctagactcga

SEQ ID NO: 269681 - DNA, 1231 bp, Cannabis indica
gatatgtactgttatgtatatatattttcctttttgatttcatgtagagcagatctcaaatattttgttaattcgtaccaaaatccagtttatgtttttcttcttcttgatttgctaatgattttaagtaatatataaaggtaaaaaaaaatattttatgaaaggatattattggtaatttgtctatggatcaagtaataataagtaattaaacttggattttcacttgttagagtgcactagttaatttggtaactaagcctttagagggtgtgttttcaactcattttataaaaaggaaagttaaaagatgtcaaaatactcgtctcgtttgaaattgacatttagaggcgattttttgataaaaaccatagatatagaatttaattataccctatgtcgtcggttgggggttgggcaatattcaggattttttattagccctatgtcgtcagttattaagtattaatcgacgccataggtgcacttgttacacgacacgtgtgcacctatgacgtcggttaatacctaataaccgacgccatagggttatataaaagaacccacagcttcgtctttctcatttcaccaacttgttcagcaagaacaaccagaccagaaaacccattagaaacccttgtcaactagtggaaaattccccttatctccctcatttcttcaccatttcacttcatttttgttttaaaatcttttattttcaatatctaatcctatacactattttttgttttgttttttcacccatttttactgtacccgatcctattaaaataaaaggtggtggtataactttggccaccgattttagcggagaaaacgttgaatctcaatgtccattaaggtataaatatgatttctattcattttactaatgtacattgctatatttttgtttttgtaaattttttctgggatttttccattttattaatattatgttgtgtgtgtgtgtgctataagtggtcggatttttgccgcaatttatcggcggattgcgtttataaggtaaatatttattaacttgatatataatatatatgtatatattttgtgttttattattgaatatgtgtttatatatattgtgtatatactatatgtgtaaattgtgtaattgtattgtatatatatttgttgtgaatgagaatgagatagtagggatttaattagttcagaaataaaatttgtaaaattatgttagtgtgatata

SEQ ID NO: 269682 - DNA, 661 bp, Cannabis indica
aaataaagtttaattataatccgattacaaaagtgctaattacaaaactgtttacatttattgtatttgtcgtattagcattgtcttcaagttagttgtattaaaaaaagttgtcaaaaattaagcttagggtcctattttactattttagaaatacaaggtccattttgtcatttaacaaaacacagggtctaatctgtaacttctgcaaaacacagagtctaaaatggtatttaccctaaattttatgatagtatatttctcatattatattcatattgagatatgtgacatgtcacaccactttggatttttctcttttctttttcttttcaatttgaataataatggagtattagtaattaataccattgttctagtgtggggcttttgatattcaataattgatgctctagaaatggcttcaagcacaaaagccactcacatgatatttattgtaacaataccatacattgaattgacacttatttcacattaaaaacaaaaaattaagtttgtattttttattttattttcttttattgtttggaaatttctttaaggtgatccgagtaaatgagaatcatgacaaatttacactatatttggtatggtggaaagaaaatatagaaaagatattatattttgtttataattgttt

SEQ ID NO: 269683 - DNA, 674 bp, Cannabis indica
cttttatttctgttattacatctttgtattaaccagctacttataatcaggcttctcaatacaagatttggaaccaagccatgcaaaagagttgtttgccttactcaaaaataagacttggacctatgtcaagttaccacctaacaagaaagttattggatgtcgttgagtgtataaaatcaagctcaagagtaatggtactatagaaagacataaagcctgtctcgttgctcaaggctacactcaacaagaaggcatagacttgttcgacactttttcaccagttgctaagatggtgactttcaagttaccgctggctaattctaccgtcaaaaaatggcacactttgcaactcgatattaacaacgcctttctaaattgagacctctatgaggaggtatatatgcaacttctcaaaggactgactttacccctgaaattgacaccaactccaacatagtatgcaaattaaataagtcaatttatggactcaaaaaatcatcacgacaatggtatagaaaactttctgatgccttaattcaagaaggttttactctatcccaagtcgattatactttattcaccaaaggatctcaagacaatttcattgttctccatgtctatgtggacgatataatcataattggacctaacttgtcctcattaaatcagtt

SEQ ID NO: 269684 - DNA, 548 bp, Cannabis indica
tccataccaacttcacaaataaaaagctataacattagagagaaaagaaacaccaactaaagctttaattcacatcaaaagaagcatcaaaaaaccaacttatactatatacaacataggctccaaactagagcaagattcaccaaaatcccaacttcaagagcttaaacacctaacaaaaatacttagctcacatcaacaaaaaaattcaaagttgcataacagattagaaacaccaataaaatccttaaaattccatttaaaacttaatccaaaacaataaccaaagattatcaacacaactaagcacaaagcatcaatattaagctaatcttccacatacatgcatacaagaactccaacaccaaaaagcatgctttaccaacttaaattctaggaataaaacttaagattaaagttgtagaaagctacctcaagtttaaagtaaagatcaaccctagcacctccaactgccaagcttgaattccaacacaaactcaagcaaaacaacaaattgaagagatggatttagagagagagagagagag

SEQ ID NO: 269685 - DNA, 223 bp, Cannabis indica
gtcacgatatgtgcaatcataatcaaagataagctcaactcacggttcagtaagcctctattgctttagtagtttgtttattagtacgttataagaaaagcctgttaagaagcatgttagtatcctgataactgaatagacacatgttttatttttttcaagtaagcagtaattagaatttaatcttgatcgtgatctgaccaggctgttggaaatattttac

SEQ ID NO: 269686 - DNA, 904 bp, Cannabis indica
gaattttctatgtaattattaatctaataatccaaacgttactataagacatgatttgcacaaattattagtattgtatttattttaaataatgttccaagagaaattttagagaatttttgttaccttaaaattttcttgtctttcccatattatatgatcttgttgagagtaacttttctcttccattgtagtttgctttagttggtttgatggaattccctatatcaaaagaagaagaaaaaaatattagtttttataaattactctctttcaatgaattgatcatatatttttcaatcaaaaaaaaaaaaaaaaaatgaagtgtcattcgtcaaaaaataataataataataaaaaaaaaaatcttaaaataacaagattaataagtaataaaaaatggtagtgttataattttgcttaatcaagttattgaattaattaattcaaattttaagttgtatcaataagaaattttccaatctagttttctttacaaggcataagcaaagtagcatatatatgatcaatccattttcatttgtaattataaagtcatgagcttaatgtgtagagaaaactagaattattactttggtttaatttgttattgcttttggggtatatatgttatacttaatataactcactcattacttcactctcttaaagttaattaattctctttcactaataaatgaagaattcatgaatgaattaaataagaaagaagaagaagaacattttagttaccatcaagatttcatgaaggatgccttttttgtttccatacttaattactacttcaacttcaacacacactcaaatattagtaacttttttctttttctaattaatatttaacacctatgatttatctatatataccatatcattaatataa

SEQ ID NO: 269687 - DNA, 365 bp, Cannabis indica
acatcaaaggaagttcaagacttcattgtgaagaacataatctagccggttcgaactgccgtacaaaatagtttcagataatggcaagcagttcgacagccaatccttcactgccttttgtgaaaaccacggtatcatcaaaagtttctacacagtggtgcatcctcaagcaaatggtcaagtttgaagcagtcaacaagaccttgaaggatacactgaagaaaaaactcaaagatgccaaaggaaattggccaggagaactacctgaagttctatggtcatatcagaaaactgagaaatcgagagccggacaaactccatttgctatggcatatggatatgaagctattgtgggttttgtgccc

SEQ ID NO: 269688 - DNA, 1110 bp, Cannabis indica
cttttgactgacgtgactcttcacagtgtacccgtcattagacttaagtgatcatagctttgtaggtgcagattgggggttgtgtcgtcagactttgttgtgtgtggcagttccaacacgtttcctcccatgcggcattaaatgcgagatgactactcagaggaagcctgacatctcccggacatgctttgatactgcttaggcctccgggagcatagaggacttcgtatgccttctccgggaggcagatcccagatgacgcctttcttcccaaagacttagccattaatttgaatgttaaaatctttgtgtccacgtgtccctgtgtggttggtccacgtatattgggcaaaaccatgggcaacatttacccccgaagccttgtttaattgaaaaatgaacaagccttgttcaaatgcctccggttggctcctcagtttcatggcatgtgcttcgggcacgtgaaggtgtatttaatgatcatcattactgcagcgattcactttttacaggcgttgattcgtttcatgcccattaattgatacggcgcattaatgggtgtcagacgaatactcaaacgtttccaccgccttcattacaaatcaatctagccgttggatcttgggaatttgaatcgtgcgccaccccagccgttcaattggtaggtgattgcgcttgttccacatgcaccttggcctataaaagccaccatccttccttcatttggttactttcatcctttcaccaaatttcttcgaatgctccagagagaaagaaaaccctcaaactagaaaaccttcaaacactataggtttcttactaaccttcattcgttactgtcagtcaacatttcttcgtcgatcaacaacaactcccagttctaacactttacgtaaagttttcgcatcccttactttatcgtttgtgttcatggcatgctttattgttcatctgcttttttgcgtttaatgttcgaagtttctggaattttttgccttgagtttctgtgtaacacgtttagatttctctttcctggcatttcaatcactcttattttgcacattatatttttccaaaggcccatctattctttatgtgatgaccttcaag

SEQ ID NO: 269689 - DNA, 567 bp, Cannabis indica
gaaaaagaaaaataaggagagaaaacaccagaaatttatttcagagttcacccaaaactgggctacagctccgtcaagctcatctcagagatagaagcttgatatccactaccacaatgtcgatttacaaggtttggagcttcctgtcacagaaatcgatcaagtaaactcgatttctctcttttacactttatgtttttgttattgtcacttgatttgatctcgatctaactcccttctttgttttcttgtgcatgtacttcctccttcgagctcctcaccatgagaactggtttctcatctctggatcttggagcagaagcctcaatctagggtttatttcttctctctctctctatctcttctctgattgtttttttgtagtagatcttggtttgtttgctttgatttcctgcttttataatgttgtagagtaagttgatcaaagacttaggagttagttactatttcagttgtaactaactactaaatcttgatccactagatgcgaagccacctaggatcgagtccatttgcttgtttttgtttgtatgttgcttatgtgga

SEQ ID NO: 269690 - DNA, 501 bp, Cannabis indica
atacatacatatatatatattcatgtggagcactgaaccgattactctctctctctctctctctctctttaaaatgtcaaagaggactgagctggagtggagactggcacttatgtatgtttcgatttgtttaattttcttaaggggagtttgtgtgtgcatacagtgcatttgccttttgataaaaatgttcatctgatataatacctgaatttgtgcattggctgaattgtgttaattagattattaaatcttcataatctggctttctctttctttctctaccttcctggggattataagcatctaggccataaaaccctttaattaatattaactgtggaaaacgccataggaacaaatctttgagccaattgctcgactcattggtggggataactattgacccaaatctccattttctcttcttccaataaatcgttgaatcactcgttcaaaagggtgtttcccacgactaaccatcatagttaaacaatgtgc

SEQ ID NO: 269691 - DNA, 581 bp, Cannabis indica
attatgtttgtatgttttttttcaatttttttttatcttagagtcgataatatatcaacattccatcgatatattttcgacacggttggtcgactaaatgttgacatactatcgacaacatgtcgataaattctcaaataacctatgaattttaatttgctttctaatcgacatgatatccacaaactgtcgataatggtcatctctgaccttttttagcaggtatcgacatagcatcgatattctatcgataaactgtcgataacatctgaaaaacccagactttgacagaataccagatctgcaagatctctaccatttcagactaaaaaacaccaattctagcaaatacgacacatataacgaaagcaaactacataaagtttaacaaaatgcttaaaccacaacttacccattataatggtgtaagattcttgagtgagattggggtatgctccggttttccaccaccgcctaccgagaaacaaccattcgatagggaagagagagagagggacgagagagggaatttttcagttttttctagagagaaagagtggtacacgagagggaagagagag

SEQ ID NO: 269692 - DNA, 826 bp, Cannabis indica
aattaataggtgatgaaaaaaaaaatacagccatcatggttggtgttcgagatatctcagaatactaacttttgagattgatcaagtactccaagcagtgattgaacttgtttatggttaagatctttataatgccctgatccgcgagggcgccacgtgtgtatacttttagtaattagtttataataataaacttatattttaagaaaatgcggtttaattaagacttttaggaaaaattatttaaattataacttaaactttgttacaaaatactattagtttcggggatccctttaattacaaacttttataaaatactacaaaacaacttattacaatatattgttacattttcaaaacacaacaaaaggaagatcatgtccactaagaacaaaatatggcaggttgatatgtatattgctggaagacctctgactcatggctggtcgagtttcccttttcccttacctggactgcagagcacccgtgagtcaccaaaactcaacaaaaaaagtaggcaaaacataaatatcacatttagcataacattttaataacacaaatcatacattaccacatatagcttaagcagatattcaaagcataatcaaatgttaataaacaaccatttatcttataagacagaacgaactcgatactttataaagcatccttaactcttgttaccaacgagtctctaatgtcactattattgcttaattaagcaactgatcataagtaagaagcttatcagcggtttcaaaagagagtaataactcatttttaacaatggtaattaccgtattttattttgacatgcaaa

SEQ ID NO: 269693 - DNA, 651 bp, Cannabis indica
acaacataccccaatttatcaaatatactaatagagagaaaatttcttttgagatctggaacatacctaacctgctgcaaggtcaacatgacttcatcatgattctttaacaagattgttcccacacctttgatctcacacgctttgttgttcccaagaagaactgcgcccccatgactctctgaaagagtcttaaagagtcttttgtttggtgtcatatgaaatgaacaccctgaatctaggatccaatctccacctgaatctgatctagacatcacaagagcatcagatgacactataagtgcatcagacgacccatagccatcagctacatcaataactccttgctttcatatgattttccctatacggtttagccttcaaagccaaaatctcatctctaaagtggccctccatcttgcaataataacattacctccctacagctccattagggcttggccctcttgtggagtttctagaattagatcttgaatggttacctttgtagccatttgagttctgatttcccttgtattccctcttggggaattttcccttaacaatgagtaatccttccccattgatctcatctttctcatctctcttctctgaatttctttaaatcaatgcagccttaacctctatcat

SEQ ID NO: 269694 - DNA, 606 bp, Cannabis indica
gacccgaaacttaggctaaaaatagcctaacaagtgtattgagtcccacataggataaggacacttaaactatatatacttttgactatatatacttttgtgttataaaaattcttaattaatacttcagtcgtgtaaaagaaattcccataattaacatagtgttcttcgctcgagtgtgtcttctgagtatatttcatatatgaattcacaaattaagaaaaagaaattgagtgatatgttgaaatgacatgttaattaactgtgaaaactaatcttcaaacactcttcttcaaacaatacaacaaaaccacagaaaaaacaaggaataaagtcttgatgttgatacctcaaatctcatagatgatataacaaacaaataagaaaactccttttcaaaatcacaaaaacaatggacaaagaataccggcttgaaaaatggaatctgcaccaagattatctccaagattgaagatggtgttgagagctacaaaatagaaaaaatagaatctgcaccaagattaccaccaagtgtgaagcaacggcaaatgaaaaaaccataatgactggtttggtgttgagagccaaagatgctacgcaatggaa

SEQ ID NO: 269695 - DNA, 362 bp, Cannabis indica
ctggtaaaataattctaacatatacttgttactacaacgactggaattattttctaagtcttcaggattacatctgaatgataccaagtcaactcttttttgttgtgggatggatgagaatgagataaagtgagttattgatgctccaggtattgtccgaagtgaaatgccatttaattattccgaaatgtgctagaagattatcggttttagaatgtgatatttggtggaaaagatgttagagacaatatggggaacttggaatatttcatttggtggtcgtgtgacttttataaatgcggttctcatttccattcattcttattggtctcaaataatggtgttgccaaaaattgtactaa

SEQ ID NO: 269696 - DNA, 743 bp, Cannabis indica
aaaatctcttataaaagtctcaacaatgggtagtgtatttttttcccataatatttataaattatattacaggatatttctcaattattattgccattgtaaaaatgaacataaagttgacttttaagattaaagacagaacattttgacgcatatcacgggtatgagttgtaatgctcaagaaaacaactgcacaagaacctagtttaacttgattcaattaaacttagtgaagtagccaaatattctcttttattgggacaaagtttctcactttatttatattctcttgtgactgaataaaacatattgattcaaacaaagtttgtactgagattagtaaatatagaccactaagaagagaaactgagctgggtccaagtactgattttctaactcaaaaaaactagaagactttataacaattataaaagaattataatgaaaggagaagagaggtgtaagaacgagtatttttattagctacctgtagttaatactattatgcggtaatattttgtgattagttaacgatattctattaaaattattacattaaattatgtagaacccgatactttattgtactactaacagtaaattggatcatgttaggcatcatatatggtgtctaagtaatgaattttccaactcaaaaaactaaaagacattttaacaattataaaaacaataataatgaaaggagaaaagaagtgtaagaagaacatttttactaagtatta

SEQ ID NO: 269697 - DNA, 727 bp, Cannabis indica
ataaaggtgcttatgatatcttttgccagaaatacttttcagtactaaatgcttaagcccgaaaattttaccctgcaagacctattgattttgaaaagaatgttgtcaatattagtggagagaggtaagcatgcaagcatactggctatcggattgtggaatgattggaaagagtaagactattataacattgtttcaattgtgaagtcattttatgtttgtgcattatgtgataagatgagcatcctaattaattgttagagtttttggaattgaaaatctagtttagttaatggaaggaaatttcacatgagccagcagtaatataattatctgattgcttagttaatcgagttttagtgttagtcttagtcttactcaagggcgagtaagaatctagtttggaggaatttgttaggctatttttagcctatgttttgggtcactttttatagttgttttcattctttattattatatttggaatagaattacgcttgttttctttggtttcaggtttcacacttggaatgtataaattgataaaatttcggaaaacaacaatctatagaatagagaaaattctgcaagaaaataaagccgatacttcaagccttaatttgactatgttttaatcagattttagaaaagatcaaaacatagaagttttagatttctttttcttctttccaacgcatcttgaatcaactcatttggagttcttatg

SEQ ID NO: 269698 - DNA, 679 bp, Cannabis indica
caattcataacaatactaattgtattacatacgacatactatgcagtacgttatacttttcttacctcaagttcttgtttaggtatgttggccaacctacttggagttaatgatccaggccctatgtcataacaatgataaactaataagtgtttatcccaaaacactacttaacagttacaaaggatagcttagggtttcctaccaaaccccgtacttcaaacacactaaaatgaaacttatattttggctccaaaacacacaccatatggtagagctcgtcgtaaggttcaaagcggtatgtagaacgtctaaaacaatacccaagtgaaaagttataacaaaaatacgatttcagatctcactggaatttccagaaacggcaggccgtttttgggcacgaaaatctcaaattttgcactcatcgaaatactcctaaaacctatccaaatcattccaaatttcacaggacacatgtataccatatatacaacaatccttacataacataaaataaaatcaagcccttaaatggaaaattccattaaagctcggacctaagctttaaaaagttccaaactcaatttctaactcaaaatcacctcaaattcaacaagtaaacatcgaaactagtcccatgactacccaataataattttataaggtcagaaccttcata

SEQ ID NO: 269699 - DNA, 515 bp, Cannabis indica
tttaaagattttttttttatatttttacggtatttttaaaaacaaacacaaaaaattttaaaaaaaaaattatataaaagtaatagaaaaataatatcaaaacaacaacaaaaaataatatataaataatagaaaatcaacacaaattaataagagtacaacataaaaatacaatacatcaaaatgtcgtattttttaagaactaaaattcatgaaaaattgtacaaatatttaaaatttcgtacaactatttttataagtttttttgttatttttgtgtatttgtgaaataattgtttttttttttcgttctcacttttcagagggctctctcactctttatttaatttcatttttttttaaatggactcactctttatttcattatataaaatttattgttgtcattgtatttctaattgtgtttggttgttctcaaaatattttatatttaaagccttacattagtgacttgaaggatactgattttgtatgtacttagtgaactagttact

SEQ ID NO: 269700 - DNA, 1165 bp, Cannabis indica
aatattcccattctattctttgcttttattgcggctaatattttgttttttagtggatagtgacggttttgtgtagtgggttgataatcgagtcttggagcttctcaaaaatttgtaattagttttaattttggtcttgtgttggttttagttttgatactggattggtggtcaagtcttagagattctaaaatgcatgtaaaatttatatttgtatttgtaaccagtttttttcgttaagaaaccagtttttgattatatacagttaattggtttattaatttatcatcttaataaaattattttaatattccttcaatttattaacaaaaaaaaatcagttgacatcatttttttattctaatattttatttttaaaaaagaaaaaaaacacaattttaaagttttttatggaatttcttcttatatacaatgattttttcccatattcttaagtttttgtaaaaaaagccatattttgtacatttaagtttttatgccacatatatcaaaacttacatttgttttcccatacttttgtaaatagcccaatctactatgcattcactacgtagttggactcgccactcgacccacctgttctttttttaaaaaaataaaataaaaaaataaatataaataaaattcaatctcacggttattatataaaaatattttttttggtattgatgacattttaaatatactagataagtcatttgcaaacatccacttagctcacctattaggttcaaaatgttaaatttgattttgttgagcttctttagttttggatttttgtaatttgtgacgtaaatacttaaatttaatttttagttacagataaatacttaatgtttttgaagcttccataggtatctaacccttcaatgttaagtcattgtccacgtgtcattttttttattgtatatttaaattaatttttatatcaaaaataaaaatttaatgacttagactaattagagactgtgacgtggtaatttacttacacttaacggtcaagtacctaccgaagttccagaattataacttaggtatgattgtcgtcaataactaaatttaagtagctatttataattgagagttaacattagatatttaggccgaaatttaaacctagattaaatttgattttgttgagctt

SEQ ID NO: 269701 - DNA, 609 bp, Cannabis indica
atactcactcaagacttaattcatgaccagttgagagtcgatgaatatctttaagtggtcaacccgtacttcatgtgctagctgaggccgactattaaggctttgtattcagcctcattgtttgaggctttgaagtcaaacttcattgctccgtgtagctactgcccctatgtgttataagggcaatgcctttgtcagtgcagcttctgtcaacatggagtttccatgttatttcgtcaggattttactgctactcttgctctcacttcttttatggctcttgaccttctcctgaatcttgagagatttgaagagatgagtttgtgcactcaggcacgaagtctgcaaaggcttgaccctttatggttgttctttgttgatacatgatttcgaactagccaagctgaatggcccacttgatagtcggcctgatgcatcatgtttctataaaacctaccgcaatggatggttggtgtacacttttatggggtgtgcctagaagtagggccttagctttctagaagccaagagcaaactgcaggtcagcttctccatgagtggctactgactttcagcgtgattagtctcttactgatgtagtatacaggg

SEQ ID NO: 269702 - DNA, 710 bp, Cannabis indica
tgttgaataaaatggattacattgaaatggagttttatttagggtataaaacccaatattatccaagacccattagtgggtcccccaaagaagataaactgggccaagcccatttggataggtccttctaggatcgtactccagctccgtgaccatagaaccttccgccattgacatctaatgcccggaagcaagtctagtactgtgaggccagaagggtcagaaagtgtgttcctagaagactctggtttcccttttattcctgcacacaaataaggaaacaatggctactatctcgacagaggatcgtatcaagctaaatggagaaacttcttatagcagatatcaattaattaattcacattgatcaagcactgttcctctctgatcccatatgtttcccttagttttgtgaaaaaccattggcacgagttgttgttttctaaatccacaacagaaaaagctaggggaaaaatgtgcccattcccatcttgtgtacaagcagagagcaatgttccttcatatgttgatttaaggaaagttccatcaacaactattataggtttgcacttcttccatccttttattgaagcatctagtgccacaaacaagtacttgaagctgttgtcttcctctatttgatgtgtacgatagttccgggatgagttttctgcagcatgtgcaaaaaacttggcagcagcttgtaagat

SEQ ID NO: 269703 - DNA, 829 bp, Cannabis indica
aaatggaatcccgcacctcaattttagtattattgttgaaaaacacagaagacttagagaaattgattctctgccccgaagccacctcgtaagtatgcagcaactccttcacgttgtacgattcttccaccgttgccttacagtaaatgtagctgtcatcagcaaagagcatatgagagattaccggcgcacctcgagcaattttacaccccgtgagtaagccactttgttcataactccgcaacaaactagagaaaacttcaacacaaagaataaataggtatggtgataaatgattcccttggcacaaccctctttgagcaacattgggtcccaactccttcccaccatgtgaaatggtacaagaaacagaacatacacaatgcataactaaattaatccagcgaccatcaaagcccatccttaccatcatagcccggagataaccccactaaagcttatcataggctttgctaacatctagcttgagtgccaaataaccaaccctccctcttcgtttcctctttaagtgatgcataatctcataagaaatcatgatgttatccgagatcaaccgaccttgcaaaaatgcactttgagtatcagagatgatagacgacttaacactcttaagtctattagcaaccactttggacacaatcttatacagcacattgcataacgcaatgggtcttaaatcccccatatccataggctgcttctttttagggattaagaccaaaatagtttcgttaaggtctgtaggaagagaaccattatgaaaaaactgcttaaccatattgatgatatcatccttaacaatcggcca

SEQ ID NO: 269704 - DNA, 533 bp, Cannabis indica
acacaaaaataaaaggaaagatgagaagaaaaaaataaaagttgagcaggaatctaaaaagaagatgaaaaagaggaagtgggtacctgaatattttcggggcgaagatctcggatttcagctccgttgaagctgtcaatcgccgaagacccagccatcgcttgggtcgatctcttcgaagcccttatgttcggtggaggaacccaatcgaacggcctggctgaggcgctgccgtgcgtctgtgtcgcgagagagggggaggcgctggtgtgtaggaggagagagggggaggggctggtgttggaggagagagggggaggcgctggtgtgtaggaggagatcgtgcgtctgagggtgttggacgcagccaacgagagagaagaaagagagagaggttatctatgtatacattagggttttatcttaaaaataacatatatatatatatatattatttagataaaaaataaaaaaaaattgatttaatttgatatataaagaaaaattaatatattgagatggaagagagagag

SEQ ID NO: 269705 - DNA, 691 bp, Cannabis indica
  modified_base (640)..(640): a, c, t, g, unknown or other
tgttgttttttgatttttttagtttttttttcttttagttgtgtttttcgtttgctgttttatgtttcaaattttcccccccttgttgttttaggttaactctaattgtgacttcgaggatgaagttgctgatttggaagtgaagcctaaagttaaacccaaggtatgtttatcttgaattttttttatatttttaagttgaaattttttaatcaactgttgtttttcattttatttttgttttacctatttatattcacggttttatgttgtgtctcatttttgtgtgtactatttctttatgtatttatcttgatgttgttttttggttttgtttttgctattaaagagtttgtagcattattggtcttttagtgttgtattgactttttctaaacagttgttttaatgtttgttttcagtagttttcgtattgtttaatttaatttcacggttggacaattactatagtaaatttcatgttttgcagattgttgttaatatgttgtcgcgggaaagttgttctatcttttaggttgtttatgtctgggtgtttttataatgttgttattgggtttttttctgtttttttttttctggtatgcttagatttatgttttgtattttttctatattcttngaaaagttaatttatttagtattttgaatttttcgcttatgatttttattg

SEQ ID NO: 269706 - DNA, 584 bp, Cannabis indica
aatcgcataatattgttaaaatcgcacaacctataccataagcctaacatcgcacaataatcgcacaaatgtcgcctaaagtcgctaaacatacaagaagtactaacctagtcaatcatcgcacaataatcgcacaaatgtcgcctaaagtcgctaaacatacaagaagtactaacctaggcaaacatcgcacaaaaatcgcatgtaaatcgcataacgtcgcataaacacgaaatcaagagaacaaagtttaccacgaaacccataatttgcccagatttttcttgcacaatttatcacaaaaaacacatactaaataacaatttcagtttaaccacagatttatccataaattaaggcatatttctaagataaattaaacaaaaaaaatccaaaatatacctcttttagtcgacggtggcaatggcggggacggtgctccgagattcgtgcgagtgcagtgggtgggttcgcctgggtgggttcgacggtgcgagtgcagtgggtgggttcgcctgggtgggttcgacggtgcgatggtgggtgggttcgacggtgcgagggtgggtgggttcgacggaggg

SEQ ID NO: 269707 - DNA, 1161 bp, Cannabis indica
aaactgcatataggtttcttacttattttttgctttactgggcaatgatagtgatatatgaagctcgtgaataactagtggtaaaagtgctttatgaggcactgtgattgactcgtcttatagacgttttattggttaggcattgccgagtatggattgaattataagtatgttgttatgttttgttgtgattacttgcattttacattactgttgcccttaattttgcccaaaatacgtggaccaatatgacaacgacacgtggatctaagaggcgtgactctcaaatcaatcgactaagtctcttagcatcaagagtgtcaacaagaatataccatcccggaggagaggtaaaggctccacgtactcccggagaccaggggaacgcctagggatctccgggaggaacaggaccttatttgaacagtcacctctcatttaatgccgcatgggagaaaacgtattggaactgccataagcaataagtctgacggcgtaacccctcttatgcagctattacgctatgattaataaggctagtgacggctactttatgagagatcacatcaatcaagaagggataaaagactatatccacctaacccctaagatacctaaggtataggtcatgtatttcctattttgtatctgctgggaatatgtgcccctactgaaactacacagaaagacaagtgcttcagttctagggatcaccccagaaaaacactataaataccccccaaatacactgagataggggtcgagaattttgggttcataagaattaaagagagcaactaagaggaatatctaccaagaacattctctgtaataaatactctcataaataagaaagatcgttgactaaggctcattaatgccccaaccacgtaaaatctccacaaaaactcctacagctttctcatatacattattaaattggttgccgaaaacctcggtcaacattttggtgctttcattgagagacaaaggaagcatctgcaagtagacaacaaccttgtaagctaaaatggtagaaactcgcaacacacatcagccccgtcctcctcaagacgctcaaaaccctgaagatgaggaagtacgctcgaaagcgtcaacgtggattccaaagagcgagaaaaggccactgatggcgaatac

SEQ ID NO: 269708 - DNA, 645 bp, Cannabis indica
ggctactaacatgcttcctaacaggcttttcttaaataatactatggaaaagaaactaccaaagcagtaaaagcttactgaaccgtgaaacgagctgactgctggtgatgattgtacatgccgtgacgatctttggaagacaacctggtggctgtgataccaaattgtaacaccctaactagcatacgcatgttagcgtgattttaaacgtactgtgtagctcgttgctaattagcgaggttaatgaaaaacgtgaataattaaaaatgtgcttacttaattagaaacttaaagtattacatatattaaatttcgggatcccgtttataaaatactttttaaaagtttgctatacacataaaccaaagtttgtcacccaatgactatgcagcaaaagccttgatgtcccaaagatcgtacgctccaggcctaaccgccccgacatgtacaatcttcacctgctcgtactcacggctcctcagctttagccttgccctaaccaaaaaaaaaagatagcactgttagtcgacagactcagtaagaaaagcataacataaacatacaaataacccgagttataacctggcgcccatacacccgatcataaccctaatccccgtgtcccacacggtattgagtctagaa

SEQ ID NO: 269709 - DNA, 622 bp, Cannabis indica
tgtcaatatcataatttaaaaaatatatatttaaaagattaatttgtagcataaatatttaagtttaattttgattgcaaataaatatctaaacttaatttttgatggttataaatacctaagttatatttttggtactctcgtaggtactaacccgttaaatgttaagttattatccacgtgtcattttctaattagtatagctaaattatttttttaaataaaataaaaaataataacttggaccaattatgaatttccacacgacaatttacttaacacttaacagtcaagtacttaaagaagttcttgatttataactcagatattattaccgctaaagattaaacttaagtatttatttacagcccaaagtgaaacttaagtatttatgcccccaaattactcatattaaagcttatcactaataatcaatagcaaaaacgtaattaaaaatatgcatttatcgtgttaaatttgacccaatattatatcttgtgcaaaatttactacaatttttagcacgtgtcaaatttgatacaagatttagcacaccattggagaaattaattttttaaaagtataaaatttagcattgaactactattttagcactccatta

SEQ ID NO: 269710 - DNA, 639 bp, Cannabis indica
ttcgaggtacttattctattttgtgctgagatggttcccgtgtttcctttaacaagtgtggcgtactaggtcaaggtttggtccgactacctcccttccatcggcgacatctattttcttagactcgtagccccgaccctggacccggacctggacttgcagccagactcgcacagcagaccctaaaacctaaagcccatacccttgacatcgacacagacacgacccaaaaccctggatcttggaagagagccggacctagaacccaaactcggaccccgcccctagacctgaactgggaccttgacttggacccaaacctggtcccaacccaaggcttctgcacccagattctgaacctgacctcggaacccgaacttgacctgaacccaaacttggacccaacctcggcccttatttggacccaggcctgaaccctagccccggaccctgataggttagcaatatgccccttccatctttattacaataacatacaagggaagttatatatacatgcttccttttctctcttgaacacagatcagaagtctctccaagaagaaggctcaaattagagagtgagagagaaggaaaacacatacataagaaaagggaacaagagagagagagagagag

SEQ ID NO: 269711 - DNA, 646 bp, Cannabis indica
aatctcaataagaaataaaaccataatctctataatttggataactattggaagtagtattacaaattctatttagtttttgaggaagattttcaatctttaaaaatgaaaaagtctaataaaatttaaacaatttaccgttataattaatatatgatgccacgtatatgatgccacatcacttttttaaaaatttttctctatagatatatatagatagattgtaataaaaacttgcatacattatttaaatttttatattcattatatattatattatataattatataaagaaaatgacaaataaaagtgatatggcgaactttatgaaattttttccttattttttgacatctcaatttttcttactatttaattatttttttaataaatatttactaagtgtccatttcaatttaattccttattattaacttacataatttacttaatttttaatgggtttatatgaaaaagaagtttaatattatttcattatcattagcctatattttaatataaattttcaacgttaaatggctaaccttttctcattcccactgtttcatttattaagaatgaaatatttacgttctatcaattcttatgacaaaatttatctaagaaaattatgactgattaata

SEQ ID NO: 269712 - DNA, 594 bp, Cannabis indica
aaaaaaaaatatatttagttttggcgtttagcttaggtttaaagatagaaaatccctcgtgacattttgaggggtctagaacctcaagagcccattagcttttggattgaattggtagtttatagtagaaattacacaataggaaaattataagtgttgggaatattttaccagtatctagatttactaacaagtatgttgaattaagattccaaatatgaatatatctaaaacaatgaaattaaacacataagagttcagaaaaccttacattgattgcagcggaataatatgactcattccgcttagatctctaacccttgttcctttctgtcgcagagtatcatcaagatctgagcctagatctctttctctccttccagttggttaccaccgtcttccgcactatgattgagtccttaacttgctatgtgtgggcatgacactctattactataggcaaattgtatgaagaataattaaggagggttcaaaaactgtatagaaggtgtctctcatctactagttgtctgacagagttagaaactagatttggtaagttgaagtgaatggttggatgagatgagagcatca

SEQ ID NO: 269713 - DNA, 520 bp, Cannabis indica
aaggtttggtaaggattggaatcaatttggttgagttttggattattttgggttttatagtgtaaaccggctaaccggttttgcaggtcctgtaaaaccggttacccagatttgttgttggattccccaaaaaatttctgttgtcaattcgtgttagtttcagagctttggttggttaattccctgctagtttagggtattgccatgttaagttgctgtagataggtttttggtttaaaacctaagtccccggttgtgatttagcgtgtcacttatccgtattttaatcgatgtgatttaggagcctgtaattcgccgtacagttgttccactcaggttggccggcacacctgaattcagaatcaaggtaagattagtgtaatgtcatgcatatgttattaaatgtttagcatacatgttgtttatacctgttagaatacattgataacagtaatagtatacttagagttgtactgattactgataaatgtatgttggctgaaatactgatcgatgttgt

SEQ ID NO: 269714 - DNA, 648 bp, Cannabis indica
gtgattaaaatcactcatgaatttacgacacccacgtccgccaccagcgctggaaccgtcctcgaaccaagatagttcatcgtctaaccgcaaagcatgctttgccaagccatgggccactaaattttcagagcgagccacatgggacaaaactgcccctagaaatttctcataaaccaagaattctgttatatagccacattttgtatagaatagatatgattttttattaatatttgtgttctttatagtggtaaaaaaagttactgaaaatatatatttttaaatcgtatcatatttatatttcttattatatttttttttatacaactaaacatgaaaattttgatataattttatgattgaatgatcaataaataatatacaaccgcacgcaaaacgcggtttgtttcctaatttatttatatatactatagtttaagaaaaaaaatatatcaatatgatagatatattttaatttatttatttattttagggtataattttttattttattctattcaaaaaaaaaatatttacttttttttataaatggatttcttttttagaatatgaggtataattttttttaaaaaaaaaatttaaaatagaagatttttctatttgaaattattattatttttcacg

SEQ ID NO: 269715 - DNA, 720 bp, Cannabis indica
ccaggatgtcctctccttcaataggaggaggttataatccctggttgcttcggttgttggacagattgggccagttatgtccattaccctgtctcttcaatgctggctgaagtggccctgcacgatgagacgttctatctcatctttcaactggcgacactcgtctgttgtgtgcccaatgtctttatggtacttgcagtacctggtcagatctcttttatgcctcgcgtgcctcatgggctcgggtttgccaaaggcagccttgttctcatgcacaaggtaaatattttcctgagtttcattaagcttggtataaatagtataaactggcacatacgtatcgtgcttcttttgtttctttttgccttttgacgaccccttagaatcgtcttttctctttgagccaaaggcccctgagttatcaactctagttgagacaatccttgttgaaacattgctgggtttgcctcacgagccagtttttatcaagttcatctcttttggagcttcttcttttcggacaaacacctgagccctctcattgaactcaatgatgttcttcactggacaaccctgtaattcgtcccacaatttgcccccgacagtggatagatcagtagtgatccccgcctggagggcagtaagttgtgtactatcatctaaatttttaactcttgcagcagccgtgctaaaacgacttaaatatgccttaagtgtttc

SEQ ID NO: 269716 - DNA, 1109 bp, Cannabis indica
gatgtcactctaatttctcttatgaaattgaatggcgcagatgactgtattctcaacattctattctgaaatgatataaatcctcgattttagaaatctcctacttgtatatgtttactttaggcaaattagacttagaattagatagtagtggtggtctaagaaagaataattactcatgtatagttggtataaatttaagtctttgactttcaattttggattccaaatagaaattgttatttcagtttccagaatacaatacagttcaactttcactagctattaatatccattttctgttaatggattcaaactgtatgttaatgtatggaatatgagtttagtattttgtgaccaggatccacttagactattctcagaactctttaatgctactagacctaagtcatcgaaagaccacaaccacatattttataaatctatggcatttgtattttgttcataaaagttttgacaagatcattctctgtaaagagtaatatgcttgtatccacttgaaagtaatatcatctatattcaaatatggatgtacattcacgggtagatatgagttttcgatatattcttaagacgatcactctagattttaccttatgtaaagaaatttgaaatgtttgagaaatttcatgaatttctagcaatgttgaaaaagattaaggtaagtggttaaagatcttgcaaactgataggggtggagaaatatttggatatgcaattcaaagatctttaagttgaattttgaattttatccaaacttacctccctagaaatttgattttcatattgatataagtaaaaagtctatgattagttaatagaagttgcctaaatccttctcgggatatacactagtgactggaaaattttagaatgatgaaatggttgtgtacatagtgtaaaccattactagattcatggatgtcctgatcgtgaacttaaaaaagctagaactgttaactaaggtttgcatgtttgatagctattctaagtgattaggggtggaccatcccatggtcattaagataagaacgtggttgtttcactaaatactacttttctaagaatatgactaagtctgaaaacaa

SEQ ID NO: 269717 - DNA, 670 bp, Cannabis indica
ttcctataaatgatatttcagtaaactaatataattactgaaataagagctctttcatttatctcttttaagccaagctcaaagaaaatcatcatattatttctatgtcattatagaagctatagatccctatcttccactcaattgtactatcatgttcccaagatgtaagtattgggctgatccattttttcaacattaacgaacaagtcaaaacataaataatacagttaagcttgaacaaaaccatctcaggattaagatctattgatctaagatcaactaagtgatgttgacatagaaagatataacggtaagtttatgatgtcttatccaagttcagcccagtccgatgtatactccatacatccgataatagtatactttaccaatgccctggaaaggacatacaacttatcgaaggtgtaaactttattggtgattatcacgtcagtgtgatcttcatgctattttgttagtagatttgtaaaaacaaaaaaaaaggtttaagcaactctttgaaacaatcaagtatattattaccgttgtttcgtaagactgattgtgacagtcagtagtcccgtgatccataaggggaaacaccgagtaagctgtgcagtcccacaccgcttggggaaggtcaagtgggatgattctgagactgtgtagg

SEQ ID NO: 269718 - DNA, 718 bp, Cannabis indica
gacataaataaataatatcatggagttaaggattttcttatgtttttacatttatattaactttttttatgccatatttttgtaaaaaaaaattagaaattccatatttgtaaaacaataataaggatctggaaaagttattgtcacttttgctgaaaatttcgccgaaaaagtcatcatcgtcggaaaagttactgtaaaagtcaccaaaaatacatgtctcagatataactaaaaatagaatcggtttataaagtttattttaataaagttcatttaaatcacaaattttaattaggtaattttttttttcatttttacacttcaaaataaaattttttagcatttttacgaaaatccacataaaaaatcacatagcaacctatataaaaatcaccgaagcagcccaaactgtaaatttgaaaaagaaaaaaaaaagttaaaaaatggtatatgaggtaattcctcttttaattaaactagggccaagatgcaaaatggcctaaatctaacacttaagttaataaatgtccctttttataaaaaaaaattaaaaaaaatgttcattcagttaaaaatttgatgataaaattacaattataaccatgaataattaagtgtttggtatagttattttgcacaatagtatatcgattttatgtgcaacagtatattaaaaaaaaattgaaaggtagtatattagtttaagattgtggta

SEQ ID NO: 269719 - DNA, 967 bp, Cannabis indica
gcagtggtgggacatttatgagaaaaagtacaaatgaggcgtatgatctgttcgaagaaatggctatgaataactaacaatggccgattgaaagaagccagtctaagaaagttgcaggcatgcatgaggtagacgctatcaccaagttgacagcccaagaggaggccctaacgaagttaatgactgtgcaggcaaaacgagctcaagtcacttatgagctatgtgggggccctcatacttataacacatgcccagtggatgtgaacagtttgccaatggatcaagcaaaatccattgggaactattctcaaaataataactatgggtataatcaaggagggggtcatcgacagaattttcaagtgcagtcctctaatcagcagtaggggttttaccagcagagaagccagccccaacaaaacaaacaacagctgcaacaataaggttctagtggagggtctagtcttcaaatagatttgttattatagttcatgacagagactagatcatccattaaagccttagagaattagatagggcaattggccactcaaatgactacccgccattgttaagccaagtttgagttcgtgaactcaaactttctcaactcaagaatcaagcttcaaaacaacttcaaaccagttctaatgaaccttaaattaacccaacaaagactcctataagccttagggttcggacaaaaccaaaagccctaattgcataatcaaactcaactaaaaatttaaaaaaacttaaaagaataatattagggctttaccttgagtttacaccacttgaattccactaaaatccatcaaaatcatagagaaaagaagaggatatctctagtttggtctggttctccttggccgactaggagagagagagagagagagagagagagagagagagagagagagagagagagagagagagagagagagagagagagagagagagagag

SEQ ID NO: 269720 - DNA, 574 bp, Cannabis indica
aaaagtgttatcaaacgccaccatagtttggcaaaatatactcttcggttaaaagatgagatatcttggttcgaggagtatctaccgccgattgtggtttgttgtattgttaatcatatgtaattctgttcaccacgtcaaaaaaatacaaaacattattttttttttgtaaaaataaatattttaggttaaagttttttttttttttacatttttatggtgttttataaaataataaaaaatacataaaaagtagagttgaacattgagcgggttgattgagtttcgggttcacgggtttcaaattcaaaaaattatacctggacctggcccgtgaaatggtttcgggttcgcgggtccacaggctcgggttagtcggatcaacaggttgactcaattaattctcgagaacggctttttttttcacccaaattctctatagaaaaaaaaacatttgaaatccaaagtagaaacgtaaatccaataatctaaaattaatcaaatcattcatcaaatttatgttcatattcatgaaaatcatgaatgctgaacatgaatgaacatgataataaaa

SEQ ID NO: 269721 - DNA, 729 bp, Cannabis indica
tatatatatatatataattgtttggtttttctcacgggaatgggttttaggattttgaggcgtggttaggtaacaataggtctttctttaatcctattattattatgattattattaaatcaacctatataattgagaagaacagcattaggtgataatagttagtagtttttgaaatataccgatttgattcttttatggtgtaatgatgtaatcatcttttattcagagtcaaaccaattgactagaatttcttattttgacatttacatgaaattgatgcaactgttaacgttagatagtcttatataaacaccttactccaagcacgaggaagtaaagttggatacttgttatttaaacctagctagaaatagccacatatatatatactagtaaaaaactacgtgcgagtatattaaattttatgttaggttttttctatgttatttgaaagtgagattattattgaatattgaatgcaatatattagtgtttaagaaaacttaatgatttaaatatattcttaaactattactgcagaacgtaataatcgtaataatatgatcacagaataaacaaagaataatataaaatgtttatttaaagctaatacatatatgtatatatgaaggaaaaaaaatataattagaaataatggggaaagtaaccttaatatcctcgtttgaaacaccatatttcaagattgatatgtaaagctttgtccct

SEQ ID NO: 269722 - DNA, 595 bp, Cannabis indica
gtgtgttgacaaggcaaatcacaccacttgctagggtttggtggatctaaatatctgaagtgagtagactcacttcttaagttattattttggttgtttccacccattcccagacttagccggttgaagagcgacctttgggttacttagtcctgggggtcctacgggagttcttcctgccggccggccagaggtgtaccaccaaggggttggccagctagaggctggccaagtaggggtgttgtagagcttgagatccctgaacgacccctaaaccactacttgctgggatttggctgttctcgccacaagacctttgtggcaaggcttgtcctcctttgggcaggggaaggtatgtcttagttcttgagcagcctagttggatagtctgtcggtagaccctccctgatctgttgactagtctcacttgaagaggaactctgatgagatcctggcctctcccagcagttctctcattgaacaaccttatcagcttgctaacttctctgttgcggcagtccagctccacctggtgagatcagagaatgtactcttggtcatccatccatctcaaaaattcacgtctctgttgtgc

SEQ ID NO: 269723 - DNA, 754 bp, Cannabis indica
aagtaaacataagatagtttaccaccaaaaaataacataagggggttaagtgtctacaaatataaacataaaggggtttggccgcaaatttctctatataaccctttggttagcgtgaagaggaaacctaaatagaacaagtccagtagcaaaccgattggatttggataaggacatgaataaattaatatttttaagttacaatgattgagattaagtgctttaattagattggcttgcatttgttaatattatatgtttaacttttttttattattaatttcctttggctgttataaattgaaacaaaccatttcatttcgaatatgaaatcaaaaagtaagcattagattctgtggtacagcatgtgcacatataaataatacatatactaggtaagcaaggcctagattgatccaaatatattgtttcatgcccaaatataataataatttgagaacaacatcaaataatggattttaaaattcgaagctattgcttccatatgtttctaccaaattcaacaatgcaaaacgatcaaaactgcactatataaagattctaacacaagaaaacgtattattttattttttgcttaccggtttttaccaggtaataatgatgatttaatgtattaagggcatctccaatggaaaaatttaaatttagtgttaaattaacactaaaaaactattatttcaacactaattttttttttcaattccaaccaaaaaattacaccaaatattatatt

SEQ ID NO: 269724 - DNA, 537 bp, Cannabis indica
aaacacattctaattgatgtgtttacatttattttataaattgaaaaaaattattttaagttacaaaatatactttaatagagttttatttgatattttttaattctttaattgaacaaataattaaaaaaaaatgtaaaaaattgacatttcataattttagaatgaatgcgagtgcagtcccaccaacctcatacattatcaatcttattcctcaattccaaattattataggactcacactcacatatttcattctcattccataacaaaattaaaaagtaaataagataacaaatctcattccttattcacattttctcattccataactgtttctaaagaccaataaattgttaagtgaagcataatttgagtgtactagatttctaacttaaataaaaatgttacaaattacacttattagtaactatagtctaaatatcttctaataaaaatgtgacaaattgataacctcaccacgttccacctaaaatatgatgtaagaaaaggtctttcccattaaattggagtatt

SEQ ID NO: 269725 - DNA, 807 bp, Cannabis indica
tagaaatacatttaatcacataatcttgattacattctactgtgttgacaacacaataaacaagaatattaatgtaataaggatttggatgatttataaattaaataaatgatcacatgaacaaaataacacattaaatatgtaatgaaataaatatgtttctttcttgataaacgaatattaaagattacattgaaatagaattttatttagggcagaaaatccaacaaactcccacttgcactaacatgaaacaatcaacatatttcaattaatcctagattcgttcggtgcttttcaaatgtagaaactataaaaattttggtgaatggatcagctaagttgtctttggtatcaactttctctaccagtatgtcccctctcgccacatattctttgatgatgtggtacttcctctcaatgtttttgcttctcttgtgtctttgatgctctttactgttagttatagcaccagtgttgtcataaagtaaaacaactggtttttccattctaggaacaacactaaattttgtgaagaactttctgagccagacgagttccttagcaacctcagcggcagctatgtattcggcctccttggtagagtctaatgttgcaattttcttagcacttcttcaaacaacttctccacccccaagattaaataccatccaagatgtagacttcgtcccatcaagccaaacctagaaatatgagtcggtatagcctacgagatgtaaagcaccacccttgtagactaacacataatgtcttatacttttcaaatatttcaaaatatgagtattt

SEQ ID NO: 269726 - DNA, 805 bp, Cannabis indica
agtctatgttgcattttctatcgccattcagggggagctctttgataaacttcttattatcttagggggaaaatttggttcaggacaatattattgacatggattatgctcaatgaagggagagaaatacttatcattggtgcatttgctgtttggttgtttaaagtgtttgcttttctgtttttttagactctgttatattttgatggttgctttgttttacactagtattgttgccattgaccataatttgtcaagggggagattgtaagaaccattattttttgtagtgacaaattatgtccagttgcatttttgttgcgtctgggactcatagtattttgtctggagtttgtactattagtgttagtccacgtcagcaaagatattttaggttttaattgttcagatggtaacagctgtctatttagggtttcttggtttagctggatataaatacaatttctgggtattatgttaaaaaaactttttgatgggagattaaggattacgtttctttcttctttatgttccatggcaggtgatctttgagcttggaggtattactccatagttgcagatcaaagcttgaagatgttgagttcagactgaagggagttcagtatcattttcatcaccagatctgaagggagttcagattgaagaagtgttgaagagagctcatcatccacacaaggggatcttgtgtctccaatcaagggtcttggttggtatgggtatagattcactgtattttgtaaaagagtgtattgtttaaatattgttggtttttgtaagatacatc

SEQ ID NO: 269727 - DNA, 810 bp, Cannabis indica
taaaaaaaaaaaaaaaaaaattactaaattttattacaacaccttactgtaagttgatttttttctttcttataatcactccatttcaaataataataataaaaaaacatgacaatgacttgaaaatccatgctaaaaactaatattattcaaataaattaatattgaaatgtgttgtgcttattgctataaatactagctaatctttttttgatacaacacaaaatcagcagaaactcgaaaaatacaagatcagatataaaaaaaaatatgagtaaacacaaactcaaaagggtacaacacctaaacacaaatactctagcccccaaattagaaacattataatttgacaaaaaggataatagtaatttgagtatttattaataaatatttaaattttaataaatctaataatattttttttgtcttcccgaggcaataatatttttatgcacaataatatttttttttgtatgattttcttaaaatatatatataaataaaattaattagaatttttttttattaaattgttaaatttaagtacattttttaagaatttttaatggtcaaaaaaataatttagtgaaagtaacttaaaaataatcgaaactatgctatgcatataatttaataattaaaaatattattttttttgggtcaaaattaataaaagaatattcttttttcagtgaaaaaaaaaaacatattatataaaattaggcaggggaagggaagatatatagaagaaggggaaggtgtggtaaacactgcacgagtcaccaccaccatcggaagagagctctgttt

SEQ ID NO: 269728 - DNA, 595 bp, Cannabis indica
gaaaaacaaaaaaaaatgacattttaggggtacaatcggacccctattgggggtcaatcggaccccaaaacacattttatggatgcccatcggacccctatcggggggtccatcggacccatcgaacccagttaaaaaaaaaacaagaaaaaacacattttaggggtgcccatcggacccctatcagggttccatcggacccggttaaaaaaaaaacaagaaaaaacacattttaggggtgccccatcggacccctatcgggggtccatcggaccccatcggacccgacccaaaataagaaaaaaacacatttttgggtgcccattggaccccatcgggctttcacctttgtcagcccattttcaccagcatcgagccaccatcgggccggcatcggaccccatggggccagacaaaaaaattgcagaaaccaggaaaaatccagttttacaggcaataaacaatttaacagaaaatggcaaaataacaacaacatccacagatcaagtatcaaaataaacattctaaactaaatataataacaacaaacaagaattcaaaaaaaaaaaaaaaaactaaacctaacagtactacg

SEQ ID NO: 269729 - DNA, 516 bp, Cannabis indica
tgtctcatgggagattttaatgacatattagctaaagaagagaggattgggaataaggtgaagtactatccagattcggctttcttgaattgtgtgactcattgtcaattggaagacattaagactagtgggaactacttcacttggtctaacaagcaacatggggatgatagaattttttccaagattgataggatgttggccaaccaatcttggttaaacaagtatgactatgctgaggtagtttacatgaatgaaggactttttgatcactctccgggtgttctttcacttcatcctattagtgcctcgggaagaaagccttttaagtattttcgaatgtgaaaatcccattcaaaatatgatggctgttttaaggaatgttggaagcaaaaaattctgggatctcctatgtttcaagtggttacaaagctcaagcatttcaaggctagtttgaaggaaattaataaggagggctttaacaacctgcaacatacggttatgatgctgaagcag

SEQ ID NO: 269730 - DNA, 867 bp, Cannabis indica
accatctctttttctcctggacaggtgcaaatagagagtatcctgctgcaatatgatatgtttcagtttcaaaacgagcagtatctacaaggtgcatacctgattttttagtgctacaatccttctccaataccaacttccatgtattagaataggatagcaccaccactttcctacttgatgtacaccgaatgaacccatttaacccataggttttcttctttctttgctacagcccatatatacttgaccatggcagccatattccattccttgactcttcgaaatccaattccccctgttgattttttctgacaaactatgtcccaagcaatggctccccccccttggaaagcatgttgccctttcctaaaggaacggcccttcatatagcttcaatctctttaatcaccttgttaggcaatagcatgacttgattccagtaagaatgaatagaaagaaggactgaattgatcaataccacccttccagcaaaagagaggtgtcttgtactccatgttctgattctacctgtcattttttcagcaaggatggcacaattcttgcttgatattttctttgcaccaattgggactcccaagtatgtaaatggtagctcctgtctggcgaatccagatattgcaattatcctgttcaattcattctcaggcatgttactacaatatatagctgattttgatacattgggaaaaagccctgaagatagtgagaaaagtttgagaccctgcaacaaatataagacagttttgaaatctccatggcaaaaaagtaaaaacatcatctgcaaaactgagatggtttagctgaagctccttgcatctgtcatgaaatctaaagtcatgtttc

SEQ ID NO: 269731 - DNA, 520 bp, Cannabis indica
cttcttcctttagtgctttggctctttctttgtcgagtaaccttcattgaattggctttaagtttttggcgtcgatgtttcaagcgtgacttatcatggtggggcttattccttccatgtcttcgtatgaccaggcgaagacatcttggttttcccttaagaactagatcaaagcggatcttatgtccttaggaagctcttttttgatcttgactaatttggatggttattcgtggtctaatggtacttcctccaattcttcgattgcaccaacccatgtatcaatatccccgaaatggggatcaatgtcatcgaccccattttgggcgagtcctcattgctaagaactacttactgtaacttagagggatttggccactttctccctagttttgatagataggttgtaacactctcgtgctaccatttgattgcccttcaggcagccaattccacccttggtaggaaattttgttgggattttatgccctaaataaaacccattacaatctaatctgat

SEQ ID NO: 269732 - DNA, 574 bp, Cannabis indica
ctaaaaagttgtcactaaaagtattttttggcagtggagtatggtatggcacgaaaatatattgacttggtcgagtatgtcgacatgctacaccaaaaaaatatgaacttatatatggatgacacataagcacgaataaactaacataaaaacacaatatgttaaaataaacttaaaaattaatttaataattataattatttcttatgaattgtaatttagaaattatataaaaataattaattgaaactataaaaattacatttagtttaataggtagctcaatatttttcataaaaatataaaaacgtagagtacgaatttgagccacctaattagagtctagagaaacacatatcttgagtataatatgacatgaaaattctaaaattaccctataaaattattaacatatgaaacaacacaacatgatttatatttttttatggcataacacgatactctagatttttgtgggactttttaaaagaaaaattttcagtaattattcataatttatatatacttaaattaaaactctaaacttaaatatatatccaaattgttaaaaata

SEQ ID NO: 269733 - DNA, 536 bp, Cannabis indica
taaaaatcacgctaacatgccttaaatagttagggtgttacatctttcgtctgaacaactccaaagaggtgaagtttgtccttagaaatagaccttggaatccttgtggcggagttatgatggtggctcctctctcggaggatgggaaatgggaatcaactgatcttatgacgattgatatttgggttgagactatgggaatgcctcccccttttctaacaaagaagtgtatcgagcaaatggcaaagcgtatgggtaccctcattcaggctaatgaggttaggaagaatggagtggttgtgaatcactatctacattttcatgtgagattgaaactggttgttcccctcctagctagagtctctttgctatattattagcaaaggaaggattggagctatttcaaatacaaatgcctccctattttttgtttcaagtgtggtgttatcaggcatatggaacaggactgttctagatggaagagagtggtctcgactcatgatgggaggtctattgggaatatttactaggatcta

SEQ ID NO: 269734 - DNA, 1294 bp, Cannabis indica
aaaataaagaatcaagtgctttcgggaaagaaacaagaatccctggctaaaacatgagccagcttgtttgcagatcgtttgacaaaacacaactcaacattatttaaggataagagaagagtacgaacatcatgaactaaaagaccaaaagaggatgacaaagtaatttggctttgcacggcttgaacacaaactaagctatcagtttccaaaatcacttgtccccacgaatgacggtcaatccagcttaaagcttctttgatgccaacaatttcagctatttcaggttgcacccgccccatctttcccatcgtgtaagcttctaccaaattaccgctggaatctcgagccacacaaccaaaaccaaaccggccttctcgctcaaacaaagcgccatcaacattaactttgatcttatttatagtaggtgcagtccaacgctcaagcacacggtccccatcaatcaacggagacaaagaaaaccctttcttttttgagcggatttgtattgatcaagcagagttcttgctgaagcaaccacatttgcagcagtacggctcctttgttgccaaacaaagtcgttacgggcacgccaaattgaccagctaacaaccgcggcttcctccatctcttcctgcctaccacagctgaacaaaccaacagccaattgcaaaaagggtcactcaaagtgctgcccacatccaccatagttctatgccagcacgcacgagcaattaacaggaacatgcctgttcttcagctgaaaaacaagcaggaagcgaacccgaagccgccctccatagaaaattactgacttttggtggaaccttcagatgccacaacttcttccaaaaattcaaaccaccatcattaggccaagcccctttcatttcttgtaaatatttataagcactcttgaccgagtgttcgagctttcacatttccaactccagcagtcatttgtagcagttgcacttagttgaatagatacaatcaactcctgatctcgaacatgaaagagatctctaataatctcctcgtcccaagcacggtcgtccgtcttaaaagggctgctaacatactggttttgaagagcaggatgagttgaagagacaaaactattggtgcggtgaggaagccaaaagtcccttaatattgagatttgatcacccgtaccaatggttcgagtgacacctgcttgtaacagccccttagcttcaaaaatactcctccatatgaagcttgggttatctcccaactcagccgaaaagaaagaaccatgagcataatatct

SEQ ID NO: 269735 - DNA, 602 bp, Cannabis indica
tataggcgacagtttataactgtgccctatactatatgtgtcgtcacctatagtatagggcacgatttaaaaccgtcgcctataccctattataggcgacgattttaaatctgtattttcccccatttttttcctgcatgttttataattttacttaaactaaaataaaacaactaattaattttgttacaataacaactttaagatacattaaatttattaaataacaaaataaatatatatagtaaataaataaataaataaatgtatttataccaagcttggagagagagaaagagagagagggagacggacgggaggtggtggtggtctgacctatgcgacggagagtagaggcagaccgacgggaggaggggtgcgtggagatcgatggacaagagacacgagaagaaagagagattgagagagggaggaagacggcgagagaggagggcaatggtgcggaggcgtgggtggggttttggagagttaagattttcgttttagggtgtgggaaatggagaagaaataggtaggcatgtgggaaatcgaaaaaagtaggtgggcacgttggaaatgtggcgagaagtaggtgacgattt

SEQ ID NO: 269736 - DNA, 840 bp, Cannabis indica
agcagattcatgacaaaccctggaaagacacattggcttgctatgaaatggctactaaggtacttaattgggacaactaaactaggactcaaatacaaacaacaacagggaaagacagctatagaatgcttcagtgatgcagactatgctggggacagagacaataaaaaatccacatctgcttacatactactattggggggaaactgtgtgagttggaaggtacaattacaaccagttgtggcaaccagttgtggcattgtccacaactgaatcagagtatattgcaactacagaggctatcaaagaaagtatttgggtaaaaggagtcctagaagagctaaggttgctagacactaaacctgtaatttactctgatagtcagagttgtgtacatctatgtaagaaccctatgttccatgataaaacaaagcatattgagatcaagtatcattttatcagggataaagtgacacagggacacataagcattgacaaggtgcctacagaagagaatcctgcagacatggggactaaagtaatcaccctatctaagtttagacattgtctaaacttaatagggttggatcaaggataaagtgatccttgggatcacagagctatgaccctcagatttgactcgactactagattatcagctcagtgaaggtttaggtggaaattgttgaagtaaacctccacttacactgataatggaataattacaaggacaaaacagtaaatacagtaaataaattagttagaatggattaggttataatccacacctaactaatttctctaactaactattacgggtacaaatcagaaaccctagat

SEQ ID NO: 269737 - DNA, 606 bp, Cannabis indica
aaaaatcaaaacataagggggtttcgccgcaaattgctctttttggtgtgttaccaaagtgatattccattacctcttcattcactttgaaaaacaaaaaaacactaaagttaaggcatcctaaatgtgtcttagcaaaattcccaatcatatttttgcaaacttattaaaaaggttaattaggatttttttcccgaattttgacatgtaccaaattatgcccctaaacttttttgggcgttaaaaattctccctgaactattgagattgttatatttaaggacttttgtctaattttagtaaaaaaaattctaacatggataaaattttaaggggcatgatttagtacatatcaaagtttgagggacatgatttgatagatatcaaagtttgggaagcatgatttagtacataaacaatcactgaaacagtaaaattgaatgaaattagataaaaatcattaaatctaacaatctcaatagttcaggaatttctaacggttaaaaaaattcaaggggcataatttagtacatgttaaaattcaagagaaaaaaaatactaattaacctattaaaaatgaagagaagtcaaaccacaccaactcaa

SEQ ID NO: 269738 - DNA, 723 bp, Cannabis indica
atgttaaaattcaagagaaaaaaatactaattaacctattaaaaaatgaagagaagtcaaaccacaccaactcaacataacaacataggcctaatgagccttttcacagcggcccacgcatgcgtggtcattcattctagcctcaaaacttttaagcgcgtacatgccactgttcttttgaattgttttacttctccaaaccaggggcatttttcgggattcaaaatcactacactacacaagcggggccaaagcgaaaaacaataaaaaggaaaagttgattgatgctgctgaatacttcttcaattaaaataaataaataaataaaagttgcaaaacaaattatactaaaataaaaaaagccagaaaataataaattaatggtcattaaattttaaatttttaaaaaatagaaaatataaggtgctactactatctattttagcatgtacaaaagttttgtagtccaatttttttttgtctcgtttatgttatatttatttaattacaaaaaaattagtgttcaaataatatattttactaatgggtaaatagtgacataagtattcaaagttttatatttgtaagtggcataaactcaatgtttatttttagtgccaatgtttataaaaatgtaatttttccctaattttatcagtacagactctgttattatcttaaacagggcatatataaagctcaaattttagatcattgggtcta

SEQ ID NO: 269739 - DNA, 898 bp, Cannabis indica
aaaataggctcataatcgttaacgaaaatctgcgttaacagtttgctgctttcattgagagcctacgtgataaaagcttagaaaaattcctcctaaacaaagaaggaattttttctccatggctgataatggggaaaacaataactctcatcctgaagagactactcatcgtcttggaaaagagccaatgggctcacggaggccacccaattcacgaacaacacgttcaacatgatcaacacgttcgagaagaagccaacgtgatagtgattagaacccagagactgggaatgaggaacccaacacaaatgctggtggttctacgcctataagtgagggtgcctatgaccccactaggtatgtaccgttggtcgagtgagaaaatcgtcaactctggtgatgtttggaagaggcaaaccaacaataagttgagttggaacgggaggcagccgcagctagggcggcaaaggaaaacaacacacaaaaccaaccaggaggcaggagacggctcaggttgaccccggccaaaacactcaggaggagcaacctgggaaaactggggatgttcctgaagatgaacaaccaaatgatcaggcacctcgtcaagaagtgcctcagagaccccggggatttacaacccaagggaatgaacacaatgatttgccagagtcttctcccaggaatgcgagcagaagacaaccccagactagggaacaggaaatccctcgttgtaacgagagaaatcctgggactcaacctaggacaagcgggttaccaccgagacaccatcaacgtccttctcgaactgatagggaagggcacatacaaatctcagcaaggggcatgtatcaacccattcccaaaggagaagttcggtgcgtgacgaagcaagttctag

SEQ ID NO: 269740 - DNA, 869 bp, Cannabis indica
cttgtgtattttgttattatattgttttgctatcatattatatagcattactagggaaatttgaatttctatccatgttttatacccaaattaattctctaaactaatacttataactattgaaaaaataggattacttttccctaaaccctaaaatacccctctcattattctcaaccatctctctctcttcctcctttctctctcaaatcaaacccaaaaccaacctatcaatccaagccgatccaccggcgttccaccgaaaaccacgatcgagcatcggtgttccaccctcggttaaccaacctctcatctcatcttgctccggtggaccgagcaaacgtggctcccacttcacaccatcgcacgaactgaacgaccaacgccacctccgacagagacgccaacggagagccaaccgaacccacagcagcccactccgacggagacgcagacggagacccacacccaaccgaacccactcggacccaacttcaaaacccgcaatgaaaaatcccatcggacccatgcatcgggcccatcggacccgacttcaaaaactcccaaaaaattcccatcggggacccatcggatggggcatcgggcccatcggacccgacttcaaaaacccaaaaaagttcccccatcgaacgggcatcggacgggcatcgggccccatcggacccgaccccttaaaatcccagaaaaaattgaaaaaaaaaaaaaaaaaaagagtttttgagaggggcatttttggggttttagaaaagtggtcatatattttcaatgtagaaaagtattagtttagggaaaaaatattaagtatatgtgagtatagaatttcaaatttccccattactattatgtat

SEQ ID NO: 269741 - DNA, 960 bp, Cannabis indica
gggaggcccggatgtcatgaaagtcgagcaatggctaacagtgattaatagaataccgaactttataggcgtcacaggtaacgacagggtggtctgtgccaccttttaatttcaagaagacgctctggtctggtgggacatggtgtccatgattcacgatgttacgacaatgacttgggaaaagttccaggaacttttcaacggaaagtattacaatgaagcagttagaagttctaagagaaaagaattcacccaattgactcagaaggaaaatatgagtgttactgtatacacaacacaatttgactgtttggcgagattggcctcgggaatcgtgccaactgacttcagtaagaaagaaatatacctggatgggttaaatacgaagatcagacatgacttgatgattactactgacgacaaaaccacttatgctaaaatggtggataaggcactacgagctgaggacgtagtgggatgcattatagagtgtggtgggactccagttgttgcggggctcctaccccacctgcatcaggttttagcaggggaggtagtggttcggccattgatctgaaaagaaaggcatccactacaactagtggcccgggtcagaacaagaggttccgggggtaccagggtcgaggcaatcgccagagtggcactgaaacctaatacacttacccagagtgccccagttgtaaaaagcaccatctgggggagtgtaaagggcaggggtgctttcagtgtggcctgctagggtattacaagagggattttccgcagctcagaactaggtaccgaagactgcagcgaaacccactccagcaagggcgttttcgataactcgggctgatgtagaagctagcccctcagtggtagcaggtcagctcttggttaacaactcttatttctctgtgttttttcactctggggccactcactcttatgtggcagcca

SEQ ID NO: 269742 - DNA, 588 bp, Cannabis indica
aaagagttttatttagggcataaaacccaacaatttgaatgtccaacccacaataaagtttgaccccaaagtgtaatattagggttgacacgtggaggaagaaggatgttaagtttcccaactaacccatgaaaatagtgatcttccctaacatagcggagcgagaagattaaccctccaagtgatacgttgatgtgaatacactcatccggcaactaacctaaaagatgacactcatccctggaaaagtgaaggaagaccgtttctctagcgatggaccatgtttcaagaggtagctgttttcctaagataatgaatagaccctcactaggactcagcagggtcgatcgaatgatatacgaatattcactatctttctagagttttacgactagacctatcatttttttacaatcttacgtactctttctcattcggttagcaaggtttaaccgtcgatcatcgcataaccattttttgggttttatgccttaaataaaactccatttcaatgtaatccagattattcaatatcaataaagtaacaaaagtattcttcattcatttgtgtatgttttggttcacctt

SEQ ID NO: 269743 - DNA, 775 bp, Cannabis indica
atatcctaagtttgaaaattttatggttagaaaccctaaaattaatattcaaaccaaaattaacaaatttttcaaaatttcatgttactttgcaaaaaaaaaaattaattaaaataaatatctaataagataaaatgtcaaaacttacatttttctaatcttataatttaatttgaatatatttaaaaaataacaaatttttaaaatctaatatggttagcaaatttgaaactttaattagattatttctaaattttattaatattttaatatctaaataagatcatttcaaatttaattataaaataagtaatatcagatcttataattaaaataaataatataaacaaaaataatcaaaaaatttaaaattaaccataatgctagtttgcgaaaaaaaaatcaaatttttaaattcaaatgctacgaatatctaaaactaattttattctgataattagattttcatttagaaatttggattctacacaaaattctaccaaaaattgaattttatttcgatgaaaaatgatttttaaatcaaaagatatcacaaaaacaagattgcgcgcacaaaagactgcaagtgggcgagggaaaggctgctggcagcctgcttggggggcaaatttcggtcaggaggggaaaaaattcagacatggccttgtctgaaggcctcaggtccgagcgagcctccccatccgcgcacgcgtgtgcatccctttgagatgtttttattcaaacttcaaaaaatcataactaattcataaaaaaa

SEQ ID NO: 269744 - DNA, 723 bp, Cannabis indica
aaggtactgattttgcggaaccatctttggcgttctgtctgaagcctgcaaattatgaactccataatacctgtttttcatagccatggctgcattgtaatctgaaatgtaagaatcaatccaggcaatagtatcattagtggttagatccaaatttgcaaataacttcttgtttcttgagaaccaaatagcccaaagagttgtgaccaaaagaactaattgatctttatgtaactgctcaaagccaatgatcataaattcttttacatcaacatgcctgtttgacaaataaaaatttcggagaggcgaggccttccaaatttttgatgctctgggacaatctagtagggcatgtgtgactgtttcagtgggatttggacaaaaggagcaggtaggttggggaatggttttcctaacaaacagattaagaccaacagggaggatatggtggtaaactctccaagcaaagtttttgatctttggctgcacatttaggttccacagagttttccaccaggttttagaaagggaagaatcagaggaggagggaggcaaggatgcattgttagctatgtggtaggctgacttgacagagaagataccagagttgtcttgggtccaaataattgagtcagttttttgggggccaccagttggaattttgagaatagtggagaccgaatattcatcaaaaaattgctgcagttttttcttatcccaaaa

SEQ ID NO: 269745 - DNA, 535 bp, Cannabis indica
tgcattgggaggcttgcaaatggttgttcagatacttaaaaaggaaaattcatgaggaattacacatcaaaccgtgcctcagactttcacttcagggtactttgatgttgattgggctagctgccttgatgataggagatcaacggggggcatgccatattccttagaggaaatctcattttctggtctgtcaaaaagcagcatgttgttgctcaaagcagcacagaaagtgagtttcgttccttggccaatacaacagatgaaataaagtggttgtcatcaatactatctgaacacaaagtctctttgccaggtgcaccaataatttgggtggacaatcaaggagctgcctttcttgcagcgaaccctgttttctatgctcactcgaaacacatagagatagatctccattttgttcgagatcaattgcttgcaggagagttggaggtttgatatgttccctctattgaccaaactgcagatatacttacaaagactttgtccaaagatcgattcagctatttgaaatccaaat

SEQ ID NO: 269746 - DNA, 724 bp, Cannabis indica
tactttccaaagtccagaaccagatatccttgcccgtgccggttgggctacccctttcaggatagcagagacagtttcctgatcgaagtaactattaagtttttagatgttccatccgccattagtctgaagtaactcagcaaccttggactccctattcataatccgcccatttggagtgggagtaaatccctttaggtgcgcaatccaagggtcagaacatatgttcgtctcctgaccatcagccacacgtttacatgcacccttacaaatgatagttctagacttagtcacatttttccaaaaccacgagtctgaagccttcggatcacaatctagaaaagacttacccttcaggtatttggcttcaagaatacgacaacataaagattggttgcctgttaggaggttccacccccatttagcgaggaaagcctggttcatttctttagatttccggaatcctaaacctcctaaagacttgcggaggcaaagtttatcccaggcttttaggtacagaccatggtttcccttatccgagccccaccaaaattcacgcaccaatccatcaatcttagtcgcaagccgattagataacttagtaggttattagtgattattatatgtaatttgatgaatgatatgataatgatggttattagtttgtgaatgattatttgtgtctaataatttacgatttctaattctcttgttgtctctgttt

SEQ ID NO: 269747 - DNA, 757 bp, Cannabis indica
caatccatcctgctactgctgaatttgatgaagaaaaaacaattattttgagattttggcacagcaagaactttactggaagcaaagatccaagcaacattggcttcattcgggagacaaaaacagcaaatacttccatgcctcagccagcactaggaaacgaggtaaccaaattctgagattacaagacccgaatggtgtttagaaggattgggattctagtctgaatgtgattattgctgattatttttctaatctttttactgctgctggaacttcttgtaacagtgtggttgagaacattcgatgttctgtaacccgtgaacacaatgatgagcttcttagtccgattactgttgaggaagtcaagcacgccctcttccaaatgcatcctgttaaagctcctggaccagacggtatgggaccgggtttctatcaacatcattgggatattgttggtactgatttgattaaattactctctgatttctttgatactggtacttttcctagtgaatacaatactaccaatctgaaacttattcccaaaaagaagaatttctctactatgggagacgtgcgccctattgctctatgtaatgttgtctacaaaattggtgctaaagttcttgccaaccgtatgcgttctttgattgatgatgttatttcaaaaactcagagtacatttatacctggtcgtctcatttcagataatatcatggtggcttttgaactaatgcactatctgaagcggaaa

SEQ ID NO: 269748 - DNA, 839 bp, Cannabis indica
atatatatttatatatttactatgagagtaatcgagtactcatttgactaaaatcccattcttaaaataatacttactatttgtatttgtcccttgtcttggttaggttagctgattttttggctctcgttcatgattgtataaaggccattttttaattgcatttattagttgttgcataaactctaataatattgtttatttcgtccaacttattgctgctatgtttgtcaactccacatacatttaataaattttccatactatagtcaaattcgtttgtcatgattcgtatacatattttatatttatactaaaacttaggaataaaatataaattagtggacaagaaaaattatgtttttcccaccatgaggctcttttctacatatattttaataataaaatagaaaagacaattttggaattaaagacaataacatttataccccaacataaatatcaagatatgaagagaaaaagttgttagttggctgagctgtcatcagttagatagtaatgtctgttattttctgttagtaataactgaattcagtttgttagttcttatcagctgtgctgatataaattgttgtaatcctttcttttcattatataatactgaaacaattttctctctcaattttctttctctatgttcttgttctgtttgtaatatggtatcagagccaccattgttgtgtgctgctctttcttgatttgtttgtgttcatggcgaggaaagtgaccagtactcagagtcaagctgctcgtgacagctccagtaatgatgtgaatcaattttcggtgctcgataatgatcctgtgcctcggcgttt

SEQ ID NO: 269749 - DNA, 1141 bp, Cannabis indica
acatcttctggtcagctctcgacctgtaacgagctctggattaaaccgtctatgagtgagttaaaggttaattgcgatgctactctattttcaagggaaaagagccacggtttgggggtgaatagctcaaaatcacgatggtgtttgtattgcagctgctgctgtaaaaagcagtggtgatctcaaaccttttatggctgaagcaatgtctttgaaggaggctttgagttgggttaaaaacacctggggagatggagcctcttttgaaggatttgttcctatgcggtggtgatggaatcaaattgtctcatgttggttcataccattaatagtaataggcaaattctttctccacttggtcttattatttcagattgtattagtcttatacaatctatttctttgtttcacatttcagttcagtttattaaacagtaaggggattgtccttactggtttgaaagttattttaataactaatttgctttaatataatctttgttttaaaaagaaaaaaaatacaaaaatttagggtttcaattcgtgaagttttagagcatgctcatgaataagttaaaattttcatttattcagattagtccacaataactatgtttagtaattgtttgacttttgtgacatgtttgaagttgttggctttgtatttcacatatccttcgtcgaaataataaggtgggaaaaagaacgatgaaagtaaaattctattttatcatatataaatttttaaaaaatttctctcttacattctcaatttagaaattaaattttttgtactttatttcttttgtttctcaataaaattcgagaaatttacaaaaatattaaaatttgggttaacttttataaaaatattgtcagataaaaatcttttaaaaaatactatgtttttataaaataacagtggaacacaaaatagaacaactaaaaacaacagtggaacacaaaatagaacaactaaaaacaacagtgacacaactaaaaaataaccgtaaaacaaatgtgaaaacttaacatagtacacaatataaaactaacacagtattttaaaaagaaaaattctagagtataataataacaaagtaaaaatttcaatgtacagtgtaattatcccataaaattc

SEQ ID NO: 269750 - DNA, 510 bp, Cannabis indica
aagagccccaccaccaaaacttaagagatcagggattcgatatccttacaaatttttgttaggaatgcgatagcaagccatggcatatgatggaatagcttgaaggacagccttaatcagagtttctttcccagccctagagaaccatttatgattccaagaatgaaaaatagtggccactttatccttaaggaaggtaaaggcaggatatttaacacgtgagagacattgaggaagccctaaatatttggtaataaaagccctatcctccaactgaaaagtttggaaaaagagactcctaacctcagcacgagtattaggagagaataaaatagaggatttagcaaaattaaccatctgacctaacgctttagaatagatagataaagcatgatgcagggtttcacaagaacgcttgtcagcagagcaaaaaagaaaactgtcatcagcaaacagcaagtgagtaatagaaggtgcccgcctagaaattgcaatacccctcagaagctc

SEQ ID NO: 269751 - DNA, 674 bp, Cannabis indica
aaatatttttgtcaattaaatatgacaaaaataaattaacataattattcacaattatagtgatattaacacattggaagataattgtgattatatgcttcaaatttatttagtctcgagatttatcaatgtaccagatttacaatgacatgataataagcgatgtggtttacttatacttagataaatggaatgtcttttctaaggtattgataaagtaaacatgtatcaaatgtattggctatacatcacactggaccgatattgacagtggaaaagatgtcataaacttagttacatattttctaagttaatatcacgtagttgatcatagatcaaatgataatattagtgtagcactttaattcttaggaacgccacatgtgtacttttataaattagtttataataataaactaactgtttaataaaatatgtgatttaattaaatactttactaattaatttgaatatgaaattattttagcattataaactatttatggtttggaatctcctttaaattttttcaaaagatagctaaacaatactatatcaacatatacataagtcaaaagcgccataaacaaaatcctgacaacttagcactactagctggatgagccgatatgtacatttgttcaggaagacttttaactcatggttgtcttatc

SEQ ID NO: 269752 - DNA, 856 bp, Cannabis indica
tcaaaaaattttaaattgaaataaaaatatacttatctcgacaggcatagactgccgagattgcatcatatttaacagcgggctttgtctgccgagagtgaccccaataacgaaggtctgggaccgccgagatagattccccaccaatctcggcattgaaatttatggcgggccagacccaccgagatagatcaataacggggggctgggcctgccgacatagacctatttttttgtagtgagcccacttagctaaggagtgagaaacattattacaatctctattaacaaatttgatacccacacaaccatctaacagattagtagagaaaatttccaacaacggcacccccaatctgcccgaggagcttttcctgacagcaattagtttatagcagtttggttattcgagttgacaaaaaacggttttgtgttcaatctttgaaccaacttcagacccaatctaatagccaagcactcagccagcaaaatcgatacacaaccgtgatggaagagagattctgcaactatcaaacgcccccgagtatctctgataatagcagccacaccactgcccatttggtttgtacacagagcagcatcacagttcagcaagaaggtgccaaccagaggagccatccatctgctaacacccctctttttcttcatttccttgtttacagtaggctgcagtagagcatgatcaacataatcaatagcccaaggggtccagctcttcaaaggagtgaccttattttggaaaattcgttaattcctgtgactccaaaccagccaactcaaacacaaaaaggtttcaaactcctcatttgagcagttttttgccataaacataaga

SEQ ID NO: 269753 - DNA, 506 bp, Cannabis indica
tggacctagatagggatccggatacgaacctcgactcgaaccaagacccagactgggatagaaatgctggaccgagatcctaacccagacccaaacttggacccgcactcgggacccgaactagtacttcgacccgaacttagacgcagatcggggtccagaccatgacacaaacccggacacaaactcggacccgaactcaaacacccacacctagaatcagacccaaagttagacccagacccagacctaagctcgaacccagacaaggatcagaaccaaggacttagacccagaattgaatccagactcagatcgggatttaaacttgggactcggaccaaacctagaccatgacccaggacgcgagcccagacctagagcctgatctgggcctacactgaaatcaggacccgaaccgaaacttagaccaggactcgaactccgacctgaactcaaaccaaactcgaactcagactcgcaaatggaactagaaccgaactagg

SEQ ID NO: 269754 - DNA, 815 bp, Cannabis indica
gcaaggaatgggatagtagcaatttctgcactggtaaatctttgggattagcttcacctagtactgcaacatgaaaggcgttgttttcttggccaaaagttttctttagaggatccaaattgtccatgtctacccaatgttgtccatggaacgatcccaaatgtaatggaggagttattaaactcaagtgttgtggtgttaaaaaagactttagtaagaactcgactataagtcttgccattgagtgttgtttcttaataccatgaatttattagttagatacattttgaaccaaccaattatggagccaaaactcaataattatatagaaatataggccagtcacgtggctttcctcacatgatatagtgtgtatggtcaattgtgttaatatttatatgtatactcatcagtctaccttaataaataactaaaactcagttcatcttcatcatcccaacaaatgaaatagtctcatctcagatctgaaagctttatctaattctcttaagtcaagttaactattaagtagcgtttggttagaggtatgaaatggaatggaaaggaaaaaaggaaataacttttatttcatttttgtgtttgattttattttaaagtattggaatattattcctattctagttatgttttcattcatttcaaccaaatttgagtatttattacgtgagtttgagctagagaaagtaaaattaaaaaaaatagactttgagagaatatgaaactgttggagatgattaatattattactattttaagttaaaaatgaaatttacttgaaaacacaattccttagt

SEQ ID NO: 269755 - DNA, 498 bp, Cannabis indica
tccaatttctatccattatgaaacttctaaaaaaaaaaaattattcagttatttgtttaaatatgtgtatatattttattgaattttatgcattttatgaagtcccacgcttaaatcaaaataccacattccaactcccctaaattttcctcagctaaatttttaagtggcaagaattttatagaggcagctaaggatccttcattttccctgataacttctccattttctattcatccttttaagcttttaattaatactttagcaaatataacttagtaatcgcatgcaaaatcaagaaaagaaattatatctgaaaaacaattagaagataacctatttgaaataagccatagtataatatacattaacctatctaagaaataacaataaactccactaaaaaaagaagaagaaaaaaaaccttaaatcactactagctagccccaatctcaacggccagtggcccaacaacgtcgttcactgtaccataaccta

SEQ ID NO: 269756 - DNA, 629 bp, Cannabis indica
ctctaagcgtgccagcgatatgtcctgctcggactatgcttcccgggcagatattccaagtggattccacgtgtcaccattcatgtgatgccacgttagagtgcaaaatttgggataaaaacaaggatgacttgaaaggtacaatcgatccaaaaaatgcctaaatcactttcctagtcatgcataatttataattttgcctgaaatagcaaccaagcaagttctaaaattttccaaacaacttttcataagtcaaatttagcatacataaatcaattcaactactagaaaatgacctaatatgattacatgttcttttaaagcacaaaattaacattagtcaggagtataacatcaccatgcacacagattttttaaataaacttttcaaatcatgctatctacttacttccaaattaactcatattaagcaaattaattcacacaaaaagaattaattttagaaactaaagattaatgaaaattttaactaaaaatttaagtttacccaccaaactaaagtgacacattgttcccaatgtgacattaaaagaaaagggaagggaacttacctgagcgccatgtgagtatggcggtggtggtggcggcgggtagaatccacctcttgc

SEQ ID NO: 269757 - DNA, 770 bp, Cannabis indica
aaggccctattttcaagctcatcccttttgggtatatactaaccaaacgttacgccaaatattgaaaaagtcatatgcttctggacggttactcaagtggggaatagaactaggtcagtatgaaattactttccaactccgaaaagcaatcaaaggccaggccttagcagatttcgtgatagaatgcacaggcaaggaagaaagcatattggaaggcaacccgagccagtacaaatacctcaaccaagtaacagtgaaggcaagtcgacttggaaattacatgtggacaggttggctacagatcaattattcggagcaggaatcgcccttctcacacctagggggcaacacttgcacgctgcagtcaagtttggatttaaagcatccaataaggaggccgaatatgaagctttggtcgccggtctaaagctagcccgggagatgaaagccgagcatattgagatctgcagtgattcacagctggtggtaaatcacgtatctggagaatacgaggctcggggagaaaagatgatagcatatttgagcaaaatacacgacctgctcacacaattcaaaagctacggtctcaaaaaaattccaagggaagaaaacacgactacgaatgcgttagctcggctggtgagtagtaatgagagtgataaagcgaacttggttcctatctagttccttgaagaatctagcatcactggcacagaggagatcgaaatgattgatacttctccaaactggatgacgccaatagcaaccta

SEQ ID NO: 269758 - DNA, 732 bp, Cannabis indica
gtttgagtctaggttcgtatccggatccctatctaggttcgagtctgggtcttggattgggtcccaggtctaggtccaagtccggctctcgctcccagtttgggtacacgatcgtgtttgagctcgagttttggtctcgctttgtgtttggggctaggtccgagttcggttctaggtttgggtccgggtcctggtcacaatcctagtctttttcaagggtcttggttttgcagttcttattcaggttccagttctatctcccgggtctgggtcagggtctgcgtttgggtcctggtccgggttcgggttcgtgtcctggtttgagtccatgatctggtcccggtcacctgtcccgttctagttccagttcaagtcttggctcccaagtctgagtttgggtttgggaccgagactggggtgcggttctaggtcccagccccaattttgtgtcccgagtctggttccatgtttgggtctgagtttgggtctaggttcggcactgagtctaggtatgagtggggatctaggtttgggtcccgattcgggtctaggtcttggttggagtctgacccttgggacggttacatttctgggtctaggtttaagttcggttttggttctaggtctaagtccaagttctggtcacggttccagtcccgttccccggtcccggtctacttccagtttcggttcaaatttttgatcacaaggtacggattcgggtccaagttt

SEQ ID NO: 269759 - DNA, 470 bp, Cannabis indica
tggtaaaaataatttccaacaaagatcacctatgctaagatggttgagaaagcattgtgagctgagggcgcagttagatgtatgttggaatcaattaggactccagtatgtggcggggctcctacccctcttgcgtcaggtttcagcaggggaaggtagtggttcggccatggactagaggaggaaatcatccactacattcggtggctcggggcagaacaagaggttccgagggaaccagaatcaaggcggtcgtcagggtagtgttgagacccgttattcctaccggagtgtctcattagtaagaggcatcctccgggtgagtgcttaggtcaaggttgattttgtgaggctgccagaatctctagtaaattggatataccgtataatagttatgaattagggtttagaaccctattacctggcggaaagttggttatctccaacaggtggtttaggtctatgccaat

SEQ ID NO: 269760 - DNA, 623 bp, Cannabis indica
aaacataaaagtgttggagggctgggctttcggagtatccgtgattataatctctctttgcttgggaaacaagcctggaggttgcttaatttcgagaactccctggtgggttagatctataaggcaaggtactatccgaacagtactttccttaatgctaagttggggaataatccgagcttcatttggcgaagtatttttgagacacaaagtttgattaaagctggtgctcggatttatattggaaatgggttgaagactaatattttgcatactccttggctacctcatgactcaaatccgtatgtggtttctacacacccggggttgaataattttaaggttcaaagtttgatgcaaattactagccgtgagtgggacatggaggttgtctcggatctctttaacaccagggatcaggcccttatcttgagtgtccctcttagtaataatgctgaggaggatacatggtattggaagaagaatgctactggtttctacactgtcaagagtgcataccagtacttacaagaaattaaaggtgcgtgggggttggaagctgaggatttagcttggaagaccctttggaaaatcaaagtcccacctaaggttcttcaccttat

SEQ ID NO: 269761 - DNA, 506 bp, Cannabis indica
atttgataatatagtatattattgaaaaagtcccataagttaaccatattcgtagctttctaaggaaatatatattttttaattggaaaagcttcatcccaattatctccttttagaaaatttacatcacattcagttatggtaggtttgcggactgctttggcttgatattagataccaaaactatcaaaacaacctacttatttaatgtatggaaactttccttacaaaaataaatgtatggaaacttgtactctcatcatttttatctatatgttttaataattgtgtaggcgcacgtgccctatactgctagtatatacatatgatatttcttactttccaatctaaataactttaatgcataatttaatggtataattataggtgggatttttttaatatgggataaaattggcacaaactttggaagtacgagcacaactcaatataaaaaaaaaaattagttaaacacgacacgatatggcatgaaaaatataaattta

SEQ ID NO: 269762 - DNA, 639 bp, Cannabis indica
tctcgactatattgtacttgttcttgctcaaatcaataaaaaaaaattggtagtgttccatgttggaatttataccctaaaagcaagtaattaacagataatatattagagaatatgtgaaatacaattataagataaatgatgtatcaattataagagtataattattaaatatctaaaaattccttattcatatggagaatgtataatcttgtaaggatgtacaagagaattaagattatataatatgagtaaaacaaggcggtattatattaaagtattagaaatctttaatatggaattgctaagtacaatttacatatacactatatgtctagtgtgtgtgattttgattcggatcacatatgtagatagacacgtagtaaataaattgtgtataattagataatgcatgactggactggtatgcaataaacatctttcattaacttgtcgtttatcatgaaaagagtttatcatatcacaataatgatcattagtagatcagcttgaatcttgagtatacatgagctcctgtttgtgttcattgagttctttgattcacttatggaaatttctcagagaagatgattcttacaacttctattttaggagcttaataacatgagtggttgagaa

SEQ ID NO: 269763 - DNA, 536 bp, Cannabis indica
cccccactttcacccaggttgcagtccacttgaagaacaaaaaatttttgacatcgtataccccgtatacgttctctctctctctctcgttcgttctctactttggtgtatgaaattataactcaaaaacctaacttctatcgtgtttaaacccaagcaaaaagatcgctttgaaccgaagtgaaacgattctcattccacaaaaatctcggtcctctgaaccgtgcgtatatacactcgtatatacaacaacaacaacaacaacaacgataacaagaataataataataataataataataataataataacaataataataataataataataataataataataataatgttaaatataccatttaacactataataatattaccaatattattatactaaaaataataatcacaattattattatactattataagttaacatatataattattattattattcccacactaataataatatataccaaatcaaatcaatcacacaaccatataattatatccagatatata

SEQ ID NO: 269764 - DNA, 507 bp, Cannabis indica
aacactttttacgtgaaattttactaaaatgctatttattaacaaaatatacaattatgtatttattaatcaaaatcagaagctagcatatttcttaaccatttatatagatcataaaacatattcaatctgcttaggaatatgtatgaaatactatccatgattatgtataaatttattgttaaaaacaaataaaaccctaaataattaaccaaaaatagcaagacatatcaacatagtctcaaatcaattccaaacattgtaattatattttaatattatattgaaggttcgccaaacagtgaacacaatttttgtactatttattctatttaaaactcaatccaatagttaattaatcacaaataattataataaatacctacagcaaccaatacattataaaactcttttgtttcataccatagataataaatagcattacaaaaatatattctactgttttagcatcacttaactatttttcataattattttaagtattaa

SEQ ID NO: 269765 - DNA, 513 bp, Cannabis indica
atattattttcttcaaaaaaaaataaatataaatgaattttaatattttatggtaattcaatctcatttatattaagttttatttttataaatcttaaattcagattttccttttaatgttttttatatgcttttttattttattttaaaaaaaattattattttttaatttgtattggttaaataatgccatatttatcataactttaataatgttttttttaatattattgaaaatagccctaaataaattttgtttgtttgtttttggcaaaaatataaacataatattttataagcacattcgccactacaaatatattcctaaaaataattataccagtgatcccttctattactttatttattttttaaacaaaataaagcaaacatatgttataagtcatttagtttgttatattttatttgaacattgtagaaaatgattcttattaaactataattttatatttcttaaaagaaaaaattgtcgtaaaaagaaaaaaaaaaaaa

SEQ ID NO: 269766 - DNA, 664 bp, Cannabis indica
gatataaaaaaaggataaatactattttggaccttgtattttgcaaaagttaccaattagactctctggtttgttaaatgataaaaatggaccatgtatttttaaaaattgtacaaatgggaccctgaacagattttttttgtcaaaataaaatttaataataattcgatttaaaggtgttatgacaaaattatttatatattctatatctgttcgtgttacaaattatttttaagttggttatattaaaaaaaaagttgcaaaaattaagtttaatgtcctatttttactattttggaaagtacagtgttcatttggtcatttaacaaaacaaagagtacaattaataacttttacaaaatataaaaaaaaatatatcaaaaaataatttttttaaaaaactaaatattaagagaacaagtttgaaagagtgatgatgaaattgattgatttttatgtttcttttatgtcatttatatatgagaagtttaagtgtcttttcatcacttatatatatatgatagtttaaaattatataaatatataaataaaaattttaagtaatttttaatgataaaattttttaaattattaaactgttaataaatttaaagtgtcatccagttaattattaacatatgttgcttatgtgtacactcttata

SEQ ID NO: 269767 - DNA, 1115 bp, Cannabis indica
ttttgtttactgcaaagagtcattctaatctcctttgattcactaaacttcagaaaataagttgatgtgatatataatcaaagggaaaggaagagactaacatttttatgttgacaatttcattattgatttctataattctcttcgattcactagacttcagaaaataagtcaatatgtgatatataatcgaagagaataatataaatctttatggtgttatgctgtccaatttattgtaaatccctatgattttcttttagctcactagacttctgaaaataagtcgacatgtgatacataaccaaagagaagaatgtaagattatttaaagaaattattataccaccaaaattatcataaggtgtagattctcatacaaaaaaatgagagtaatataagggagttgattgattacttactgcacactcaaaaaaaaaatgtaggttcagtcgattatatcctaatcaaattcactttgttggtgtgataattaatggtgaaaattctctctgtaaaaaataggtgatcagtgactatatatatatatccataaatgttattattcatataaaaaaatgatcatatgcacaaaaggtctcgtcattattgtcaagccatgggattagtatgatttatacatggtatgcacataagttgtagatcgaggatgtgtatagacgccaaccatatattacatattcacatatatatatgtatatatgtgatttcttctcagtaactttataggctaaacaaaaaaatctcacaagtgtgagaatgactcctataaatatgtactgattatgatatatatatatatatgaataatatattcatatatatgaatgcctatttgaaaatacgaaacatgtgtcacttgaaaaattcctctgcttatttcaaggtgaacaaggcttgtaaattaaatgccaaagtttaacaataaaaaaatcgcatagaagactgtgagtgtcttctaaacaaatttctggaacaaacgaaaaaaaggaaaaaagcaagcatgcactatagtcagtaaaaaaaaaagaaaaaaagtaatatatatatatatatatacctgtgcttatacgataaaaaagaatatatatata

SEQ ID NO: 269768 - DNA, 640 bp, Cannabis indica
tttagtgctcaattagatttcttggaaagtaaggtatcattttataattttgagtttgtagattcattgttaaagtttcatatatatatatatgtaccattatgataaatcgtaattaataagtatgaaatttaggttttttataaaatgattatttctcaaggatctctcattgcaatcaaggctaggactctacattcgaggtaaagaaattaagtagaaacttttaagttttctgtatgaaatattgttcaaaaggagtgggagtaaggtataagactactatcctatttttatttgttcattatcatattatgttgtttgaataatggacagtacaatatggatttacatcgtttaaattatttatgttgtttgaataagggacggtacaatagattcgcattatttaaactagttatgttgtttgaataatggacggtacaatgtattcgcattatttaaactagatatgttgtttgaataatggacgggatatgaattcgcattatttaaataaagttatatatgtgatgctatttaaataatgtatagtaattagacattatttaaattagataaattgtagcttatgtgatatgatttgaccgaaaagataatggttaaatacttgactgtt

SEQ ID NO: 269769 - DNA, 629 bp, Cannabis indica
tgaggtataagacttctatccttatttttatttattcattattatattatgttgtttgaataatggatggtacaatatggattcgtattatttaaactagttatgttatttgaataatggatggtataatggattcgcattatttaaactaattatgttgtttgaataatagacggttaatggattcgcattaattttactagttatgttgtgtgaatattggacgggacatggattcgcattattcaaataaagttacatatgttatgctatttaaataatgtatagtagttagacattatttaaattagataaattgtagcttatgtgatatgatttgaccgagaagataatggttaaatacttgacagttgggtctatatagtagatagggggccatttagtagtgggtatgattttactgaacccagccctccgccatttagtctaatagctcgggtttatttaccaaagtcagactcgggtgtaatcattattatgtgacttagcttagaaactagggattagttactagtgacaagattaagcttatatatattgctatttgtctaagtatgtgcatccaagttttaattatatattttcttttattttatgtgactacgtga

SEQ ID NO: 269770 - DNA, 1455 bp, Cannabis indica
aaatgttttaaggataaaatacattaaacggtagaacgataaatttgtccctactcgatgtagatcatctatagaggatctttgactatttagattataattatggataattaatagcgtatctatatcttagaacatatagagcgttctatataattaagagtgcaattccatatctatagtggagtcaggaggaatcaataagttagagagtttacttggtaaattctagaactacttattggaagcttgattatataggcccgtggtccccacactagttgagataataactgattgtgactcagttaattggttttaattaatcaattataattctaaattagactatggcttatttatgaattttcactaagcaatggcttaattgtgaagaaaagagattttaggtgtttaccgagttttttggcatccgaatattttatggagcttaagaaagtaatgaaggtataaataatacaataacaaacaagagatttttacgtggttcaggcgttaaatatccttagtccatgagtccattttattaggctctttggccgatgatcgtttatacaaatacaaaaggatggacttttcttgcagaccactgtgttcctctcgaagaagaagaagcttagtaggaatattctggagttaaaaaggtgttaaattttggttgatccctaagcagaccccacagaactaatcttttggttggggaaccagtttactggttggggtattttagggcaccctagtttttacaatatttagggaatttccatgttatccatcgataaagaaatttttagtttcatttttaagtcctcgaaaagtgatttagcgagtcactcactagttttacgaatattatgatttaagggcctataaatcgtcgagcagctgttctactcaggttgacgggcacacttgaatttagaaacaaggtaagattagtataatgatatgcatatgtgtttacatatttagcatacatatttattaagtatgtttgattacatcgatagcggtatcaatatacgtagaattgtattagataccgatagatgtatgtttggctcagatactaatcgacactatcacatcggtacgactagagtatgactagagtaccgagtataggctaatattatggttgatagtattgttgtatgaacattctaaactcagtaccgcctagggtgcgaggatatggttatagttgggtgtatgggcgcttaattgtaactgggttatatttatgattatgattatacttttcttactgagtctatcgactcacagttattgtttgcatgtgtaggtaagggcaaggctaaggctgagcagtcgtgagagcgagtggatgaagattgtacatgtcagggcgattagacctggagcgtacgatctttgggacaactggttgtattttgtatagtcgttaggcga

SEQ ID NO: 269771 - DNA, 627 bp, Cannabis indica
aaaaaaaaaactactaaagacttgcaaataattaataactaataaactcactttttattcaacattttcttttaaaactaatgtggttgcatacactcagtttatcctctctcaagtttgttctaaaagacatactttaagcatcttttttagtttctgaaatatagataattttagaggctttgtgaatatatcagcaacttgctttttcttcacttctgtaataaataagatcaataacgcatttcatattgtgctctcttaaataatggtacttcacatcaatgtgtttgcttttaccataaagaataaaatttttaaaaaatttaattgctaagctattatcacaataaattatggtgtctccctcttgcttaaagtataactcttcaagaatcttcctcagccaaaacaattttttttatatatatttttacgtaattccacatagaaactcctatagcaactaacggaacaatctaaataacaaccaaaatccacatagcaacccacatagaaattatcatagcatcccaaactgtaaattttaaaaaaaaaaataaaaaatagtatatggggtaaattctccttttattttttaaacattatatttttatttttataatt

SEQ ID NO: 269772 - DNA, 949 bp, Cannabis indica
tggatcttagaaacttatgattgtgtggagtggggctttctttaagctatgatgagtaaaatgggatttgatttgcgtttattggccttgtcattgccacggttagctcggtgaggtataaaataattcatggtggacatgagctgggcccgattgttcctgagaggggtatcagacaaggtgatccttcatcaccttacttatttcttatttttgctgagggcttctcatcgttggtacggaagttggagcgggatggtaggcttaagggttgcaaggttgctaatggtgctccggtcatatctcatatgctttttacggatgctagttatgtctattgtcgtgcaaatgatagagaggcttcgcatatactacatctgcttcagttatttgaaatcgcttctggtcaacaagttaatttcagtaagtcctctgtcttcttcagtactaatgtgcctaatgctactcgagaccggttatgtgggatccttaaaatgagacttgctgatgaacatagtacttatcttggcttcccttgtgtcatgggaagaaataaggatgctattttggggtttttgaaagacaagatgcaaaagcgcattcaaagttgggagggtcatttcttgtctactgctgggcgtgaagtcctaataaaaaccgtagcgcaagctttgccaagttttgctatgtatgtgttcttatttcctctaaaaacttgttcacatttggaaagctttatgtctaagtattggtggagttcgagtagtaggaagggtgtgagctggtttagttggaggaaactttgcaacaataagagctctggtgggatgggttttcggagtttgcgtgagtataatctgtctttgttgggaaagcaaggttggcggttgttgcgatatttttgcacacgcaagtgtacgtatcgtttaaagtagtagactcactagga

SEQ ID NO: 269773 - DNA, 912 bp, Cannabis indica
catataaaaagaggtatgttttaaataaatataaaattagaggtaaatttgattaattgatgaataaaagaggcatttttcaacttacccctaaaatatacccgttatttgtcatcaattaactaaaaatagctttatttttaattcaattgaaatgtaccccatttatatgttcattaccgattataccctcacataagagtactgtttagggaggtgaagaaggtttttctcattacataaaggtataattgagatataacaaataaaagagggtataaattaaatatatagaaaagaaaggtaaaaatgaaatgggttaacaaaaaaagagtatatggtgcaatttccacaagaaattagggtaattttcataaatatgggaattgagggtttagtttacttttttatggcataaataaataacattatagggttaagggttttttttatttttatttttacatttatatgggtttttcttatgctatatttttgtaaaaaaagtggaaaccctatatttgtaaaacaacaataagttttgccagaaaagtcaccggcactggaaaagtcgccggaaaaatcaatgtcgccaaaaaagtcaccggaaaagtcatcggaaaagtcaccattaccggaaaagtcactggaaaagtcatcgtcgccggcaaagtcactggtaaagtcaccagaataaaatgtctcagatataactaaaaatataaccggttataattaaatataaataacataaaataactcaaaccagttataattaaaatagaaccggttctataatagtgttataatgaataaaaataaataacatgaaataactcaaaccggttataactaaaatagaaccgattatataacataatgaatacaaacaagtaacacgcaataactcaa

SEQ ID NO: 269774 - DNA, 597 bp, Cannabis indica
aagcattttctcgtctattggtgtgttttggagcggttttacgcttgattttccttgtctcaggtttccggggtatcaaaagtcaaatgcagtcaattgatgaaaagacgggacaaactggtgaaaaatcggagaaatttgctcttcaggtgtcagtagtcgcgaccatggatcgtgctagtcgcgacccttttctatggtcgcgaccacggtcgcgacttggagttttggcagaacctatgattttcgaggtttgcctgtagtcgcgaccagcctttaaggtggtcgcgaccaggtacggaaaacgcagtttttgacctaattcagatttttttccaattggaggcacacctttcattcctatataaggaacacgattcagaaggtcaaaagaagcaaaaatagacctgaaaagtggatgaaagtggagaggaagctatcttgaagacccggagcgatatcaccttctagtttctttcttttacccttattctttcttttatgtctagttttgtttcagatttaatcatggatgttattattgtttttatgagctaaatttcccattaagggaggatgatgaatgttgtttaagtt

SEQ ID NO: 269775 - DNA, 753 bp, Cannabis indica
ttttattattatatggccttgataaggcaagggagtacacagttggtcccctatcatgctggtgacaaggtgcttcataagtcaccatgtcaccccccctaaagagcttattggggttttaagggatttctaggaacatacatgattatagctctctatacatatttgaatggaaatacaaagaaagaaagctaaacaacaaaagactccccacactaatgaggtgcttggtgcaagacttgactaatgatcaagcaccaaggcatgctcatgttacaaaatggtcccattgtgggtgtgccgtggggcagcaagccacactcagcaggatgtcactatgtgcttcgggttcgatttctttaatcttcttcatgtcatctcctaactccttcaattcttccttgtaaatggcttggtatacaccctgatgaaccagaattgctttcgttttaatcctccacagtccaaagttattggctccattgaagttatctacttcaaagtgtgcggaagccatagatcactttgttgattttgttcttatttcaagaaacctgagctctaataccaattgttgtgaaagatcaccttgggaagaacacaataaacacaataatgatcaatgaaactaattcaagacaatgcactaatatgagagcaattataaaccaagtagcaaaaacattaaacacacataaagaacataagaacttaacgagattcgaacaaggtaatggtgaatcaccttgccta

SEQ ID NO: 269776 - DNA, 630 bp, Cannabis indica
taaacagcaagagatataaaatggaccattattcatcatcattggatcaaaagaatttcatgatgttgtccattctcctaagaagcaaggcctgacttgtctccattcttcccaaacgcaagttgaattctgccatttctgtaggagcagaagttgaagcagatgcagcaacattttttgaacggttgtgcattttttgttcttgccatttttctttaaaactctagaaaaacgaacacactctcacacttgaaaaagattagaattttgagaaaaataagagaggaatgaatagtggtgatcgtggggagtgggtagttgagaatatatatttaacacattgattttacttacccaaaatacaaaaaaaaaaaaaaaaagaaggaaagtaacttccttaccatagatacatgtgtggagagaaaaaaggaaaccaaaaagatatttcaaaaattggtcaagatttcgtaaaatggaaaaaggaaacaacataaccccacaaaatctaagaattaaacaccctaccaaaaccgaaattgccaccaaaaaggaaaccataaaataattaattaattaaaaacaagtttcctaaaactaccaaaaataataccaaatctccaaaaataaagg

SEQ ID NO: 269777 - DNA, 820 bp, Cannabis indica
cgtactcacgacacaacatatatattatatagctccgtataaatgctgttgtacaacatttatttttctttccattatgtaaacaatgtatttgcagcagttttatacgtaccgtacaagataaaaatatgattctacgaaaaactctacaagtccccccgtttgtttcggagctctgaaacaacctgggcggaacgagtcctttcatgggaaggatggagtttatcagtccgatcatcattgtgttgctctccgtctcaatttattctggttttttcatggatttggatttggtcaatcaatgcagaggtgttgagtcttgatgaaggtgacggccctgttttgtcactcaacaaagctgcgattgaggaaggtaagaaaagaatggatttgtttcttgttggtaaggtggtcggtcctcggccggcatataaagaggggactgagaaagcaatgaaaggggtgtggaaaattaatcaccgttttcaggtgcaagaattgagttcgaaaaacgtctttcaggttttctttcgaagccgtgaggataggcagagggttttcggtggtggcccgtggacaattgacaaacaattgatctattttgtgaaacaaatgggattgggtgaaatttcaaagatgaattttgattttacatcgttctagatttccattaataatgtgccattagcttgtatgactgagctctttgctaaagaatggggagaacagattagtaagctggaggatattaagattgtcaatggaactatgaaagtgaggatgcgaatcaatattactgaacctcttaaatgagggttgc

SEQ ID NO: 269778 - DNA, 794 bp, Cannabis indica
ctaggtttacaggatcttttgagattctcgagagattgggattagtggcatatcgtctagctttgcctccatctctatcagcagttcacaatgtatttcgtgtttccatattacaaaagtacatttcagatcctactcatatactgagttatgagaatcttgagctacaatccgacttatcttacgaagaacaaccagtttagatcctagacagaaaagataaggttctttggaacaagaccatagctttggtcaatgtagtctagaaaaatagcagggtggaggaaaccacctgggagttagagtccaacatgagggcttagtatcctgaattattcagataagattttgaggatgaaatccttttaaggggggaaaattataaagaccgcttaactttaatttggaaattagcagataaatagggtttaattatgaaacttgcatattagttatgaattattattttacgaagatttatttgaattcagaatgcattatatatgtcatatatagaatttcatatttttgcatgttttgtgcccgacaacattagaatgcggtgtttggccattagaatcatattttagtatttttagtgtagcgggataatatagttatacattggaaaagtcggaaattattcgatgtagtacatgtccaaaatacccctagatgactttggactttgaagcataaatgagggttgaatggtcttttgaccttcgttgtcctttagtggactttagttagatattttattttgatttttatcctttaatttattagataag

SEQ ID NO: 269779 - DNA, 719 bp, Cannabis indica
gatatttaattaataataacaaaaatatgacaaaataaatagcataaaatgataaaagaaatgcttaagtccatagaaaggagacaaacataaaattgccatatttttcaaataaagtttcaaaataccatattaggtgtaattttctcttttattattttgtttgtttttgtatttcattttttttttatttttaccaccttggaggacaaggtgatttttaaagagtcggaaagtgttatgaaaataatataggggcttattagtaatttgtaaatagtggaaaagcctataaatatataattgtgtaactattattgaatagagaatgagaaattagaactttagttcaattgggagattgacactgtctcgaaaagtgtattttaaaaatttatcttgtcttgaagaggactcgttacccatgatatgtggtcatgaagattaatgtgcatccatcgtctaatatagacaatgacttctctatcttgaactttttcattcctcatcatctaatatagacggcttctcattgttgagaatcatggggttccatctcaaaaccaagtggtccaattggtgatgagtggagtagcccatgttcttatatatgtctcaatactttactatttatttaatgtaggataatgtccacaatattctccctcaagatggtggctattttttttgtcaccgatcttgaaccatatccgcaagag

SEQ ID NO: 269780 - DNA, 549 bp, Cannabis indica
acctaaaatgcctattatagaaaaagtccctaaataaaaaagtgctggttatatattgctattctattttttttttctttatttcttgtgattaacacctcttgattaacaggatgttcgtatatttgaaaaaaaaagaatcttcttttgtataaaagtttaaatatgcatgtatccgtataaatgtaaatatgaggtcttttttgtatatttgagaaaaaatcccaattttaaatatttttaaaattttatgattttatttatagaaaatacaatatattttaatgtatttttatgttaaatttttattatagttgatcttttttatttatatattagatttaattgttgttttgatattttttatatgttattttcaatttatttttatatttttttttgtaatttaatattatttttatgaaataccataaaatgttaaataaaaattcttaaaaggtaaaaagatttttttatacaaaaatagtgtaataatatgtaattatccctattatataagctgagctaagtgccacacatatgaacaat

SEQ ID NO: 269781 - DNA, 755 bp, Cannabis indica
ccccagttccctctggctaagcttcaccaagttcctccagggtgcaacctatccatcgacaatgaagccccttccatcacaccttaagaaaccttgcccatcgttggtcgtctgaaattgcaccacctccgatctcaccccatcaacccagattgactcatctaaaactcgcaagctcatctaaaactcgtgcacttcagctttggttcacacgatctaagctctgtcaatttaaaaatcgcaccactcgagtttatcgtcttctcccctcctcccccttcatcttctttttcttcttcttcatggctaccggagttgggaggagctcaaatctcagatctggctgtgtttgggtaggtgtgatgggagcataggatttcagaatttttcctagtttaaactaatttttggatctcacaattgtagatctgagctaaggctttgtgggcatcattgccaatcggatatggaatttgtatctatccatctttggcattaaaattacaaatctaggaaaacagtaggaaagtctccatcttgggttagtttcaagctcagaacatactgtgaaatcaggatctaatattggggcttgcatcggatgttggagcttacgaaaatgcaactgaagatgggaaaggatccagatgccggagcttgggaagaaggtcggagctagggaagatgggtggagtggacaatcgaaggagaactgggaaagaagaagaaaaacaaattaattagttttaattatt

SEQ ID NO: 269782 - DNA, 766 bp, Cannabis indica
gttggatgcagttgactgctatgcatttagttgatgcccatctctgcagcgatcccgggaaatatgttagcgcgttgcttctttctttatcgacgatgctccatatggaattgccacacattaatgttctgtcaaagattgatttaatagagaattatggaaagctaggtgagttttaagggcttttatttgacacatgtttctttctttttgatcagtacagattcttgtttcgttctaattatttttgtcgtttttatgtgttgcagcctttaacttggatttctatactgatgttctagatttatcgtacttgcaacaccatctcgatcaagatccacgttcggctaagtataggtggggttgattgcgtgttcttaatgtttttttcgatcttggtaagtgcatcagatgaaactcgatatacgaatttattagaagcactttgttaccaaacattaaaattgaggtcttaagatctttgttgagtaaaaacacatacatcatttgtgaagcgtgaaattaaactggaattagatcccgtgttttataaaagttaccgatcagacactctgtttttcaaaatggtaacaataatagcgggagctcaatttttgtcaaaataaaatataacaataacttaatttggaggtgttatgactaggatagttacaatttttgtattcattcgagctagaaattggcttgagacaaaaaaaaaattgacaaatattgagttgaagatattattttttaccattttgaa

SEQ ID NO: 269783 - DNA, 647 bp, Cannabis indica
taaaaattttaaagtttgtaattattatggtagaaagtcttaataaatttttatttgctaatgtataatgatgattgtattacgtaaagtataatagtgaacaataaaataatacatgcaataatataataataatcatcatcaaataaaaagtttgtcaaataaaaaattgaataataaatttcgttaaataaaaatatcacattataaatggatgaaaaattttgcactaaaaaaaatctgaatgatttcgatttaccgtcgatctcatataaatttgataggctatgataactttggataattatgaggtgcttcaaacgtactataaatgatcaaattgctacccttgtaaagacataatttttttttttttatttattattaatttaacttttaaattaatttaataatttaaaatttatgttttaaacaataatgtatggaacaattatactataaaaatttcaaagttacaattataatagtgaacaataaaataatacatgcattaataaataatattcaaatgaaaaattattgtcctcccctatattttaaaggtaaatttgtagcataaatacctattttgttcaatttattgctattaaatacccaaaatcaaaaaatggcggcaaaagtactca

SEQ ID NO: 269784 - DNA, 539 bp, Cannabis indica
cctagttcggttctagttccatttgcgattctgagttcgagtttgggtttgagttctggtcggacttcgagtcctcgtctgagtttgagttcgggtctggattttcaatctaggtctagattacgctgcgggtgtgggttcgcgtgctaggtctttgtctaggttggatccaagtcccaagtttcaatcacgatctgagtttggattaagttttgggtctaagtccttggttctgatccttgtctaggtttgagtttgggtccgtgtttgggtctagctttgggtgtgattctaggtgtgggtgtttgagttcgggtgcgagtctttgtctgggtttgtgtccaggtctgaaccccgatttgggtctaggttcgtgtctaagtccaagacccagagctagaccaagaccaagaccaagacccaggatgcacacccacacccagagcctgatcttaacctagacttaaatccggacccgaacccaaactcagaccaggactcgaactccgacccgtactcaaactcagaatcgcaaatgg

SEQ ID NO: 269785 - DNA, 587 bp, Cannabis indica
taataattacacagttatttccaaatacaccctacggaactccacaaatatttcaagtctttttatactccaacccaaaaaggcaaaaagcataaccaaaaagaaaaacaaaaaactagctacaccttctctcaaattcagcgtgactatagcattaacaaacctccgagccagcgcggcttggctcgctccctatggtgacgatccatgggttcctctattgggttccacaaactgaagtcacagcttggtcttgggcctcctcattcatcctagctttcatgtgcctgtctcttgggcctacgtaacattagctatggtgcactttcccagccattcgtcttaccaagttttacaccattgttaatggccattcgctcaaaagccgaaggactattaggtttaccaaagtcgttgtaccatctattcttcttattcattgtcacttctacgttgattagagtatttattaaaaaactaattatttcagaaaatatatactaatgctctatctaaaagaaaacacgagtaatttcatatcccatacacaaaatgtacgaatgctaatgtggaatggttggtttgga

SEQ ID NO: 269786 - DNA, 1168 bp, Cannabis indica
ttaacctacaccactcaagaaaacttgtcaaaacgacagggacaaagttgtcccagaaaattcaatttaaaacccaatcaacgacaacaaattcttggtcgtttcttccctgcacgacaatgaagcttgtcgttttcactcacacgacaaatcgtttaaaccgaacgatttgtcgttctggattgaacaaaactaagttcaatcagagctaaccctagctcatttgcaccttcgaacattcgagagtttctcaaactctctctctttctctctgccttctctctggttctcaaaccctagaaccagagatccttctcgatctattgatcgatcttacccagaaaccttcccaaaaacaacacacaacacacacatacaaatatcaaacatagatcattaggttagggttagaaaatgaacaccagagattatagaggttcgccctaaatcaggggtacgtcctctttgagctcgccttgaagatcgacctcagatctttcactatgaagcatgaatattacaacaggtaagaaatccaagtcacagatcgactggtatttctaggttttctctcttttggttttctgtgtttatttctctttttctttcttctggtttctctcactaactcacttctgtttcttgtgcatgaacttgaaacaacgactggagctgaacaatctctcagatctggtaacctagggctttttgcatctggtatatctcatctcttctcttctgttcctttttatagttgtagttctagggttgatcacagaactaggagttagttacaacttcggttgtaactaacaactagttcttgatccactagaggcgaagccacctaggatctgattgtctgttgtattctgtttgtatttatttgtaattttcacttcatctgtaaaactgtaataataaaggttacagtgaggtctaattttaacagtgggattgtgggtggagggaggacaaggttgaaattgcagccgcgaacgctgcccgtggttagtgatggaggctcgcctggttctggttctgtgacgggaactgtggcgactattgtgacgaagccaaagggctcaaccccttttggagaggccagaccgagagaggaggtttttgctgaaaaagggtaggattggaaaaaaaatcgatgagcagc

SEQ ID NO: 269787 - DNA, 680 bp, Cannabis indica
gggcataaaacccaacagatctaacggtagaattgactctggaggtcgatcgtcaatttttggagcttgagtcgtgtctgtgaaacctgttttcaggtaagttgtagttgaaattcgtaactctcttgaggacgagttttggacttgataccttcagaattacaattggactacgagacatgacttgatataacattaaaatagcttcaaagcgcaagttgaattgcgttaatcgaatcaatattgagtgagttatgactattttactgaagggtgctttgataccagcgcccaaattgacatccatcgcctaggttgacatatgatgccaaactggacactaggtgagtggaaaaacctattggggatgtatttttttaatgcctaagtgatattatgacatcaattagtctaatttctttattctagtgaagtcgttcaccaattctcgaagatggtgttgatctatttcctcccccgaaagctactttttcctacgttttggatgagacaaagaaaattctcaagatatttcttctagttttatgattagaagtcgcccaggttgacaatatgtcaaccgtggcagttgggtgccgtagggcatctagtgcgttcgggtgctcaaaaagtgaaagtgctctaaatttgactctgatgcctcatatatgttcgtgaca

SEQ ID NO: 269788 - DNA, 919 bp, Cannabis indica
ttatatataaataaatcctaaccctaaatgaaatcctatataaagaaagagatggctcttattttctagactagtttttcactttgtcagacaactgagtaaaataaagagagcctctcatattttgaaatcctcctttccttcttcttcataattttgagtgtcctatagtgagtgagtacttgcccacacattttaagtcaatactcaatcatagtggagaagattgtgaagaattccatcatctaagaagatccaagttcttatcttagtaatactctacaatagaaaggagtaaagtttagagatctgaatggaatgagtcattatatttttctgccagcaatataaagttttataaagtaactttatatgtgtttatttcattattttaggaacttcatatttggaatgttagattatagttctataatcaatatacatgttagtaaatttaaatcctggtgaaataaataccaaaaaatggcataagagctgtaacgccctaaataattaggcacactacccaagatacttatgaaaccctaatcccctaaacgggattactaataaaattagcgcagaatttaaactttaataacaataggaatggaaataaacttgtaatattttaaactttataaactaaaagttacagaagttgggatcccaaaaacatttgcaaaatattattacaagtccttttctttcagccggcctaagcggcaaaacagagtctcaacaacacaatactggtagaccccaacctgcttggtttgatatggtctggacatgtacattcttcgtccagctcctgtactcatggctgatcaacaacagtcttaccctttcctacacagtagagcacccgtgagccaagcccaacaagatggtataaaatatattaataatatgctca

SEQ ID NO: 269789 - DNA, 1054 bp, Cannabis indica
catgttctaccaacataactgggatattgttggctctttggttacagaagttgttttggaagtcttaaataatggtgctaaccctaatgcctttactaagaccctaattactttaattccaaagatcaaatagccaaagactatgaaggattttaggcctattagtttgtgcaatgttgtttacaagtttgtttccaagtgcattgttcttcggcttaagaatgtgcttcaccatgtcatctcagagactcaaagtgctttccttccacatagattgattacagataatgtcttagtagcttttgaaatgattcatatcttaaagcatagaagtagaggctctaagggatatgcagctttaaaatcggacatgagtgaagccttcgatcgtgttgaatggtcatacattgctgcggttatggggaaaatgggcttcaacattagatggatttctcttatcatgacgtgtttacactctacttctctttcatttctcataaatggagaagaaactggctcggttattcctcagagggggctccgtcaaggtgatacattgtctccgtacttattcttaatattctctgaaggtctctcatgtctcttacaatatgaggaatccattggacacctcaaaggcttagctgttccccgaagtgcaccatcagtttcgcaccttttatttgcagatgatagttttcttttttgtcaggccaatgacaggtcttgtgttgcaatttaaagagcattagacatctatcatcgtgcctcaggaaagttgcttaacgaagataaatcagttatgtccttctctcctaatactcttgagcatgttcaacactctttcagtaacattcttggtatgccaattagtgaatgtcatgaaaaatatttaggcctcccacctactctgagcaagataaaaaagcatttatttgcttatattaaagataaaatctggaaattattgcatgcttagaatgacaagttattttcaattggtgggaaagaggttctcttgaaagctgtcgttcaatccattcccacatatact

SEQ ID NO: 269790 - DNA, 722 bp, Cannabis indica
cattatcttttctctataaaagtttggtagaagatatataagtttcccatctcattatgattgaaaatttagaagtacaatgtttatatcatgggatactaaaattgttagagcaggatcaccagcatagtgtaaaacttcatgttcttgctattcaagcaatgtgctatataatgtacattggaagaaatacaaaactagagcttccaattttatatctctacaacagcaaattaataagaaatctttaacttcctaaccacatgttttgttttcctttacagggtgggtactctattataaaaggtgaacacgcatgtgagaaaagcttggtgaccaactaaataagtgacatacacactttcctccaagtgcataagaaagacagaaatgattatatctttttttagaaatatagatgtttcagtgttcatccgagtggttagcattaatttcagcatattcaataatgaataagaacaaagaggtaaactaaaagggttgtttagtcgtctaattgatcaactaacagcactacactatactagactttactaactagtattaaactcgtacctatttttccttttcttttcttgttttaattgtaagcattctcccctttggaagactcaaaataaaaacttagacatcattatttgtcatatgtagaaatatgtcaaagactgaacttagaaggcaagaaaaagtaagctaaaatt

SEQ ID NO: 269791 - DNA, 502 bp, Cannabis indica
cgatgggagatagcaattgggacgacttcaagtcttaagagtaagactgggtgttatcaagtttgtcaaaaattagcgagtcatcagtggatgcagggttgattttgggagatgatcttgtggcacagttttgagagccgacacaagcaggagcttagaggagcaagtatgcagtggatcagtggggccttttgtatgaagccgtgggtatgcggttgggccagagggccaatgttttgaacttcgcgaagagaatctgtgcaagagtgcacttggtgctgcattgggtgaagttggcttgcgagcctcgtccaggtgggacgcaccaaactttatcctgcgatgagagtgtcttgctcgattgccattaggaggatggtgcaccatggagttggtgtatgaagtttccagagggacttgtccagagggacttggcttcagtggaagcgtgtttgtaggtgtcgttggggtgcaccatacttaccccgaggggtgcaccata

SEQ ID NO: 269792 - DNA, 1000 bp, Cannabis indica
acatatgcggccattctttctccgcgcatcggatactctcctgatatctagttcacgaacagttgggagtcgttgtagacctctactcttttggcccacacagtctttgctaatcttagccctgctatcaaggcttcatactcggcttcgttgtttgaagcagaaaagtcgaaccgtagggctgcctggagtcaaagtccgctcggggatatcattgcaacccccgctccggatccattttcgttggaggctccgtccacaaatactttccatgttgggaccgacagtaccggtgcgttcgcggttgcctcggcttcattacattcggtgataaaatctgccaacgcttgtccctttatggagatacggggtatgtagtgtaagtcgaattgacttaactccattgcccatttgaggagccttccagacgcttctagctcttgcaggacttgtcggagtgggtgattggtcaacaccttgattgggtgcgcttggaaataaggcctcaactttcttgaggccattgggaggcaaaaaactagtttttcgatgacggggtaccgcgtctccgcttctgtcatgcgcttgctgacgtagtacacgggatgttgagttttctcttcttcccggactaaggccgcgctgatcgcgtgctcggagatggccaagtacaggaacatgtcctctccgagaacgggttttgacaggattggaggcttggccatgtgctctttcaatttttaaaatgcctcctcgcactcgtcagaccattcaaacttttggcacttcttcaaaatgttgaagaagggaatgcacttgtttgtagaccgggagataaaacggctcagggcagcaacctttccggttaggctctacacgtcttcgtgtttcttgggggacgacatgctcaggagaggttgaactttctctgggtttgcctcaatccctctctggctgacgatgaagcccaggtactttcctgatttgaccccaaaggtgc

SEQ ID NO: 269793 - DNA, 614 bp, Cannabis indica
aaaaataataatttatgtaattaagtttaatgaataattaattaatttaagcagatcccgatatgcttgaagtgggaaacggtggaatgacaacagaagagtatcgtgcgcattttagcatttgggcgctcgttaaggtattattatttatctaatatttaagggcttgatttattttaccataaaaaatatccatcatataataaactacaaataatatatataattaaatatttaatattttttatttttaataagagagaattttacttgtttgtaggctcctttactagttgggtgtgatattagggcaatggacaatgttaccttaagtttgcttagcaacaaacatgttattgctgttaatcaaggtacgagttttgtcttgattctccgagcattattattaagcattagtggtatctaatattagtatgaggtgatatcttacgagtggtttgtacctttttaaattgtaccaataataatataacatctttaatattattagagagattggtacggtttaatagttttattcttctggactttatgcaaaattaatattacaaaattgttttttttatttattttctatttttaagaaagaaaat

SEQ ID NO: 269794 - DNA, 1102 bp, Cannabis indica
tttaatgtttattaaatatattaattattatattataaaaattgtaaagttgtattatttatttattaattaataaatttaaatttatataattaagagcgattttacaatgcagtcccttaaaagggatgtactgatgcactctctacttgttttggcatccaaaaattttttagtctatttttttttcatatccatgtacgttatagctatctaagatatcctacaaaagtttgagaaattcaaaataatttacaatatagaaaataatgttcaaacagtctattttacacgtgtataaaataaaatagtcacccgtgcaacacactgcttgaacgcaattttcagcgtgttaaactttttcgaatttcttaaaattttgcaggatgtcttaaataactataatttacatgaccttgaaaaaaattttgactaaaaaattatttcggatactaaaacagatagagatgtatcgatataccttttttaagatggtgcattatagaatttccctataattaatatagggaaattctttaatagacacccataaaagaaattcattaatagttccactatcgtgtagtataattggtccacataggaaaattttagaaagttattgtagattgtagtgtattgaattaaaattggatttgaattagtcaaagtgggatatattgatggacactttattattattatttagttgatttggtcaatatagaagcattcatatatatccttaattattatttcattggtccactgggctaaacataaagtgttaaaaaggattaaaatgaaaaattagttcagggaaaagaaaacaggaagtcattctcttaagtttcgcccagaccatcttctccggtgaaggtgaatgttagtgcatttttttttttttttgtaattttattttgattcattcttatttcaatttattcaaaagtttactacatttatataacttatagattatagaaatatccaccatgaataccatcgcataatatcattgcaaaacacattaatttcttaaaaatatttcaagaaaacaaaaagaaattttaaaatccagatttgaagaacctgaaaaaaa

SEQ ID NO: 269795 - DNA, 718 bp, Cannabis indica
agttgaatcatgaaaaacgtgaaaaaaaatatatttttcaggagcgggaacccagtggtcgtgaccaccaggttccttggtcgtgacctggggtttttacagaaacaaggaaaaatttcattcccagtagtcgcgactagggtcataggaagtcgcgacctattttccaagtcgcgaccccagtcgcgactaggccactttccagaaacacataaaaatttgaatgtaagctagtcacgaccagccttagggcaagtcgcgactagctcacgaattttccataaaatcccaattttcccccccattcaaccctacaccaaaaattcaaatctatcctattctcagccgaccctaaccacttctctttcaaaattttcaaattttcttccacaaatctttaattctttcatcttcaatccaatttcccaatctcaatccatctaaaaccccaagttcactcatcaatctacactttccaacaaaaaccatcacaaaaattaccaatacagtccctaatccgaaaataccattgttcttcatcttcaacctcaagctttcaagaacatcaacaatggaggtggagtaaaagcttctttgggtttgtaagtatcacttcctaccattttaaggaatttgatttattcttttataaatttctggtggtaacagtgcttgttgtgataaaattattgttcatattgggtttgttggtattgta

SEQ ID NO: 269796 - DNA, 622 bp, Cannabis indica
ctggtcatcagctaatggcagtcgtgacaaaagaaggtgagaggaaggatgaaaatctagatcttcagattcaagatgaaagaaacttattgaaaccaattgaagaattggaagaagttgttctggacccaggaaatcccacaaagtgtgcttacattgggaagaacctagacgaacaattaaaatagcaactaataagtttattaagggattgagcctaatattatctaccatcatttaaatgtcgatccaaactacctagcaaagagacagaagaggagacccttggattcggagagacaaggggcactcaaataggaagtggataagttgttggttaatgaatttatacgcgaggtgttttatccctcgtggatagccaattctgttcttgtcccaaaaccaaacggaactttgagaacttgtattgacttctatgatctttataaggcgttcccaaaggattattatccactacccaggattgagcagttagttgatgcaactattgggcacaaacttatgtcattcatggatgcatattttggatataaccagataaaaatgcatgtcctagatcaggaacatccaagtttcataacgaacacaggactttactatt

SEQ ID NO: 269797 - DNA, 671 bp, Cannabis indica
tttataatattgtaaatagttcactaaccatttgtaacgagctaaaaaattcagggagcacaatagtacatatgctataaatcggggctaaaaatcctaaacaaccatttaattacatctaattactactactagctaggtgtgtacataaattgatctaatccaataacaatcgatcgatccaattacaatctaccgccaaacattagatatttaatcatgatcggctcagattggatgttattttaatatctaattggatcgggtcatatatgtaacatccgcgcttcaagcttccattgggtccttacacccacaagatcatgactcttatacacgagtacgtcactgtggttgcttcatggaatggcgacgaaccctacagaccaacatgagtgttttcagcgtgctttgtcctcactcacacggttcttgggaaaacttcccaggaggtcacccatcttgaaattgccccaagtcaagcacgcttaattgtggagttctttcgaaaaacaagaaagagtggagtaacgaaatacaagatacaccttgttgatataggtcaccgaaaaacaagatacaccttgttgatataggtagtaccaatcaatccatttaatatctcttcaactgtgtagtctcatacctacacagtctcagaatcatcccac

SEQ ID NO: 269798 - DNA, 1056 bp, Cannabis indica
aataaaaaaaatatatattaataatggtgtagtttttaagagttaatttgagctattggattaaatcaagggctataaattactattcctattaataggtaaaatacccaatccctactgttgacctcgcttttagccaacaacagtgagtcttatttagtaagcgacaagtagcttataacgattgatatatagcaaaacaatataaagacacaggaattttatagaggttcagcccgtagtagttcggtaatagtctaatcctcgttatttgtattaactcaagaacaaggagaaaggttccttttcttatagctcttacaacagtatctctgaatatgaattcttagacaatatctctctacctgaatgttttccacagaccctttatccagtcaacatgcatcactatttataaggctatgagcttggggaagaagtatttcccttcttgttacaatagatataagcagaaagattgcataataaatacagaatacagtgatcgtgggatttggacagctgtccatatctctgtaatctgatccccaagttataggaatttctttgatgactcacgatgcgaaagctgaattcgctaagtattggtcgctctgcacggattgctgatcgctttgcttcaggcatggatatgaggcatcctgttcggactgtattcttcgagcaggcactcgaagtaggttccacgtgtcaccatcatgtgataccacgtcagagtgcgaaaattgggataacattttccccccaagtctgtacgggacttccgaagttgcgtgtagacttcatccgagctgcttctgcatttggatgggtgacacgtgtcaagcgcgtctgttcgcgactcgatgtgaggctgactgggcgtcccttctgttttcggcttataaatgctctgacaattaatatttcgaaatccgattttctctcaccacggttgacggtcgcactcgattattttttattctcatatttgcttttatgggggaaccaagatgtctgaggttcttttgaaatgattaccccttttcgttactt

SEQ ID NO: 269799 - DNA, 1245 bp, Cannabis indica
cccatactactgtcacataaataaagttacaaggaaaaaataaattagacctctttacaaagcctcaacagaccattataactcatagagttatcggttctgttttcataggcttaggtcttttatttctttacaataaaaggaagcaaataaaatatctcaagactctaacaactttcagctttacaaggaaaatatctcaacagattacaaccatttttctcagatcagaaacaaacacaacaacaacaacaacattataaataagtggttcaaccttccactttgagcaacagaaccatttcggccagcagtaaaaataaagggcagcagctgtgttttttcctttgtaacccacctcagaaacaagagagaaaaatagagagagttagtgagagatattgtaagaaaaccaagagaaataaagtgaagagaaagagattactgctgggttttgtagcatggaatctccatgaacttgtaaccgttttgacaatcatagtgaagaatcaagcgtctttgagggaagcttgacggagatgtactcttgatttcaaggggaactccgaaatcaaattttgttgtgttcttctttatttttctgtagtgtttcggtttctttcttctaaaccaacaaagatcattttagatctttgttgctactgtttctctctctcgcggtttgtttgtgtgttttgcatgtgtggaggagtaatatactcggccataatagctactgttgtagctcgaagaagaaggagattaagagaaggagaaggctcggctgggttacagcaagaagaaaagaaggaaagaagaaaagcctgctgcgtattcaaaggttgaaggaaggagaagaagaagcttgactaggttgttttgctgttcaaagaaaagagaagaaggagagaagatgaaggaggtcggctgtgaaaatggcagctaggttttctttgaaggagaaaagaatggttttatattgcaattaaatgcaatagggttttgaaaaaggagatctgatattcaaaagggcatatccggatttgagaaaggaatattctctttggatccgcacaaagagagaaggacaaatctgcccctaggttttgaatgttggggtgttggtgtagggggcaatctgggtatttcggatgccattatttcctacagattccatgtgaatcacgcatgccaaaatatagtgttcactttgtgacaacttttctccttaagtacttaagcttt

SEQ ID NO: 269800 - DNA, 416 bp, Cannabis indica
ttttttttatcttttttttttcttggggtgcctttattgaattttgttttcttctcttttttttctttttctcttggcacccccaaattaaaaatctcaaccatccctcaaggagatagaggtattttcttgggtgacctctccaccccaaacttcactccttggcctttcactaagaattttcttcttgaaaatgcaacacaaagttccaccaccccatctgagtatactctcaccaccaagaaagatccatcacaccttgaatctagtcgtccatgagtagcctccgttaaagagttggaaaaaatcacttgttgcccaactttgaacatttgagaccgaaattttctattaagcttctttttctttctcttctttttgggtgtttttttagagttcaaatgatttgtctttgc

SEQ ID NO: 269801 - DNA, 852 bp, Cannabis indica
tgtgatgaaattatatgtttattaatgttaagtgttggctgaataaaagagttaaatttgcattttgtctcttatttcaaaagttagaaaaattagaaaggaaaagcaaaaatctctttttctctccttctcttttcggttttgagcagctgggattgggggatttctttgtgtgtgttcttgctggatttatcaaagttcttgtggtctcaactcttggtaagtctcttgctttttgttcttgaagattttgaagaaaagtggataggttgcatgctagtttttgatgttgttgctgctgttagttgttgttgttgtctttgtgtttaaaatgctgaattaaatgtgattagaggggttgaaatgcatgctagttatccttgttctagtttgagaatttttagttcaaaagctatggtttttcaagtgaaattgtgagttttgttgctgtgtttgttgaggtcgatttcctgtgttttcagaggttataatatgcatgtttaagtaggtttgaactgatttggatgcatgttagttagatttaaccaagtttgagtttggaactcaaagcttgatgctttaatggtgtttttggtttgtttgcatgaagctcggtttttatgctttagaattgctccttagggtctatatagcaggtctggaacgttttgtttgaattggttaggttttgagcaacttatgaattttggttggaatctgcgaggaaccggaattccggttgtgcatccggaattccgaatggggttctgaaattcccagaactggaattccggttgggcaaccggtctgccggttgggtgatgttcagaaaccctagattttctcattttt

SEQ ID NO: 269802 - DNA, 504 bp, Cannabis indica
tagttggttccaactaactacaattctcccacccgggtgccaaggattattcgaggtaaagcaccaaccactaaaaacacttgagtataaggccccaagttttgaggccttaactctagtttcgaggaggccaaccaaaccaactttttgagaatgaataaattgtttaaccatttgttgcttttgttggttgttgactcctcgaacattccaactagcaattttatccattgggaagaggaggttctccccctcctcttgtgttcccaatgatctctttgcctctttcttttccaagcaaaacattgttctctccttcaatttccccatcatcttcctcttgatcagtaacatgttgcagcccgccaaaagtattagccactgctataacctctggtgcttttgcttcggttagcttctccttccatgttttctttggtagtacaaacccatcctcatcactggttggttttgcccgagtctccacagcaggttttttgacca

SEQ ID NO: 269803 - DNA, 514 bp, Cannabis indica
tatatatatatatatattagtaagaaatagaaattatacatatataaatatataaatatatatatatatatatatatatatatatatacctgctctacacagagttaggtcagcagcatcatggtttatggcatataagaaataaccaccaaggctgttattagcctccaagacctttttcataacagattgtctatcttcatacccataccagaatggattaccattagcatctctctcaaccttggacgtgcaccaagcgacatcatcatacgtcccgccggtttcaggatcaggaatgtctctatacgccacgcgtcctttgtattcaacagcctgggccccatcagtgacttcatttacgtcatcagccattatccattttcctccgtacaacggaatacccataacgagtttagtcagcgaaatccgaacattcctccactcttgtagcgcatcttgagtgttataattatgggaaggtctgatgggtccgaatcgggaatggtaacta

SEQ ID NO: 269804 - DNA, 658 bp, Cannabis indica
gtgaactagtaaatgaagatccttaagccattgcagactatacattaaggctgatgcttccattacttttggtcgaaaacaacctaggaaaagtttagacattgcagcgatggtatcgcccctacaatttcgtaatatagcaccaaaaccaaaagtttgtgtcattgcgttaacaaccacatcggtatttaatttcaatctccccaatggtgggtttaaccattgcagaattgatgaaacctttgtggatggtacttgctactgagtagaacccgaagctattggtttttgggctgaatggaattcctcaaggtataggagagcaaagtacaacaacacattaaaggttttgggcttcgttccatgacgctccttgtttctttcgttccatagactccaaataatgcaagcaaattgttccaattgtaagttagtctattctttagacacctatagtaataattctttgagggatatatcatcgggaaatttcaatttttgaccctaataaaataccccatttcaaaatatataccctccactaatttatacaaattaattccactattactcatttgtacccaaaatacccctcaaatttaattttcctattcacactctctttccgtctttccctctctttcactctctctctctc

SEQ ID NO: 269805 - DNA, 617 bp, Cannabis indica
agtgttattccaaggtcccaagagctccaccaaaagagataacccctatgaacagtctttggccctttgctgtttagggaataggttttgtgggatcatatcaaacaacaaaatgaggagtcaaatttgtcattttagctgttgactatttccctaaatgggtggaaattgaacccatgaccgtagtaacttccaggaaggctttggacttcgtattaaaaaacatcgtgtgtcgacacaaacttccataaaaaatagtgtctgataatggaaagcaattcaacagtgatcgattaaccaattttgtgtcaagcatggaatcattagaagcttttcaactatggacagacctcaaaaaaatagacaagtggaggttgtcagtaagatcttgaaaacaaccttgagaaagaagctttaggtttgcacgactcattggtaggaagaacatccaagatttctttgggcatacagaataactaaaaggacctaaacaggtcacactccgtacgaccaatagatgcaatataataatcccagtcaaaaaaattgtacccttctcatagaagagaaacttatgaccccactcaaaatcattcttacttcaagaatcccaaatc

SEQ ID NO: 269806 - DNA, 750 bp, Cannabis indica
aatttttttttacaaaaaatgataccttatgtaattatttcaagataaaggtctcattagagcccattttcgccacctcccttcaatcaagaagaagcaaggatcctatgtgtagagcaacttcaattgataacaactcatccaataaacttaaggaccctgtcaaatcttgagtctcacctgtttaccgagtttttcggcaaccgaataattctatagcttaagaaagtaataagggtataaataatgcgataacaaacaaaaaatttttacgtggttcagtcattaactatccttagtctacgagtccattttattaggctcttttgtcggtgattgtttatacaaatacaacgcaatgcaattttctcctattccactgtgttcctcttgaagaaaaggaagcttactagtaggggtgggcatccgatccaatccaacttttttttcctcatccaattcaatccaattattagttattggatttggaaaatcatcatccgatctaatccaattagacctcaaaatccaatccaatccaattactaattggattagatcagttatttaattagatatctaattacacacctaaattttaatattaatataaaaatattaaaaaaaatacgtacaacgtaaatattacattttgtttaagtttagtactctataaatatattatcattacaatgtaatgcaactaaaagtttaaaatagttaagataacaatatttctaagtaataaaa

SEQ ID NO: 269807 - DNA, 1130 bp, Cannabis indica
aacataaaatgttatttctgatcttaattaataagtaaatctgattatattgaaatgagttttatttagggcacaaaacccaacagtcataactgtgacgtcccgagtgatggttgtcaactcccaccactcgagagcgtcctcctggaatgggaaagtagcgcaagtcacccgatcattaccaaccactcccataaggtttagaatgcgctcaattgttgtgagccactggaggtgcttgcttacggaatctttcgtacaacggctccatacggttgcaagcaacaggttgttctactggcaccgatggaactgcaacggcctgagcaacttgctaaggaggcacggcaggaggaccctacggcctcaacctctgaatttcttcatcctgctggcggattcgatcttgcatttccgcaaatctctgctcccaatctggaggagcttgtggtggatttacagggcgaccaccctgagctctgccacggccacgaccgtgaccacggggattctaaggattttgatttccctgaccgcctccggtctcaaccatattaccctgacttcttgtatttcgctgggcgtccattttataggacagcctgcgaacccataagccaggcaggttagacagcgatcacaaaacttattaccgctcttacggacttaaaggcataacacttaaaataaataattaaaatctaatatgcttcctagcatgctttaataatcatttaaaacagtaaacaagtacgagcttagtgaaccgtgaaccgagctttctataatgaagattgtacatgtcttggaaagtttcagtagacaaacctggcggctctgatactaaaattataatgccctaatgctaagccacgctacagtgctttttgaattacagtgaaatctttgctaatcaaagaattttcttgaaaaacttgtcaaattaaaacttttatattaaatattaaactttatattatatcaaaatttttacaagtgtcgggatcccgttttcaaacttctaaaatatcatataccaaaatacatattaatcaggtcacacagcgactacaaaatacaactcctagatgtcccgagaccaaacactccatgtcgcgctgcttcgacat

SEQ ID NO: 269808 - DNA, 749 bp, Cannabis indica
taactcattgtttgatttgttttttggtaagctaaagtaataatgagttagtgagatatggtgatgataacatgtgatatacaaagatgagaacaaatttaaatgattaaaaaaaaaatatgctatgtctgtgttcttattgcctttgaaaacttgttcacgtctggaaagccttatggctaaatattggtagagttcgagtggtaggaaaggggtgagttggtttagttggaggaagctatgcaaaaataagaactctggagggatgggttttcgaagtttgcgtgagtataatctgtccttgtaaggtaagcaaggttggtgattactgctgcatcaggattcccttgtgggacggatatataagcctcgatattttcctaactgtacattcttggaagctgagttgggtggcaatccgagctttatatggcatagtgtctttgagtcacaatcactactcaaagatggtgctcgtaggagaataggacctggttcatctactgaggtgcttaacacgccttggcttttgtttgaggataatctgtatgtggtctctaatcatccggcactgaccaattgtaaagtgtctcaactcatgaagtcaggtagtagatagtgggacttggagcttattgaggacttgtttgattcctgtgatgttgagctcatcaaacaggtgcctttgagtgataatcttgtaagtgatagttcgttttggaacaggatccaactggttttttcactgt

SEQ ID NO: 269809 - DNA, 801 bp, Cannabis indica
accgtttcccgtctggtgataaaaaaggttctgtacctcgaaactgcagccgctgtggcagttcaggccacaacagagcaacatgcaaagcccgcatttgaggcgtagtatacttattcgttgtaataacatgttttctatttcaggttcgaaactgctttaaaataatgtcgaggttgaatattttttgaatattttaattattttaggtttaatagttatttttgtatgggaatatatgtgtatatatcgatatttgaaaccacgaataattatcaaaatttgaacgaatataagaaaattagatagatattacttctcagccgacaaaatttgaagccacaaacagaaagtctatatatacataactgtaattttaattacacaaaatataaaatgtcaccataattacacatataatcagccgacattctggtaaaataaatcaacacactaccgttcatgaaacaacttgatccggccttgcgtgacatcagttaatccacgttgcatcatgagatgctccacatactcaatgcaataaacgccacaattaccactaaatgcaatataaaatataaagttagtagaatgcaaagtatattttaatactaaagtacttttttatcgctatgtacctagttgttgccttcggaactaagtcgtgagtggcacgactcgcatgcatattcagaagcacggtgatctccttattagttagcgccaggatctggttattaagtggaaaatccctggttgcatggattagcgagggcaacagttcttcccaagtcttcaaga

SEQ ID NO: 269810 - DNA, 1121 bp, Cannabis indica
gttcgtagatgttattgtcaattaaaaaacaccacaagcggaaagaatttaggtggcgtttggttgggggtaatgaaatagaatgaaatggaaaggaaacaatttgtttggttgtatttaaaaccattagaataccattccgatagaatgtctttccatcattttggtggaatgactattctaatgcaagatttgaaaaaatttaataattttttttatcaattttttaataaaatttaaattttattctattcctattctaattttcattcttattcttatatttttatttctctcaaccaaacgccaccttagagtaaataattcaactccatcaatgtgaaatgtaatatactatcatagtttctttcttttttcagtatttttattgaacataaatcatccacaaaaatgaactagtggacaatactttacattagcattgcatcaacaattaatagtaaaaaataaaaaaaataaaaaaacaaaacatcggaacaagacattacaaaactcaccgaacctttttatgagtcttgaaagggaatctagatcagggaaaattctaattcgccacttataacattcccatcacctccttcattgaagggctgcgagctgatatcttttgtaaacataataatgcaactttaatacaaagaagagcttattctctatccaaatattgaatagacttctcaacaagatcaataaatttttcagctcgagcaagatgacgagcccaatgacacaagattgtgcatgttggtgtttagactataggtgaaatatttctaactttgtaagaggctgcctcccaactataagtactagccacgagatcccaaaactatcgatatcacacttctgtaaatgaatttctaccaaaacttgtttctagggcaacataacacacagttcccctcatattaggagtactactatagccccccaccctttgggatttctccactaccaaagtcatgactaccactttgccaacctcgccacagttcaccactaagcccatctaaccaccacctctactaccccctactcctacccatttgtttctctttcctttttactatgtacaatttctcatcatgtaatcaccaatt

SEQ ID NO: 269811 - DNA, 1018 bp, Cannabis indica
tttgatatatgcatgaatattaaatttattaatatttaatattgaataatttatatataaatatcgaaaaatttcttattcataaatgaggatgtaacttgtaattatacggagaattaagatcacttaatcatgaataaaacagtcactaacatattaaagtttgagaatttttaatcaacagttgctcaactaaagctataatgaagaagattagaaccaaaggtattttcacaaaattcttcttaactcattatcttaaggagaatggatatatattggtgtccaacatattcaacgaagtgtcaattatgtatacttatttacaaattaagttattgccaacatcaacgtttgagaagcgtatgacatataagattggaattcgtcaattagaaaatctcgactaatgcctaaattaatgagggggttaatttacactgcactctttttcttttcatcaattttttttaagaaagtttttaatgagaaagttttgatagacatctaagattattatagatgtctaaatcaatgtattaattaccaccatatatacttgattatcttttcttttatttcattaatttagtttttcattattctagtaatatttttgtataaataaaaattcaccctattagaataaactattgagaaaaatctcattcactttttcattttctttttctctttgtcttctttatgttaaaaaaaataataataaatccaagatcaacttgtatataatatagaacacaataataataatatataataattaggtatatgcgtacctcattgatccaaaataattaccgcaatttgataatgtaatactatcaactaagtcttcatagatctctaaatcagaaacaattttttatttatctgattatcaaaagtatatgaaagtcctaattactacgaattcagatcgattaatctcaacagattattcctaagatctaaacaaagagtaaatcaaagaacacagaatttacaagcttcctctgca

SEQ ID NO: 269812 - DNA, 648 bp, Cannabis indica
aagtggcaagcgttcaggcaacaaccacaagcaaggaaacgggaagaagggaaagttcaccgaaaaacccggacagactccccgtgatcgcgccaaacacactgcattcactatcttaactgaagatatagaaagtgtgtacatagcaactcagtcgttaattccgtacaagaagcccgggcccatgaaaaaagataccagcaaaagggacatgacaaaattttgtcggttccatggagactacggccacgacaccaacgaatgctacaacttgaagcgggaaatagaacttctgatcaagaaaaacaacccgcacttacagaagtacgtcaaggccaaccaaggtcagaataaccaggatctgatgcctccgccaatagatggacacttgcaagtcatcattggaggcccgcacatcgctggagacacgggcaaagctcgagaaagatatgcccgaacagctcaatacgagcaagaagaagtcatcctggccgtggaagagaggaagcccaaagttccacgcgcaggagagccaaccataacattcaacgacgaagatgctgtccagataagatttccgcacaacgacccgctagtcgtggaagtccagatagcaaacaaaatggtgtccaggaccatgatcgataa

SEQ ID NO: 269813 - DNA, 574 bp, Cannabis indica
ctaaataaaggaatagaataaaaaatattttatttccattttattctatttcattatcttcaaccaaatgtcacagattcgtttggtacgctttattaaattatactgtattatatagtaatagattatattgtgttttctttcatattttggcatatataatgctacataaatttttgatttatataaaaatattgtacgtggatatgtacatacataagccaatactaaaatatagtactatataaaatataatacaacttaataaatattataccatataatacagtataataaagttcaccaagcagattccttaaagagtttaagagttaatctacaaataattaatcaacataattttagtctaaacttgtatgccttgcttattttgagttttgagcttcaatgaatgagcaggtccgagctgaaaggtgcaattcttgaaggaggaatacccttcaatagggtccatggaatgcatgcttttgagtatccaagcttggaccaaaaattcaaccaggtaattaacaaagcaatgcataatccgactactttggttatgaagaagatc

SEQ ID NO: 269814 - DNA, 535 bp, Cannabis indica
aaaaaaaaacaaacaaatacataaaaaggacaaaatctacttaaagaaaatttttaagggaaaaaatgtgagagatatataaaaaaatgaaattgagctaaacaaaagtaaattaaataaaataaaaagtagaagaagacaaaattgacttagtatttttgcattattcttttgatgacattgatatatagggctaattagttaatatttaataggttgatttgaatatgagaataaaaacaataaagatgatcaatatgtgacgacaatcatagatcaatatattcaaacaataacagtatgtttggttgttaggcaagcaatttccgtaaatttgttttaagtatatctagcccatgaagtaaattcatatggtacttaattctaattataatcatatcacgtaaatatatattttgtataaaatttgaattaacttttacaaagatactcttagtttttaaaaatattgtgtttttataaaacaccagtaaaacacaaaacagaacaattgaaaataataatagaacaacta

SEQ ID NO: 269815 - DNA, 751 bp, Cannabis indica
cacagatgctaagcccattaacaattgatcaccaacaacatgggctaacacagcaaagaactatccaatcaacccaagttttaataaaaccaataaaatttaatgtaagcccaaataaaagtctaacacataattgatgcacttggttggggggtttgctgtcttatttatcttttatgtaaagttgattaaaatttaaaagaaaatgagaaaaaatttcacatttcatttaatttagtcttcatttacgttttactaagttattattcttttttctttttaatatggtaagagataagaatatttaatttgcatttaggaggaattttactagaaaaacattgctattagctgtagtataataggatagaaaaatatcaatgtcattgatgaatatatttttagaatcacctttatttttttacctaaaataagtgtatctcattttccaatttaggtttaaataggaatagttaaaattcatttagtaagaattgtatagaaatataggtatttgtaaaatatgataggctagatatattactgttatttatgaatatttttttgaatcaccattatgtcttataattaagcgcattgctattaggcaccagtagtgtttattaccttctcgatatgtcacgttgcgattggctagcgatgctccttaaaagctattatgttaaactatgtgggacctgatacttagttggactaatagcgatactaacacataggagggtgctaggca

SEQ ID NO: 269816 - DNA, 521 bp, Cannabis indica
cacaggttagggtcttgagttggctggattctcttatagaaaccacaccaacttccttcccagatccacatgaaaccatgccaatcttcctctggaattcttcactagcctgaggaggatctttgagatcactcacaagatctataccctctgggatcactaatgaggatcgaccatgacaggtcacggggtttccctggtttggattggtcagaagctcctcagccctggaatccatcatttctggctccggttggggcttgaagtctgtcagaatgaatggaaattggttggtgcatttgggtattatgagtctgggaggataaatttctaaactcagaagacaattttggcagtaaggaagtaatccattctgaaaatagatttcactaaagagccagaaggtttgtgaaaaatgacaagcatgagccgcccttttatacacgaagtttagtgacaagagagccaaagattgagaaatctaacggctggggattgttgagaatatgtgttatcccaaa

SEQ ID NO: 269817 - DNA, 592 bp, Cannabis indica
ttttattaaaattgttactgattataatacaacaaaaaaagaatacagaagattaaaaaaaaaataatagtaatgattttttttctttttaaaaatagtaatagaattgaaaataactttaggaatttgtatagaagtgaccaatgaaaaattattagttctttgagaagttgggttcattaataagaaaaaattgaagagtattaaagaaaaaatatattagatcctttattttttttaaaacttgtgcagtagcccaacttgcacacagggccgaccatttaggtgtgcaacaagtactaatgcacagagcccacaaattaaaaaggcttaatatgactttttagaatttttgtagagaaacttacaaaaatattgaaatttgagttaacttttacacaaatactgtcacatggaaaagttttcaaaaatattgtgtttttataaaacactagtaaaatacaaagcaaaacaacttaaaataacagtaaaccaattaaaaaacaccagtagaacatcagtaaaaacttaacacattatactgcactatgaaattttataaaaaaaaataacaagtaaaaaagtaaaaaat

SEQ ID NO: 269818 - DNA, 578 bp, Cannabis indica
gctgcttacgaaaagatggggctccaactcaaggatcatagtagacgaggtcatgtacagaagaggattctcgatgccattactcagatgtgtcacacatgacgaagttgcacgactcctatttgaagttcacgacagattctgtggaatcacgccatcggacagagcttatccaagaaaattctaaggcaaggtttcttctagccaataatgattgaacattcgagagactatgttaagaagtgcgacaaatgccagagaattttaaagataccaagagctccgcccaacgagctgacacaaatacaaagtccgtggccctttgccatttggggaattgacctgatcgggcaattacctaaaggtagcggagtgcagtacgcagtggtagcagtcgactactttactaagtggactgaagccgaaccactgccaaccatttcattaaagaaagtttaagactttatagtgaagaacatcatatgctggtttggagtaccgtacaaaatagtttcagacaatggcaaccagttcgacagccaatccttcaatgatttttgtgtgaaccatggtatcat

SEQ ID NO: 269819 - DNA, 635 bp, Cannabis indica
atcacgctaagtaaatgaggtttttaattataatttacacagctgtaagtatcccgctcttattgggtcgggatgaatgcacatttaaggatatatggtaagccttatctcgtggggattcctcgctagaaatggagccgggttaactttgatggcgagaagttacttgtcatcagacttcctgagattaacattgttttaactctgacaactatattttttagtgtcgagataatcttcctcgcatgcatgccatctcacagcgagatagatgcctcgctatttgtcatcttgattcaccatactgtttatacttagtttgtataccatgtaatatacgctaagtacttttatcgctattgtttctctttcacgcaacgaggttgaagccttgtcatgcacacttgcaatctcatggtttctcatcgatacatacgttagcagttcgtacatttttgtctcgcataagaccatttagccagtcgagttataaacatactctacaaattatgttactaacgagttgttccatgccaagtgtacttacaattgtgtgtttgagccctttgttcttcccagctcgacatagaattcttgaagaaacaatctatatggagcaaccagaaggctatgtt

SEQ ID NO: 269820 - DNA, 769 bp, Cannabis indica
ttgcttaggatattctgtttctagggactctagagaataaacttctgaaccagattgggacatttctaacaaaaaagaacaatcccaattcctggatgaaaattattaaactagaggcttaaagaatatgataaacctaaatttatatcatgcctaaaccctaaattacccacaaaacttaaaccagaatcgctaaaaccaaatggagtgagaagatgcaaaataaatgatcataacccagaaacaaaaaagaaaaaaaaacagaatagaggagaatgggtcacttacagtttgaagtcgagtagtcgtgtgatgaaaagtcttgcaatagaagacggagtgaatggcgtgataaactttttgagcacttgaggccgaaaagcaaatctgaggtaattcatagaaagtatgtcaaagacaaggagggcatgcaaagtttcaagaaagcgggatgagaatttcttagaaaagcttgagtttttgaaaagataaaaatggtggaaaaatggatgccttaccgttttatacttcaaacttagttaccgtcaaatcaaaatgtagaagatccaatggatagaaatgggagagaagtaaaaaagatggttcattaatgctgatgatgtacctcgaaaccacaaaaccgccaaaatcaaaggcatgcatatattcaaattggattattcacggtaatcatttaaaaaacactttttattaaataaaaggactttttaaggggcaattgttatacccaaaatttggctgtacttca

SEQ ID NO: 269821 - DNA, 335 bp, Cannabis indica
ctgaaccactatattttcattggttatatattttccagtacgtctgagtgtccatcctttaaatactcaccattctaggtggagtaatcacatactttcatttataattttattttaatattttatttggtgttgttaaaattcctccaacaacagactactttggtatgagaaatgctatttggcctagaagacaaaaagtccatcaggattaatccggataccctcatggggtaatcaagatacatgaaattgaagagacatttggaagcctccagatatcatcctacgcaacgtcctcaagacatagggccccactgttggaaattatttta

SEQ ID NO: 269822 - DNA, 639 bp, Cannabis indica
cttttgcaaaacacatggtcccaaatggtatttacgctaaaacaaacaatacccatgtaacaaatgtgaaataagatatttattacttatataattaaattattatttaaataaccaactaatttcaaaaatttaaggttgttaaaacaacctaaaatatctcttcaaactttaaaaattcaaactaattttaaaatatctagatttatttaaattattttatcaaattaaattaaatatctaataagataaatgaattgaaaataatcaaatagatattttcaatatctattgactggatttttagctaaccgacgcagagtcataataaatgagatttaaaccacaatcacagtaataaatgtagttaataacactggaatttgcaataaatgtaaataaaagacacccgaatttaaagaggttcggccctgggtgttggtaatagcctacttcccttgagttttattgatctgagttgcaaaagtcaagaacaagctcttgattgcaaagaatgagaattgtttatttttctaagtgtttgagattgcggatcctcctcccaggtcatgggtgaccccttatataggggaggggggtcggtgcttctcgcttcaggagacgcgaccaacgcggagc

SEQ ID NO: 269823 - DNA, 547 bp, Cannabis indica
aaaattaaaagggacggggcccttattaaaggatggccccggaggccgtaaaaaccgtctttaaatttgtcccctttctttgggacgaaaacaagttcatagaaatacaaaatttgagccgggctaggcgaaccccagcccctggcaacataaaaaatgaataagcttgaaagcaggcggtaggcttggggaattaattggtaaggcgcgaggccgacaaaaactagaaaattgacgaagtaatcttgaagagggagcatggccccggacaggcggtggaaggtcccagaagcagatggtttgatgccttccacagttacgatcttctcgagctggtgggcgcaaatcaaggtggagtggagctcgtccgcctcccagccgttagcacgggaagtataattctcttgggccacgggacccttcatgacctcctctaaagtgggcagtggaactgcctctttcttggaagactttgactcagatgtgggagcagacatattggttctgaaaaaattaagaaaatccagcagttaggccccaaaccaaa

SEQ ID NO: 269824 - DNA, 1081 bp, Cannabis indica
tttccccagggatttaaaaaccctcacgtctcatcatatgatgggaccaccgatctagtctctcatttgaataacttcagcacaataatgcgagctagaaatgtgacaaacaatttatgctgtattttgtttcccacctcactagttggagcagcaagcagctggttcaacaaatttactcatcattccataacttcttgggaacagctgtccaaggacttcacaaaatagttccaggccgcaagggataggcgacccgaggcgttccttgctaactaatataaagcaacagctaggcgagaatttaaggcatatttaagtcgttttagaacggctactggaagagttagaaatcttgatgatagtacacaacttaccgcccttcaggcagggatcgctactgatctatctactgctggggccgaattgtgggatgacttatagggtcgttcagtgaagaacatcactgagttcaatgagaaggctcaggtgttcgtccgaaaagcggaagctcgaaaagagatgaacttgttaaaaactagctcaggaggcaaacccagcaatgtttcaacaagtactgtctcaactacagttgataactcaggggcctctggctcaaagagaaaagacgattctaaagggtcgtcaaaggacaaaaagaaacaaaagaagcacgataagtacgtgccattttatactatttatactgagctcaatgaaactcgggaaaatatttacctctcgcatgagcacaaggttgccttcagcaagcacgagcccatgaggcatgcgaggcacaaaagagatcctaccaggtattgcagatactataaggacattgggcacacaacagacgagtgtcgtcagttgaaagatgagatagaaagtctcatcgctcggggccacttcaaccagtatgtgaagagtaaggcaatggacataactagcccaatctgcccaacaatccaaacaactaggggttacaacctcctcctgttgaaggagaggacattctagttatttcgggagggtcgcatattgcgggagtgagcaacaacgcccgaaggaggtatgtgaaaga

SEQ ID NO: 269825 - DNA, 567 bp, Cannabis indica
aggcccatcctagccaccttatgtgctaaagattaaaatccctaccaacatgacaaatggttaggcccggattgaacgataataagttcttaatactacatattacatcatcaaacacactattattccaattacaagaattaagcttatctattatagatttacaatctgtcatcaacacgtccaccgaaagtcgaagcaattgagcccattggatagcttgatgaaaagctttggcttcagcaacagcaggaggaacaagcccagaaaaaggagtagagaaccctgccttcacctggttacaaccatccaaaagaaccaatcctatactatgctttcttctttgagaatcagtggctgcatccgtgaagattttaaaattatttgaaccagatggttgaaccgttgctgatgttgagttgcaaactggaccagttcttggcacctgactttgctgcacatccaaatgttgaaaaaaaaatatgcaagactccaatcaaaaatatctttatgagggatagaaaattgcttgtgtaagatattgttcctttgattccataaagccca

SEQ ID NO: 269826 - DNA, 642 bp, Cannabis indica
acaccggaaataaaaaacgagggtccatcttctacacccacacacagaaaccaccacaataacaacagaacaaccgaaaaagaaccattaaatccggtgagatgaagcagaaacattaaaaccattaaaattagggttgtcatagtttttctaatgttgtttttgggttgttccactattgtttcgtatgtttaaaaaatattggttttaaattacacatgttaaaccaactactaaatatttatatgaggtaaccagaatgaaagaattatggacagtaaaagacttaccttccattaaagtggggaaatctagaagaccaaaaaaaaaaggatggaagctggctgggaaaaaaaaaaccacataaaaaatacagtaaatgtgggaagctaggacataacaagagaacatacagaaggagacatcaaaaatgaaaagaatgagaatagctaaaaaataacagtggaacaacaaaagaaaactgaacatatattgaagtatatgatactgaagaaataacttacatgcaaattttattatttccctatttctattaaaaataaagcagtacaataatattttaaaaaaaaaaatgagataaaaaaaaaagaaaacaacagtaaaataacattaaaacaataa

SEQ ID NO: 269827 - DNA, 510 bp, Cannabis indica
agtttgtgtatccttatctcgattaagactattcagtcaacgagttatagatataccctatcagttcaacatttaataagttattccattttatatcttctaatataattactattatattagttgattcgtattctcccagtttgacacatgtcctcctctaaagtgccaaccgactttcaagtataataattgcctcttaaaaagttctttttaataaaaagttctttttaaatgattatcgagggttatttgtcataatcccttttgaaaaatgcatgacctctaattttggcagttttgtggtttcgaggtacatcaacatttaataaccatcttttcgacttctttttcaaattttacctgtaggatcaattatctccctgatctaacggagattaacccaagagtataaaatggaaaaggaaccatctttgcattacctttgccattttagaaactctaagaatttttcaagcttttctggcgaaaaaccattacatgatttgc

SEQ ID NO: 269828 - DNA, 608 bp, Cannabis indica
agtatttaaaaaggtaatctatttttatcagcttctagatacatagacgtgaaactatagctgatattctaatcatggagaagaaactaccaaatccatcaaattatggtcaaaattataggatttggagaatggacagaggaagggttgacggggaacttacatttgggccacgaatacgagcagcaatgtttaatgaagggtccgcatcaaaacccaaaaatatggacatgctcagtgcatgagtgccctgattaaaagagaagagtattagtcatcattacacattagcatatagaagctgctaaggtgattcaaacgtacctttgttccattgctcaatggatgaagagtggaacttattgcctgtacattttgatccggtttcagcatttcttccaccatggcagctgcacgatcaacagctaaaattctctcagccatgtcttttaactgcaaaagacgtcattgtaacaaaaccaaaagcatattcatttcattataagtatcaaaaataaaattttaaaccatatgttgttggttaaacatgaaacaagggtatatgcagacggcatcccatcaaagcttaaacaatttctactacttat

SEQ ID NO: 269829 - DNA, 1605 bp, Cannabis indica
gcatttatctcttgatgcaagggctgaagttgttttctaagtcttctggtttaacaccaaacaatacaaaatctgtagtatatttcagtggaatggatgaaaaagagattaaacgagtcttggatatgactggattttctaggcaggaagagcctttcaactacctcggggtgcccatatgtgcaaggaaaattgcagcaggggattgtatcagccttgctcagaaaatgacaaagagaattagagtttggtctaccagaaatttgtcatttgcgggcagaatagtattggttaactcggttctccttacaatacatatgtattggagtcaaatcatgattctccctaagaaagtgattaaagaaatagaaggagtgtgtaggagtttcctatggacagggaagagtgtaatgagtggggctggatcagttgcgtgggaaagcttatgtaaaccgaaaaagaaggaggcttaggcttgctgaatgttgctcaatggaatactgcagcaatgtttaagcatgtttgggcagtggcaaacagaaggacaatctttgggtgaaatgggctcattgtgtatacatcaaacatcacaactggtgggagtataaagtcccacaaaccagtagctggtactggaaaaaaatggtggtcataagggatatagtaaaggaaaagcttcagatagaggaatttacaagagctgactttaaagtagcagctggttatagaagcatggcacctgaacatgaaagagtgaaatggagtaatgaagtgtggtcacgactcaacatcccgaaacatagtttcctaatcgggtatgctatgttgaacaggttgaagactaaagacaggttatgcaagtacaagatgtttgattcgaatatatgcccctgctgcaatattgtagaagaaaacatagatcacctgttttttcagtgtcaattttcttagcaatgctttcaactgttgaaggactggattaagtggcacactcaggcagataccttggggaatttgataaagatcatacggaaagcaagacaaactaaattcaggaaaggggtcaaagcagtatgcataacaggactggtgtacctgatatggagaaggagaaataatctgatatggaatggagagacccagcagccagccgaacttctgcagcagctgaagaagaatgtgaaaactagattgatggtagcaatgccaaaaaaagtaaaaagtaaagatagagaatggtttgacagtttgtagataaaattgtatagagactattgaggccattattggtgcttataggatgtaaatgagagtttgtgcaatgaatattcacttgattcataaaaaaaaaatacattttatctcttttttcctctaatatggtattgttatacctgaaatttggcttcatttcagaaggtgacacgtgtcacacagtggaatatatgaaccacctgatataataaagagaaattaccccacatactattttttaaacttttttttttttaaattttacggtttgggtttctaaaatggttgtagcgctagttgcaataggagttttagtacaattttttgttgcgatttaggttgcagcgctag

SEQ ID NO: 269830 - DNA, 557 bp, Cannabis indica
gagtgtacaaagctcggtactttaaaaatgagaactttctttgagcagtacttggtaataattcaagttatatttggagaagtcttgttgcagtaaaagatttgattcgtaaggagcgcagaagggaatcggtaatggagaagagactcttttatgtgatgtttcgtggcttctgagtaggtcaattctgagtcaagatagtttggatcctgatttggctaatgaaaagattagtagtctttttgtggtgggtgagaaagctagggatgttgatgttgtcaaagatttgtttgatgaggaagtggtggtcaatatccttggtattctcctttctaattcagttactaaagattattggtattaggggtttgaatcttttggcgagtatatagttatgagtgtgtttgaattattacaggaaaaccatgagggtagtgtgggcaaggaggttgtggcattttagaagaagttttggcaattaaagcttcctccaaaggcaaaaaattgtgtctggagggcggttagtgggtgtcttcctatgagagtttagttgaaga

SEQ ID NO: 269831 - DNA, 1239 bp, Cannabis indica
aaaaatgaagttgtaattttggtgttgtagaaaagatgaagtagataggattaggttaaagtactccaacatatatctttgggagcaaaagttaagaaagagacatgtcactccacttgatcacttttaatgcacatttgatgttatataaactataaatactatacatcttattttattgttatagaaagtcacaaattgttattctgtccgaaaagcataaacaactaattcatgaaatacagaaataataaacaccctaaatatctgaataacaaattttcaaagaacttctaataacgatttaaatttttatagtagaaaactttcatagcgaaatcaatcataatcatagttgcttaagactaaaagtcttagtaagaggttccaatataatgtgattatgatcaaagtcacccaatttgcttgaaagacttttttccctttcattgcaaatagtaataataataatgcactagttttaggtttatttttaatgaaataatcatagttgtattgtacggacaaactctaatgaacaacaataaaattgtccatagtaaggaagttgggctacagaacgcattggggaagaggcccatggaagtttgggcttgggcttagacttcgtcgggtttgggcttgggctttccaatcactggttataatagtgcggtgggctaccttggtctactagtaggccaagaagattgaactagtccaatccaaccatgaattttgaggaaaacaagataaataaaaggaattatttcacaaatacacaaataaaaatacactaattttaaatattttttatgatttatttataaaaagtatagtattttaatatatttttatattatactcttgttagtttgttgttatttgtatatagtagaacctctatccaagaatgcacttgggactaagtaaattatattctaattgagaggttataactaaatagagttacacaaaaaaaaaatttaaaaaacagaaaaatatcaacgtaacaataattacaataaataatcatttatactatatcataataaaaatattttagagtaaatataatattcatacatgtattataatttaaaataaaattattaattttacataaataaatttatataatacatgtatatattttattaatatgtaattacaatttagaggtacactttggtaatacgtgacttcaaaaatgtataactaattacaatttagaggtta

SEQ ID NO: 269832 - DNA, 687 bp, Cannabis indica
ttactaacatatcatcgacgtaaccctcattttgccctatttggtttgcgaacatttcatttaccaatcgctgatacgttgccccaacgttcttcagtcagaacagcatgactttaaaacaaaagagtccaatgttggttacgaagcttgtatgttcttgatctgggacatacatttttatctggttatatccagaatatgcgtccataaatgacataagcttgtgcctagcaattgcatccactaattggccgatcctggaaagtggaaaacagtcttttgggcacgccttatttagatcggagaagtcaataaaagttctccaagttccgttggactttgggacaagaataggattggctatccacgagggataaagcacctcacgtataatgttgttggctaacaacttgtcaacctcctgttttagtgccgattgcctctcagaatctaagggcctcattttctgtctctttgccgggtagtttggatcattatttaattgatggtacataatcttagggtcaatccctatcatatcctcgtgagttgaggcgaattgatcctggtttgccttcaaaaagcttagtagttgctatttgagcttctcgtctaggttcttcctaatgtatacacattttatgagatttcctgggtcgagaataacctcttccaattcttcgattg

SEQ ID NO: 269833 - DNA, 551 bp, Cannabis indica
tctaaatggtattgtcgtcttcggttgtgcagcaacaacagaggcagtgggatcattatatttagaataagatgatagaacacttttggaaaaaaatgtctcctctatttgctactttattttcagacttaagcaatttcttagaaaagtagtatttgtaaaaacagacactttcttatcttaataccatgggatggtccaaccctaatcacttagaatagcgaacaatatgcaacccttggttaacagttccagcttttcttaagatttcgattggtcatccacgaatctagtaatagtctatactaagtaaacaaccattccatcattctgaaatttcctatcactagggtatatccctagaaggacttaggcaacgactagtaactaattaccaatatgcaaatcgaatttctggagaggtaatgtaaagcccgcttagttaatttggaaattagctgttgtttatgtttaattatgaaattatttatagctatttaaataatttattacttttatttatggaattcagaaatgcatgattatgtcat

SEQ ID NO: 269834 - DNA, 943 bp, Cannabis indica
atagggatctggatacgaaccttaactcagacctagacttagaatgggatcgaaatgcttgacctaaatctggaccgagatctttatccatacccaaacttggacccgcactcgggaccccaacttggacctggacccgaacctagacccagatcagggtctagacatggacacaaacaaggacacagactcaaacgcgaaataaaacccacacctagaattagacccaaagctagacccagacccaaactcgaacccagaccaggatcgagaccaaggacttagacccaaaactcaatctagactcagatcgggaatggaacttgggactcgaacgtaacctagaccaggacctaggacgcgaacccaaaccaagagcctgatctggacctagactgagatcctgacccgaacccaaactcagaacaggactcgaactctgacccgaactcaaaccaaaactcgaactcagaatcgcgaatggaactagaaccgaactaggactaggaccaggactaggaactaaaccaaaagccgcacccagatcaaaaccgagacagagacctaaacctgaaccgagattagcactcgcgccataacctagaccgggacccaaacccacacaataactgggacgtggactcagaatcaggataggcacctgggaaacagaactaggaccgggacctagtacccgaccccgacccgaaatttaacctaggacccaccttgtgacgttgcaccagaaattgaactagattgggacccgagatcgggatctcgatctggaacaagggcttggataaaaacccgtagtgggtctggatttgggaccctgcccttgacccgaaccctgacaaggacccgaagccacacccggacctgaacccagccccaaacccaaaagtggacttgaacctgtaccatgtgacacaaaattgga

SEQ ID NO: 269835 - DNA, 1354 bp, Cannabis indica
gtcaatagactcagtaaaaaaaaggacaaaacatataacataataccgacttctatctaggcgcccagacacctatttacaaggctttagatgcatcaagaacgttcttaacagaagtacgacccctgtaccacatgcactaagtactcgtcttgtactagtgttggtagggctgaacacctcgagtaccactgagtgttgtaccacatgtactacgtactcatctcgtactagtatttgtaatactttatcgtaccctttgaacatcatatacagtaccaattcactccgtatcgcaactatactaatattggtagtatacaaatcacataatacaacttgcatataatacacatgcatatatacgtatacacattttatgctaatcttacctcattttcttattcaagtgtgtcggtcaacctgaatggaaattcatgtgctgaacggaggccctatgtcataatcatacaagtcgggtaagcaacttgctaaaaccttttcggtaaattattgaggcctcatttcagtaattatattagtttattgaaatatcatttatatgtagctaagtattttacggataaaatacattgaagggtagaatagtaaatttgtccttatttgatgtagatcatctatagaggatttttgactattggattataacaatagatcataattaatagcgtatttatatcttggtacgtatagagcgttctatataattaagagtgtgatttcgaatctatagtggcgcaaggaggaattaataagttagaaaattcacttggtaaattatagttctacttattggaagcttgattatataggctcatggttctcacactagttgagactgcttgcagactcagttaattggttttaattaatcaattataattctaaaattagactatgtcttatttatgaatttttactaagcaagggcttaattgtgaagaaaagagattttgagatttatttattaattaaaagactttgttaagtctaattaataaataaaataaaaaataattttatttgataaatattaattataattattaaatgaatagttttgatatttataggattaaattggaaaatatagtattattgaaagaaggataaatggttgaaataaaatgacaacattgtaactagtgaggcccattagtgtggctggccacttagtgaattttgtccattattttattcttttttaatcaatataattaaatcataaaccctagtttaaatactataaaaggaacatgatgctctcattctcatcaactcacttcaaccaaattaaacttagttttcatctagtagatgagagactcttttt

SEQ ID NO: 269836 - DNA, 516 bp, Cannabis indica
aaaacatcactaggcctatcaagttgattaagaactctcaatgccacataagatcgggtagcatccgaatcaaataaaacagtaaatacaagaccgttgataagaagttgacctgtaaccactgaagggctggtagtagcatcgacctgagttatagcaaatacacgtgcaggtgcgggtttggcttcaggctttggttcctctttcttcaattgaggacagtctttcttgaggtgtcccactgagccacactggaaacaggctctccggttacaagtctcggggtgatgtttcttgcaacgcggtcactcaggataggagtaagtttgacgtcctcatttattctggtttcctcgaaaccttttaccttgccctgaacttcccgaaaacgtaaaagttctcttctttttctcaaatgtggggccagcactctcttttccagaactgggaacagggagggtatgttgggttttatgccctaaataaaactctgtttctatgtaatccagattattc

SEQ ID NO: 269837 - DNA, 737 bp, Cannabis indica
cagtttgactcctagggtccaagttcatgtaatttcatcttccggggcatggatttgatgctccatgtcttcatggtacaaactactgaaatatagtgagttggaaacgagttatcgaagtttgaacttccatttcgaagttcctgtagtcaacatgggcgcaaggctagggacctctcccaggttgacttgctatgacttgggactactcaactctgggatgtcatatttcttgatatatgtcaaacattgatgtccacatcatcagagctacttttggtgtaaatatttactcccaagtcaactttacacttgtgtaaggttgacttaatgacgttaactaagcctgtttctcttgtaactaccaggtgggcgtcaattttaacaatcttggacaattttttctgttctttaagcatttccactgagagtataattttaaattcccgtccatgttgaatagtggaattcgaaaattcagtataaaaggagaagaggaaagatgatcttcttttcttatcattatcttttccttttcaacttaaaatttagatgactccttgtgtggtttcctttgatttgagatacttctgaaatgtgtcaacattggaatgtcaacacttaatatgatctttggttgttgtcttagcactgactctcttgtcacactgtatgtttatgtaaatatagatgtagtctttgtcttattttaggttctagccttgaagttctttagc

SEQ ID NO: 269838 - DNA, 645 bp, Cannabis indica
tttttttcttttgttttgtttgattgttttactgttgttttactattgttttgccatgattatttattgacgtcgattttactgcttttgtttattcttgccggttttaatggttttttcttggtgatttccgtctccggcgtctccccacacacgaagaaggttgtttccccacacacacagtataaatgttatgctgttgggcttgggcagtacaaaagtaatgaaattgggctggggcagtaaaaatgttatttttgccgtgtcccagtataattgtaaagttttggtccaaaaacagtatttttgtaaaattccctatgatgattagttgtgccaatataagccggcttctgtgtctagacgatgttatattctatcctctctacgctatctctgttctctatcttgatgtttctctaaattgcaatgtctcgaggaacagaaaagctagtcaagagcttgaagaagtttgctgatattcagtacaagctcttcacaactcgctatggccaacaactcattgacattttcgacttccccattaagcttgttctctctccttttactctcgctatcgacattgccggctctgctccacgtggctttggtgtccctgagctactctccaagctctcttacgct

SEQ ID NO: 269839 - DNA, 608 bp, Cannabis indica
tagggttttgaggttaaaaattgcatctttgtggtgtggtttatggtggccgatggtgagattgaaaaaaatgataccgagcgattttgttgtttttaccaacttccattgaagtataagtttattatatatttatatatttgtagttaaattgtattgtttatattgattttaatattttttggtgtttgatatacggtttttgaggattttgggtcagtcactgtggttaggcaccacaacgctgcgatgctccacttcactctgacaattacaacgcaagctatttcttagttttggtatcttcttttttgacaacatgcaatgatactcatactgtgaaaatttatatgccttcactactagaaaaacggattttagggacacacattgagtaactctaaaaatgtttagtgacacttcaacgcgcgtcactaatgagagtgactcgaaagatagtttatagtgacacttcatatgtgtcactgaactattttttgttgcacgtgactataggcatatagagtcaaattttgtcagactaaaaaggtaacaactacacataaaaattgttagtatatcctctttttagttttttatttttcatt

SEQ ID NO: 269840 - DNA, 1472 bp, Cannabis indica
cctaggcaaacatcaggtgcaaaacaaacatccaaaaaaaaaaacaaaaataaagggaaaagaagaagaagagaagagtgtggaattcgcttcaaacactcgatggcaaacaaataagaagatcagtttctagccttaaaagaaaactgacagtaagcatgcaaataaaacaacatactacaatggtcatctgacgccccctttggggaagcatcaccatggcctccgccataaccaccgtatcacataaatcacgcacaaccaaatgagaatgtcaccattcttcttttgccccaacatgctaaaaaagcagagaaaatatgaatagagacttacacaaagatgataaccgagaagttaacggggttcggtgataaagcttggtctgacagcggtggaggaacgacagtagaaagtcagaggtgtctgaaattttttgaatgtgttggctggattaaaaattgtaaagtgctgaaagtaacccagcaaaggaaaggtgctggcttttataggccagaatgggtgcaaggcagctgtgatcagataccatcgtacggtgaaaatttgtagtgatttgaattccatgatccaatggatggggtgaacaggtgtgaagaggagaaaggacggtcaaaatgcttgagtacctctatggcatcggcattaatgcaaaggtctatcaatggacgggaagtgaatcgttgcctgcgaaaggaaataaaaatcaatgatgacgatcataaatgtgacccacgcgccaggggcacgtgccactatatttattaaaggaccagaggccgcgtacaagtctcatttacttgttactaaataagacttgggggtaaatattgttggaattattttaccaggatctagatttactaacaagtatgtttttaacatcctaaacataaacttctaaaatgatatgaaataaacacatataaagtttcagaaaccttacagtgggtgcagcggaattataacggctccttccgctcagatctctaacccttgtatcctttctgtagcagagtatcaccaagatctgagctcgattctccttctcttgaatttggattcttcacagccttacaaactatgattgagtaccacttgatgagtgtgggcacttactctaatcactctagggtttcagttttgaagagagaaagagagataggatttcgaaataggtagagagaagatggctcaaaattttattgaaggaaagtgtttgcatcatattttcctttgaagccatcactacctatttataggaaaccacttagggttaggttagatttaaatatcattaaaataatgaaaaaataatgtggaaaaattgcttcccaaatggtcggccatggatagtgggccccactttgcaattttgccatttttctaatttttcatctattttctcaaaaatagccatctttcaaatttaaccacttaaatgccaaatctaa

SEQ ID NO: 269841 - DNA, 934 bp, Cannabis indica
caacactttggaaggccatcctcgatattcgggagaaatttcaaaagggaatttgcaggagaatcggaaatggaaacgcaacttcgatttggtttgatccttgggtacctggagataatacacaaccaatgccttgtgtagaaacaactgaaggtgtgagcttagtgagtaatttcattataaaccagcaatggaatgaagacatggtccggaaatggttcgcaagagatgatgctaaaagaattctcaacatctctctccccgataccatcacgaatgattcttggctctggcttccggaaccgaatggtgagttctcggttaaatcggcttgcagaatgctttcaactccaaatcaggatgcgcattcggatagaaaatggagaattctttggggaacatcaatgcacaaccgcctgaaatttctttggtggaggatcttatccaacagtctccccaccaaaggcaagatcggttctctattcccaattactgatatgaattgccttttctgctcatcctacatagagagtagctttcacttattctgggactgcatagttgcacgatccatttggtttggatgctcgtggtgtgtgcgaacttctggcccttccatctcaaattgagaggagtggattgagtagttcactgtgtcggccaacagacctcctataatggacctcaactgcttcttaggaggtgctgcaattatattcgaaagcatatggaaggaaagaaactcattactccatggtaagcagccgaccgccttgaaagtgcaagtagaatacattaatagtagattccatgaaatggatgcaattaaggagcctaccaatcctcccaacatggaatggaatccacctccggaaggttggattgcttgcaactcggatattgctattggccaatcccaagcaacgggggctgc

SEQ ID NO: 269842 - DNA, 570 bp, Cannabis indica
tgtgagtagatctaagatactggtaaaataatttccaacagttcattcaagggcttcctggaacagtcaattccctattattcaggagtgcatgcgcctcctatttgcctacaaatagcgaaagcatcagatgagaacttcaagaaccaagttgcccttcgcaagggaagtagctttctggatatcacagtatctttcatgatcctaccttaaaagaaggtttgggatatcagtatatcatttgacgtggcaccattctgcagccttcatgtaaagacatccaggaatagggataacaattatttacttaaaaaccatggtatatctatattagttttattaaaatctatatatatattttatttgtggtatataatttagttagtatagcatattatatatatttatatatctatatatatgttagcacagattttcgttaactaaaaatattaagcccttacgtaataaatatatcacaaaattaaagagaaataataaatatatgagtgacaccagatatttttacgtggttttgcagttaaatctgcatactccacgagtctatct

SEQ ID NO: 269843 - DNA, 565 bp, Cannabis indica
tttttccttttttgtatttttttgtttttttccctaaaatttaattagttttaataatgaggagtgttaccgtcaaactcctatacaaattctgtattcaaaaatgcatatttgaatacttttttttttcaaaatttgtttcatgagagtgtttgttatgcttacaacattgttcttgtaatttttttttaaaaaaagtttgtatattttacagtgttgaaaatacgttcaaagttttttaaacatgtggtaaactggaatatcagaaattttgtttttggtactgtaaattgtttgaatttttttaaaaatttacaatttacaggagtgatattgtaactataacgaatataattttttttgaaaaaaaaaaacatcccgtcatgaaggttgtaataggaagttctaattagtcctcatttttggtaattgaataagggaaatttgattttctatacttacatatacctaatattttatttctaaactaatacatatcatcattgaaaatatatgaccactttatttaaaatccaaaaatacccctctcaaattttccatactt

SEQ ID NO: 269844 - DNA, 648 bp, Cannabis indica
aagaaagaagaaagaagaagaaatagtgaaagaaattatttttaattttttttttattttttaaattttaaaatatttataattgtttttaaaattaatattaagtcgaccaatcttaacaatttgatacgtgtacacgtgggctggcatgtagcacttaattgagattttttgacaaaagtgtaaagagcaaaacgaaatgggatttaagtaggttttgccgtcaaaattttaatatttgttgttaagtgttaaaaaatttaaaattcaggtagtgtagtcgctaatatccctaataaacaatgtttctattactagtacaattaatgctcaacacaattagaaacgatatgacacatcgtaattattagacataattaatattttagtattttttatataaaatagtgtcttatatagtatagccatataatatcactatgaggtcgtatttaatcatcgagttgcctacacgttacgaagcgtttgcactacgtcacaccgcaaaaaaaaaatatatagtttaaatttttttacaatgtagttgtaatttatatttttgccaaaccgtactgcatgatttgcgattttaaatttaataattgtgatttaaacagcactatactatatattataaaaaataatttt

SEQ ID NO: 269845 - DNA, 595 bp, Cannabis indica
gaacggtcatgctgtggcgaagagtcgatgaatggtgagtgcatttttagaattgaagagagctctttggagttctcatgatgagggttaacttatgatcatgcacatccacacccacataaaacatctgatccggactcggacctaggcttccaatagtactattaagtattaaccatcccataacaatgatgatacgaatgatattgaagatgagggttagggtgagggcgatgagggtcagcaaaatatgtgacacatatataatataatatatctgtcgtctcactctatcgtgtgtgtggtgaagttcaaaaattaacatatagtatattaatatgtaataaaaaaaatatataatgtatttagaataattatcttttttaccccctgtacttatgacactatactattatgccccttaatctattcagcttgttacaaatagtccttgtataattttatatgcatacatttagtccttctgtttattttgttttaaaataccgtttgtattgatgatgtggtattataacaaaggatagagtagtaatttcatctctttttagagggaaaattgactatgaggtggcat

SEQ ID NO: 269846 - DNA, 514 bp, Cannabis indica
tgtcagagtattttgagtacaatacatataaaaagaggtatgtttcaattaaatataaaattagaggtaaatttgattaattgattaataaaagtggtactttacaacttaccgctactattggagtagtatttttcttagtgtgctaaaatatagcaatacgctacttttttagcacttcattgaagatgttcctattttttagctttgcatcacttatttgtatctccactttaaatgcttttatattattattggtataattaaatattgagcctcatataaattaatgtaataatttttatgaaatatcactagctaaccaattacaagatactgctagtgccttatagcaatattgtgcatcaatgcactttattcgtgtttttgatatatgaatagttataatcttaatgagtaatttgcagcataaatacctaagtttgactccaagttgtaaataaatatctaaagtttaatttttggcggttaataatacataagttataatttt

SEQ ID NO: 269847 - DNA, 2493 bp, Cannabis indica
gattacccatggtctgggttagttccgcggaaccacttatggtctaggatgtgtgaaaaagtggatgactttggtggtaactgatggagcatttttcaagggttgaaaaatgttttaaaggtcctaaggtttttgagtgtggaaaggaaaagaagagattcaatatttgggcttaaagggtgtggtgattgagagagataagttaccgaaaaccacctccgttgaaaatctgaagtaatcagactttaatggtaactgatcgggcatttttcaagggttagataattagctcttgcattacttttttaatttacaatccatgtgaaaacaagctacttatcattgtattacttatttgattgtgtacacttgctcacactaattttcacaataaatttttaacgttgttaccggagattataaaaatatttaattgtaatagtcaattattttagtttatttttcttttgtactcatttttggtgactcttgttcattgacatgtgcaatatctttatgaacgagtactaagaatttattaatcctaaactatttcctattgatcctgaaattgaacacacattaagaaacaaaaaagaaaaacacaacaaagagctcaagagatagtagtgatggagaatcaagaagatgggcagcaagcttcaaggggaaagactcttactaatggtcaaaatgcaatgattatggcggataatagagatcaagccattcgacattaggttgtctcccttttcaatgagctcaacccaaacatagtgaaatagggatattcatcaaactatccacaccactcaaaccatcggcaccacaccaaattgcatgaaaatacaaattgaaatattttacggtgcaactgtgatttgtactttcgccgaaccaggtggtgcaattttaaatttaatagttgaggtcaaactgcaatgcaacaaattttataaatttatacaataactttaataatgattatataaaaccactaatcatttataaaacttcacctcctaaaagtgttaggtaacatgctgcctaataccaataaataacatattaggtattgtatttggttcaataccacgtatttaatttaatggatttttccaaaatatttagtatacaatatcatgtcatgcaaatttactacctaactattttagaccaaaaactacatgggagaaaagaaaaataaaaatataaaagaaacaacttcttacaccgcaaagaaaaaacgaaatgttaccattcaatcctcattctcaaagctggaatagcctttctacgacccgaattgctttccttcaaatgattgtccgaagttccaatctttgggagcaacactgtaagatgtaacagtgacaccttcactattagtgacttcaaaggataggggttgattttttaaatcagcatttatgtgccagttttggccccagttccttcccattgaaagccaaccagttcttgaacccttaattttcacagcagatacgtctccagcaccggcaacattgctgattagcaccgaaatgaagatacttgaaccgtcaattgtgaatcgtattcctccttcctttctgcactttattctgttacagaagtcaaattaactagttgtcaacatgccacattttttcctaatagatttaatcacaccgaacatagttttcgtcatcaatatgccacatttacaacaacattgtcatctcatctttttcactatctcttaagtgctacatgcaagtctaaacatgaaatagtcaacaaacgattgcgttgtatcgcccccattttccttaataacaaatttagaaaaaacctgttagaattatatgaaaaacaccataacattttaccaagtacctcatttatcactaattggttttaagttggaactctaatcttttcctagaaggcttatttcttccaaattgtaatagcttctattgacaatatgccatatcatatcagcatgtttattcagatggaatgacagaaaatttggaaactttaattaaacagaaaaactagatcatcagttccaactatgcccagaaagaaaaaagctttctttcttttgttcttccttaaatttctagcttataaagggaagctaaattaaattactgtagataaatacaaaatcatgttgtaaaaacttaaaggccatcagttctatactcaattcaaagaaaagtaactctacttcatacaagtgaactacaataactattccatccccaatcatagtaaatgtggtttgcccttgcaagagacctacctccaattgctatagtttcctagtccctaaatataatgctgaacagagacatctgcacaatcaagaactagtttgaactttggtttgaaaatcactgctaaatatccccacaatctctacaaataagaataggaaatatgtttcaaaattataagcacatcaaacaattaagatgcgctcagtaatttaactaaaag

SEQ ID NO: 269848 - DNA, 849 bp, Cannabis indica
caagacttagctcgaatgcagatgaatttctagaatatactgatttgaacaatgatagttaggttttgtaattatgtcaatttttatcttttaaagtttatttaaagacaattttctaattttatttaagataatatagtttatgttgtgatggacaaattaatattaatgtttaatttctaattaataatatatttataaaataattattatatataattataattaatttcattatataaatattcaaaataatgttttttaaatatttaaaaatattaatacaggcggaacactgattgtggtccgccggtattaatttatctacgtgtaaaagtgcagacattaataccggcagaccccatcgctatcaatctgccggtattaatattattactggcggaagaccatttttgtcgctattagtcacttatagcgaccaattaataccgcgaattctgccggtattaattatttccggcggtttgggctattaataccagcagatgtctctgccggtaatacagaaaattgttgtagtgccgttaactgctataagaatttttaaatgaatttcgtaaaaatcaataagaaaaactgtttaaaaatataaaacaaaaaaactcctatatttaatcataacttagactatatgtgttttcataattagtctttgttttataaaataattaatctttacttattaagaaaaattatgactaatgtaataatcagcttataatttagtatgcaatggggttttttttttttttctttgataagtatttagtatgtattggttagagttgtattaattacttattttgtataacttaagatatcatacac

SEQ ID NO: 269849 - DNA, 632 bp, Cannabis indica
aaatagatgtagcttcaattaccatcgcgacatgaagagtataaattatgtgtgtcactcttttaatatttacttaactcattatttatctcgtcaatctagtgagctagtgttggccaattttcagtgtcaacataaataataagagcacttaatacacatatatatatatatatatgaattcaagaattaacatgtcagaataaaaatatatacacaaatataatatatagataacaaagaagaaaaatacaaaaaggttattgacattatttaagtcaaatgattgtatatataaatatatatttaatgtatcgtgactttaaaacaattcaagaaatcaacaaacaatatgacagagggctagcttggcacatttatgctgtgggaaaaagcagctgtagctgtactgtgagaaaaagtaattgcagaagaattgtggaaaaaaacttaactaagtgtttggtaaattataaatttcaaagtactgtgagttgttaagatttattataataataatgataatgttataattttgtttattataatcacaaatatataaaaacttattttatataacatcttttattttctacatatttttaattcttttttaagtttaaatttatatg

SEQ ID NO: 269850 - DNA, 435 bp, Cannabis indica
gggcataaaacccaacagagaccccatcctcaagttttagaacctcaaaagtatcaaaatggcatctcagaagctccgaaataagcactcaaccctcaggttgacatatggcctagtgtgctgggttatgcttatccaattctgattccatctctatcgttcatctaatttttcataataactgagattcatgaagtcagaatagtcaaattcacaactacatattttcacttttctagcaaggtaatgtacttggaaactgggtagtttcgagtctcccatttctgcagaacaacaatatctccaagaaccgatgaccagcttcactaaaatatagaaatagactaagtgctgtcaaaatatcacttaggaatcaagaaaatacatccccggcatattttcccacacaaccagcgtccaagttgacattacatg

SEQ ID NO: 269851 - DNA, 631 bp, Cannabis indica
cttcaacacaaaatagatgatctgtcaactagacagtctaatgaacctaagaagaatttttatgaagtattagattagcgtgaatctttttgaaaaaatgtgtgaaacaattttggcttaaaaatagagatcaaaatagtaatttttccacacacaaataacaaacttcccatctgaattctcgtaaattaaagatccacttatggtataattagggtcaaattttagatattaattggtttatcttatttaggctcaatatgtgtagaaataaataataggttaaggcttaaaaaaaaaggtaactaaaataaaattacagggagcttgaaaggcacaatcaattcaaataatgcctaaatcaatttcctaatcatgcattatttaatattattaatatattatattatgattattgatatattattatatatataatgttataagtttatatcagtaaactaaacagacgaaccctcgtcatcccctttcgacaaaaccctctcccctctatatttattttattcgattttcaacccgaaatctagcgatctaagctctggtagtagtgggatagtgaattctcaaagcgggaaagcttaaggtaatgtttaatttcgttttaagttta

SEQ ID NO: 269852 - DNA, 861 bp, Cannabis indica
acaagtcgctggtaggtagcaccgacattcttcaacctaaagggcatcacattgtaacaataatgccccatgtcaatagtgaagctcatgtgctcctggttcgccacgttcataggtatttggttatatccagaatacgcattcatgaaagacataagttcatgaccagcggtagcatctactagttgatcaatgtgaggaactgggaagcaatccttgggacatgccttgtttaagtcagtgaaatcgatgcatgtttgtcacttcccgtttggttttggcaccaacacagggtttgcaacccatacggggtagaaggcttcacgaataaaattactggctaaaagcttgcttacttcctcttttaaggccacagctctaacctgatcaagtaatctcctcttttgtcgtttggcgggcacgtccttgtttaggttcagcacgtgggtcattacatttggacttatacctaccatatcagaatctgcccaagaaaatacttcttggttgtcacagcagaaatgaataacaaccttcttaatctccttacttaagtgcttcccaactttgacagtttttgttggttcatttaggttaagagcaacttcttcaagttcctcaatgggacccaagtcaacacggtcccctattttccacttcattatcgttgtttacgaccaacatctgggccgctggtcgggtttgtcccctcatagccacaatgtagcattcacgtgcagctagttgatctcctttgactatttcattcctggtagcagttggaaactttaacgccagatgcttgattgatgtgactgcccccaacatgtacaatgctagtctacctaaaatggcattgta

SEQ ID NO: 269853 - DNA, 538 bp, Cannabis indica
tttgtctgcaacaaggtttggattttggttcaaagaccaaaaggtatcaatgtgattggaacaaagtggatctttaaaaataaaagtgatgaattcgatacaattgtaaggaacaaggctcgattggtggcacaaggctatacacaagtagaaggtattgactttgatgaaacttttgctcttgtagcaagattagaatctatttgtttgctattgtgtattgcttgtattcttgatatcaaattgtatcaaatggatgtgaagtcggcctttttgaatggtatattgagtgagaaagtttatattgagcaactaaagggatttgaagatcctcagtttccagaccatgtgtataaactataaaaggctttgtatggtctgaagcaggctccccatgccttgtatgaaaggttaactcaatttttaatttctcatgattatgaaagaggttgtgtagacaaaactcttttcattaaacatataaaatcttattttatcattgctcaaatttatgttgatgatatagtatttgggtcta

SEQ ID NO: 269854 - DNA, 744 bp, Cannabis indica
aatatatgcttgagtctgctacaaattaacttggtaataattttatacaagacattacaacaagctatgggtcgaaattcactcactttgttagggcatttgatcttcggtatgagagtgagcactgttgagttcacttctttcaatatctgccctgaatgtaaggctgacaggattgattcagatacatcttggccaaccaaatcccaattatcctgaaaaaaggagctgctaaatccatccggaccaggggctttaatccctgggatactgaaaaactgcttgcttaacctcctctttcgaaaaatttccttcaagataaatggcctgctgactagaaacaaccggacccatctccaccaacttctttttgacctccttcctatcttgcattcgggttcccaggagattcttataaaattcagtaaaggcttcagtaatctcagcaggttcttcaaccctttctcctctcatgttttgaatcgagaggatattatttttggtccttctttctctgatgtatacatgaaacaatgcagaattactgtctccatcttttaaccatgacagtttagccttttgctgcaagaaagagcagtaattgctatgtatttcagcatattgagttctcgccattgcttcttgtcgttgtagctcatcactgagcagattattgtgcatcaacgattgacactcagccagcctagtacaagcttggatatcagcttgttgtaaattagaaaa

SEQ ID NO: 269855 - DNA, 684 bp, Cannabis indica
aaactggtttttatttgttttttttattttggttattttactaactggtttctcacattccactatttttttttgttattcttttatggtttttattgcatttttttctcttaaattttctttgtttctttttccctctttgattttaatttctgattctctttgttatatttcttgcatattatatgcttaaatcaattctagtttttgagcaagcaaataaaaaattaaatggcaaaataaagaatgaaactagaagttttgttataaggtattgatataaaatttatatgttcgaaactagtttttaaatttagtatcgtttgtaaaagtttaattattaggcattgtgtatttttcattatattattgatgaaattatttttttgcctcttttaatgaaataattagtttcttttagtattgatgaaagtagtttttaaagttatagtatcatttttagattataaattttttcattatcttgttgatgaaactatttttttattcttttaatgaacttattagtttctttcaatgtttatgaaacttatttttgaagtttgtattatttttagattataattttttatattgtttttttccaggatgatgttgatgaaactagttttttttattcagctgcttttaatgaaataattagtatttaaccaaaaaaaaaaa

SEQ ID NO: 269856 - DNA, 1123 bp, Cannabis indica
ggtccccaagtcgaggatccacatcttcatccccgccttaggaagttccctacttagaaacattttttcccttgtctgtgctatggctggagcatacttccttcttagccttggttaccgcaaggttataatattcctgagcaatctattggtttcctttcaaacaccctaccccattctttgttggaaacttcaggcatgaatggaatatcgatgtgacaacctttaagtcatacaaggctagttggcctaacatgacgttaaaggctgagggaacgtccaataccagaaattgtgccattatagttatgctcgtcggagcttgtccaacagtgagtggtaggcgaatttgccctaaaggtgcaactccttggccggagaaaccatatacaggcaggagacaggggttagatctttgagctcgaaccccatcttttcataggcggtcttgaataagatgttggaggaggctccattatcaatcataattctggccaccatcttgttggctatctggacctccactaccaacgggtcattgtgcgaaaatctgattttgacaacatcttcatcgttgaatgttatggtgggctctcctgctcgtgggatttttggcttcctctcttctacggctaggatcactttttgttgctcgtgctgtactgtttgggcatacctctcccaagctttgcctgaatcttcagctatgtgcgggcctccaatgatgacttgtacatgtccatctaccggtggaggtagcaagtcttggttgttatcaccccactgattctgatcggtcttgacatacttctgtatatgcgggttattcttccttatcaggaattcaatttttcgcttcaaattgttgcattcattggtgtcatggccgtagtctccatgaaattgacaaaacttggtcatgtctctcttgctgacatcttttttcatgggagcaggcttcttgtacggggctagtgactgtgtggccatgtaaacactttctatgtcctccgtcaagatggtaaatgcagtatacttggtaggattctcccggggagcttgttcgattttgccggtgaactttccttttttttttccattcccttgcctattattgttgctg

SEQ ID NO: 269857 - DNA, 912 bp, Cannabis indica
aaaattcaaccagaaagagaaccaccattaatttcagcaacttcacctgagaagacaaccagaatcaatcaaaacacgggttgtttcgaattcatgaaagaagttgtagaaaaactactacgaaactaaaatttaaccagaaatacagtttaatttgcataaaactaatgtcttgatttcaattttcaaatcaatgaaaggtagatctcaaaaatttgaacttgagttcccaaacaatccaactcaagtataatccaaaaaaaaaatcacatcgatactatattaaaatgtttatcctagtgtattttcgttgttttccaaatttctaatggtgaatttgttcatattaaattataaagagacatgtagatagagttacgtacgtggaaacactattctgatttttaatgtttcacaatagttgcattacagttgcataaacattttgctaatagttattttgtttgattgaaacctttgtctgatgcaaccttcagccaactacccagcaactacccagaaactttcgtctaatgcaaccttcggccaaccacccagcaactaccctgcaaccatcgtctgattgaaactttcatctgatgcaaccaccacgtaactacgcagcaaccaccctgcaaccatcgtctgaatattgtgtaagtgatcatgtaagtggtattttagtaattaaaattacataaaaggtataaatattgtccacaccttatggaagtatttttgtaaataaagtgtcaatttatattttctatgtattcctagtattaggggtgtgcagaaagacatccaatccaatctcaaccgactgatccaatagaattagatatccaatcataattggatcggatcggatgaaattttaaaaatccaattggatcgaatcggatgttggat

SEQ ID NO: 269858 - DNA, 624 bp, Cannabis indica
agcattgcaccttgtttggcatgaggacccgaccatgcacagtaaccctctccagggtgtgtttccaggtgcccaggagagggaaggaagcattcgacctgccctaggagaccatcctcaaagagaatggtcaatctcttgaaggtcagaacggatggtggagaaacccatcgagctccctttggaccctttcagcttatgggacgagcctcagtaaactcctccttaacatagtctcgaccagcttctaagactccacctgtcataaagataggttcccccttctcgttgaaaccaccgaatggtagaacccgagctaccctctccttctcttcgccctcggcctcaaaaggagttgcaagacaaatctcgccctggtccttaatttcccgaacttcaacatctctagtattctcctcctcctcgaccgtaggtcgggcctgttcccccctggccagggtagccagactagtaatatcaggatcaatagatgaagactttttgacagtctgcttggtctgcgccatcattttacgactagacggagcttttttagaggtgtgccttgcaatagtcacagaaactccacaatagagtttacttcagcagttggaattggacagc

SEQ ID NO: 269859 - DNA, 1160 bp, Cannabis indica
gtgcctgttccagaaattttagtggcacctgcccctgttgtccaggccgaattagtgttagcggtgaatcgaatggaacctatgtattaaaggttcagcaagcaggcacctctaatttttctgggaggtctggacgtcatgaaagccgagcaatggctaactctgatcacaaagatattgaatttcatgggcgtcaccgggaatgacagagtggtgtgtgccacttttcaatttcaagaggacgcattagtatggtgggacatggtgtccatgatacacgatgttacaacgatgacctgggaaaagttccaggaacttttcaatgccaagtactacaatgaggccgtcataagtgccaagaggaaagagttcacccacctgacccaaaaagaaaatatgagcgttattgagtacacaacgcaatttgatcggttagtgaggttggccttgggaattgtgccaatcgatttcagtaaaaaggaaaagtatttagatggactgagtgcaaagattcgacatgatttgatgattactaccgacgacaaaaccacctatgctgaaatggtggagaaagctctgcgagctgagggcgcagttggatgtatgactgagtcttctaggactccagtgggtggcagggctcctacccctcctgcattaggctttagaaggggtggtagtggctcggccatggatcagaaaaggagggcatccactgcaaccggtggcttgggtcagaacaagaggttccgagggaaccagggtcgaggcattcgtcatggtagttctgagatccgttatacttacccagagttcccgagttataaaaggcaccatctgggtgagtgtagagggcaggggtgatttcagtgtggcatgccaggacactacaagagggattgccctcaacttagaacagaagcaccaaaggatccggcgagacccactccagctagggtgttcgccatcactcaggccgatgtagaagccagcccttcagtggttacaggtcagctctttgtcagcaactctttttactctgtattgtttgattctggggccacacattcttatgtggtagccagaatctttagtaaattggatagaccgcatgatagatatgaatcagggtttggaaccctattacctggcggagagtt

SEQ ID NO: 269860 - DNA, 740 bp, Cannabis indica
tgttaagattcgggactttgctagggccgaattagagagttagggtagagctagcttgattgctttttaagtgtacactactttcacagatattctaacacttaacctttttctcttattgcagcagccgttcccatggatgagatcttggccacccttgctggagcccacagtcctgatgtttcccctcctcctacttcttcccagttggtcacccccgggaaggcttcttcaagtgcccctccgaacactattgacttagtggacgaggaggaggtacttcttgaggaagctgaagaaggtgaagaagagcaagaggttgctctcgtgcgcaagcgcaaaggcaagatggtagtagaggagccttctaaacgcccccggagggtggacactccggccccgagtcatgactccgggatcccctccgaggcggaggagtatacagtgcctcatggaattgtattgactctcatccccggagatgaagagaggcagaacctttggatagccaaacataactacgcccttgacgagtacacccaggggcatgctgaggtggaggccttgaagaaggtcttacgagaggagctacaaaacactctcaacgaggaaaacttctggaatccgtgggatcagaacatggatcccctgacggagtggttcaaccgtttccttgggcccaccttggccccttttgcctcagagctgaccagcgaatacgtctcccatctgactcaatt

SEQ ID NO: 269861 - DNA, 1111 bp, Cannabis indica
aggtttttttttttgggaggctggggaaaggtgatcattattcattactatttgagaaaaggattgagtgacttttttttcgtatatctttaaaaataattcatacttattaaaatatattaattactctcttatatatattcaattgacttagaaaattgggttatatatctttattatatatatattaaaactatgggagcaaaaaacccaattattaatcagctaacctattgtgcttgtaaaattaaggcagtttatttttaaatattatagttgattgggttttttttttttaaaagatttttacatcacatattgaaatttttaacgtttttttttttactgtgtaccgtgttaagtttttattgttgttcaacgattgttttttagttcttttactattgttttaataattatgtattgttgttttacggttattttataaaagatagtatttttattaaaaaatctatgtagcagtaaaatttacaaaattcagtatttttgtaaaaatattttttatttttattttattttatagtttatatatagttgttgtgaggttgatttgtagttgttttttttactttttgcgaagcaaattatattttttgtaattttaaaagtgtatttttataaataaaagctctaagttgtaaaattgtaaataaaatattaaaaataattccagcaactatataatagaaatacacaaaagtagttatttcgatcatataatataggaccaaaatgattataaaaagggccaccacttggaattctaataataaagctattaattaataagaaaatattatcataacaacttttcccaaaagtcaaaaatgcaataatattccaccaattctcactatgtagtttagactataagacttgtcaagtaaagacaatctatttatgttttgttgcaaatatgccaagagcaaaaggaattgaatttatggttgaaacacaagcaaagagatcattttggaattttaattagttttgactaaatactattatgatatcttaggatggatacaatatattttttaaaattttgatttttattttaaaaactgtaaagtcctttttggcaagttag

SEQ ID NO: 269862 - DNA, 453 bp, Cannabis indica
cctggtaaaataatttcctacacggaccccatcggacaaggcgaaaaaaaaaagcaaaaaccaggaaaaatgcagtattcacagacaacaagcatttcaacacacaaaacagcaaaataacagcaacaacacacagatcaagcatcaaaacaacattctaaactaaatataacaacaacaaacaagattaaaaaaaaagaattatttacccattgatgtttcgtatatgaggagcttgtagtgttgtagtgtagtgtagtagcttctagtgtagaaaatgagtgaagagaaggaaaaaaaaaattgtggtggtggagtagagcttgtgtgggaaaaaggaagaaggaatgggaagagaggagagagagggaggtgatgtaaatggggagtgtaatttaggaataacattaaagttgacctagattacaaatattggtaattataagtttaggg

SEQ ID NO: 269863 - DNA, 352 bp, Cannabis indica
tacctccaaccaaacgccaaggttaagaaaaacaaatgggaatgagattcatctttatccccacacaaaagacagcaaggagaagaattaatgtcaaacttgattgacctatctattgtgtttaatctttgcttcaaggctgaccacacaataaatctatgcttcgagtacataattaatcccaaatcatagcaaatctccaattatcaacctgccctgtttcagcttaagacacatatcaactatattaaattaaaattcttgaaaatcctgctgtagcatcaaggtctttgtcttttgtttgcacaagcaacttccagtaccaactaactcttggaaattattttaccag

SEQ ID NO: 269864 - DNA, 1777 bp, Cannabis indica
aaactcaacaaagctctatatgggcttaagcagactccaagatcatagtttgacaaactctcttttgctctaataagtttgggctttcattcaactaagacaaatcattcattatttattcaaattacctctcatagctgtttgtatgtactggtttatgttgatgatatcttggtcactggtaacaatagtacttaagtatcccctcttatagcaactctcaactcaaagtttattttgaaagatcttggtaacctcaattttttcttgggcattcaatttattccaacttctaatggtctcatttgtcccaacaaatgtatttacatgacctattttgcaaaggtgagctacaaggagtaaagacacaaagtacccccatgaacaatgctcttaaactctctacctttggaagtgatcctgtagtagatccttctgcctatagatctattgttgggatcctacaatatgctactatcacaagacctgacatagcctttagtgtgaataaagcttgtcaatatatgcaaaaccctttgcaatctcacttagtagttattttaaagatatctcaggtatttggctggaacactagactataagtcttcacattaagaaagcctctcatttgaacttagaagtctattgagatgttgattgtgtcaataatcctgatgatagtaggtcctcaattggctgctgcatcttttggggtgacaatctcataggcttgcaatctaagaagtagaatacaatctctcggtcctcaactaaagttgagttacaaagccttgtctctgttgtttctgaaataagttggattcaatccttactatctgaattgcacttgcctcctgttacagttcctatgatttggtgtgacaatttgagcaacattatgcttgctacgaatctagtactccacgcccgcaccaaacccatagagattgatctctactttgtacgcgacaaagtgcttcaaaaagatatttgtgtgcagcatgttcttgctaatcatcaactttctgtctctcttacaaagcttatatccaactctaagtttctttttctaagagacaaacatggtgtggtttattccactgtactctgtttgaggggacccgttaatgatacaattttagctaagccgttataattacttaataatttgttagatagttatgttgattcagttaggattagttgcagcaagtgattagtcaagtttctctgttcttgattaactaatgaatcttgtttagcttttccaattgtatagaagggttttgtaattcttttctcaacataatcaagaattcattttgtcaaattgcttttcacattcttcacaatcggcacatatttatatagatttttttatatataaattgatgtaaactttgaagaagtccacccaataaaattttgaatctccagcaccaattatagccgctgatatttgttctttttaactttggttgacttgtcaatattccagcttaagtctattttgttcattaatgttattcttaacaatcacattgcttcttattttagtacttctgtcaagaatactcttcttataattttatcttatcttggaattaacacatgattaattgtatattttccaaattaattaatgatttgaaaattatacgtcaccattaatgattcaaatgctcaattccaaaattgcaacgacacgaatttttctcaacctcaaatgacaaaaggaaataactaatcaagggtgaagtgttagttttaacctcta

SEQ ID NO: 269865 - DNA, 743 bp, Cannabis indica
gattaattgttaaatatacatatactctcaacgatcaatatataatatatgttatatatatacactatattagtgtgtaaaatttaatagtcttatattatatgttgtatcctgtatatataattcaaataagaatatgagtttgaattataaaataaatatctttaatattatcttaaattttaattgacctacttaaattggaattcaagatagtatctactaaaagataaattattatttctaaattttggaataaataattaaaatgtcagccaaataatctttttatttataaaaaagtaataaaaagatttcaagctcaattttatcaaaaaagtggtaaaattctaaagtcatataaaatgacacaaaattccaaatgagctcattaaaataaattgaaatgatgaaatattatttcaaaatttcaaagaggtctttaacctcacaaaaatcttaaaatggtaattttacctaacaaaattcaaaagtgaactaaaattcaaagtcataataaattaaatggcattcctaaaggaggtcattcacctcaacaaaacttccaagtgaattcacttttcacaattttttttttttttttggggaactacgtttaatttgattcctataaaaggataactaggaaacttagttgctaagactaagtgcagtcgcctataccgcaaaatggtataaaaatacaaccttaaaattaccataaaaggtcatccacctaggaa

SEQ ID NO: 269866 - DNA, 590 bp, Cannabis indica
aagggagtgatgttttcctttacctaccacaaccactccattatttaatcctatatcaatacatttactaagacccaatatatacccacatatggaattcgtctaatattgtttttgagtccacctaatttgtttattttttcttgttttgtgttttgactaagacgtagtggtatctaatatttttttacgtatcaatatcgctattaatacaattaagtatcaagtcttatatattaataagaataagacaccttgttgtcaaaccgtttaacaaaagaaataacaataaattcaaacaacaaaaaaccaaactaaaaggtgaaaataaagaaagagagataaataaaacttgtttattccagcaatataaaaactaaatattgtaatcaattcatattacaattcttattttattgcattaccattactcttaccattattcatcccattagagtgttgagcttgttaatgaagtcctcaatataagaagattcaaaattgttgcgaagaatgttttgtcgtaacttggcaaggttggctctaacctctttaccaacctcattctcttcatccatgacagtcttaat

SEQ ID NO: 269867 - DNA, 808 bp, Cannabis indica
atatggatctgacgtggtactggcctggaagtcttagatgaagaagaggcggcttccttcagcataggctactattttttttttgaaataattagggtgcattttgttaattgttaacaattatgttttcagaaaatatgtttgggaaaacagtttttactttttcttaaaaagaaaataagtttttattttttaaaataataatcaaagttttaaaattttacaaaaacaaaaataagttacgcttggttggccaaccttgttggaagtaggtctatccagatccaatccaattatatatttgatgttagattttactatccaatcggatctaattaatttcagtcatccaatcgatccaacatctattggatgttggattggatcggttctatccattggatgtatttcatatatatttattggtttaatttgggtttatctaatattttagacctaatattgtttggatcggatcagatccatctaataatttagatctagtatgtattggattggactaaatccatctaatctaagaaaaaaaaagtaaaattttaatggttaattttcatgtatacatatagatttgacgtataacaatataaaatttaattacacatccaaacttgtaaatacaaattagttcgattggatgttggatgtattggatttctagacgccccatccaccatccgatccgatccaattggatatttaaaaaataacatctgatctgatccgatcataattggatatccaatgtttggcggtcggttgtattagatcggtcggttctcattggatt

SEQ ID NO: 269868 - DNA, 664 bp, Cannabis indica
gggttcgcgtcctgggtcttggtctaggttgggtccgagtgccaagttcaaatcccgatctgagtcttgattcagttttgggtgtaagtccttggttcttatcctggtttgggtttgagtttgtgtctgggtccgggtctagcttttggtctgaatctttgtgtgggtttgagttcgggtctgagtctgtgtccggctttatgtcgaggtctggaccctaatctgggtctaggttcgcgtcaaggtccaagtttgggtcccgactgcgggtccaagtttaggtctgggtcaggatcttggtccagacctagatcaaacatttcgatctcagtctgggtcttggtccgagtccaagttcgtatccggatccccatctaattccaatctgtgtttgggatcgggtcccaaataaaggtccaggtctggctctcagtttcggtctgggtacgcgaccgtgtctgggcccaaattcaagtctcagtttaggtctgaggctaggtctgtgttcgggtcctggtcacggtcctagtcttgttctagggtcctagttcgacgattcttgttcaggttctaattttggctcccaagtctaggtcttggtttaggtttcgtactttgtatgggttgtggtcctagcatgagtcccagatctagacaccgacta

SEQ ID NO: 269869 - DNA, 520 bp, Cannabis indica
gtagaaattacataaattatagagtttttgtagtgttcattttttatggcataattaaataatatatttagtgtatagattctgtattttgctcacatttttatggaatttttatatgtcatatttttgtaaataaaactaattttactatattttatagtttctccatatctcgcttctctaggtcaatcgtttgttaggtcaatttgaacttgcctgcaaccatcctccccacccctctccaactcgcctaaccaacaaaatcgtccgccccaaactatgaaaagaaaacaccaacagtgtttttatgcgtgtatgaagattcattatcattatcatcatcatcacttcttttgatcttcttcctcaataggtacatgcaaccctcaccaaacgttattgcacacaactgttttgctggagcaaagtcaatctctgacggagcgagtttcgacaatcgcggaagagatctccggtctgacgctgttggaagtcctctgtgagaaattgggtgtaacgc

SEQ ID NO: 269870 - DNA, 531 bp, Cannabis indica
ttttttttttgtttaaattaacaaaaaccgctattcgcattgtcacatatgaaagcatcatattagaaagtatagtcctccatgtcattgcaaatatacacttcttagatcagaagatgctcaatatccctgtttacaatgtttggaagcaaaacctcagaacttggatgacaaatacaaatcacatttcagtaaataagcaattagaaaagtacaagacagtgataattatacatcagatgaatagggaaatagggtaaaagacaaaccattgaaagcaaaccattgtacatcaaatattcagtattctctacttttttttttcttttgacaaaccattgtttttcagtaaataacctcaactttcttttacttgcctttctctatcctacatcagattcctacattgaaagcacataagagaaaaccacacgaatgagaatgaatttctaacaccctttcgccctaacaaacagaatctttaaaagacattgatgaatgaaaatgaaaaatggattgaatagattaaat

SEQ ID NO: 269871 - DNA, 616 bp, Cannabis indica
aagcagtcattcaattctgggaagatgttgggattttatgccctaaataaaacccatttcaatataatctgatttgttgtcaataagatatttgaagtcatttgtgtttacacgcagttttcatgtttatggtttaatatacaatttctgttaaatccagaacatatagttagtcatagttatagtgatgtcaacatagagaaaggtaattgtgattatatacttcaaaagataatgtcccattattcatcagtgcactagatttactctgatgtgatagtcagcgataaagcttacttacaccttagataagtgttatattctttttaggccattgagaaagtatactagtatcggatgtatggagtatacattggactgggaccaatattgatattggtaaagatattacaatcttaccgttatttctaagtcaatattcactggttgatcttagatcaaaagatcttaatcctgacatggttaggtttgatctcaatggtgttatttgtgttcttagagttgttagccaaagcctacattttgattctggtaacacgtacaacttgggaacatgatagtaaaattgagtaggagcgataatcatagatatgga

SEQ ID NO: 269872 - DNA, 546 bp, Cannabis indica
ataaagattgcattttgtatttttaatgtaaaaatttctttttttaaacgttataattttttttccaagaaaatgtaaggaacattaacgtgaagcgttaaccatctctttctctatattgataccattttttctaaatgacctaaagttacagaacctcactctcaatcccagtcccaaacgagtatgattttttttttggatctgaacccatttgtagaaattctaatggcataccatctcctactctatatttctacatttcacaacagatcttttccatattttcaatcgcagagtctcactttcaatcccaatccaaaaaaggaaacccaaaccccaatctcaatgacaaaaaaccattagtcttcatcgtccatttttcaaacggcaatggtcggtgccaaaattcatccttaccaccagcaatggccgcaagcagccccgccgtctcctccaaccaccgctggtacaactccttctcccatccttgtggaaatccctaatcaatctactactgataaggttagtattctcttttgtttg

SEQ ID NO: 269873 - DNA, 880 bp, Cannabis indica
aacaaaattcaaaggaagaaaaaaaaaaattgtatgtataaagaaatgtgtaattttttcttaaattgtatgttaatatatatagggaaatttgttaaaacatacttaaaaatttaaattattctttcaatatactacctttaaataaatactctaaatattctccaaacaccctaaaacccaaaattacccttacaatttaaaaactctcttctcccactctctctgtccaacttcccccactctctctctgttattcccagccccaaacctttcaagccccaattgttcacgagctccgactgaccaagacaacccacgaccgagaagacccatgacgaatcgcaacgacccacgagaagcacccaagacaacccacgatcaccgcaccacttccggcaaaacccactagcttgttttctgcatttttttcctagtttttgacgatgtcgcgaaacatcgctaaatcatgaaacatctctaaatgtctccaattcacaacagcacttgttttctgtatttttttctggtttttgacgatgtcgctaaacattgcgaaatcgtgaaaacatctctatatgtctctaattcacaacatcgcaaaacacatcgcgaatatcatcgttaaacatcgcgaaacatcactaaatatcgcaaatcatcactaaacttcatccctgatcttagatttgttctatcattgcaaatacattgctaaatatcgcaaaaaattagtaaactagaagaaaaaaatgtaaaaaaatgagagagaccgtgagagaagatgacagtaaggccttgcgatcgaggttctgggtctgtgtgttcgacggtaggggttctaggtcggggttaacaccggagagagagagagagagag

SEQ ID NO: 269874 - DNA, 938 bp, Cannabis indica
ataaaaaaagttttttagcaagaaaataagaaaagaaaaagttgagtttgagttaaatatttttgcatgaacatatttgtgatatgtgtaaaaagggatatttttgatattttttttaattaagtagttaaattaagcatagaaattcaaatttgtgattttattattcgttattagatcaaaattcgatagtttgatatttttaaaattaatatttatatttaaatttgtttagtaaccatttatggataataaccattaagaagtgtttcatatatatatatatatggattgtttttcaattggtaatactcatgggaacttttaaaataactatagttaaatgtcaattttaaaaatattaatgttttaagaacgaaattttaatccaatggctgatattaaaagaaaaattataatttatgtgcttaattttactagttaattaaaaaaatttctttttttacactatatccaaaatatgtttatagttaacattacttttatttctctctctttaactcaaactcaattttttttatctcttttgtcttgatagaacaaccttaaccatataataaaaaatgaaagattcttttaattagattgtaaaattaagcataaaaatttaaattttcataataatactcattcatggataatactcattaaaagtgcactatatgtatataaatcttttaaatataatttttttttttaaaaaaaaaaaagtccacttggaactattttaacccatcctcttgcaaggttaaaatagttccagtcaagagggataaaatagaggtaaattaaaaaatacctcttttattaattaattaaccaaatttacctctaatttttatttaattgatatttgatacatatctctttttatatgtactgtacccaaaaatatcctaacataagagagtcacatg

SEQ ID NO: 269875 - DNA, 892 bp, Cannabis indica
aaatattgttacgaaggcgttacgaataatcataggttaattgcactagtttaacccaataaaatatattagcaacacaattaattttcaaaatacatgaaatttatttttcatcatattattttaaaattaattttaaaaaaaaatacacttagtttaatgatattaattcaagataaactatatgtatttttatgtatttaattaaataaaagaagttataacaaattatttttttttagatacttaattatttgaattttcatagaaaatatatctaagttaaaaattaattttttaaattatttttagatcaacttaaattagaatattttgaaattaataattaagtatttttttaggaacttagttactcagatattgtttaaaaatatttttaagttgaaaatttattaattttagatcaatttaaatagggatatttaagttaaaaaccacgataatacgcctaaactagtagggtgttacaccctacctcctcctaagtcgttaaattttgtccaaaagacgatcataagctctcaagtcctgagctctaattattttctcatatcttagatatcactctcgtctatactatcaaataactaaataattattattattgtatttaacttttaaaactgagtccaatgacatataatataactatatttaaagtttaaagttctgaagcctcacctaagcgttgcactttaactatcggtggcggtaaaaattggtgtatcagaaacgtcaccgaaaataaggatagtatatatcaacatgactacctcaacgagtagatcacacccataacaaccatttgtcaaaacagtacacgatatcgccagaatatcaccgaaaaggggtggagctacaaaaatgttat

SEQ ID NO: 269876 - DNA, 1312 bp, Cannabis indica
ttcctcatgcctaaagtttccaacaaagaatggggtagggtgtctgaaaggaaaccagtagattgctagggaatgttataaccttgaaatggccaaggctaagatggaagtatcctccagccagagcacggacaagggaaaaaacatttccaagtagggaacttcccaaggcggggatgaagatgtggatcctcaacttggggacccaagcagcaatgtttgacctgtggaagaattagaagagatcgagatcgatccagatatcccggccagaggctaaaaattggaaaagatttgttgctcgaagtaaaatcagcattgataaaatttctgagagcaaacctggacgttttggcctggtcacatgaagatatggtcggaattgatccttctgtaattttgcacgtcctaaatactgatcccaacttccgaccagttcaacaaaattgatggctatttgacaaaaagcgagcactagccctaaaggaagaggtagagcagctacgcaacaataatttcataattgaagctttctacctagcttgggttgcaaatcctgtattggtacccaagccgaataagaaatggcgagtgtctattgatttcacggacctcaacaaagcatgccccaaagactgttttccacttccaagaattgatcagctcgtggatgcaacagcagggcatgaaacataaagctttatggacgcttattcggggtacaatcaaatcaaaatacgtcaaccagaccaagagcatacaagtttctaaacagatatgggtctatattgctaagaagtcatgccattttgtctaaaaaatgctggagccacataccaaagattggtaaacaaaatttttaaagaacagatcgggtgaaacatagaagtgtatgtggatgacatgctcgtcaaatcaaggaaggctggggggcacatagatgacctggacaaatgcttcaaagtcctcaggaagtacaagatgaaactaaatccgttaaagtgctcctttggagtcagctcgggaaggtttctgggcttcattgtcaatgcccgaggaatcgaaaccaatacagagaagattcaagccctcctagatatgaagtcgccaacaagaaccaacaaagtgcaaagcttgactggtcggaacaccgcatttagcagatttgtttcaaaatcctacaaggaaataagcaatttgagtggacggaagaatgtgaaaaagcttttcgggagctaaaaatgcaactcgcaaagcctcccgtactctcgaaacctttggacaaagaagaacttgggatatacttagctgt

SEQ ID NO: 269877 - DNA, 520 bp, Cannabis indica
ctccaccagaagcagcaaatgtagattctgatgcagcatacttgaattttgaagaagcgaatgtcgaatctgctgatgcaagtgaagcagatgaaccagaacagcctatctcgcttcatccaaacatcattattgattctatgcagaaggaacccagcaccagagtaaaattggatcattcaaaagatctcattcttggaagtcttgaagaaaacatggtaacaaaaaaaaagggtatgttaatttgatttgttttctttgttttatctcacaatttgaactgaaaaatgtgaaagaagccatgacatatgaagaatggctcaatacaatgcaagaagaacttaaccagtttgttcgcaacaaggtttgaattttggttcgaagaccaaaaggtatcaatgtgattggaaaaaagtggatctttcaaaataaaagtgataaattcggtacaattgtgaagaacaagactcgattggtggcacaaggctatacacaggtagaaggtattgattttgatgaa

SEQ ID NO: 269878 - DNA, 647 bp, Cannabis indica
actcaacgagctaatgatcgggaaagtatgggaacaagtaaatacgcgagccactttaagaaaaagtttatgagtaggacgcactctatgagtaagacgagatctaccagcaattattcccaaccgaattcgcgagagcacttgaattggaagaaacctgaccttcgccaatagcttggtccaaagcaagacgatccaatccaattgcggataaacgagctggaggacaagtttaggagatatcaagtgggggaattagggaaatcatctggatacgactctgacgaggagcttgagccgtatcacccagatattatgaataccccttttccttcgggattcaaaaacctacatgtctcgtcctacgatggaaccacagattcggtctcgcatttgaataactttaacacgataatgcgagcgagtaacgtgacgaacaatttacactgtattttgttccccacctcgcttgttggagcagcgagtagctagtttaacaagtttactcgtcattcaataatttcctgagagtagctgtctagggatttcaagaagcaatttcaagctgctagggataggcgacccgaagcagccttgctaaccaatataaagcaacaaccattgcatcattctgaaattatattacc

SEQ ID NO: 269879 - DNA, 538 bp, Cannabis indica
tatttttgtaaatttcccttttcatctacaggtggtcttatactatacaacatcatatatcctgttgtttcagccttcttggctactctttctttcacactagagcaaatatttgcccaattggttacattagacatcagccgggctggtcttgaagttttatgggctttaggaccaatcagaaaatattgttgggccctcatgaaaaaaatgtggtatttttgaagaaaaactaaagagtatttatatttttgaaaaagaaaataaattaggatatacattatgtttcatttcaatttttttagaattcctttcttcaaatagatatatataggtttgtattatcaaatgtgaaatatatatacgttacaaagtgatattattaaaaaaaaatattactattagataatgataaaatatagctcattaatctatgccctatggtcttctctttgtgtaaacaaaacatttttaaagaaactataattctcattccattaaatagaaggatttaaatctctctctctcaaaaaaaaaa

SEQ ID NO: 269880 - DNA, 1210 bp, Cannabis indica
ggggatgttagggttaggttttgatgcaatttgaattttaagcttagtttgagttgaatttagtttctagcagctggttttgatgtttggattaggttttgtgcaagtttgagttttgaattcaacgctttggtctttaatggctagttgagtttcattgggatttttctgtgattttctggttggaatatgttgtgtatacatggtttagctactctggaaagtttggtggcaattggacaagttttgagcaaattggtgagtttttggggagactggtattaaaaccagtttactggttttaccagtacctgtcaaaccggtaaaccggttttggcagggttccccgaaaaatcagttttctaaattctcctccatttcagtgccgtagttgggtgtttctctgtatcctaagttagtgtgattcatagagagtatagcagaacctaaggttttgggtttcggattcccggattagggtttcgaccatgtgatttactccattttattatgtgattagggcatccgtctagcacaagactttccgttcaggtcggccagcacacttgaatatggaaagaaggtaagaactgtgtataatgtgtaatatgaatatctgagtgtatatatgtgttaagtgtatatgcatgcttatgctttaattgcactaccaacacttgtacagaattgtacggagtgcattggtatagttaatatggttgaagagtacattacagtgataccatcacgtgtacaggaaagtacagggtgtctgtggtatatcactcagtggtactcagggtacgaaacaaaccctaccaacacttgtgatacaaggtacgtagtgtatgtggtatagtggctgtaccgtagtatggaacgttcttactcatttgttgagccttgtaaataggtgtatgggcgcctagatacaagttggtattatatgatatgttatatgcttttcttactgagtctgtcgactcagagttctgcttccgtgtgtagttaaaggaaaggctaaagctgaataggagtgagtctggctaggatggaattgtacatgtcgtggcagcgtgacctggagtgttcgatctcgggacatttggggatttttttttgtagtcgatgtgcgaccggatatgtattttggtatattttttataaaagtttaaaaataagatcctggtacttgtaaacagttttgtaa

SEQ ID NO: 269881 - DNA, 575 bp, Cannabis indica
tgttgatattctgtcgacattatcaaatagtaagcacctacacaattttatcgaaaaaaatatcgacatcttgtcgacaacctatcgatattaacacacataggaaatacagaagcaattaaaacaaattgtcgacaacatgtcaacaagaggtcgatattccaaataagtgatcactccaattaagcaatacaaaagtgtcaacaacatgtcgacatactcttgacaagatcgatattaacaaacagaaacagattaacatcataatttcgacaacatgtcgacatactgtagacaagaggtcgatattaacaaacagaaagtaattaaaatcatattatcgataacatgtcgacatattgtcgacaaattatcgacattataggtcaaatttttttattctaataaagtcgacatcttatcgatacacctacgacatcctatcgatatacattaccatcacagacaattctaaaggtaatactgcattcaattttgctcgacattatatcgataacctatcgatatctcatcgataacttagtttaaacaaacagacaccactgatgaacatg

SEQ ID NO: 269882 - DNA, 688 bp, Cannabis indica
ccgtgcatttcaaaatccttccttgccacccatataaatggggcttttggcgattgagatcattgtcttcatttcaaacattttcaaaccaaagagaactctttcctttctcacacaaacttcttactcagaaaccctcaatcttctcatacttccttcccttaaaattgaccttctttctccccatcctcgctactgtatcccatagacacccactgttacttcgggctatcctgtaattggagctaggaggaccgttgctgccatgaattagtggaatttaagcgcgtcaccaccacccctaacttttttctagcagtgattgttcctcctcttccaaactttgatttcaatgttgattgaaatgtagttctcatattaggaggatttgatcactcttgcatgcgtagaacataattttagggattaggatttgtgacgtttggaatttatgtgccaggttcgtaggtgaatatttctaatttttagagttttcaaagaggtatttttaatttaggcccgaaccgaaacacatgttcgaggtttgggttttactgggttatgagagttttcaggacatcttttatttactttttctttggcctgtcatatacatttgtttcacttcatctttgaaaataaatctaggccctgttattgtcattatgcattagggttcccgaattat

SEQ ID NO: 269883 - DNA, 723 bp, Cannabis indica
gcttcttcagcttccttcttggccaagccgcctccgccctcaaggtgtcggacagagccgcgttcttggaagcaacagacttagcctgggagtaagtgtaggccagctttataccggcctgcacaaagaaaaaactttagcatattgaggtaagagtcgaaagttaaagggaagtatcaaaaaagacttaccctggtgaactccttcaagactccgcccaccgacacatccaaagatgagtcattatcagcactagtagtcgctcactgacctcctcaaccagccaattcatgtagtgggtcagcatctccttgccctttttagcctctggaagcactggcaaaggtggagttggtgcctgcatccgttcaggatcactcctgaccagttcagacccagttgttggtggtccagactccttggacatggtagtttcgggggtagaggcgtttgcaacagtcagctcctcggaaagattaataacttcctcagaaggtctcctttttcctgtgaagaggacccctcaccgcccttggacttcttggccggaggagaggcgctacagtttccgcccattctcttcctcagagcatcgatcatctgccgagacatgtctacacataacaaaaatgttgggttttatgccctaaataaaactcatttcaatataattagatttacttattaatatagattagaaataacatttaatgttgcatggtt

SEQ ID NO: 269884 - DNA, 631 bp, Cannabis indica
ggtactttgatagctattattataggggaactcaatcagaggcaaatatttactccatgaccctccaaaatctataacacaagctcgcaataagtcttcaagtacctaaatagttcgctcagattgcccatctgtttgaggatgaaaggccgtgttgaatttcaggttagttcccacggccttctgcaaaatcacccaaaacttcgaggtaaatttaaggtccctatctgaaacgatagactttggtaccccctggagacgaacaattttttttacatacaagtcagcatactgatctactgtataggttaccttaacaggtaagaaatgtgctgactttgtaaagcgatctaccacgacccaaactgagtcgtacattcctgtggtcctaggcaagccaaccacaaaatccatcgcaatgtctttccacttccattctggaagtgttaatggttgaagtaaccctaccggtcgctgatgctcggctttaatttgttgacaagttaagcacttagtgacgtattccactacatccctcttcatcccataccactagaaatatggcttcaaatcctgatacatcttagtggttcttggatgcaatgagaaaggggtagtatgagcttcatcc

SEQ ID NO: 269885 - DNA, 597 bp, Cannabis indica
aagcgttagcagacttcatcacgaagtaccatgaggcagaggctaacgcgggcatgcccacaacgcaagtcccagcgtggaaagtatttgtggatggcgcttccaacgaaaatggatccggagcagggggtagcaatggtatccccaaatggagttcgactccaagcagccccacggttcgaattcagagactctaacaatgaggccgaataagaagccttgatagcagggctgagattagcaaaagtcgtgggggctaaaagagtagaagtcttcagtgattcataactggtagtgaaccaggcatcaggggaatatcaaactcgaggagaaaaaatggatgcgtacatagcaatagtccgggagtttctccacgagttcatgcactacaaagtagaaagaatccttagagaaaagaacgctcacgtagactatttggctaagttagccttagacagtgaaattgagagactgggggtggtgcttgtggaacgcctctcggaaccaagcattaaagcgaagagtaccacaacaacagttgaacaagagctcaattggatggtccccatcatcgaatacataacaaaaggcgacttg

SEQ ID NO: 269886 - DNA, 1212 bp, Cannabis indica
ccattatgtgggcctgactagttacaattttgccactttatttcaactgcttatccttatttcaataataccatattttccaatttcaagcctataaatgtcaaaactaattaattaattatcaaatacaattgtcatttattttatttattaattagaccatacaaagtctcctaattaacaaataaatcccaaaacccattttcttcacaattaagcccttgcctagtgaaaattcataaataagactagtctaattttagaattataattgattagttaaaactaattaactaagtctgtaagcagtattatctcacctagtgtggggacaatgagcctatataattaagcttccaataagaagatctagaagttaccaagtaaattctctaacttattaattcctccttgcgccactatagattcggaattacactcttaattatatagaacactctatatgtaccaacatatagatacgttatgaattatccattgttacatatccaaatagtcaaagatcctctatagatgatcaacatcgaataaggataaatttaccgttctaccctttaatgtactttattcttaaaacacttagctacctataaatgaaattttagtaaactaatataattactgaaatgaggcatcgatcatttgtctctatcaagccaagctcgaagaaaattatcgtttcacttctaagtacttatagaagctatagattccatattagcgctcccactcaattatactatcatgttcccaagatgtatgtgttcagccatacgagcttcaacgaacaactctaagaacataaataatacaattaagattgaacctaatcatatcaggattaatatctatagatcaaagatcaactagtgatatggacgtataaagatataatagtaagtttctgatatcttatccaagtttcatatcggtccaatctaatgtatactccaaacatcctatactggcatactttcctaatgccttggaaaggacataacacttatctaaggtgtaagtatatcttatatcgttgattatcatgttagtctaaattcatgtactgacaaatcacgagacttaaatttttgaacatataatcatgattatattctactatgttgacaacagtataatcataaatggatatatgttctggacttaatagaatttacacattaaacatataat

SEQ ID NO: 269887 - DNA, 1178 bp, Cannabis indica
attgggattgagcaaaaccattaaaggtgagagttgcacttagttttgcataccactgccttgaagcttgtttaaggccatatatgctttttcgaagcttgcaaacaacattgggggaagcttagtggcaagtttatatcctgggggaagtttcatatagatatcttcatgtaaatccccatgaaggaaagcaatgtttatgtccatttgatgtaattcccaattttttattgttgttggagcaaggagaattttaagagtattgaacttagcaactggtgcataagtgtctaggtaatcaatactatacttttgtgtgtagcctttggctactaatcttgctttaggtcattctattgccccattgggaaggtacttgattttgtatacccattaacatccaatgggtgtataaccaggggataaggaaaccacaatccatgtttggctatcttccaaggctttggtttcaatattcatggctttgttccatcttggatcttttgcagcagcagagtagtgttttggttcagtaatggtgtaggtagataatatggtattaagaaagtggggagagagtttatggtaagatatgtattttttgaatggggtgggaggtggaatctgcagtggtgttcacaaagtagatgtaatcttgcaaatgcctgggttgtttaatggatctgccaattttagaggttttgtttgtggaaattttagtggtttttggtgtgctgctgatgttggcgggaacagaggtggaaggttggtgtgatggaagtacaataacatgaaacaattggtccaagtgattttcttgacttatatttaggaaaaggaaagattgtttcatggaaaatggcatttcttgattgaaatatggaattagttttcaaatcaagttataggcctgttgggttttatgccctaaataaaattctatttcaatgtaatccagattattcaatatcaataaagtaacagaagtatttttcattcatttgtgtatgttttggttcaccttatcaattgtttgtccttttgatttataaattcattcaaacccttttcacatacttgatcatgtttattgtgttgtcaacacagtggaaagtaaacatgactatgtgaataaagattcctagatttatcaaaacactgggttttactgatatgac

SEQ ID NO: 269888 - DNA, 633 bp, Cannabis indica
tggtaaaataattccaacacccggaggcatgagtcatgttggggggaggcttgttggtgcttgcggtgaccggaggaggagtttgatcctaaatctcagtctcaggaacctcaaggtcaataggctgagaggttttcttctttttatgagcagtggctttcctttgccttttaagaggctccacctcgatatctaaaggagcgaccgaattggtcgctctcttcttccctttcctctgcataacatcctcgaagtgcatgtctgctagttaagaaaaaagtgttagcactaattataaataagtaaaaggggagtttagggtataattttctgcctaaggaatttaccatagtcactagaagacgaggtatgactagaagatggggtagaaggaccataatatccagtaaaatccctacaacttgtgatcttgaatatattaaaggaatcaagtggttctaaatcccagctcgcatctaagtgacttgccctatccatcatggtaccatattgctcggctataccatagtacgaatcattacaattaatctggacatggaatctggggtaccagttgtcaaacctatgggttatacgatctacaaggagtgggttccaaatataaaaattaaa

SEQ ID NO: 269889 - DNA, 1067 bp, Cannabis indica
atgaaaaagataggttagacaagaacttgggcttacaatacaggttttttgggagccaaagttgcttccactcccatggaacccaatattaaattgagcaaagatgttgccactcctctttcggacccaaccatttatagaagactcattggtaagctcatttatttgtccattacccgtcccgacatctcttatgctgttaacactttaagtcagtttttacatgagccacgcacacctcatttacatgctgcacataggattcttcaatacctcaaaggcacacctggacaaggactgattttttatgctaattctaatccccatttgtatgcttttgctgaatctaactttaaagatgcagaaccacaacttaaaattttttcagatgcagattggggctctgtgttgacacccgaaggtctatcacagggtattgtgtttttctaggccattccttggtttcatggaagtccaaaaaacagccaactgtttcaaagtcttccgctgaagctgagtatcgtgccatggcccaagctactagggaaatcacttggctccttgctctcttatcagactttggcatccattacaccaacccacctgtcttatattgtgacaataccgccgcgattttccatgagcgcacgaaacacattgatattgattgtcacattgtgagggaaaagctccaacaaggccgtctcaaactcctacatgtttctacaaaggacaacattgtcgatatcttaactaaacctttatttcccaatcaatttcaatctcttgtatccaagatgaagctttataatttgtacacttcatcttgaggggggtgtattaggattgggcttttatattgggttgattttattttgaggtttgttttaggtatttgccactttgtataaatacctttttttcccattttattcggtaatgagaaataccaatttctaatatcctaatacaactagcgctgcaacctaaattgcaacaaaaaatcgcacagaaattcctattacaactagcgctgcaaccactttagaaacctaaaccgtaaattt

SEQ ID NO: 269890 - DNA, 551 bp, Cannabis indica
gtgccacatgtcgttactcttgccatgtcaccatcatcgaaatttgggtaaacactttgcttttctcatttttagaattcgacttactttttttcttaatttgttgatttaactcaaatattcttaatgaacccatgagctcttcaattttttattttaccaaaatcttttgtctcttccattgctagtattttcgtatcaaatctgtcaagaagcacatgaacaattttctgaaccagcacagattcatctactttttttgccaaggcaaaaaacttattagcaatatcaaataatctttcatatataaaattcagataatgtttcagtttctgacattcttaattcatcgaatctagtttgcaacatggtaaaacatgatctctttacatcaacggtaccttcaaattgaatttaaagaatttcccatgcttcctttgcagaatcacaagataatatcaatttaataaagtgttcaccaacactattaaaaataacatgcaaaactttattgttataaccagatatttttcatcttcagtggtccaatt

SEQ ID NO: 269891 - DNA, 872 bp, Cannabis indica
cttatatttctgaattgttaattatttaatttagtaatagctatcacttagcttaaaaaacacctcactttaacaaaaaaaaagaaaaacaagttcaatctcttcattctctttcttctaccttcggctggggcaaaccagaaggaaaccagggtctttgctcatcaaattcttaggaatttagttgtgtttaaggatttgattcaaaaagcctctgttcggcgcataattttccatttagatcgactggcacatttaaatttgaaaacgagataagattagcatagaatatatatatgtttgtgtatgtgtattatatgcatgttgtttatgtgattcatattctaccaacacttttatagtaccgatactgagtatattggtacaatgtatgatgtttaaagggtacaatctggtgttaccaacactagtacaattaagtacgtagtgcatgtggtacaacactcggtagtactcggggtatggttcagtcctaccaacactagtaaagtagcggtacttagttcatgtggtacagaggtcgtacttctgttaagaacgttcttgatcatctattaagtcttctggataggtgtatatgggcacccaaatacaagtcaataatatattatgtgttgtatgcttttcttactgagtttgttgctcacaattattgtttgcgtgtgtaggtaaagcaaaggctaaggctgagcagtagtgagtctagaacttagggatgattgtacatgtcaagatggtacgacctagagagttcggtctcggaacgacttgagctttattttgtagtcgttgtgcgacatgtttgtaaagtttattttaattatgtaaacaagtttaacaaaatgggatcc

SEQ ID NO: 269892 - DNA, 1168 bp, Cannabis indica
acaaaacccaacaacatgttagtcatccgggaactcccttctggactcaactatcattccacaagactctttccagaatggataagttagctgtccaggaacaatattcgggatccacctaactttccaggaacaacttttgaagaccttttcattcagaggaactataccacaaattccacctagttacttcaaattaaaagaatgacgatgatgaagaaagaacgtagccatcatgattggtattccaagaatctcagtatactaacttctgagattgatcaagttcaagcaatgcttgaacttgtttatagtcaagaccttagtccaaacatcagcaagattatcttctgttttgaccttctctaaattaaccagccattcctctatcttctctctaattcagtagagtcatatctatatttttattcttttcatgataaattgggttcttacaaagatggatgaatgactggctatctaaaaatacagtcactcccttttttatttgtttcaagaactccctgaagccataaaactttcttgaaagttttcgtagtcgccataaattttactttcgtggtggaaagagcaaccatggactgtaactgggctttctagcttataaagttttggtttgtcaagaaaacgtaggaagttgttgattttctggtatctttattcgaggcgtagtctgcgtccacgaaccctttcaagtctaattctcctttagatttttcataggtcaaaccataatcccaagtgccctttaaatatctcaataaccattttagggccttccaatgttcaatgcccgaattggacatgaactggcttagggtgcttagagcgtgagctatatctagtatcgtgctcaccatcatgtacattaggcatcctagaaccacaacatagcatacatccttcatttcttctttctctttcatactgttaggacaatgttcctttgacaaaacaaactgacaccctaacgaaatagatgtactctttgcatattccatgttgaacttttgaataactttcttgatgcacccgaactgcattaagctaatagtccattcctttcagttttgtgagacttcgataccaagtatcttttgaactggcccaagcttttccatctcaaattctctctcgagcttggctt

SEQ ID NO: 269893 - DNA, 1407 bp, Cannabis indica
tggtctagttacaattttgggtcaaggtacaggtcgaagtcctggttccggtcccgttcctgggtctcagtctacttctgatttttgttccaatttcaggtcatagggtatggctttggatcaaggtttgagtttgggaatgagttcaggtccaggtccgggtttgcatcttggtctgggttcgggtttggggctgggtcacagatccagacactgactacggggtcgatccaagcccctggtcctgatctggaccctgatctcgcgtgctgctctggttccatttttggtgcggggtcacgagctaggtcctaggttcaagtccgggtctggggttccaggtcccgattctagtctaggtttgtgtcctggtgtaagttcaggtttgggtcctagtcgcggttcgagtttggatctcagtcttgttttttatttgggtttgggttcgagtctgggtcttggtcctggtgctggtcctagtcctagttcggttcagttctagttgcggagttcgagtttgggttcgagtttgggtcaaggtttgagttcgggtcagggttcgagtcctggtctgattttgggttcaggtctagatctcagtctaggtcagaatcgggctccgagttgtggttagggccctgggtctagtttaagattcgattttgagtcccaagtttcgatctcgatctaaatctaggtttagttctgggtctacgtcctgggatccgatcccagtctgggttcatgttcgggttcaggtgcaggtctaggtttgggtctaggtctgaggttcgggatcaattttgggttcaattcctggttcggattttgtcctgatatgggttcgtgtccaggttattgtcctagtttgggtcgggggcaggtttcgggtctgggtctgtgtccaacttcagattcgtgggtctaggtcaggtcctggtgcaggtttgagtcccagacttagatttgggtctgggttccagggcataggtccctagtataggtcccccatccaagtccagttcctaggtactggtctaggtcgaagttcgggttcaggtcctgagtcttggttttattctatgtctcggtttgagtttgggtccaggtcttgatcccagtcttggtccgggttcaggtttgggtccttgttggggtcttgatcctggtttgggtcacgtgtctcaggtcccgatgagggtttaggacttggtcaggtctaagtcccagtctgggtctcggtcgaggttcaggtcccaagtctcaggtcccaatcctagtcaaggtctcggtccaggttctggtctgagtttgggttatggtttgggttcgattctggtctcaagtttgggtcctactcaagttccaattatgattctgggtctgggtttggttccgggtctgggc

SEQ ID NO: 269894 - DNA, 749 bp, Cannabis indica
aaacttgatacaagataattatacgtgacattagtgttctttcaaacaattctagttcacgaggccccagagaataaaatcaaaaagtaattgacttaaacaaatttagactccctctaataatttatcgcaaccatttataatccaccttgctaatttaatctctgaaccacaccaagtagtgaactcgcttcaactattgatgtgtgcttatcccgaagtaaggcttaaacaaatcttctcttaaagatatatactcatttcctgccaaaatgatacttgaaaaagtcttcttccgaagacccacgcttgttcaaagcttcttttcaacatattctatgaatagtacaagatcataacaagaaaaccaaaatctagttgaacaatttaagtttttacaaataaaacactcttctcacaaatatagatatgaaaatatgagactagaggatatcagaacgtttggttactctttaggtcctatttatagaacatagaaaacctaactacaaccacacataagttttcaaagttgcccaaaacttttctaaaaaaatcctaatttgcagcatcaagatcaaattttattgcagcaaatcaagaccaaacgggaaactttccaattaggaccaagatcgcaatttagtctttaatacctcccaaataaagattatttgatctacaataaacatgacaaaaccgaatttaacaattttttttttgaaagaaagtagaaaacttcattaaga

SEQ ID NO: 269895 - DNA, 679 bp, Cannabis indica
aaacctctttcttcacaattaagcctctgctaagtgaaaattcataaataaggcatagtctaatttaaaaattataattaattaattaaaacaaattaactgagtctgcaagcagttaaagatcctcttaattttactcttaattatatagaacactctatatatgccaagatataaatacactatgaattatccatcattttaatccaaatagtcaaagatcctcaatagatgatctacatctaatagggacaaatttaccattatacccttcaatgtattttatccttaaaacacttaactatcattaaatgatagtcaatacactaatataattactgaaatgaggcctcaatcatttatctttattaagtcaagcttgaaggaaattatggtttcacttctaaacatttatagaagctatagatttcatatctatgattagcacttccactcaattatactatcatgttcccaagatataagtattacgccgttcgagatttaacgaacaactctaagaacataaatagcacaaatgagatcgaacctaatcatatcaggattaagatctattgacctaagatcaactaactgatattgacttagatataacggtaagtttatgatatcttatccaagtttaatatcggtccagtccgatgtgtacactatacat

SEQ ID NO: 269896 - DNA, 519 bp, Cannabis indica
aacattccaacgaagcaacttcacatatacacataacaaaacctctctctctctctcaatcattttcttacattctccccccaataactagtgagattatgtataattttacgattttctatctactaaattgtgcccttaaatttcaatatctactatgttattcccctttcaaatgttgacatgtattaaatcgtatactaaaactttcatacatgtcattggataaaaatctttacatctaacaatctcaataattagagaaaatttttaacagcttaaaaaatataaaaagcataattttgtaaatgttaaattttgggaagcaaaattcctaattaatctaaaatgcattagtaatggtagtatggtaggttagggtttagtggtgactttctactttgagttgaataaaaagttattgctaaaactaaaatacaataaaataaacgattaatacaaatctaattgttaattctaggatgaaaatgttgatgtctatgtatatgaatattctat

SEQ ID NO: 269897 - DNA, 946 bp, Cannabis indica
aaaataaattttatttattttcacattacctaagttataattaagttataattttataaatattagattacaatttatatttagatttatctaaaatagtaattttaattaaataaatatattaatatattgaaataaatagattaaaataaacagatagaaaaataatacttaagttgtaaattaattcttaattaatttttgaactacttaaattagtaatttttcatacaattattttgatagaaattaatatttaagtattgaaagttaattttgataattaatttttaagatactatagtgttaattttatcgattaatttgggtaaaagattaatttattaattttggacctacctaagttaaataattttcatagaaatttattttaaaaatttatacttaaggatggaagataaattatttatttacagaacaacttaagttaattgttatactcgaaattcggctattcatctgaagctgacacatgtcctacaaaaagaatatgaatcagctcaaagaatatagtaattgaattgtattattaaatgcaatttaaaataactcgtttcaattaattataagttgatagaaatattcaaacttgctgccacataagcatatgcgagataagaataataactagtaaactgatataattgacaagataatatgtccatcttgagataaacagagtatatgatagaagcctacaagacgagacatcaaggagcttacagctcattaaaccacgtacttgggaataaaatcttgcaactcattgactcacgtaattgtacatggagaatattacattcatccatctcgctcttaacaccaccccacgaatagctttacgatatgaagagcacaacaagtagaagaatgtcttgttgggttttgtgccctaaataaaacccatctcaatataatcagattt

SEQ ID NO: 269898 - DNA, 423 bp, Cannabis indica
gagtcatttaattctactgcaaccaatgtaaggtttctcgtactttagatgtgtttaattttatcattttagagattcatatttaattaggatgttaaaaacatacttattagtaaatgtaggtcctggtaaaatatgatccaacataatcaacatacatgttagtaaatctagattctggtaaaataacttccaacaatttagacatttttattaattaattatgtaaataatagcttttttacctatttttaaggatattaggcatgtaagctctactatataaaggtcattagcctatctctaaagccctaagtcattgagtctcaagccctaagtgttaagcctctaacctcactaaagctttcaactctaagtctgaaaaccctaatcctctcttctctctctcttctacacgcccaa

SEQ ID NO: 269899 - DNA, 591 bp, Cannabis indica
gagaaaattttcttctgcattttttctttaaggaagccaagaattgcattcttgcttctgcccatgatacatggcaatcccaggtacaaactattctccatagcttcattcattcccagcatattacacatcatagcccgagtgccatcattcatatttttactgaaaaatatggacgactttgcttgattaacctactgacccgaggctctttgacacacatggagaagttgtaagactcttatagcttatttatcattagccttgcagtacacgtagctatcatcaacaaatagcatatgtgaaacacgaggagcacctctagcaacttgacaaccagtcaaccagtgattttgctcataatgtttcaaaagtgaagacaacccctccgcacaaaccaagaataagtaaggggaaagtggatccccctatcttatacctctacctgggtgaataggccccataactctccccccataagtcacattgtaagtaacagttgtcacacaatacatgattagagagacaatatgacgactgaaacccattcaatataactttgcttctgaaaaattcccaaccaactcgatc

SEQ ID NO: 269900 - DNA, 543 bp, Cannabis indica
aatgataagattacattgaagagttttatttatggcacaaagcccaacataatcctaccaagttgactcctttctctgtcctaacagaagatttagaaactatttacatggctactcaatcattagctccatacaagaagcccacacccatgaaaaaagacataagcatgagagacatgaccaagtcttgccgttttcatggggattatggccatgacaccaacgaatacaacaatctgaagtgggatattgaatttttgataagaaagaataatctgcatgtgcaaaaatatgtcaaggtctatcaaaatcaaaaaggtgataacaacaaagatttactaccaccaccagtagatggacatctgcaagtcattattggaggtccgcacatagctagagattcgggcaaagcccgggaaaggtatgcccgaagaatacaacatgagcaagaagaactagttctggtcgttgaagaaaggaaaccgaaaataccacgggcaggagagcccaccataaaatttaatgatgaagatgttgtcaaga

SEQ ID NO: 269901 - DNA, 1178 bp, Cannabis indica
atcatcatcatcatcatcacaattaattaaaaagacaagattattgatatatatatatataactaagatgggtcatcgtggttgttaccagaatttgaactgaaattttaaaataattagacaaaatataactataatgggatctcactgtggttgttactactatctgtttggctcattaagacttgtgaggtgctcaaatcagaccagaaggatggtgagagggagaaaggtgggatcgagtgggaggaaaggggtcaggtttgggggtttctggggtggggatcttcgtggcgattgagacctggggtgaccggagtacttccgtccagtgagcagagctgctcgaaaaataggccagagagagagaggataaaagaagaggcgacaggaagaagaagaggcaggaggaagaagaagaggaaatagggtttgggggttagggttttcatattattctttttatacccttaaatatatttactaaaatatttaaattaaatctgattatttatcttataaaaaaaactaattattttttttttttttaaaaaagaaaatctgattatttattagttataccctataattattttagaggtattttatactcttctttttttttatggccgaaacattttttcttttgttattttctttaattaaatatatatttcttttattaagcataaattaaaaacagaaaaatttattaaatacaattttttataactaaactcaacataattctacaataatattttataaagttctatttatggtttttttttcgtttaaatagctgaaacttttttttttttgttattcttttaattaaatacaaaattcttttttttttttttgagggaaaatacttagttattattaaccaatcaagattcgtttacaataaccgagtatataggcggaggaataatctccaaccaagtacaagcctcatccacaaaattcttttattaagtaaaaatatatatatataaaaatttattttattaaatttaatttttttaactaaaattcaaaataattctccaatatattttaggacctcaagtaattgtccaatagtattttagtcctcaaataattttttctccttcacaataattttttttttgaataactttcacataattttttaaatacaactaatttat

SEQ ID NO: 269902 - DNA, 1437 bp, Cannabis indica
taccataggcaggagtaggaaaagtgggggttccaccaacattcggagtcacttggggctcctgaaggaatttaaccgcaccctcagctctaagagctttttctaccattttttgcataagtggttgctttatttgtagtgatcaccagatcatgtctaatctccacattcaaaccagccaggtaattttctttcttactgaaatctgcaggcacgatacccacggcgagtttagccaaacgatcaaactttgtggtgtattcattaactgacatcccctcagcttgtaataattcagtgaactccttccgcttagcattgcggacagcttcattataatacttggcgttgaataattcctagaattcttccaggtcgtaacaatgacatcccaagtgaggaacaccaattcccaccacaccagggcgtcttacttgaattgaaatgtagtgcatgtcaccctatcattaccaaccacacccataaaattcagaattcgctcaatcactgtgagccactgctcagccttcatcacatgaggacctcccaaaaacaccagaggcgcttgcttacaaaatctttcgtataacggctccatacggttaccagcaatgggttgttccgctggcaccgctggagctacaacggcctgagcttgttgcgaaggcacggtaggaggaccctgctgccttaatctcagaatttcttcttcttgtttgcagattcgatcttgcatttctgcaaacctcagctcccaattcggaggagcttgtggtggatatacaagacgaccaccctgagctctgccacagccacggctgcgaccacgggggattctagggaatttgatttccctcaccgcctccagtctcaaccatattaccctaacttcttgtatttcgttgggcgtccatttaataggacttaacctgcgaacccataagccaggcaggttagacagcgatcataaaacttaataccactcttatggacttaaaggcaacacacttaaaaccaataattataatctaatatgcttcttaacatactttaataatcacatataatactaaacaagaacaggcttactgaaccgtgagccgagctttctctgatgaagattgtacatgtcttggcaagcttcggtagacaaacctggcggctctgataccaaaattgtaatgccctaatacttaggcacgctacagtgcttttttaattttagtgctatctatgctaatcaaatatttttctcaaaaaacgtgttaaattaaaacttttataataaatattaaactttataatttacatagttatttagaaacaccgagatcccgtttctaaacttctatacaaaacatgccaaaatacaatatccaggtcacacacggacaacaaaatataaccccagatgtcccgagaccgaacactccaggt

SEQ ID NO: 269903 - DNA, 761 bp, Cannabis indica
agattcatgacagaggcgacgaaaattgcacggttaaccgaagaagggaaattaaccgcaatactggggggcatcaaagttatcggagagctttggaaggacgtcaagagagacggaccagtagattccatgagtgacttcctcgatcatgcagatggtttcatcaagcttgaagaggccattcagcgagcagaagtcgagcttaaactgaaccaatcacaagctccctctgctggaacatccgttcagctccttcagtacccaatgaattcaagctcggacggttaaaggtctaacaacaacaacaacaacaacaacaacaggcaaggtgaacaggcccctagagagaatccttccaagttcactactttctctgtcttaactgaggatttggagactatctacatggctactcagtcagtagctccgtacaagaaacctgctcctatgaaaaaggacataagtaagagggacatgtcaaagttttgtcgttttcatggagattatggccatgataccaacgaatgcgacaatttgaagtgggaaattgaattcttaataagaaataacaacccgcatgtgcaaaaatatgtcaagaccgatcaaaattagagggtcgcccaagcagacaataaccaagatttactgccaccaccagtagatgggcatttataagtcattattggaggcccacacatagctggagattcaggcaaagcctgggaaaggtatgcccgaacattacaacacgagcaagaaga

SEQ ID NO: 269904 - DNA, 695 bp, Cannabis indica
ctttctttcaccaacttcatcccagtgaataggtgatctgcattttcttccatataaaagctcgtaaggggccatcccgatttttgcctgatagttgttgttataagagaactcgattaggggaaggtactttacccatgatccttcaaagtcaagtacacattcccgtagcatatcttctaaaatttgtattgtcctctcggattgcccatccgtctgaggatgaaatgttgtgctgaactttaactgagtacccatagcttgatgtagactctcccaaaatctcgatgtaaacttcagatctctatccgaaacaatggactttggaacaccatgaagacgaataatttctctgacatataactcagcatactggtcaatgtaataatccttctgaacaggtaagaagtgcgctgactttgtaaacctatccactatgaccaacatagagtcaaattgtcctgtggttctaggcaaacctaccacgaaatccatagcaatatcttcccatttccactctggtatgttcaatggctgcagcaaccctgcaggcctctgatgctcagcctttacttgctgataggtaagacacttaacaacatactcagcaatatcattcttcatgcctggccaccaaaacatggctttcatgtcttgatacatctttgttgaacctggatgaactgaataaggag

SEQ ID NO: 269905 - DNA, 1016 bp, Cannabis indica
gtggataggtcagttgtgatcctcgcttgaagtgcagtgagttgaatattgtcattcaagtttctgacctttgcaacggctatgccaaaacgactcaaataagccttaagtgactcacctagttgctactttatgttggttaaggacaatgcttcaggtcgcttgtctctagcgacttgaaatttcttttcaaagttcttggatagccgttcctaggaagttatagaatgatgagtaaatttttcgaagtagttgctcgcagctcctgttaaagaaatcaggaataaaatgcagtgtagattatttgtgacattcctggctagcattatagtattaaagttgttcaggtgagcgaatggttcgtagtccaatcatactgcgaaacatgtgggtttttgagtccttgaggaaactcagaatttatgatatcaggatgaaacggctcagtctcttcatctgagttgtaacgaagaaattttccatgttctccatcttgatactttctgaacttatcctctagtttcataatttgcaattagatggggtttacttgctgttgattttcattttgattgagttgatggcgcaaataaagtgcattttggtttagtcgctcgcaaagatctggctgtctttgattcaggtgctcgtgaagatcaggctgtcttcgctcataattactcacagaccttgtctatgaataactctcagatttgtagcttcgcgtattgctcatgctttcttggtcaacataatgttgaggtttacttccctctcgcatttgcctacccgatcaactatgtccttgagaccttgagcgtcccgaacttgagcttgcttcatcttgtattggccttctccttcaaaagagactagatacacgtcctccattcaagtatgtgtatacatcctctctctctgattgagaaggacgttgagggtatgttggcacaacccacttgaccttagttgatttctagggtttctctcgttgccacgagggattccctggttcc

SEQ ID NO: 269906 - DNA, 419 bp, Cannabis indica
aaacattaaaaatcaaaatagtgtttccacgtacgtaactctatctacatgtctctttatgatttaatatgaacaaattcaccattagaaatttggaaaacaacgaaaatacaccaggataaacattttactatagtgttgatgtactttttttttgattatacttgagttggattgtttgggaactcctgtttaactttttgagatctgtctttcatggatctgaaaattgaagtcaggacattgattttatgcaaattaaactggatttccggttgaattttagttttatagtagcttttctgcactttttttttcatgaatttgaaacaatccctgttatgattaattatggtcgtcttcttaggtgaagtcgccataattaatggtgattttctttctagttgaattttcatttc

SEQ ID NO: 269907 - DNA, 545 bp, Cannabis indica
agatcttggtaaaataaattcctacagtccgaacagtctccctcatcatcaaaggactcccatatttccatggaccaatcctcaaagcaccatgcctgcattcatgctgacaggccctcaagacaaaccaccaaactagcagcatacgtcagacctctgtctcttactagcatggtgcatccccatgcgcgtatgcaaactagcccacgaatgactacttggtcatctcatgttgagactcgtggccaaggcacaccacgaacagtctcttggaggtttaggccacgtttcgtgcaagcgacatatctacaagccaataaaaacgtacccgtcaacctctggcagaaggcgcactactgggtcggcccggtagtgtccatgagtatttcaactcatggagacatatgagtcccctcgtggtcctcatgccctactagtcccactgaccagtagtagctcacttagcaccaaggtgtcaaggggtggtggagagctgacactaggtactccccccttaaagagcattctaagttttagccttctac

SEQ ID NO: 269908 - DNA, 922 bp, Cannabis indica
atacaactcaattgtaaaaataataaagaacaataaaagagattgattaaatatatgttacaatacatatatatacactatagtctatgtatatatatatgtaatatatgaaaggtagaatagatgaatagattacacaatattatataatatatataatatgaaagaagaaaaagatcactcactcacaaccttgagtgtagaataatggggatgatcaccatgacttaacaaggtattacacctttgtccaaaaacttatttccccctatctctaagtaagggaactctctaggaaatagctttgagaattatcaagccttaggattttctagcaaagtgcttttttttgatagaaaacatgttctcacttactctcaaatgagcaccatagacctcctttatatagtgtttaggatatcatcatttgaaattcaaattcataagtcataacctccaaagatgttatggactcaataaagagatataactcatacacaccataactcctatagagttaagaattttaaattaagatgtgtaacaccttttacactcttaatgttggtgataatggtggatgttactcatagtaacaagtaactctcatatatgttacaaaataatgacaaataatataaattatcttatgttacatattattagtttattacacatatttaatctatatattatattatttaataataatataatatttttttcatggaatttattattacaacttcataacttcaacttttgttctctcttcctttttgagttagtaacaattaaaatgataatttatttcttagaagttaaataaataattacattaataatagaaataataaaatcttatgatttcaaaatgggaatataatataatatgtaacatataattaatatgttaatatct

SEQ ID NO: 269909 - DNA, 1659 bp, Cannabis indica
accacaaagtccatcgtaatatcttcccacttccactcaggtagtgtcaaaggctgcaacaaccctgccggtctctgatgttcagccttgatctgctgacaggttaggcatcgcgatacgaattctaccacattcctcttcattctgctccaccagaagtagggtttaagatcttgatacattttggtggtgccgggatgcaatgaatatggagtggtatgagcctcttcaagaatttcatttctaagtttcgcactacttggaacacaaaccctggtcttgaataacagcatcccactatctgatactgtaaaatctctggcttgaccaactgaaacctcttctctgatctttactaactctagatcaactaactgagcagctttaatttgttctaacagatcagattgcagcgtcaagttatgaagttttcctacaacaaactcaatgcttgatctaaccatgtcctcaactaaccgaggtaaaatctggatcatactagttacctgcccaggacccttcctgctcagggcatcggcaactacattggccttcccaggatggtaaaggatctcacaatcataatccttaaccaactctaaccaactcctctgtctcatattcaagtctttccgagtaaaagaaatatttgagacttttatggtcagtataaatttcacatctctctctgtagagataatgccgtcaaatcttcaaagcaaacactactgtggcaagttccaggtcatgggtcaggtactgctgctcgtaatctttcaactgacgggaggcataggcaataacccgatcaacatgcatcaatacacaccccagaccctgtctggatgcatcacaatacaccatgaacttctctttatcagaaggtagggctaatactgcagctgtgattaatctctgtttcagctcctgaaaacttgcctcacacttatctttccacacaaaatgctgattctttttcgtgagctcagttaagggtgttgaaattttagagaaaccttctacaaaccgacaataataaccagccagacccaagaaacttctaacttctgtgactgtttcggtctcagccaatccctgacggattctatctttcccagatccaccttgatcccgtctttgctaacaatgtgcccaagaaaagacacttgagatagccaaaatttgcacttcttgaatttgacatataacttatgttctcgaagtcgttgcagaaccatccagagatgttgctcatgctcttcttctgattgagagtacacaaggatgtcgtcgataaatacaataacataaatatcgaggaaatttttgaatatcctattcatcagatctatgaaagttgcgggagcattggttagtccgaaagacataaccagaaattcataatgcccataccttgtacggaaagccatctttggaatgtcctcttctcagattctcaattgatgatagcccgatcagagatcaatctttgaaaaagaccgtcttctcctaaagttgatcaaaaagatcgtcgatcctaggtaaaggatatttattcttgattgttagcttattcaattcttggtagtcaatgcacattcgcaaagactttcttcttaacaaatagtatcggagctccccaaggtgacacactaggcc

SEQ ID NO: 269910 - DNA, 489 bp, Cannabis indica
attttttttttacattttatatgagatttttatgctatatattttttttaaaaaaaaaaagataaaaatcatatatttgtaaaacaataataagttttactggaaaagtcactgacactggaaaagtcaccgaaaaaatcacaatcgtcaaaaaaagtcactggaaaagttaccagaagtagatatctcagatataaacaaaaatagaaccgattttataacataatgaataaaaataaataacacaaaataactcaaaccggttataattgaaatataactggttgtgtaacataatgaataaaaataaaatgacacaaaataactcaaatcagttataattaaaatagaactagttttataacaatgttataatgaataaaaataaataacacgaaataactcaaaccggttataactaaaatagaactggttatataacatcatgagtgagtatttttggagaaaatatggtatgtgtgtaattat

SEQ ID NO: 269911 - DNA, 797 bp, Cannabis indica
aaaatagaaaatagaatgagaatttttgacaaaatttctatcatcgtcggaaaattcgtcgctcctgaaaaatcactgtagtactactataaatattaagatttgtaacggtcctaaaaacgactttttttggaccgtcgctaaaaaaattaagtaactatttaaaaccttcgggaaaaatagagtattcccgatggtttaaaatcatagtaaacaaaataggcgacgtttttaataaaatgtgaatttttaggagagccttatacccgacggtttaaaaatgatgtgtatacactacaacaaataccattattaggggcggaacagtctgctggtaataatcttgtaatctgccggtattggtctttagcggcgggggtccgtcggtaataccccgtcgctattaataattaatagcggcggactgacacgtctgccgctattaattattaataccggcggaccattagcggtggggcccgtcggtgattacgcctcgtctttgttatgtctgacacattattaccggtgggtgtccgccggtattaatgtttttcataaaaaaataaaaaattaatattaataataataaatattttttatatttatttaattattttttaaaatttatattattaataaatattaaaattaaaattaacaaatccacaaattatcatccatacattatttaaaacttaaaattaaataattactatccaaaaataaataaaacttaaaaattaaataattattatccatatattaattaagacttaaagaaatctaaacataat

SEQ ID NO: 269912 - DNA, 599 bp, Cannabis indica
catcattttacccttctcgggtcacaattactaaaatgcccctggctcaccaacggggtcttaacatattaaaattcatattaattcacatatattgaactatatagtaatataactcctaaattattcataattatttaattagggttctgctaatccatttcttaattcaggggtattacaatatacctcgcgtaccaccaacagaacttagaatgatgacctcgccctacccatttgctatatggagaattgacctaattggggcattacccactgagcaaggaggagctaagtatgcggtagtagcgatggacttcttcactaaatggaaggaggtcgagcccctcatttctataacctgcaagatagttcttgactttgtcgtcagaaacattatctgtaggtttggaattcccatgaaggtagtattcgataatggaacccaatttgatggcgacttgttcactaaattctgcgagaggaacaaaattatcaaaagcttcttgtcagtatccaggcctcgggcaattggacaagtagaagctgttaataaaaccttaaaggatattatcagaagttagacgctgccaaaggca

SEQ ID NO: 269913 - DNA, 712 bp, Cannabis indica
tcggtatttgagcggttcgtgaggctgcaacctccaaattttatgggaggtactgaaaatatgggagtgacgggaatagagagagtgaattgtgcagcgttcatgttataagatcatgcccgcgtttggtgggatattgtgggacacacttgtgatgtcagtttgatgacttgggatgagttcaagagtctatttgaggaaaaattctatagcatcactgtgaggacttcacatatggaggattttgtgaaactaactcaagggaaaatgtctgtggccaaatacactctagagtttgatcggctgaccaagtttgttggggatctggtgcctacaagtttcaccaggaaatagaaatatgtgagaggactaaatgccagaatcagtcgggacttaaaaattaccactactcgtgacactttgccccccaagtctgtacgagacttttaaagttgcgtgtagacttcatccgtgcagtctttgtgcttggatgggggacatgtgtcaagagcgtctgttcgcaattcaatgtgaggctgattgggcgtcccttcagtattcggctaataaatgctctgacgcaattaatgcttcgaaatctgattttctctaaccacgtttgatgtttacacttgatttcttttgatttcccatattcgcttttgggggaaaccgaggcgtctgaggttttttgaaatgatttacccctttt

SEQ ID NO: 269914 - DNA, 598 bp, Cannabis indica
attagggattaacgattcaggggaattaacgatttgtggtgtttaatagatttctggggttggagtttttggtttttcgaatgttcacttttttaccgttttagttttttagtctcagtttttaaatttattttgtaatttagttaaaaaaattaaattatttaaatttttaatttggaaaaacattttattttttcaatttgaaaagaaataaatacaaatacagcgattaaatcctatgcgtacacgtgtaccgttagtcatactaacggatgtggtatgaacgaacaaacacgaaagtccagcttaggtatcaacgtgaactatttggggacttttgccgcaaattttccttttttttatattacttcacacttttacattgcatcatacattaaatattattttttttaatatattttattataaatatttttttaaaaaaaaattaaatgaagaagaattaaaaaagaagtaagaaattattaaaataatatttgaagaatgaatagtgcagaagtactattcattttttacgtgtaaagaaacactattcatgagctaaaattttgaattattttagctcacttgatagagc

SEQ ID NO: 269915 - DNA, 526 bp, Cannabis indica
taatacaaaaccagtactaagggtgtagccaaaatcatctcattcgaaagagaagaaaaaaaacaacatgcttatatgtacaaacaggtagatttaaatagatttcaattaataaaaacgatttagatttcattaataaaaaagatagaacacaccataaaaattacaaactatatatataggtacatacatatatatatatatcaaaagaagacatcaaactatttaatgcctaactgttaggcttgccttcaatatatatatatatatataagctgattatgatgctacagtggtagcaaaacataataaataccactatccaaatcatacctatacacaaatagttctaaacaataggacactagggtggacgacagaaatactgactgcatctcgcaactgttcaggcatcctctctactccactcaacagtcgagtcatggattctacagtaattctatttagctggatgtattccattgcactctctattgctaagatccattgtgcacgcgttggaggt

SEQ ID NO: 269916 - DNA, 1034 bp, Cannabis indica
gtctagtgataaaataaaagagtaaatgtttggtgtattgtggtctaataaaaagtgttcaagtcttggtgtaattatttttacaataataaaataattacgttttcacgtgttgtggtgtccaacatgatcctcctaagattgtgttgattcgatctttcagaggcaggggcattgaggctttttgcctatgttcaactagtggtggcactaagtgtattaagatgatataaaacaatgtctttgtataccttttagttgtattaatgaagatgtagtgagcaatttctcaaaaatcaatcaaaagagaattgataataattaaaaaaaccatacatcagtttataatcaatcaaaaaaaaagaattgcagaatttttattggaaaacacaaggtaaaaaaataacataaaaaatactatagtaatgttcctgtttcgattaattttgcttagcagagcttcgacgacgtaatttgagataaccaaacttgccagcacctggtgatgaaccctcaaaaataaagggcaaatagcccgtggcagctttgtatctctgctgaacctgaaaaccaattttcattacatcaaattaacaccccattaatcatctagttaagacaaaaatattattagtctttagtgcaaagttaagatataataagattctatttagtggtaaaaaaatgttacctcaagaatttgttggctgctctgtaagcagttccttccaatgacacaaactgttcctcctgagcctcctcctgttatcttggctccaaacaatgtcccttcatcagatttagagactttactatgttgcatttcttgcactaattgtacaagcctatctgttccatccgtaccaagtccacaagcactatagctataatgacactacacaaaaatatgaacaaaacaaaatggtcaacaaatgttttcattctttcacagtttgtttcttaatcttacatctaaaatgtctgctaaaatacctgatataataattctccaagagctgtaagttgctcgtccg

SEQ ID NO: 269917 - DNA, 871 bp, Cannabis indica
ttctaggctcaccccataaaagtgttaaccgatcagcccttgagacaagttttatcaaaaccagatgcttctggaagattggataaaatggtcgattaaactggggcagttcgacataacataccatcctcgaacatctgtcaagggccaagctttggcttacttcttgataaaaggtataactctagaagaaattccacctgatcagcgaggtgaggaaacctggaggttatacgtggatggcgcatccaacgagcaaggtttgggtgcaggggtaatattaatatcgccagaaggctttaagtttcacaatgctctgaggttccaatttaacgcatctaataatgaggctaaatatgaagccttgatcgcccgacttaaagatagtagaggcattgaaagtcaaaaatctcatttgtcatagtgattcgcagctgatcgtgaaccaggtcctcggggaataccaggccaaaagtttaaaaatggcaaattatttagagaaagttcggaagaacttcgaaagatttgattattttaaaatcgaacaaattctgagagaacaaaactccaacgccgacgccttagctaaactagcctcatagaatgacctggatgaactgaatctagttccggtagagatgcttagcgagccaagtatatgtgaagctaaagacgtcgagatgatagatagctctccaacatggatgacgcctataatcaattatttactcgacgagcaacttccaaatgacaaaaatgaggcgcgaaaactattgtatacagtggctcactacacgatgatcgaaggcaaactatatagaagaggatattcaatgcccctacatcgttgtgttcttcccacagaagcaaa

SEQ ID NO: 269918 - DNA, 1094 bp, Cannabis indica
tctctctctctctctcacctcttggaaccagctaggattctacttttctcaacaattctcgtgaatttccagtagatttttagagtatcaaagctaaggtaaagtctctagcaacttcctctttggttttcttgaattttaaattatggatttttccatgaattgggtctttgagttctgtagtggctgttgttgtttgatagtgttttctagagtttagttatgttgtattatgttgaattgagctagttttggtggctgttagtaggtttgagcaagctttgagtttttaaactcaagtttggctctttaatggtaatttttgtttatgtgcatgttgtagtgttttgttgctttggatacgttatttgtagtgtaaataacaggtctagaaggtttggtgtaatttggggttaatttgagtgacatttgaaattttgaagttttcctacactgaaccagtcgacaggttgagtgggacttgtaggaaccagaactccggttggtccccaggaaaccccacagaatcagaattctagttggggaaccggtctaccggttggggaaggtttgggaaccctcggttttcccatttttgcgatatttagattattaccatgttatttatcgatagggaaacacttctagtttcaagtttaagtccctgaaaagtgatttaccgtgtcacttatctatgttgtgaatgatatgatttaggggcctataattcgctaagcagttgttccactcaggttggccggcacacctgaattcaggaaacgaggtaagattagtataatgatatagatatgtagttacatgtatagtgtgcatgttagctaagccttttagattacattagaaatgtatgttggcttttatattatccgatagtatcacatcgatacgcttagagtatgactagcgtaccgagtataagctgatattatggtcgatagtaccgtactacttgacagtattacatcggtacgcctagattatgactagcatattgagtataggatgatattatggtcaatagtactgtcgtacaaacattctagacgcaacaccatgtgggacacagggatagg

SEQ ID NO: 269919 - DNA, 589 bp, Cannabis indica
aaatatttttactttttcaattttaaaaatagaaaactgattaaaaaagtgttaccaaacgagaccataattaatattaaattctgttaaggtaatattttattatttaatagaatattcttaaacttttaaataaattattttgagagttaaggactcgcgaagaaaaatcctaaaaccctaaaaccttctgttagtatcgcagtcacagcttctttcaagtcgcatactcgcaacatttttccttttgcatactctacatgaatccgtgacaatacaaagaatacattggaatggattttcgatttttcaagaaaggggttcacatgtgaactcgggattctttcaatcggctcctcgcaacaccgaccgatcactcctctatgacttcaatccctgaaaccaccaaaggctttaacattgtaaggttttccacaatttttttattgagtgtgaaatttttaattttcttttctcttaatgatatatagtgggttcagatattactttgacaagagaagagaatgtagaatctggttttgagttcaattaattagttcttaattttattttttctttaatttaattt

SEQ ID NO: 269920 - DNA, 992 bp, Cannabis indica
gtgacgttggttcgtcccacacctccattgattgtgttagtcagattagttccatcacctaggagtgggacattcattgttccaaagttgaaagatccagtgtttttgtttgtctggtttgtagccatgttgattttcctccaaaatcaaagaagttcccacagacgacgccaaatgttgtgggaggaatttagacaacatagaaaataaataattgacacttaacaaaaaagcagcaagtactcaacttaaaacaacgagtattcgaacaagactgcctagacaatttaaaagcaagaaaaataatgaacaccaggaagtatagtggttcagttaaatcaaggtctgcttagtccactattgcaagggatctctgtcttgtcttattcatgtcggatcacccctttatatacaaagcaagtgtccttttagttacacaaaacttaatcggttatagaaccattttacattatatattaacattaaattaaaataaacctaaaggaataaatgaagaacagtttaaatctatttcactaaatacaacaacgtatgcaacttccatagtgcgtgtaaagaccgcttagttttaatttagaaattagcagataattagggctttattatggaaattaattatgaatattgaattaattatttatgatgatttatttgaatttagaatgcatttttatgtcatatatagaattttcataatttatgcatgttttgtgcccggcaacattagaacgcggtgtatggctattagaatcacatcttagtattttcagtatatcacgacaatagtttagacattgagaatgtcagaaatagtcgggattttagaattttctaaattaccccttagtgctattttatgacttttagtgtgggaggggcaaaatagtcattttgccccaatggtcttttgtctttttgtgtgtttgattaagtaattaaatcaaattttttttattggaatgttggctgat

SEQ ID NO: 269921 - DNA, 666 bp, Cannabis indica
aatcatacacacttgccatttcttgttcagcatgggaaccagtacaggatttgcaacacaagctgggtagaaagcttcaattatgaaatcattgttgtgtagctattctacttcttcttttagggctagtgctcgctctttgtccagtagccttcgcttttgtttaactggcggaaagttgggatcaatatttaggacgtgtgaaatgatagaaggatcaattccgaccatatccacatgtgaccaggcaaaaacttctaggtttgctctcaaaaattttattaatgctgattttacttcaagcaacataacttttctgatctttagctttctacccgggatatctggatcgatctcgatctcttctaattcttccataggtccaacattggtccttgggtccccaagttgaggaaccacatcttcatccccgccttggaaagctccctacttggaaatgtttttttcccttgcctgtgtttcctctcagacaccctaccccattctttgttggaaacttcaggcacaagtggaatatcgatgtgacagcttttaagtcatacaaagctggatagcctatcattacgttaaaggctgaaggaacatctaatatcaggaattatgccatgatagtcatgctcgccgaagcttgcccaacaatgaggg

SEQ ID NO: 269922 - DNA, 874 bp, Cannabis indica
ggtgctcttctataatacccacttggggagacccaaactttttctattcgtgtatttatcttttgagatgatgatgatgattgtattggtgatctaagattgtttaatcttgatgttgttgtgaacctctagttttactagagaagaactttgtaatcccattattgaattttggtgatagtggatgatttgagcggactacggtcccgtggttttttcctgcattaggtttccacgtaaaaatcttgatgtctcacttttatgcttgatttgtgtatttatattgtttgtggtactttggctgatatttgatattgcatattgtggtgtttgataagtgttccgtttttgacatacaaagagggaaaatattgtggttaattgtaataggttttcccaacaagtggtattagagccaaggttgattggtgttgaattcttgtgtgtttaaaatggatgagtcggatggaatgatgaaattgaactatcaaaatattccccttaagcaattgatggaagatttgctctattgtaaagatttgtacaaaccaataaaaggtagtgagaagctgtctaagttagataatgagaaatgggaagttcaacatagaaaagtcattgcctatattaaacgatggatggatataaatcttcatgagcatatctctaatgaaactagagctgatgtttttggaaaaagctagaaaatctcttcgctaaaagaacgaatggtaataaaatttatctacttagaagacttctaaatttgaagtacaaggatggtagtagtatggttgagcatacaagtcaatttcagagtcttgcaaaccaattaggttccatgaagatgaatatggatgatgagatgcaagca

SEQ ID NO: 269923 - DNA, 566 bp, Cannabis indica
gctactcaaaatgactctaaatacatgattaaaaatcaatcaaaaaattttaacaagagaaaataattattatataatatttatatagttgcaaaagtgaaatagtcaaaatgagcttgtgaattcactacacctcagtgtgttatatttagtgactgtgaggattgaatcagggtcatacatgggaaaatggggcccaagcaaggtaaaattatgggcttttttatttatttatttttttaaaataagagaaaattcaccttcaacagaattccacgtaaattaattacataaatgtgtctcgtgttgcatttttcgatacaaatataccaaccaattaaatttgtataatcaagtttttccactaaattcttttcaatgataacatagctaaattgtttaatatatctatctcgtgacatagttggtcgaagataaaatcaatttcaacttaaaaaagcacatttttgcatgagcaatagtaactggaattgacagtagaatcctataaacgatccaagtgttagagtaattaccatatctacttcttttatataattcaacac

SEQ ID NO: 269924 - DNA, 619 bp, Cannabis indica
cttctcatcaatttattaagagacatttatgaataaacttatgtttggtgtagataagtccctaactttaaaaatcagcggtaataatctctgaggtcgtaatttttgtaagtatgtcagtacccaaaataactatccatttattaattctaaaaataacacacgtttaaggacttttttctaattttagtaaaaaagtctaatatggatgaaaattcaaggggcatgatttagtacatatgtcaaagtttgagaggcatgatttggtagatatcaaattttagagagcatgttttagtacataaacaatcattgaaatagtaaaattgaatgaaattagataaaagtcattaaattcaacaatctcaatagttcagggggcatttttaatgatcttaaaaattcaaagggcataatttgatacatgttaaagttcagggcaaaaatcctaattagtaaaaaaagattaataaattaaaagaaagagcaaatgtagttaattaattgatgaaaatttgagagtttcatttcgttatttttttactatgatattttataatacaattttaattataatgcttcttactatgatagcagatttatggctaattagtaattt

SEQ ID NO: 269925 - DNA, 861 bp, Cannabis indica
ttttttatggcgcactcatgttttaagtatatagatagtttttttttctttttgtgtgcaatgatgtacattgtagttatttaaaatattgagataatctaaataattaatatgccaaaaaagagtataattagtataaagcgctggtttcgcactataaggttcaactatagacgtgtttttggtcttcttataactcttttattaaactacctatagattagacattcatgaattaattaatatgatatattattttgtttagtgtgatcttatcatttgtatgcccattgcatatcattaatatctttagtgccataacaaatctaaatgtgtacacgagcttttaaaatatttccaaatttttattttcacttaaaaattgtacaattaagttctattatattagtttttattttttataaaatattgactggatttttagccaaccgaagcggagtcgtaataaatgagatttaaaccaaaatcacaataataaatgcaattaataacaccagaattcgtaataaatgtaaataaaagacaccgaaatttaaagaggttcggccccggatgtcggtaatagcctactccccttgagttttattaatctgagttgcaaaagttaagaacaagctcttgattgcaaaaaatgagaagtgtatatttttctatgtgtttcagattgcggatccccctcccaggtcatgggtgaccccttatataagggaggggggtcggtgcttctcgcctcaagagacgcgaccaacgcggagctatctcaaccatctccttgattttcggaggcgattggagtttgatttttaggataatatcccgctattttcgtggttgacaact

SEQ ID NO: 269926 - DNA, 672 bp, Cannabis indica
ttaattaattataatattagaatctgaatactcaaattccaaacacgaagattccttaaaaaatataaaacaaaatatagctaataggaattagcatttaaagtaaacctcttaaactttatttcagtttaattacaaaatctcacatttataatttatatacgaaaattaatattatgttatccataataaactaatgaggcaataatctcataattacataccataattgttagctattaaattttataatattttttataattaatgatatcttgtaattttaaccaaattatcctaaataattaggggccagccataaatcaggcgcgaaaaccttgaaaggcaccaaagccataaacaatggcgcagctcatccatcaaattcgtacttccatttcttccataaaaaagctaataccactcatccagaaattatttaaaaatacaaataatgtaataattttggtacattcccataatattgagaacaaaccaaaattccataataatttgacttcccaaatatatctgaagcaatatattctcattagaccattagtgttcccacctccctttattacaagatcctcaagattcttattcttcaatttatttaattaattataatattagaatctgaatactaaaattccaaacacgaaaattcct

SEQ ID NO: 269927 - DNA, 896 bp, Cannabis indica
aaacccttgacaaaatagaagaaaaaagggaccaagccaacttaaagcagcatgtctgctagtaaaaagttgttaggtacttcaataaacaaatcaaggagaagaaattcttcatagaagacttagtgcttcgaagaatattctctaataccaaagatctacagcaagcatgtttggacaaaactgaaaaggtctacaccaagttacaagataacaagtaaaggtgcatacaagcttggcgagtacaatgagaacatggagttagctttcctaccaatatactagaatggagaacatctcattaagtactatcactagccaacttgtacaaaacactactctttagtagtggttcctgtctatgattgagtatttgacttgctatgtatgggcatagtactctatcactaaaggcttgaagattgatgaagaacaacaagaagggtcgaaatcactatgcaaggagtctctcatctactagttgtctaacagagttagaaaattaggtttagattggttgaggtaggttggatgagaatgagagcatcatgttccttttatagtatttcaactagggtttaaattaaaaaagataaaataataggcaaaaattaagctagtggctggccatacatggtgggtttcactagttacaattttgccactttatttcaactatttatctttttctttcaataatgtcatattttccaattttaatcctataaatgtcaaaactatttatttaataattataattaattatcaaataaaacttccatttatcttatttattaattagactatacaaagtctcttaattaacaaataaaccttaaaacttcttttcttcataattaagcccttgcttagtgaaaattcataaataagacata

SEQ ID NO: 269928 - DNA, 634 bp, Cannabis indica
atttgatgaaaaggggttttgaatgggattagatgaagaaaaatggtgaaaagggtgttttcggcgtggaggggttagggatttagaatggggtgtgagtttgaaatgttaggaattggggtttttaaactaaaactgaccaatctcgccgcggcgagatatagcctcgccgcggcgagaatgcgtgaaaattgcaccctttctgtaagccttaaatggccgcggcggtatgtcccctcgccgcggccagaatttgtgaaattaagcctctctctgtaaggcttaaatggccgcggcggtatgtcccatcgccgcggccactgggaattttctttttttttttcacaaaaaactggacaaactgaaaaagaaaaataacagtaaaacttaaaaagagttcaactaaatcataaagaacacttgggttgcctcccaattagcgctaactttatcgtcgcatagctagacgttgatcgagatcttcatagtggcgccagaatcatggcggacttggtttgatcaaattgacctcccaagtagagctttaatcgctgcccattcactttgaaagtattaggactttcaccttttagttccactgctccgtagggaaacactttgatcaccgtaaatg

SEQ ID NO: 269929 - DNA, 467 bp, Cannabis indica
ttttttttttatcttttatttaagttctccatttattaattttaataatataaataaatataggtaagaaaatgactaatggctccatcgaaaaaaggtctctcaacttgcattttcttatttctcctccttataaataaaagaataataataataactcaccttaattttcttttactcaattatgtttactgtttataagcatagcctatatatatatttatatatatatataaaaaaaaaatcagttactaaccttaattttgatttattgtcatctataagttttaatttaaaccataatttagttttatttttctttttagtatgatccataattaaattaaatgtcatggatgagaatttggtgtttcatttttttttttaaagaaagagcatttgttcatttattttaaatgaaatattaaaactaattttcatgaaaattgcagctaatgtgtacttat

SEQ ID NO: 269930 - DNA, 1072 bp, Cannabis indica
ttaccaactattactggtgtggtgcttgctacaacaatgcaacatacgagactgactaaggaggttccttagaaaccacctgatctaaatgggttgaagctgaatgtggatgcaacgatgaacatagacacaaaattattagggattggtgcggttatacgagatcataatggacacgttattgctgccttatccaaaccagtccaaggaagctttagatcagatgagatggaagcaaaggctctttttcatagcatcacttgggcgagcaactaaaaaattcctaaaactcacattgaaactagtgctttacgagtttcaaatgcattattaattacatctttaaatttatcttcttttttagatttaatttcaaatgtacactatcttttattctttttttcttagagttattatctctcgtgttaggagagatatgctaatcaagtagcacataaattagcaaaatataatctaaaattagatgaagacatatgttggatgggtaaaatttcatattctattttctctattgttataaatgcatgacttttaatttataataatagttgaatctttctcaaaaaaaaaaaaagtcacacttcaatactaattaaatttttcaaaaattaataggaaaaatgaaagttacataacaaaaaaattaagcgtggaatgtttacattaaggagagaaaacaatgaaatttataaatatattacttcttctaattataagtaaaagagctgatttgtatataattcattaatgactcatcaatcttgatttcctctccttggataggagtttggcgaaattgagaagagcttcagcattagtaccttctccttcaacaatctcatacttacctgtttccaaatttaccctcgaaactggtttctctagtagctttgtcccgatatcaacaagtctttgtagattctcagtagttgctatatcaaccgatgactcattcccaaccaatgtatcatcctgatcaaaataatcaataataattaataaacatttacaaaaaatcaatatatattaaaaaattcttaggtaaaaaacg

SEQ ID NO: 269931 - DNA, 562 bp, Cannabis indica
aaaagacaccaatagacgagaaaatgctaactttaaagacccaaaacataggctaaatataacctaacaatatctcaggtaatgaaatagttacaggcatatccactaactttcgacataggtgtgttgttggtgtcacccaaccattgatggctattgtgatattttgcacacgcaagtgtacgtatcgttaacaagtagtaaactcaccaggagtgaggtcgatcccacagggattgtagttaagtactttaaaattaaacttctacttctatttggttgaattaaaattaagaaaggattaaaatcagaaaataaaaataatgcaagaataagcaattagacaaataagaaaattaacagttaataaaaactagggcttcgacttcaattatttctattgattatggcctaatatgattatctccccattatcaatttctatgcaatagcaggtttactaaggtaatttatagtcttctcagatatataaatctcaatcacatgcaaactttctactctcgtgataaattaacatgcaacaggcattaaacacagaaac

SEQ ID NO: 269932 - DNA, 686 bp, Cannabis indica
tacatgcctaaataaatcatgtaataaattaccaaattaaacaaatttccactttcaatttatactaaatatatgtattaaacaaaaatagaaaattgactaaatgtaatttattgactaaattaacataaaataggaaaataattaatattccaaataaataaaaatttataaaatttcggaatttttccattttttttttgaaaattgcactgcataaacgacatgtcgtttttgcaaaacgcaaaaagacacatcattttatcaatttcgaaggggctgaatatgtatgcaaaaatgacacgtcgtttaccctcctgaagggctgcctcacaagacgaaaaacgacatgtcattttccatagtgtggaaaatgacatgtcgtttgcaacaaacgactacgaaaaaaaaccttacaaacgacacgtcgttttctacaaacgacacgtcattttccacaaacgacatgttgtttgcgtcgtcttcttcagccaaactgggtcgatttttacccgtttttctgcacgagggtccgacggacccgacccaaacccgatcggaaagacaattctgacgaccaaaaaggcccaaatcaatcccaaatggatctaaatgcaaaaattaagacatccatatagatttcatgcacgaaaacacgaaaaaaatatgaaactttaacatcacaa

SEQ ID NO: 269933 - DNA, 549 bp, Cannabis indica
aaattatcatttcacttctacgtaaccgtaaaagctatagattccgtatctatgattagtgctctcattcaattgtactaccatgttcccaagaggttagtattgggttgatccaattggtcagctttaacaacaagtccaagaacataaataatataattgagctcaaacctaaccatcttatgattaagatttattgatctaagatcaactaagtgatattgacttagaaagatataacgataagtttatgatatctttttcaagttcaatatcggtccaatccaatgtatactccataaattcaatactagcatattttactaatgccctagaaaggacatacaacttatccaagtgtaagtaaactttatcgttgattatcacgtcagtgtaaattcagtgcattgataaatcatgggactatactttgaagcatgtgatcacaattactttttactgtgatgacatcactataattataaataactatatgtactgaatttatcaaaaattttatattaaaccataatcatgaaaataacatgt

SEQ ID NO: 269934 - DNA, 699 bp, Cannabis indica
acccaacctagaccacgacctaggatgcaaacccaaacccaaactcagactaagacgcgaattccgacccgaactcaaacccaaattcgaactcacaatcgataatagaactagaaacgaactaggactaggaccaggaccagcaccaaaacccaaactcgaacccagatcaaagcccaaacagagccctaaacccgaaccgagactaggactcgatctggaaccgagactgggacccaaacccacacaataaacagcacatggaccgaaaattattatagggacctgggaaacagatctaggactgggacctagtacccgactagttagggatcctgatctggacctagggcttggacaaagaccatattcggtgtctgcatttgggaaccatcgtggacccgaaaccacacccgaacaataactgaaattggacctagatccagaaccgtaacaggaccaggacctagactccaaatcagaccgagacccgaatagggagctggacccatatcccaacccaaacctggactcgggacccaaacctgaacctgaagtcagaccaaaacatggaagtagactagggacacgatacaagagtcatcacatagaattgcaccccaatctcgatcccgaacccaaagtccgaaatgggatctgggaccttaacaagaaccagaccgagacccgtgacagtga

SEQ ID NO: 269935 - DNA, 525 bp, Cannabis indica
aataagtttcgccggaaaagtcggtaccgaaaagtcaccgtaaagtcgtcggcgccggaaaagtattgtcgtcgaaaaagtcattggaaaaatcactgtctccggaaaagttcccatcatcggaaaaatcacttaaaaagtatatgtctcagatataactaaaaatataaccggttctatgaataataaaaaataaaataaataatataaaataactcaaaccagttataattaaaatagaaccagttctataatagtgttatagttaataaaaactaataacacgaaataactcaaaaccggttataactaaatgaataaaaactaataacttaaactggttataattcaaatataattggttctgtaacataataagtaaaaacaaataacataaaataactcaaaccagttataattaaaatagaaccggttctataacagtgttataatgaataaaaactaataacacgaaataattcaaaaccggttataactaaaatagaatcaattatataacataat

SEQ ID NO: 269936 - DNA, 879 bp, Cannabis indica
aaaaaaaaaaaaacataacaaaacaataaatcatgcatagttcaaaatatcataaactagtctagtaaaacaatttcatgggactagctatgaagcgcaactagtagttgtggtagttgtctctgttcctgtgcttgtaatacatgattcctctagaagaaaaataaaattaaaatatattagaaaaaaattatttgtaagataagaatattaaactatatatatatatatatgaaatgataaatttattttacccaattcaactagtttagagatctccaaattttcaactttattcatgtattgtctcaacacaacaggagcatcatactcacaagtcaaccaattctttgagcaaattaatgcttcacctgtctttggagacaaagaacttctaaatggatcaagtatccatcctccagtaaaaaaagctgattcagaagcaacactagatatttgaacagccaaaacatctttagcaatgtgagagacaataggatacttactactattccttttccaccaatctagaatgtcaaaattcacattatcaagcaacttttcctttctatcattaagataatcatccaaatcattagtggctacttcacttgacacaaacctaagcttgataaggaatgatgtgctacttgagcttgcattggatttgaaagtggcattttcagttgcttgttgatcattggaggaattaggaagcacaacaatcttttgataaaaagcatataagctactcatcatattttcaacttttttaatcattattttcagctataattgcatcatagagatacctaacaagtaattaaatagaaacattaaacaatgtatatagaaaaagctaaatagtaatatgattat

SEQ ID NO: 269937 - DNA, 912 bp, Cannabis indica
aagctcagtgaatagatcgcttggcaatagcgttgcaccattctttagcattggtctcagcaccctcgaccttcatagtggttgcattaagtttttcttggagtgtctgacaagcctcgaacttgtacttggattctttttggggtacctcaagttcagtctgatgagtcctcttcatctcttcagcctccttggtcagacgggaaatctccttttgggcatcgttccattctttagcaacaacctctcgttgctcaatggttttacgaagctcaacttccaatttctttactttattgagaacccaactctgggcaacatgagataagaaggtggcctccaaaaaaataaatgcacatgaattcgtgagggttcttgaaagaaatgttaaaaacaaagaaaaaaagaaggaaactaaccgagagattgaaggtaacactcctcttaagcatctcttttgggctgccattattgaccaaatcccagttgctagactggaaagattggaaatggcgctagtaggacgtagaaaattgcacacaatactctgaactagtgcccccagcctcgatgggcgaagtctcaggtaccttactcgaagaagtggtggcctggtgagtctctaggactggcttctcgagatgtggaatggctgtggtatgaacttgaatttattcttcaggagcctcgaggtctatagacaacgaggcacgcttcttatttgtagtggttttcctggatctcttgaggggttccacattaacatctgaagaagtttcaaaggcagcaaccctcttttttcccttttttgctcgaagagtggaggagattctctaaatccatatctgcgagacaaaaagatgcattaaaacttatttaaaaatagataaaaaggaaaatggtaaataaatt

SEQ ID NO: 269938 - DNA, 799 bp, Cannabis indica
caatgaaagcaccaaaatgttgacctcacttttagccaaatacagtgagtcttatttagtaagcgaaaaaaagtttattacaattgatatatagaaaagcaatataaagacacaggaattttatagaggttcagccccgagcagttcggtaatagcctaatcctcattatttgtattaactcaagaacaatgagaaagcttccttttcttatagctcttacaacaatatctctgaatatgaattcttagataatatctcttaagtaaaatctctcgaccctttgcccagtgaacatgcatcactatttatagggctatgagcttggagaggaagtagttcccttctcgttacaatggatatgagcagaaagattgcatagtaaatgcagaatacactgattatgggttttggacagcttgccatatctctgccatccgatgcctaagttatttggatttctttgatgactcactatgcgaaagctgaattcgctaagtgttggtcgctgtgtgcggattactgatcgctttgctttgagcatgcatacgaggcatcctgtttggactatactctctgagtagatacttggagttgattccacgtgtcaccattatgtgatgccacgtcagactgcacaaattgggataacaataggcaaacaacaaaaaggggtaatcatttcagaaaaacctcagacgcctcggttccccccaaaagcaaatatgggaaatcaaaagcaatcaagtgcagccgtcaaacatggtgagcaaaaatcgaatttcaaagcattaattgcgt

SEQ ID NO: 269939 - DNA, 647 bp, Cannabis indica
aaataattatatgtatagatataaaaatgatattgaaagtcatgatataaattaaagaccaagtcttagctgtttaagagtgacccataactaaaggtcgtgtggactcatgtgtgtatatctaactttttcgaagctgcatgcacacccaaaaatcaaccaaatgatactatatatgtataatgtataattaaagattatttgaacacaataataatagataataattagggatttttttcattttttttttgacgtggtgaacagagtcacacaagattaacaatgcaacaaactagagtcagtggtggaacctcctcgaaccaggatagctcattgtctaaccgaaagtcatgttttgccaaaccatgagctgcaaaaatctaatcacgagccacatgggacaaaactgcctccggaaatttagacaataaagctataacaacttcatttttaaactttaaaatagtttttttttttttgttgtatttttacgaaattctacataaaaaccctattgcaacgaaaaatcgtacagtctctattgcaattagcgtttgcaaacactttagaaactcaaaccataaatttagaaaaaaaaaagttaaaaaaaatagtatacgaggtaatttccctaataattaggt

SEQ ID NO: 269940 - DNA, 527 bp, Cannabis indica
aaataatgaggaaaaaagtaaactgcgaaatatttaccacggtgagggagtggctgaaatcctggacttggaagatggagttcaaggatgcacaagcagcgaaccgcttgggtacacaccgggtaaactgagacgcaaattcaccggtcatctccgcggcaaagggagctaaggtgggcccgaggaaacgaccgaagcaatccgacaaggggtccaagtttagatcccacggattctggtagttcaaatcgttgagggtattttgcatttcaactcgcaaaaccctcctcaaagcctccacgtcagcatgcccccgggagtactcgtccatggcgtagttgtgtttagctatccggagttcctgtcttgcgtcatttctaggaaccggagtcagcacaatgttgggaggggctgtgtgttcctccacctcgggagagatcccgccatcatggccaggggccggagtatcagctctccgctgccatttgggctctcctttgcaccatcttgcccttgcgcttgcgaat

SEQ ID NO: 269941 - DNA, 612 bp, Cannabis indica
aatcaatattttggacttcgaccccaatcttgaccatggtacccggactacggtctcagccccagtctcggatccggaccacggccctagcaccaggtccgacttaaataaaatcaaatatataaaaataaaaataaaagttatagaacacacatttgttttatgtttttcaaattaaaaaataaaagtggttataaaaacacaaattttactttcatttttgtgatcaaaaaattaaaaagcaaaagtgttactaaactcctcttaagattatttaaatatttgtcttattttttaaagaattattatttaaggtggcgtttggtaacactttcttaatcaattttctgtttttaaaattgaaaaagtaaaaataatttttaaaaacatattctataaaaattgttttcatttttcaattttttaattgaaaattaaaattttgaaaataaaaaaaaaattactttcaatatttttttaaacagtttttttttaatcaatattttggactccgactagactcagacccaaatccccaaggccctggcactgaacccggcatctgacccaacctgaatctgacttcagacctagacccaatataaataaaat

SEQ ID NO: 269942 - DNA, 611 bp, Cannabis indica
atacatctttttgatcctagatgaactgagtaagtagtcgtatgagactcattcatgatctctcttttaagatcatcatccataggcacacaaacacgattcatccactgtaaagtcactagtcttcctagtcgaaactctatctcgagatttgactagttctggatattttcgttgtgcttctctaattcactccaaaagtgtagattgcagggtaatattagccaatttccccgcaaccaactcaattttagctcgggtcacttcatttgctaactgctgggagatctggttcactgtatttatctgactctggccttttctactcagggcatcgccaacaacgtcggccttcccaaggtgataaaggatctcacattcataatccttcactaactatagccaacgtctctgtctcatcactacaagaaaaatccccttttaagtccatcaatattggactagataaagttttggagtcccttttgtgttggacattatagcctgcgacataaaagggttgtttttttagtccaacattattggactagaaaaacatttctaattggactagaaatatttttctagtccaacattattggacttaaaaa

SEQ ID NO: 269943 - DNA, 758 bp, Cannabis indica
agctgccatcatgggaggcattctggtgagaagtcggttgtgggaggatatatggcagaaaccaacccatactatgagagacttccttggcagagttgatgaattcattaaactagaagaggtttagtggaacgccaaaggcctcaaccaagctaagggaaagaagaacgaagcaagcactagtggccaaggctcccagggttaggcgagtaataataaaaatggctttaacaatgaaaagtggaccaacaacaataatggttgaaataactttattaacaacaaaaagccaaacaaagcatcttcatgaatgactatgtccttctaattgatacaatcctcagccacatgcgatattccccttgttcttgcctatgggtatggtaacccatcattccaccaaaggatgacttaccaccaagtatagagtacttgaggtcatcccacctagaatatacaagttagcatgttatggtgccaacaaaaagctagtactagtgtcttgccattaaaacggagagcacctacaaaagtactaccaatataagttgcttttcagtaatgacttaggctggttggtgtacatgcaaagtatattttcatagctggtcgtcatacctacaaacaaagtttgataatgtaaaggcacgaattgcccacttttgatgtaataaggcatgtttgcccattttatttataaagaaaaaattgcaagttatttttcatataacgacacaacttgtatgattgttattgaa

SEQ ID NO: 269944 - DNA, 1149 bp, Cannabis indica
atatgatctggacttaacagatttgtgtgtaaatgtaataaacatattaaaccattagcatgtaaaattcatgcaaacataaatcacttcaaatttcttatattgataactaattagattgtaaagggtttttatttagggcacaaaacccaacaacaggtgcctatacacccaactataaccctatccccgtgtccaatacggtactgagtttagaatgttctatcgaccataatattaggctatactcgatactctagtcgtaccgatgtgatagtgtcgatctcatacttgagccaaacatacatccattggtatccagtacaactctatgtatatcgataccgctatcaatgtaatctaataggctccataaacatgtacgctaaacatgtaaatacatatgcatatcattatactaatcttacctcacttccaaattcaggtgtgtgcggccaacctgagtggaattgttgctcgacgatttataggcccctaaatcacattattcgtaaaacgaatgagtgacatgctaaatcacttttcgaggatttaaaattgaatttaaaagttttcctatcgatggataatgtgacaataccctaaatattgcaacaataagaaaaactaggattccataaaatgccccaactggcaaactgatttcccaaccggaagaccgattctgtggggtttcctagggaccaactagaattctagttcctacaggtccccaattcgaccccaaacttcacaagaacttccaaaacacctatttataccataataaactgaaaccaagatataaatcacaacagctaactcagaaaccaaaaacaccattaaagagcaaagcttgagttcttaaactcaaaccttgctcaaacaccataatagtccacaaacccagctcaaatcaacataactaacttcaatttaacttcagaatacaaaaccaaacactatctagtatcacagaaccctaattgcaaaaacatgcaaggaaagctaacttgaaacttaaggaatcacaagggatgagcttgggagcttacataggattggaaattcaacaatttttcttaaaatgctttgaattgtgttgaagaaaaccctaaccttaactggatgctagagagagagagagag

SEQ ID NO: 269945 - DNA, 931 bp, Cannabis indica
atcttcttgggaggacaccaaggacttttcgaaccagttttgaatttgagtaagttttcccaagggcataggactcattggagatatcacacaactttgcatgaaattcagctactaactcgtcttcctccatggtcagattctcaaaagccttggccaaggctcgcaatcttgatttctttactgcatctgttccctcattttttattttcagcttctcccatgcttcctttgcaatttcacagttagcaatgacctttaactggttcgtggagacagcattaaacagagcatgtaaggcctttgagttgaagttagccctttccatttcgtctgaggtccatcggctcatgggtttagaggtaactatttcattctccattaaagttggtctagaccacccttcttcaatggacatttagactctttcatcaacacctctcaagaatgcacgcatcttcgtcttccagtatgggtagttagcaccctccaacatcgaaggtctcaaggttgatccaccttccctaaacatttccattctgcacagaagagaaaaagaaacaagcacactcttgtattgtagttctctgagaaggatctcaaagatggttagtggtgacaagatcaaaccttgaacatgtaccaagtgattatttatagaatcaagaatcagacaagtctaggatctaacacaaatttttagaaaatttcaagctctgatactaattgaaaaaactacttgtataatttacaagattcatattaccgaattggtcatgattggattggtttttttataactcatgcattcaagaattggattgagaataaagcaggaaagcacacaatgatttacaagcttcatctgcactgagaacacatctcagccaactagtgcttgggttccccgaaccagggtaataacatctac

SEQ ID NO: 269946 - DNA, 626 bp, Cannabis indica
gagtcagaactccatatcacatgatcaatgcactcagcgacttgtaacggaatctgaagaatgagacttttatctctttcattgaacaagtcatcaatcaactcaacatcccaacacctcgaacctggaaccatcaaactactcactttgacacccgaaagagcaggatgagaagagctaacaaagggattgtggggatcgggcagccaagcttcaccaacaacagtaatgttgttaccatcgccaacgcaccaccttgttcctttcgtgaccagttgttgagcctcccaaatacttctccaaacgaagcttggattatttccaagaggagcattaagataggaaccatgaggataatatcgagccttgaaaaccatggaaaccaaagagtccgttctagtgaggagacgccaaccttgttttcctaaaagagccaagttaaaatccctgagattcctgaagcccatacctccaacatctttatgcttacagagcttatcccagttcatccaatggattccaccactgttttgttttgaggatttccaccagaactttgacatcaattgttcaatctctctgctgatctctaaaggtaacaggaacacgctcatggcgtagcttgg

SEQ ID NO: 269947 - DNA, 787 bp, Cannabis indica
aatcactaaggctgaatttgtttgtgaagaaggctatagaattcaatttagaagaagagaaagaagaagaagaagtctcaaactcactagttgtctcaacaacaaaaaaactaagtcaagagttaatattttacattagttgaataatgagaccttttctttttcttttttatactaattcacttagggttagtattgaattatttggaataataaaatgatataaatggagaaaaataaggactagtggccagccgtgaaagcgggcccaatactagttagatttttgccatttttctcacccatttatctatttttcacaaatacaactttttgcaattttaatcctataaatgccaaaactatttatttaattactaaaataattatcaaataaattttcatttataatatttattaattagactcctcaaagtcttttaaataaaaagttaaccttaaaatcctatttcttcacaatcaatccatatcttactgaaaattcacaaactagacatagtctaattttagaattataattgattaactaaaagtaattaactgagttttacaagtagtttgtgtcaactagtatggggaccatggacctatataaccgagctttccaataagtagatctagaatttaccaagtaaattccctaacttattaattcctccttgtcaccactatagaatttggaatttgcactcccaattatatagaaccgctctatatgttccacgatatagagacaaacggtgagttatcaattgttataatccta

SEQ ID NO: 269948 - DNA, 1452 bp, Cannabis indica
tacacctttgtccaaaaacttattttctcttatctctaagcactaagggaactctctaggaaatagctttaaaaattattatgccttaggattttttagtaatgtgattttttgatagaaaatttctcatctcaatataagcaccttacacctctttatatagtgtttaagatatcaccattcgaaattcaaactcataacctccatgaatattatggactcaaatgtaacttatgtacacaccataactcttatagtgttagaatttgaggaataagatgaatgaggttccatcccaaaaccaattggcaatgggaggagtatcccattcatcttatatatcacaatttatttccacacattagcaatgtgggactaactctaatacaccctcctcacgtttggacctggaaagtgtgggtaacgaacgacctttaagaccacagggccgaatgtgacatttgaaagaatcccacaaggccaaatatcgggaaatttgtgggtgtacacgtcggaaaatttgtggattttgaaacaggtcaaagaccccaacactagaaattggcacacattggccaaaaggtcccaaatagaggttaaaggggagacagcagaagtatctgtttggaccggcggcactttggctcacaacggatcacaaacggcttttagaccggtggcaatttgggctcacaacggatcacaagtggctctgataccatgttagaatttgaggaataagatgaatgaggttccatcccaaaaccaattggcaatgggaggagtagcccattcatcttatatatcacaatttatttccacacattagcaatgtgggactaactctaatatatagcattaagaatttcaaattaagatatgtaacatttttttatactcttaatattggtgattaactcccccaaatattataattaaaatgatgacaactaatatataatgtcatatattacacatattagtttattatacatatttaatctatacattatattatttataaataatataacactttaaatgtttcaataaggagatctattaaggcaatctgataacttgttattgtgaaaaagtttggattggataatttttttttaaaaaaaaattctaagcccaatactttttttttttgaataacagtatccattgagaacaagcaaatacaggatacaatcacaaggttaatgtagagtttgtccacagagcttcctgttcaaggcctagagccttcttagctagagagtgagccatttcatttgcctctcttggaatgtagctaatgaaggcattagggaaatatgacagcaagctgaaaataggaattacaaatttgttgagatgaatatgatgtgtgcttttgttacaaatataatcaactaaacctttacaatctgaaactatactgtccggagcaagggaatgactatg

SEQ ID NO: 269949 - DNA, 637 bp, Cannabis indica
aaaaaaataataaaaaaagaagagtgagataaatcatatataaaaataacaaaaatagaggtgggttaatattatacattctaataatcaaatgatacccccaaacaatacaaaacccactaaaaatttagagtataaagaaaagatagagaaacaaagagcctaaaatgaaaatataaaaaaaataaaaaaaaagattaaaccaataaagctagaaacaaaaacaatgaaatataggtttggatattagatttacaaaaatgtggcatatcaaataccataaaaaatcttaaatgtgagaaaaataccatatttttgtaattttagtatcaaatctcatatttcatgtaatttttactagatgcattgcaaggcctagggccgaatctccaaataccagacgacaaaagtttgtgtgtcgtcacgtaataaagaataagaaaaacgacactgaaattaaatacaaaattacaaatagcgtaaaagaaaatgatagaaaaatttacataattaaccaaaaattaaaaaaaaaattacaaaagtacttcaacatggaatttttttttttatttttacattttgaatttttttatttaaaaaattacctcttcagcaaatataataaaccgttttttta

SEQ ID NO: 269950 - DNA, 625 bp, Cannabis indica
aactgtagaaacagaaaaataacggaaaataactaagtcatatctaatcttatcttaacatgtagttgcttgtatcgagtatttctgtaattgtgttggaaacttttctcttatgtaaaactagtttaaggataaaataacaatgagatcttatacaaatatgtaaaatgtgtttttaaaactgtaagatctttgacagatttgaaacataattatgaaggtctttttatagattttatggaagaagataatgcttttctggtttcgtttttcaattatcagtggggttggtggttttggtttaattgtgatattggaattgagcttggtttgaacgatgagaacgagtagttggattttgatgaatcgtatttctgggttgagttttgtagagaatagtattagaattagttggaaaaaagcataaattaccgtttagattttatatttagttaattagtatttttgtttcctgaacttttatctgtactaaatcatattgtcttccttttaaaaaaaaaataaataaatatcatgtcgcctaatttttttactattaaaaattgttaaaaattattgagatggttaaatttaaatacttctatataattttatttaaatttac

SEQ ID NO: 269951 - DNA, 1020 bp, Cannabis indica
agttagggtgttacaatacttaacaactccataactagaaccatctttagaacttgaaatcgaagagtcaaactccataaagggagaagtcaaagctattggtttcttagatttcctcttttcaacaagagaatattagtcaatgagaattggatgatcttccacaacttgaatattagaatcaacaaaaacacatgttgtacccatctaagtatatatataaaaaaaatagaggaaaaaatataaagtcagtcattatcaaacaactgttgggcaactaaacaaaaacggtaaaacaaccatacctcaacaccaagaccatgactctccttaatctcaaaattttcaaaatctggaacctggttaccaaaatcaccactaaacccacatgaagacatctgtttttcttttcttaaaaaaaaaataattagaaaaaaatctaatcattcacaactatttaacaaccagaaatcatcaaacaaacaacgttaccataatctcaactgctttcacacccgactgaagaggattctcaacatcaatttgagtggctccgtcattgaaatcaacaaaattcttgataattaaaaaatacaaacaaaaaaaggggaaaacaaagtttttttttttaagatttaaaaaacctaaaaacaacttcaaataaactaaaaaacaaacaattagaaaaaaaataaaaagatcatgattaaatgcaaacaccataatctataatataaccattacaaaaatataagaaatacaaattaagagtatgactattagtggtaaactaatacagaaaaaagactccaaaatataaaacaacataacaacaacataaaaatactaatccattaacttaaacatacaaagtaactaaaacctagttacattgtctaattatctaccttcttctcactatcagtgcattcatcatcactgcccttatcatcttttcctttggacttgaatctttattatcatcctcatccttcttctctccgtcactaccctcctcct

SEQ ID NO: 269952 - DNA, 573 bp, Cannabis indica
gtttttagttgttccactgttgtttttagataaatttttttgtgttccactgttgttttataaaaacacagtatttttgaaaaaatttctatgtggcagtatttttgtaaatgttaacccaaattctagtatttttgtaagggacatgattacttgaatgtaatctgcaagtggcctcactactttcttcaactatcactgaaagtaccaaaatatgtacctttatgaaaatatatatattttttatatttaggtaactcttaaataattaaagtgattttaaaactatagtagtgtaatacatttgcttagagtaattttttttttaaaaaaaatatattaaactattaaattacataaaaattaatggattacatatcatttattattcaatatactcattattatacaaaacataacttaaaaattataaaaatgatactaaaatactagaaaaatagaacatattataaaatataaaatattaataaaaagataattaatattcaaagacttagagcaatgtaaatgtattttgactttattttttaatttcatttttatttatatttt

SEQ ID NO: 269953 - DNA, 533 bp, Cannabis indica
aataggatatatagtttgtgattaacatatacacataaaggaaagcataaaatgagtctatatacatcttatatttttttccttcttaatatctagcttatatataatactttagttacgtttatttccttagtctaaaaattgttttattttagtcttttatgtgtgattaactaatgttttatccaataaatattttacttttagtaataatttttttgataattttttatttattatgaaaataattttattttaaaaattttatttatacttttcaatacatttatattgttatttgttcaagttaaaaataactttttacagctgaaatattttctcttaattaatatttgttcaaaagttaaaattttattttttattttatttgtaaaaggtgattgtcaatatcatatatgacaagttgaacactcttaattatatatatatttcgttatgttttctattgtttcattttaaaatattagaacatactatttttacatattgattttttttattttagcattttt

SEQ ID NO: 269954 - DNA, 1282 bp, Cannabis indica
tggagcttagggtgatttgggatcttgaggtagtttctatctcttgttgccttttaatgttgctgaaattgaagtgagttaagcatgtttagtgtgtttataatcttgagatgcatgttgatgatagttgggttgttctgttgttgtgagcatgctttgtgcttggattcttttgtagtttagttttggtttaggtttggaaaaagaatttaaaggattttattagtgtttttattctgttatttagctctgaaataagctgtttgaagatgttctcgatgttcttgtgatttaatggtgcatgttgatgaatatgaggtgaaatattggatgttggttattaatgttggaattgatgttattagcactttgttgtgttattttttttatctgtaagaagttaattttgggtatggtatgattgatgtacgaatttatagaaaagttggcatgttaaggccttaaaaatggagttttggggtgttctaaacccagtcgctgcgacgggatttttggccgtcgcgactgggtttggtagtgagaaagtctgtttttcttgattttgttttggccataacttttgactcgagactccatttgggacattttttatatccttggaaagctcgttccgagctctatttgattttctgtgttttgaatgccatgtttatattatgtgaaagtgaaattagggattaaccctattagtaaaatcccgggttgtgtgactaggattaccggcacttgatcaggagaacccaggggtttggaatctctgttagtgcgggaaaataggtaagaaagtagtttgcacgtagagtatgcgcggtggcgcttatgttgaatatgatatatgtaagtaattgtaaccgggattagggttattactctaatatgagcggttaatagcctagggttataaccctagtgatataagttgagtaaatgctatgccatgctaagtatatgattatattgagatttaagggttatgcgttcaaggcataatcaggttggactcggtaaccataaccgagatgaatcattctaaggccttattgtatttagacgtgtgagagcaacacgtaggtctatgccacgtagacataaatagacgtgtgagagtaacacgtaggtttacgtcacattaacataaacaggcatgtgagcccaacatgtaggtctgtgacacacagacagatttaaatggcattactgtttatattatatgatgagtatattattgttattttttatattgtcttgttgggcttggctc

SEQ ID NO: 269955 - DNA, 1032 bp, Cannabis indica
aatgtcctgaaaagaacataacacttatccaaggtgtaagtgtaccttatcgctgattatcacatcagtgtaaatccagcgcactgatgaatcaagggacattattttttgaagcatataatcacaatttcattccacgttttgacatcactgtaattgtgaataactatatgttctggacttaatagattttatacacattaaaccataaacatgaaaactatatgtaaacataaatgatttctaacttctattgataacaaattagattctatttaaatgggttttatttagggcataaaatcccaacaaaatattgttgcattagtctttgaaataactggtcttcaatgtctaatctcatttgttgtggtaagtaaactgtattgcacttttacatgctttttagttgaacactgcgtggcaagtgaagaagtggtcccacagaagctatataattacgaagggaaactcctcttcacttttcacttttcattctttcactagaaaaagaaaattttaaaagctcctccttctctctagaggtcgaagcctacatcgctccatctctcgggatttgtgcaccattttgacgatccaaattgttgacctcaaaaagtgatcaaccaacaacggggtcgtatagatctgatgcttgccacgtgtttgcacaaataagaatgaaaggtaataaatacatagatttgttatagaggttcgacccccttgtgatagcgggtaatgacctagtctccttttagttgtattaatgaccgtgagaaatacaatgtatgatcaagaatggcgaaactcaagtgtaaagatcatgcttgtgtgggcatgtgagagaggaagtgaagaagagagaagttgtcaaacttcggcttagagcttggaggtaagtgttaggcttaactgagcttaggctttctaggttagagttaaggcctttatataggaggccgaaaccctagattaccacttgaaaccctagatatttgtatgttttattagttaattacaaagaccaaa

SEQ ID NO: 269956 - DNA, 830 bp, Cannabis indica
gtggatgttggttctataaaaaactatatttttaatatttataaattcataacagagtggacataagtaaagctatatttttttgaatggatattaaagctatattaaaaacttattacaaagaagggagaaaagattagccaagaaaagttgtttatttccttttcctttcttaaaggtttaacctttgagttgattccttttttttttttatcagaagggggttaggagaagaaaggagaaggcttcgctgttacagtaaaaaaaaagagaagaaagaagaacaggagaagaagaggaggagcaagaagaaaaagaaaatagggaagaatgtaaacttagacgtatgatcagagggtttttgtggacgtaagttctattaaaaactatatttttaatatataaatatatataaattcataacagagtagacataattaaagctatatttttttgaatgaacagttaaattatattaaaaatttattacaaggaagatagaaaagattactttgaaagtcaaggaaatttgtttctttacttttccttccttaatggtttcagctttgagctgattgttttttttttttcttttttttattcgtaaaaggattaaggagaagaaaggagaaaacttcagtgttacagtaaagaaaaagagaaaaaaaaaatgaagaacaacatgggaaaaactaggagaagaaagaagaagaaggaagaacaggagaagaattgtagactaggaagcaattatataaagccaaattagtatggtgtacattgatgcctagcaatatataatctatagacaatagactgtatgctgaaac

SEQ ID NO: 269957 - DNA, 928 bp, Cannabis indica
aacttcagggaagacagtattttctagattgacttgagatctgggtattatcaattgagaatctcggaggaagatattctgaagacagcctttcataccaggtacggtcattatgaattccttgttatgtcattcggattgacaaatgctccggaagcctttatggatctcattaatagagtattcacggattttcttgatagttttgtaattgtatttatcgatgatattcttgtgtactctgggtcagaagcagaacacgaacagcatcttcgaatggtactgcaatgacttagagatcataaactctatgcgaagttcaaaaagtgtgagttttggctgtcacaagtatccttcccggggcatattgtcagaaaagacgggattatggtagacccagggaagattgaagcagtgaagaattggcctagaccaaaaacagtcactgaagttcgaagttttctcagtttagtgggttactatcggcgttttgtggaagctttttccaaaattgcaatgccgttatccgagttaaccagtaagaaccaacggtttatatggtccgataagtgtgaggaaagtttccaagagctaaaacaacggctgatcacagctcctgttttagccttaccatctgatcaagaaaaatttgtggtgtattgtgatgcatcaaggcagggtttgggctgtgtgttaatgcatgcagataaagtcatagcttatgcttcacgacaactgaaagattatgagcagcgctatctaacccatgatctggaacttgcagcagtggtgtttgccctgaaaatttggcgacactacttatacggtgaacggtgtgagatctatactgaccacaaaagtattaagtgctttttcactcagaaggatctgaacatgagacaaaggaggtggttagagctagtgaagg

SEQ ID NO: 269958 - DNA, 407 bp, Cannabis indica
aaaataatttccaacacttaccttgctagcacaagcaagtatgcccctcaaatattggtgcgatgcctttcacacttcactctatttaataaataggcttcccacacctttacagcactagaaatgaccttatgaaacattgttttctcgaaaacccgattatgcatttctgaaaaacctttggtgcaacgtgttttccgtgccttcgtccttaccaatcccacaaattctagttccacttatcaaatgcgtcaatctcggttatagtgactcctacaaaggctataaatgccttagtcccactggccgcatatacatctctcgagatgtagttttcaacgaattggagtttcccctcaaaacttgtttatgaacaattataccactccacaacctgtcataattca

SEQ ID NO: 269959 - DNA, 1082 bp, Cannabis indica
ttagcagattcgtgtcaaaatcaacggataaatgtgttccattcttcaacatcctgcggggaaacaaaaagttcgagtggatagaagaatgtgaaagagcttttcaagatctaatggcacagctcccaaaacctcctgtcctttctaaacctctggacgctgaggaattggggatatacctagcagtaacggagcatgccgtgagtgccgtactgatcagagaagaggacagcgtgcaacatccagtctattacatcagtaaaagactcatcgaggccgaaggctgataaccgttgatagaaaagctcgcctactgcctcattctagcaacaagaaagctgaggccttactttcaagctcatcttgttcgagtgtataccgaccaaacactatgacaaatactgcagaagttagatgcctttggacggtttctcaagttggcggtagaattgggtcagtacaaaatcaatttccaaccccgaacagctatcaaaggccaagccttgcacaggcaaaacagaaagcataccagaaagcgatctcgagccaataccacagccaagtaatattgaagacaaaccgacctggaagctacatgtggatgggtcggcaacagatcaattatctggtgcaggaattgcccttgtcacacctaggtggcaacacatgcacgcagtgattaaattcggattcaaagcctctaacaacgaagccgaatacgaagccctaatcgctggacttaaactagcaaaggaaatgaagggcgaacacattgagatctgcagtgattcacaactggtggtaaatcatctatctggcaaatacgaggctcggggagaaaagatgatagcaaatttgagcaaaatacatgatctgctcgcacaattcaaaagctatagcctcagacaaattccaagggaagaaaatacaacgcagatgcattagcttgattggcaagcagcaatataagtgacaaggcaaacctggtccctttccagttccttgaagagcctagcatcactggcacggaagaaatcgaaatgatcgacacatctccaaactggatgacgctaatagcagcc

SEQ ID NO: 269960 - DNA, 591 bp, Cannabis indica
tttttttttttgaaaaaaaagtaatttatataattttgtattatcattattttgtgtacaatagaagcacacgataaaaatatatttaattaattaattgaaaaaccaacccaggccacgcgccttaacaaccacaacgatacaacctacacctataacctaactcaataataaaaaaaaataaattaaaaaaaaaaaacagatttcttttcgttttattttaaatttaaaaaaattaaaaaaaaaaaaaagaatacttaaacctctttggtctctataaatacccctaaaaccacacactgcttctacaacaaaccaaaaccaaaacacagaaaattctcgaagcttccaaatttcccaaaccctttcttactttcttcacatattttctttaatggcgggtcttcagtacaacttcttccctaccgatttcttctaccctcgtccagcctccacctccactgcaaccgcagaaccacttcctacatcagtcgtacagatcagaagacctgacgtcatcaccaccgacgatattaatattcccttccacccgccgatggccacaaccgcctcagtttgcagcaactgaag

SEQ ID NO: 269961 - DNA, 537 bp, Cannabis indica
aaaaagtttggtcagggagttataacagttcgactcctctttcgtacaaaggtaggtttagtcgaagtaacctttagtaatttaacaaaaaaaatttcgtcttttaggaaatggggggttggcattataccatgtatttccagatgaattacggctaatcattcataaatgccccttaagtaatttttaaagaataaaaatttgtaattacttaatataaatgattccctttattcataactgatgtttagattttacatcagtaatgcgagttacatcatttatttattggtagtagggttgcaaatgttccacgttccagttattctttattagcgagccgtaaagtcgagcaaatttataaactccaactccaactactacttcgatgacatatggaccctcccaattcggattgaacactcttgcagatgcacctcttgtattaatttgcaaatactcgtcttagcaccaagtctccaacattgaatagtcttttcttgacttttttgttgaagtatcttgtgactcggtgtt

SEQ ID NO: 269962 - DNA, 812 bp, Cannabis indica
attgaatccgtcagggattggccgagaccaaagacaattacataagttagaagtttcctgggtttcgctggttattactgtcagtttgtagagggattttctaagatttcaacgccaccaagctcactaaaaagaattagcagtttgtgtggacgaacaagtgtgaagcaagctttctggagctaaaacagagattaatcacggttctagtgttagccctatgccatcacctatgcctctcgtcagttgaaagaatatgaacaacgatacccgactcatgatctagaacttaccgcagtagtatttgctttgaaaatttgacaacattatctctacgtagagaaatgtgaaataaatactgaccataagagcctcaaatatttctttactcataaagatttgaatatgagacaaaggcgttggttagagttggttaaggattatgactgtgaaatcctttaccatcatgggaaagccaatgtagtggctgatgccttgagcaggaagggtctcaggcaagtaactagtatgattaagatttcacctcagttagttgaagacatggttaggtcaagcattgagtttattgtaggtaaacttcataacttgaccctgcaatctgatctgttagaacgaattaaagctgctcagttaactaatccataattagggaagatcagagaggaggttttagttgatcaagccaaagattttacagtgtcagataatgagatgttgttgtttaagaccagggtttgtattcctagtagtgcgaaacttaaaaacaaaattctcgaagaagctcataccac

SEQ ID NO: 269963 - DNA, 469 bp, Cannabis indica
attttttttttgccttttctaggtttttttgcatgtgatcgtgggatgagatgaggaagaaagtggagataaaaggatgatacttgtcgacggtaaacctccaccaccgagaagggtgggtgatgaatcgtagaatttttttttatatatatatttttctttaataaaaggaattggagaaccattgtggacttaatttgccctctttgtaacattgaagctgagaccatttttcatttggttgggtgtggcaatgctcgttcctgttggaacatttcgagtgttgttgttaaaatagtgttgtcccgtttaggcgagagtcaaggcaattctatgttatgagcttccaccattgtttcatactcttgtaagtcttatacagtcgccaccattagggtgatcaaaactaatataaaaaacttataagaatacttatctttcgagattaaacggtgctaacttgctaatg

SEQ ID NO: 269964 - DNA, 685 bp, Cannabis indica
ttattaaatattatattacatattattattattaacttttaactctttatatatatatatatatattatatgttttaaaacataaaaaaacgaagatgaaatcatcggttcgacggaaaaccttatccctctctattcattttctttgattttgaacttaaaacctagcgattcaagcttcggtagtagcgggatagaaaatcattgaagagggagagcttaaggcaaggatttgtttcattttaagttgaatacgattagttttatatagtgattcgatgatttaaaatagttacggagattctgaccatatagaattttttcttgggtagttatagaactagtttttgtgtttacttgttgaatttgaggggattttgagttagaaattgagttttgaactttttaaatcctagtacgaatgtttgcagatgctttctttggaaagggtagagtcacatggatggtttaggaaatgtagcttgggacacagtttgcaaataaaaaacagcaaaaggcttgggatttttgaacatatcagactggaacatagcatctatcataaagcatgtgttgtcaataaccaataagaaggacaatctatggatcaaatgaatacacactgtatatatcaagcaaactaattggtggggttacattaatgctccatccaacaatagctggt

SEQ ID NO: 269965 - DNA, 556 bp, Cannabis indica
gacgttcttttatatgttacctcggtaatgtctccacttcaagcctctattgttccaacgagatgatgactcttatacacaagtgcaccgctctagttgtttcccggactgacgattggcccccacagaccaatccaaatgtttccaacgtgatttgctctgacctcacacgcttcatggggaaatttcctaaatgaaatcacccaaagtcaaggacactcaaccatggagttccttcattgtgggctaccaaaacaagatgcttcttgctaacataggtagtcccatgcctacattatctcgaaattactacacaattgtcgccttcaattcacctagaattccaaacaatactcataaattgtcccacctttgctaatgctaaatcactcctaaacaaaagattttgttatttgaatcaattagatcaatgcctccattaactactcgtgtcctatatttcacttgggaatactagcaaatttaactcatattgtcatttctccaatttatctatcccgtcaaatgggttaccactaaataacatgcagacata

SEQ ID NO: 269966 - DNA, 857 bp, Cannabis indica
cacccgaacactgatagatgtcgccgttgggggagctttcatgaggaaaagtgctaatgaggcctttgaattacttgaagagatggccataactaatcaacattggtcaatagagagaggctcaactaaaaaggttgcagaaatgcatgaagttgatgcaatgaccaagttgacagcccaggtagaggcattaacaaagctagtgactgcacaagccaaacaagctcaagttgtctgtaagctgtgtggaggatctcatgccactgacacctgccctatagatgtcgacagttttccaatggagcaagcccacgccattagaaactatcagaataattgtggtcgtcagcagaacttctagaagcagttttatcctcaacaaaatcaatctcagcaaagccaacaacatccacaacaacaacaagcctctagtggaggttctaatcctcaattggacacgttactgcaattcatgacggagattaagtcttccattaaggtcttggaaactcaggtggggcagttggctgctcaaaacactaacagggctcaaggtaacttgtctagtactactgaagtaaatccaaaagataattgtaatgcaattaccttgagaagtgggaagacttatgctgggccaaaccaagataagccaatggaggaagaagagggagaaccagcagcaacacaagagaagaagaagactactgacggtcttcaacaacaagaaacaccacctcccatcagcattgatcatcacatcaaaattccttatcctcaaaaacttcacaagaataagatggataagcagttttcaaaattcctgaaatatttaagaaactgcacatcaatatccc

SEQ ID NO: 269967 - DNA, 549 bp, Cannabis indica
agaggggtcgaatcgttataacgccttgataaaaccttttttacgagaaagggatcaaacaactgtaatttttgatttataacctaaggaaaatcaaaagtcatgactagtgcataaagctgaatactaacggctcgcgctaagggaaagtattaaacgagacatccaaatgttttgaaaaaaatacttaaacccaacacgtgcgtagaaaatttaactactcatgtaagcaataaaaatatatacaagatgacaagtttattaaaaatatatttgaattttcttaaaataagatcatttccgatgatcgcagggtggaatcgatgatggctcgcagattgaggaacgagcagataagctgcttgcgcatgtaaagtagaaaattggttacttaacatcgggggaaaggacaagcaatggaaacccctaataaactttatgcatgtgatagtttatattgtgaataaaacgcaagccaacatccgcatattaaaaactgcgaggcattaaaaagcaaagttttccatccaaccttgaaaatttgtcttt

SEQ ID NO: 269968 - DNA, 371 bp, Cannabis indica
tattctcattctcatttcccatttcccattcctatattttcacttcctcccaaccaaacgcctcctaaaatcttatcacgcccctctctctctaagtctctatcgtattctctctctcacttcacttcgtccctctttgctgcccagcgattgacgacgacgacggtagactcgctcgttgtccagcaatttgacgacgacagaaacggcagcattttctcccctactcgctgacgacgacggtcatctcctccctaggtcaccgacgacatctgaccagcgacggaagctacacaactcgtctctccccaacgacgacacatcttctccctcacaaacgataactgttagacttttatttgggcttacat

SEQ ID NO: 269969 - DNA, 617 bp, Cannabis indica
gcaggggttccaccagccacaaatccttaacaactgccaatcgtaggtcagggtgtgacgactccgttgagtggaatcgcgcctggtgtgcaagagactagaaataccagttcaacacccaatcagggtattcccaatgctggagtttcgcaagcatcaaatgtctgaacaacctttggagatgacaccgagatccagaacctccatgctgctcttggactaatgtaaggtcacagtaatacctagcatcatgatcaggagaagctctgtgctgcggtaaatcttacattggaagagcaaaggcgtctattcgctgaatggatggataaagaggtggaaacgtcgaaggcttagcaagcagcctttgacgaccgaacaagaaaggcgaccgtgctgatatgaagagcctatcaggctactaatcagcaacagacgaccgtggtgatatgaagagcctatccctctggggggagtcagacaaagatccagccgtgaatgtttctcaaaccctgaatggtcagctggccaatccccgggccacaggtttcgcctgtgggccaagtggtaggcagactgaccttatcgagtaattcgtcaagagaggtcatacctaataa

SEQ ID NO: 269970 - DNA, 652 bp, Cannabis indica
tttgctgaagccttggaacaaatgcctagctatgtgaagtttatgaaggagatcttgtcgaagaagagaaaaatggaagactatgagacagtggcattgaccaagggttgtagcgccatactgtagaagaaacttcctcccaaactcaaagatcctgggagtttcaccgttccttgcaccatcgggagaatagaagggataaatgcattatgtgacttaggagccagcattaacttaatgctcctgtcggtgtttagaagattgcagttgggtgaggcaaagccaactactgttaccgtgtaactagctgatcgatcactagctcatccaaggggagtcattgaggatgtattagtaaaagttgataagttcatcttcccagttgactttattgttctggatatggaagaagatagaaatgtcacaattattcttgggagaccattcttggcaaatggtcaagcattgattgatgttcataagggtgaattgaagctacgagtgcaaggggaagaagtggtcttcaatgtactaaaggcgatgaattttccaagggtaagtgataactatttctttgttgatctgattgatactattgtcgagaagaaaaatttgatagaaaatcctttagagttgagcttaactgaggatg

SEQ ID NO: 269971 - DNA, 615 bp, Cannabis indica
tttttaaattaaaataattaagtttcgatattaaattatatcaataacgatattatactaaagccaattctaaggagactccatatatggagtgagcttcttctccaaagaaatactataatgtacactaatttgaggttaatgcaacaatgcacgacatatatattgtgcgtagatataatattatatatatttaattaatatttatattatttgatgtataagaatttgtgtttgagaaattttacaatatatttttttaaagtgttgtattgaagtattcctatttgtttcgacatccgataatttttttgtctaatttttttatagtcatgtatattataattatttaaaatatcctacaaaattttaaaaaatttagaaaaaatttaacacgccgaaaataatgtacctctttaaaagtaatacactcatatactcttacctgtttcgacattcgagagacttctttagtatattttttgcatggtcgtgtacattataattatgtaaaacatcttgtaaaattttgaaaattttaaaaaaatttaacaagccaaaaataaaattcaaattgtctattgcacttgtgactcttttatttagatatattaa

SEQ ID NO: 269972 - DNA, 531 bp, Cannabis indica
atatttttggccttcaatcgggtatctagagtcgccgaacttgagaatatttttatttcataaataactgatattatatcaacgtatttcaaataaatctttgtaattaacaaactatgcttatttatctacttaacggatctctagagtcaccaaatctgaaaatatttttattacacatatagctcatattacattcacacaggctatataaatctctgtaatttataaattacacttatttactcacttatagcaaaatttaaattttatgctgaaatagattagtaggatcataatcccacttattacttgattaactcataatatatataaactctaattatttaccattaggcttatcgggatattgcaccatgcctccacacttgttggcaggacatagagacaagccaataactagtagcatacattcgacctttgtctctttccagcatggtgcatctattccatgcgcatatgcaaactagcccacgaatcactacctatgtcatgtcgtgttgagactca

SEQ ID NO: 269973 - DNA, 529 bp, Cannabis indica
ttcatataggggttccatccgattcactagagctacaggttttgcctgcacagcaggcgtaggagctattggtatttccggaacaggaattgcaggagcgccctgctgtctcaatcgccgaatctctttatcttgttcattaatcctggcttgcatttctgcaaacctgttttcccaatcctgggcagcttgggcagcctgtggcgggttagcatcaccccggctaggggtgcacaaaatacgggccgggccgaccataccggccaacccaacccattttttttgttaaagggttatgtaaatatgggctgtacttcattggtttgaaaaatgatgggtcgtttaaatatggtttggttatgggtttagaaaatttaagtctacacaacccaacccagcccgttctctcatattacttctctgtatatattatatatataattaacttttattttatatgttgaatgttggagtcaaatagtcaatcacagcaaaagaaaaaatcgtagaaataattttcatttattaa

SEQ ID NO: 269974 - DNA, 733 bp, Cannabis indica
gtcgtagactcttgaatgataagtattattgtaagtcttttattcttagtaacgatcaccccaatagtggctgctaagagtgggacttacaaagtatgaaataatggtggaagctcataagatagaatgaccttgactctcgcctaaacgggacaacgccgaattctcatcttgatcgaataaatagttgctaaaatggtgtccattttagatgagctgacaattctattgactagtaatatatttgactctcgcctaaacgggacactgatagcattgagttgaaaacattagaaattatttaggatatatttatttttgtattttcacatatcattcctacttcctaaatgcttaataatttctgaatgtgtatgattttgtattggtaccttattttgattttctatttattgatatttgtagttttcaatatgactatgaacaacccaattgtatcactgttgactaacaataagctctctagagctaactttatcaaataaaaagagaatattaatattgctctcataagtgaaaactcaatgtttgtgttaactaaagaagctcctgagcaactaggtaagaatgcaaccaaggcagttaaggaaaacttcgagcattagtagaatgctaataataaagctcgataatttatgctgtctagcatgcttgatacattaaaacaaggtttgtaaacactctcatgactgcagaaatcatgaaccaatta

SEQ ID NO: 269975 - DNA, 1028 bp, Cannabis indica
catgttccttttatagtgtttcaactaaggcttagggttgaattatatggattaaaaaagaataaaaaattgggcaaaaatcacttatggccgtacacaatagtggatccatctctagttagatttttgccactttattcaactacttattcttcttttcaataataccatattttccaattcaaagctataaatgccaaagctatttatttaataattataattaattactaaataaaattttcatatatgtaatttattaattagaccatacaaagtcccttaattaacaaattgaccccaaaacttcttttcttcacaattaagcccttgcttagtaaaaattcataaataagacatagtctaattttagaattctaattgattaattaaaatcaattgactgattctgtaagcagtattagctcaactagtgaggggatcatgggcttatataaccgagctttcaataagtagatttagaattcaccaagtaaattctcaacttattaattacgcattgctccactagagatttggaattgaatacactcttggttatatagaacgctctatatgtaccacgatatagatacgttatgattatttattgttacaatcctaatagtcaaggatcctctatagacgatctacattgaataggaaaaaatttaccgttctaccctacaatgtattttatccttaaaacacttcgcaatgatacttcaataaacgaatataattactgaaatgagacctcaatcatttatctctattcagccaagctcgaaggaaatcattgtttcacttctaaaaacttatagaagctatagattccatatctacgtttagcgctcccactcaattgaactaccatgttcccaagatgtaagtatccaccagaaccaaaagttagcttccacgaacaagttaaagaacataaataataaaactaagttgaacctaacgatattaggattaagatccatcgatctaagatcaaccattgatattgacttagaaagata

SEQ ID NO: 269976 - DNA, 660 bp, Cannabis indica
tgtaataatgaataaaaataaataacacgaaataactcagaccgattataattaaaatagaaccagttctataacataatgaatacaaacaaataacacaaaataactcacactgattataattaaaaaaatagagagaaaatcagttcctaaaacactattacataaattaaaaaccaaactagtttaacaacaaattgagtaaaagcgaatatagcacataatacataagaaatcggttataattggaaaaaaaaggtgggaatcaatttcaaaaatacagaggcataaatctaaacatatgcggttccataacaaaataagtaaaaacaaataatacacagtaactcaaaatataagataaagaaccatgttatatttatcaattagttaaaaatatgtgataaaaaactggttctgtaaagaaactaaaataaaaacttacacacaaataccagttaaataaatgaataaatcaaaagtcagtttttcttgaattaacaaaatcaaaagtcgatttccaaaataactaaattgaaaaccgattccttaaattaattaaatcaaaaaccagtttttgaaataaataatttaagaactattttttgaaatgactaaatcaaaaattaactgggacataaattaaaatagaactagttc

SEQ ID NO: 269977 - DNA, 828 bp, Cannabis indica
gacttgaagattaccacttcacatgacactctgtacaagaaagtggtagagctagccttgattgctgaagaggctgagccgcatgttgcgaaagagaagactgtaaaggatgtcgttacggcatcaaatcctcctcctagtggtaatgtcagtaaggggaccgacagtggcaaccctgatcacaaacggaaggctgaggcttccggagcatcagggggaaatagaaagtttcggggaaacagaggtggccgtcagggccgcgggtcctcattccgatcatatcccgagtgtcccgaatgcaagaaacaccatcctggtgagtgtcgagtcaaggcatgtttctagtgtggcgtggtgggccactttatcagaaattgccctcaggctaagaaagaggagcctaagaagaatactacacaaaacccagggcgacttttcaccatgactcaggctgacgctgatgctagtccgtcagttgtgacatgtcagttctctataatggttgttcttatactgtgttgtttgatttgggagccactcactcttatgtctcaagtagagtgatagaaagtttccataagtcatgtgatatttatgcttcggggtttggaaccctgttacccttgggagaccttgttgtatccactaggtggattcggtctttgtccttttggattgacggttgtgaattgaccgcaaatctgattgagttgcaactgtctgattttgatatgatcttgggaatggattttctgtctaagtatggggcaacgatcgactgtaagcagaagatggtgtgtttgagcccgatagtgctaacccagtggt

SEQ ID NO: 269978 - DNA, 671 bp, Cannabis indica
tcattgagatattgagaatttgtttttttaattctcaataaatatattacgatttttttattgttaatcacactcatttgaatcaggtaattatttatatctttctgtttactatctgtttgttatatttggtaattgtttggaattgaatgagtttggtaagtgtttacagattttgaatcttctccaaattattacttacaaaattaaactttgcacttactttcaatcattgaattattacactttctttaacattgtggttttgaaatattctgttatagttaagctagatttgatttttttgtacacagaaaaatatcctgatgaacctcgacttttaaatcttacaaagtacattctgactgctcaagttatgtttattctaatattataaattttgtaatctagaggggtaagtccaaacgatctgacctatggtatgttcccacaaggtctgagattgagtagtacctacacagatattatagttcatctctcctcaattgttataaggtttggcaaatagccctaattgaaaaaataataattaattttgtaagaatacttttaactttgttatttatcatatagatagtatatgattaattgagttgcttaagggggagaacccatgcttcctaaaaaaatatacaaaagtttcacgtcaa

SEQ ID NO: 269979 - DNA, 523 bp, Cannabis indica
tttatccattagacggttatgctgactaggaagattgcatctcgtcaaacatgagttctccttcttatctatcttaataaaaaaaaatactaagtgttagaggcacgtcatctcgctgtatccctatatttgtattagtgatgcacaatgatctccatgttatgagtaacatgaggcggttgagtgtcctaagtttttcttttcttatgagagagttaatgattcacgaggtccttaaatatcttgtcttgaacattttattactatgtctatccaaggcaaacatatgttccatcaattattagttttgtagttattattcttgtctcgcataagactaaacagtaagcaagtttgaacatctctattaaacatatatttaattcaaacgagttatttttattgcatttaatgttacaatgtccttattatattcattgaattggttcacattctttctataggacacgtgtcagcttttggtatatagccgaatttctggtaaaataattgcctcctaaaa

SEQ ID NO: 269980 - DNA, 848 bp, Cannabis indica
tggatcaacacagctggtatcggatttttcccataaagggatctcaactagcaggcttctaagctaacctgcttcttcactagcagaggctagtgctatcatttcagactccatggtggactacgctaaaatagtctgtttctttgacttccaagaaacagcgccaccagctatgctaaaagtatagccacttgtagctttggagtcatctaacaaagtgttccagtctgcatcactgtatccttcaaagagagctggatacctttgatagtgtaatccaaggttcatggttctatcaaggtatctccttaccctctcaatagcatgtcaatgctctatactaggcctactagtaaacctgcatatcccacgacataggcaatgtcgagtctcgtacaatcagtggcatatcgatgactgccaataatgctcgcatagttagattgtctcacactatcactagtgttattgaatagctttacacttggatcatatcgtgtgcaagcaggtttacagtcaaagtaattatatttcttgagaatcttctcaatgtaatgagattgatccaaagaaattcccttttcagacctagtaatcttaataccaaggattacatcagcttctccgaggtccttcatatcaaagttagcacataatagtgatttcacaacattcacagcatggatatttgaaccaaatataagcagatcatccacatataagcatataatagtgcaaatgttgtaacgtccccgcttcaagcctccattgggccctcacacccacgaactaatggctcttatacacgagtacgccactctggctgcttcctggattgatgactgacc

SEQ ID NO: 269981 - DNA, 522 bp, Cannabis indica
atcaaaagttgactaaagaacaaaagggtaagggtgttttggctcattcctctcacgatgagatttcttttagccaagcactacaacatacttttgagccacttatcaaagcacaaaaagccaaaacttggaagagagtcacttcttcggctagccgtgggtctaaaggtgtgtccaagccatcttctttccccattagtcctaaattatcacatgttatggttgctaatgctaaatacaagttgagtccgaaggtcaatggtggtgggaagcgcaaaatggatgtagagggtgctactgaaagtgtgaaaaaaggaagattgggtgaggaagtggacatgggtccagaagacatgaacatgttattggcgaagcctgcggagcaggctcgccaggagccatgagtctgctatgttggaacgcccggggattggggaatcctggtgcgttgactgccttgcgaacgattgttcgtaagttttacccaagtttagtttttttatctgaaactaaactttatgg

SEQ ID NO: 269982 - DNA, 1003 bp, Cannabis indica
tatagtccatattatgactatcttagcggattaggaaatagtcttcattattgaattattgtatctcattttatctttgaaggttcatatcaatgttattacttttccgtttaatgtgtttggtgtgtttaattttaatttttatgctcaagtttgtaatatttttattatgtactattaattgtgctttaattttataatgtttggttgtgcaatataaagtatgtgtactcttgattaataagaatatgatgtctagtgtgtctaattttaattttaatatgtggttaaatttgtattatttttgtgtgtaatttttttaaaaaataaaaaaatataataaatttttacttaaatcataattaaaaataaaaatatttatggttttcacatttaaatttacacaaaaaatattataaggtgtttttacaatgcaaccctctaaataaaagagacgcgataaaaagtttaaattttattttcggtgtgttaaattttttaaaattttacagaatgttttaaataactataatgtacacgaccatgaaaagacaaagactaaacaagtctctcgaataccgaaacaagctggagtatataagtacgctacttttaaagaagtttattattttttgcgtgttaaatttttttaaatttcacaaaattttacaggatgtcttaaataactataatatacacaactatattaaaaatagactaaaaaaatttgtcaggtaccgaaataaataaaaatagatttgtacatcactttttaaaatatacattgtaaaattttccaaaaataaattcttaattttataaatataaatatataaatattaattaaatatataaaaaatatgaatacatgccgtgtgattgcacttttttttattgggtaattatcccatatactattttttttaacatttttttaaaaatttagggttgggtttctaaagtggtttttttctggtggtttctattgttggaaattatttta

SEQ ID NO: 269983 - DNA, 728 bp, Cannabis indica
gcattacaggtgtaatggaaaaataatagtaatggtaatagaatgggtatggtaatggtaattaaggataaataccattttggatactgtgttttgtaaaagttatcaattggatcctctgttttcttaaatgataaaatagaccctgtattttctaaaatagtacaaataggaacctccacaatttttaacatttaataacattaaaattaaagtactgcgccagccccctaacatgcagcccacgcctcgagctcttcaatctcattgtttagtcttatccttacttggacacagagtacccgtgagctaacgcctagtaaaaagagctatgtaggacataacccttctaactagatacttgacataagttactcttaatactaattaacaataatttacattccataaaatatattcacaatgcatgttattctcacatgcataaatcaaagtctcataccgcacattatacttacatataataatcaactatacactcatgtttatcaaacatgaggtaactattgggttttgtaccctaaataaaacccattttaatataatcagatttactgattaataaagatcagaaatcacattctatgttgcatggttcacatgatttatttcatgattgtatttaatgtataaattctattaagtccagaacatatgtatttcttcgtgattataatgttgtcagcacagtggaatataatcatgat

SEQ ID NO: 269984 - DNA, 657 bp, Cannabis indica
tgattaatttaattagtgttgggaagataagggataaatagagtatgtgtaagagtattggaaaaaataaatgtttgtttggatggaaaaatagtgaaaagatagggtaaaaataaaataggaatgttaatttaggtgagaataattgggaaaataaaattgatatgtaagtgtaaagtgtgggagaaaatatggatttttggcattttctaagtaatttttgaatgtgaataattcaactaacagctcattttttccttctttttgtttcttctgcagatgccacatggcgacggttggatggctggagcactggaagttggtgatctaggatcgtctggttcgttggtggagctgacggggcaggcctgcgttgcacgcgtggcgaaaagaggagggggaccagctgcttcgtgggtcccatgcggaaggaggttggcaggcttcactttagggatgtaaattatacccgcgggtacccgtcccttatggggcgagtacgggggttgactttcggggccggggcaggtatgggtttaaagattcatacgtgagtcaaaaacgaggcagtgcggggaaatagatacccgccacgaacctgccccgatatgatgtatgtatagatttaattttaaaatcataactactacaattaaa

SEQ ID NO: 269985 - DNA, 869 bp, Cannabis indica
aaatacattgaagggtagaatgataaatttctccttactcgatgtagatcatctatagaggatctttgactattaggcttgtaataatggataatcataacgtatctatatcttggtacatatagagaattctatataattgagagtgcaattttaaatctatagtggcgcaaggaagaattaataagttagagaatttactttgtaaattctagttctacttgttggaagctcgactatataggcccatggtcccctcactagttgagataatactgcttgcatactcagttaattggttttaattaatcaattataattctaaaatagactatgtcttatttatgaatttttactaagaaagggcgtaattgtgaagaaaagaggttttggggtctatttgttgattaagagactttgtatggtctaattaataaataatataaatgaaaattttatttgataattaattataactattaaataaatagttttggcatttatacgattgaaattagaataagtggttgaaataaagtggcaaaattgtaactagagagtagtccactttatggccagccctagaagttatttttgcccaatattttattcttctttaatcaatataattcagtcttaaggcgtagttgaaacagtatataaagaacatgatgctctcatctcatccacttgaaacactattcactcaaacaaaacttaaatctagttttcattctctgagaactagtagatgagagagttccttcacgagtaattttaatctccttcattgttcttcaccattagaacccttgagtgatagagtgccatgcccacacatagaagttcaagtactcaatcatagtgag

SEQ ID NO: 269986 - DNA, 771 bp, Cannabis indica
attcggttaatgggagttgaaaaaaatttgaagaacaaaaagaagagagaaaatggagttgggattgtggagaagaaagagttcagctatagaggttgatattttttttaaaaaaaaactaaaaagaaatagaaaataaaaggaaaagaagagaaaaagagagggaaataatagatggttgattgatagatgtcatagtctactgatgtgtagtgatgtatgcatgaaatgtgtgtgcaagtagtaaaattgtaataaaataaagttgaagagttaaaatgtagacttaaccgtgtgttggtattttagtaataaagtatgtattttgtatttttagtgtaaaaatttcttaaaaaaatttaatataattaaagatattaattttaaataaaataaaaattattaaaatagggtgtctttaaaaatatttgaggtgtaaataaaatttcctaaaatgacgggcttcatttttttttgtataattatttacttttttttttaaatacaaaatgtgaaaataaagaataattggaaatgaataaaaccaaaaataaatcaaattttatcttcaaatctcccccgtaagagcaaacactcatctgtttcaaaaaaaaaaaaaaaaaaaaaacgaaaaaaagaaacaaacaactcacattagggcaaacattatgataaaaaaaaaaatttagaaatgggaaaaataaatagaaatgaagtctaaaaacttaatattccatgtatggtaaaaactaaactataaactaataaacg

SEQ ID NO: 269987 - DNA, 619 bp, Cannabis indica
attaatttttttttaatataaaaattgctgttcaaaattattattcttatccctcaactttaaataacactaaatttatctctttttatttaaaaaattaaaattaaaattttctattaattttagaaattaaaaaaaaaacctcaatattaaattaataaaaaatatatttaatttacttgaaacacctaaattattcttataaaaaaatattttcaaacttcattttatttataaacacatattttaaaaaattaaaccaaaatttattgaagaatcaataaataatttaaacaaaataaaaaaaaaaattccaagagaaaatcaaacttgtttatatttacacaaacttatatcttcaaaaaataaaaataaaaaataattagatattcactaaaaatatatatttttaaaaaataaaaattaaactaaaaaatatattaggtgcacctaaagaaattcagatttttggaaaaaaaaatatactcaaacttgttctcctaaaatttagtttttacaaaaatttaatttttaatatacttttttatattcaaatagattttaaataaaaaataattaatttttaaactgcttattaattttaaaatttaaatttatt

SEQ ID NO: 269988 - DNA, 701 bp, Cannabis indica
catcttatctttcatttatatgtacctgtctcttcaagcaaaaaaaattatatttatatgtatccatctttaatattgtagctcatcagtaaaagttgctattcaacttagaaataataatcaattatatcttttaccttttatacatactctaaaacaatatatttacaataatggtctatttcatgtgatttgtaatatatgacatgaaaaacatttcacactgccttaaatagatgttgagattgtaacaagggtagaaaaattgatatgagttgtagaagcataacattaacttatttgtacacattagtggtaggtcaacagaaagataatccttccaacaatttagaataatttgcaatttttccacattaatgttttaaaattaataagaaaatttaattttaaaaattaaatttttataaatagtaaaaaactttagtatttatcaaaattgagggggtaaaaataaaaattatttaaaaaattaaataactaaaacaaacaaaaaattgaagcttaattacgaaaacaaaggtaaaacacaaaatcttttgagtaaacaactacaagaagaaatattatcatcatatgaaaaagaccatgtcacaaggtccttttacttctatcagtataatattaaatgtcttgctcgtagttatcgatgatgagctaatcgaaagtattgtatggggcaa

SEQ ID NO: 269989 - DNA, 633 bp, Cannabis indica
taaatcattgcaaagaaaaattgtagagtatcttaagctaggattttctacgtatcttctacagcaagggtaagatcgcattcagaaattaaatgtgcaaagtaaaagtagaaggaatcgagaacttactcactgatcgacatccaaattcagtctatgcgaagctattcagatagttcttgtcaaaatgtcacagaaaactccaagcgaagaacctctcttttttctctaaacttgcttaatggagaagttcgtgaaaatgagtttgtgaacaatcttcggttgtatttataggaagaaaaacaaaaatgggtaatcatttcaaatgcctcagacgccttcgttccccccaaaaagaaaatattggaaatcaaaagcagtcaagtgtaaccgtcaaacgtggtgagagaaaatcatatttcaaagcattaatcgcgtcagagcatttattaaccaaaaaccgaagagacgcctagtcagcctcacatcgaatcgtgaacagacgcacaagacatgtgtcacccatccaaatgcaaagacagctccgatgaagtctacacgccacttcgaaagtcctatacagacttcggggggaaatgttatcccaatttttacactttgacgtggcatcac

SEQ ID NO: 269990 - DNA, 906 bp, Cannabis indica
atctttggctatgatgttaaggaaaaaaaggttattgagaaccatggaagttaaagcaaaaatagtataatgttttattcttgaaaggtgggcaacctgagaagatcaatgcaatattagaaacataccgtgagcatatttgataaaggttagattatcttagaataatctctttcttgacgaggtgtttatttaaaactgataattaaatgtaccactggttaggtaccttaataagtgtggtacgagagaaatattagatacatgttcactggagtaagtaggccaggtagcccattagttagctgtaactcctgcgttgtccgatttcatgtctgcaagctgagaaaatatgtattagactcgacccgtattttgagttgtgatgacgttaaacttcagacaaatttataatatgggaaaaacatcttgtccaggtaaggaagtaatatgaaatgagacaatcgcactagttaggaaagtgctatagaaaaacagcaagatagaagcagcaacttgataattagaatcataaatatgggagtaatatcccgaattgtttaaatgaatttcgaggacgagatttttataaggaggggatggttgtaatatcccgataagcctaatggtaaataattagagtttacatttatactatgggttaatcaggtaattagtgggattatgatcttactaatctatttcagtattgttgacctcgcttttagccaacgacagtgagtcaagtttgataagcgacaagtagtttataacgattgaaagataataaagcaatataaagacacaaaaatttggtacaggttcagccccgaacagttcggtaatagcctaatcatcgttatttgtattaactcaagaataaggagaaaggttccttttcttata

SEQ ID NO: 269991 - DNA, 507 bp, Cannabis indica
atacaatgcatatacaacatattacagtcagtatttcacagaaaaacatacaaaatcaatttatgccgttaaagacctaaacttgagtttcaaacctcaagcttactcaattccctcactatagctcaaaactaataaccagagcttaaaataaattcaaaataagcttagaaatcggactacacaatctttaaaccctaacagccaccaacttcaaaaatcacaactcaaaccaagtaagaacttaacgaatttaataacaaagcttctagggtttaccttggttaagaaatcctttaatcccagctgaaacacccaaaaaccagtagcaattcccccttgttctgggctagttcgaagagagaaagggaatgcaagagagctctttctatttttcgtcttttctttcatttttctttaatttctcaaatgaaatgtgtaaccttggctgaagtaatctaatgctaggtgtcaccatacaaggcagccaccaaatctcttctcttg

SEQ ID NO: 269992 - DNA, 1087 bp, Cannabis indica
tatacttagaaactagatagaaactttgacaaaatagatttataattaaaataattcttttttataacatttacaaagtaatttttctaacgtacgtatactctcgatcataatttgtcaagtataacaaataaaaaagatatatattaaatttgactaataattatctttaaaaataataagactattcactacatgacacgattattaattttatgattcaacaaagaaaaaaacgacacattttacgatcaaattacaaattagtgatgactgtaaatctaaaatttctcaccaatatgtatatatatatatatgacaggtgttcttcacacatatatacatgcatgcatgcatatataatcaacttaattaaatatttaattaattattatatatttatatatagatttgatgagtgtatttgggaaaaagtagtaccttcccatttacttttcccctccttttgtccacctcttgctaattacactttttacgtggtaattaaacacattaacattaattatatatatgccttaattaattaattaattaatctataattaattatatatatacatttatacgtacgtaggccatacaaatctctaagcgtgacgaaattaaagaacttgtttcctctttataagctgtctatctatctactcatcattctcatttttattttatttatttatttttgcttttttaattaattaatatatatatatggagagtcaagcaaatatatattaatgatattggaattattaggcatgatttatacgatcttataatatatagtgcattaggttaattttaggccacatgtcctttgcttggattattcactgaccaaaataagtcaaaaatactattatgtattatagtaataatatatcaattaaatgcatttatatatattcttatctatttattgtatcacagctgaggggaacaggatcaggggggcactatatattaattatatacttaggtaaattttttttgtttgtttttgggcttgctaattattaattagtagtagtagtgtaagtaatataataatataataataatataaata

SEQ ID NO: 269993 - DNA, 525 bp, Cannabis indica
gaggaggatcttgggactcaacccgaagaacgtaggtcaccttctagaaatcaccagcgttcttcccaaacccatagagcgaggactcttacagaccctaatgggggaaatatgacataccactttcagggggaaagaacacagcgtgaagaagcaagtgtgaccttgaggtggtcaagaactcatagtcgatcaacacgaagaggagaaagtactcaacgagctaatgatcgagaaagtatgggatctagtaaatccacgagtcactcaaagacaaagtttatcagtaggatgcggtctatgagtaagacgaggtctgctagcaattactcactaccggatttgcgagagcacttgaattggaagaaacctgaccttcaccaatagcttggtccaaagtaagaggatcccatccaatggcgaataaacgagctagaggacaagtttaggagatatagagtgggggcactaggaaatcaatctagatacgactcaaacgaggagcttgagccatatcatccagat

SEQ ID NO: 269994 - DNA, 1287 bp, Cannabis indica
tgacgtttttgaagctgaaaacaagttgggatcacacccgaagcagccctccataagaagttactgatcttaggaggtatttgtaacgaccaaatacgcttccaaaaatcagtattggcatcatggcaccaagcacctttagattcttgcaagaatttataagcaattttaaccgaataatttccacaagtctcaagtctccaatttcaaccatcatttacggccgaatcactaagccgaatggacaaaataaggtcatgatcacgtgaaacaaacaagtctctcacaacatcatcatcccaagcgcgagtgtcaacttgaaagaggcagttgactgatttgttcacaagagcagggtgccttgtaacgacatagctgttagaactatgtggaagccaaggatctgtaagaatggatatatttttcccattagcgattgttctttgagcacatgaatgtactagatctttagcttcaagaatacttcgtcagatgaaactaggatcatctcccaattcagtagaaaacaagttgccatgagcataatattttgccttatagagcctactaaccaaagagtcatcattaaccaacaaccgccaatattatttccccagtaaagctaaattaaagtctctcaagcttcggaaacccagtccttctgcatgtttatgacgacacaaccgctcctaactcatccaattaatacctttaccactgctcgagtctgaatgccaccaaaacttagccataagccgctctaactccttacaggtgtctaaaggcaagagaaatatattcatagcataattcggcaatgcttgagcaatagatttcagcaatacctcattttccgcatgagacaaaataagccctttccaaccttgaattctcttccaaagcttatccttaagaaagccaaggatagcatttttattcctcccaaccgaacaaggaaggcccagataatagccattttcatctgcctcataaacttccagcatagcatagatagaatcccacacctcactaccaatattattgctataaaacacaaaagacttactgaaattaattctttgttccgaagccacctcataagtacgcaacagctccttcacattgtacgcttcctcctcagtggccttacaataaatatagctatcatcatcaaagagcatatgagagattaccagcgcacctcgagcaattttacatcccgtgagtaaaccactttgttcataactacgcaacaaactagaaaaacctcagcacaaagaataaata

SEQ ID NO: 269995 - DNA, 460 bp, Cannabis indica
atgttctggacttaacagaatttgtatatattaaaccataatcatgaaaacaacatgtaaacatgaatgacttctaatcttttattgataacaaatcagattagattgaaatgggttttatttagggcataaaatccaaacatcttcttcattatagtttcagttgagcaatgcatctcgcgttatcatcatagagaattgttgatattgatactactttattgagtaattcatatgatttccgaatgtaatatgtcaatgatctcagtctcacacattttctacttacttcataaagtgcaagtatgttagcatgatttaaacttacatctttaaaaaactttatcaggaaaaccatgcagtgggacaaaacttgagccaagaagaaaataatgcaatttgtgttggaaattattttacgaggatcttaaaacgatgaaatatgaactttctaaaacga

SEQ ID NO: 269996 - DNA, 793 bp, Cannabis indica
taaaataatttccaacacaatagtatttcaagttggctccaggaaagtttagttcatggaaaaccttttcttcggaattccatgcacaattctcttcctcacgccaactcccattgcatgtgggagattcggtcaaagtaaaacagcgaccaggcgagccactccgggcatacattagcagattcatgacggaagcgaccaaggtatcacgagtgaccgaggatgtaaagttatccacgatattggggggcattgaagtccttggcgaattgtggaaggacataaggaaaaacggaccggttgactcaatgagtgatttccttgaccgggtcgaaggtttcatcaagctcgaagaagccattcagcgagcaaagggtgagcaaaagccgaacaaaacgaaggctccctctacaggaacgtccgcccagcttccccaatattccaccaattcaagtggcaagcgttcaggcaacaaccacaagcaaggaaacgggaagaagggaaagttcaccgaaaaacccggacagactccccgtgatcgcgccaatcacactgcattcactatcttaactgaagatatataaagtgtgtgtatagcgactcaatcgctaattccgtacaagaagcccgggcccatgaagaaagacaccagcaaaggggacatgtcaaagttctgtcggttccatggagactacggccacgacaccaacgaatgctacaacttgaagcgggaaatagaacctctaatcaagaaaaacagcccgcacttacagaagtacgtcaaggccaacca

SEQ ID NO: 269997 - DNA, 849 bp, Cannabis indica
aaaaggtttattgatctgaaagttaaatttacaatgagaacaggggacacatatatagtcgagcataatgactaacagtatttaacaaccaccgacttagacaataacgaactactgacatgtaactaatattctaactaacaataactgttaagctagaaaaggagatcagtagttaaacaattaaaaagaggacttaataaattgttgtctataattctcaattttgtcatctcctaaaatgggagatcttcccgtatttataagtgtttcagaataataattatatatatttgtactataagttgttacgattatcacacgctattacatcattaattttatctattataaaaaataattaaaattttaactaagttacatatacttactatcacaatgcaacatatttaaaaattaataactcatgggaacaaggccaaatggttatctaaagtacaagggcaacacagtatccaaagcctgtaactatttttaacatgtgttttgatatttcgtacaataacttaggttgtgtaaaagtcggctactaaagctagcttagtagtgagagaaggatatagaacaaagagaggtgttatgggtttaaactcaagacttttaagttacaagctattaattgattgtgatatactattatgctacgctacaaaaaaactcaggttgtgtaagtttttcccttccaaaaaacatctcatttcacaccttcaatatgataaatcaagactgcagtggcagttaaataaacatgcttcttgatttgactaactttggctcgctcaatctagttttagttatccaactcagccattgttgaacttggtatag

SEQ ID NO: 269998 - DNA, 614 bp, Cannabis indica
cacttaaagataaaagtaacatgagatgaattttacataattttaattaggaagagatgttgtggttgctatcaaattaattaaaattgtatatatctttatattctttatctaaaaataataagttgagatatgaattgtgaagactcggtatatatataataaataaataaatataataatatatatgtactttaaaaaataattatatatatttaaatcagaccccctactcgtccctctctctctctttctatctatctctcttttttctccttcaaaacacaaaaagaaaaccacaaagctctatcaccggcggactccggcgacccacctccggccaccgaccaaccccatgcctcgaaccacttgaaacccttggtgccggctatctcaactcccaagcggcgctactctttttgctaccgttagcttgggatcgcaagtcaaagtttggtggttcaaactttgaacggattttctggtcacctccggtgtccgtttgacgagccgtcttcaccactagactcagctcgtcgaggagaacaacctacactaagctacttcacacagtttgctactttttttggtgatatttttgtagctccgcccct

SEQ ID NO: 269999 - DNA, 624 bp, Cannabis indica
caaagtgaaaagataaaatcacactaaattatatgtgcaaagtaataatattagggacgagataaatctccaattgcatatatatataaagtagtttcggtatgtgattgttatttcatataataaaacaaatgggcatatttttggaaataatttgctatttacgttggaatgtgtaattttctcttctatttttgcctacagttgcccaattcgactaaaagtttccatttgaaaatgcaccaattactatattttaaccttgactacggtcatttgtaacaaagcttggaggctctcttttgctttctctatagcgtaatttgcggtcaaattccctatacttttatgtttgttacggtttaacctctttactcgaaaaattatggctatactccctggactcaacaatcgttttgcttccgtcccttttggtctgttaagtgtcaaagtgacattgtcacgtatacacatgacaaattttcatggaatgcctaatattaataatttatatactaaaaaaatagaaaaaaacataaaaaaaaataaaataattaatattttttttccttttttctttttctttctttttcttcttcatctttcttcttcttcttcattttt

SEQ ID NO: 270000 - DNA, 809 bp, Cannabis indica
gaattcttttccactggctatatgcacccaaaactgaatactactttcatttgcctaattcctaaagtagagtttcctatgagagtggatcaatttagaccgataagcctttgcaatttctcatacaaagtaattgcaaagattttatccaatagattgagacctcttatgaatagtatggtatccccttttcaatctgcttttattcctggaaggtggattacagaatctttgatcctcacacaagaaatagttcacaagattcgacaaaaaaggggtttgggaggtcttatggctttgaagctagatatgcataaggcttacgataaaatggaatggagctttcttgaaaaagttctatgtgcgaatggcttcaatgaacggtgtaggaagcttttgatggcgtgtgttacaagtgtctcatactcggttcttttaaatggcagccctcttaaaaagatctctcctcaaagaggacttcgccaaggagacccgatctctccattcctgtttctcctctgtcaggaggtcctttccaaactcatttgtaaggcagaagagaggggatctatccatggtattaaaatagctcattcagcccctccggtgtctcatctcatgtttgccgacgacacaatactctttgcccgagccaatgaaaaggaagcgaaaaagctgatggagtgtatttccgtgtatgaaaaatggtcaggtcaatcttgtagcaagccaaagtcgagtgttctattctcaagaaacttgtcgtctcaaagaaaggagcagattttgggtaatttgaatattgatca

SEQ ID NO: 270001 - DNA, 552 bp, Cannabis indica
agagttgattttggtgaatatgtagaaatctggtttaggaggaacaaaaaagtacataatgataagatgattgctcaagatattgttgttacttgggatcgtgattttcttgttgattaccagatattagacaactctcctagtgcttctcacttggttgggagcttgccatcctctacaaatatttcttctagttttgtttgggtgccgcctggtaggggacaatgaagatcaatgttgatgctgctctcgatgcttccactaatagatgtggtttggatatggtggttcgtgactccataagtgagaatatggtttctactgtttgacacatttgcatattttctctcctaaaatggcagaagctttaacttttaaaaatactgccatccaatgtcgtttattgggttttcagaatatgatttgtgaatctaattatttgaatatggttttgaagtttaataaccatgtttttttggctacttctttgggtttagtcatagtagattctagacataatttttttgaatttcactatgctagtctctcttt

SEQ ID NO: 270002 - DNA, 1175 bp, Cannabis indica
atactattttaatctggatattacagtgtcaaaatattttaaaattaagatactaaaaatagtttaaaatataaaaggaataattacattatacacaattttaaattggtacaatatttaaaaaagaggtaaaaatgatagattttaaaaaaaaaagataaaaataaaagaggataatataaaaaagtatagagtgtaatttaagaggtaacccatggggagaaatatgggccttctaaataagcccaatggggcaacccgtcggataacccaaagtccaatatcgaagtcataatatcctcatccaaaaaacgcgtggttttcaagcctaataatggtcaagactcaagaaaaccgacctcgtcttggctcgtaaattacaaaatctcaggaggtcacaaccgtcaactcatctcattttcaggggtacaatcggaacctcataaaatactctcttcctttcctctcctcctccccccgcggtcgctccattccatccgagctttgccacaatttccgaggaccatcctaccgacgcacccgatctgactccccaactcccaccatggagatcgcaccggccactccggccaccgactcacccagttatgaagatactgcttcgcctgatagcgtcgccgcggcttcggcttcggattcatcgcctgagaaggaactgaacgcctccgtggcttcgtcttctccggcggcgtcgaggtatgatgaggatgaggacgaggaggacgcgtgtaggatttgccggaacccagctgattctgatcatccgcttaggtatccgtgcgcgtgtagtgggagtattaagtacgttcatcaggactgtctccttcagtggctcaatcacagcaacgctcgccagtgcgaggtgcgaaattattatctttttataatattcttgtaattcaattgtgttatttggtattaatctcgttaatgtcgaaccttcttgtatttttaggttgaatgagatatccttaactttaaagttgttaagagaatttaaatttgatttaggggaaggtgtcattttgattcaagaaaaacttatttatggttttgtggaatttaatgaaacatgaagcttctttgaggtttatagtttccaattatttgagtcggccaaggcaaggacttggaatcaagcttgtcttctattt

SEQ ID NO: 270003 - DNA, 567 bp, Cannabis indica
aatctacttaatgaaactaacttcctttctttcagttgctatgtttctctcagttataatggcaacccataattgctaatatatatctcatatgaaaaggggaaattaaaaattaattaaaagctgtcattaaatatttttaaaaatatattctaatcataatgctcaacactttttcttgtaaggtgtattagagagttgttggtaacaactaaataaatgatttaaaatactaaaaagaaagaaaaaacaaaaacaaaaagcctaaatgcataatatattcactaaaaaccagctaaatctttaactacaatatatatataccttctttactcttccttaatttcttttttgtaagattgttttcttgaaatgttttaaaaggaaagctaatttccttagaagaaaaaaaagtctttaataaaaaaaaaatcgttttttatacttcaaaataattttttttttatatttttacaaaaatttacatagaaattcacatagtaatcaacggagcaaccaaaatcacataacaactcacataaaaatcactgaaatttaaccaaaccc

SEQ ID NO: 270004 - DNA, 2219 bp, Cannabis indica
gtctatgtccaaatcctgacaccgactacgcatcgggtccaagcatcgagtcacggatcccaggtcctgaggtgggtcctaggtccaggtttttgtctggggtctagtctcgattcccgatttaggttttgaggcccaagttttgctcccagtttgggggcccaattcccgggtctgggtcccccatctatgttcaggtcttaggtccctgtctgggtcaaaatttgttttcctgttcgggttcgctctcgagtcctagtctgagtcctggttccagtttgggcttaggtccgagttcgggtccatgtcccagtgtgggcctgagtttcaggtcccaggtctgagtctggttcttatgtcgtggggccgggccttgtttttgggacagggtttgggtttcggtccggatcccggtctgggtccaggtcccggtctttgtttaggtcccatgtcataggtcccaatctaggtccaattcccagtatgggttctagtttgagtttggtttttggcttggatcctgttactgtcccaggtctggtccgattcagattttgggttcgggtcctagattcaaacactgactacgggtcaagtccaagcctcaggtccagattcagatatcggtcttggatctcgttcttgttccagttcgggtcccgggtcttgggccgcgtcctaagtttgggtttaggtccgagtttggggttgtgtcccagtagtcaggtcctgggttctaggtatagggtcgggtctcgtgtctcgagactgtggtcgagttttaggtctcggtcccagttctggggctcaatttcgggtccaagtccctcatctggctctggatccttagtacaagtctgggtccaggttcaggtctggggcccaggtcccccatctaggttcggatccttggtcccgatctaggtccaaaattagattcgggtttggatctcgagttttggtgcgagtctaggtcctagtatgagttcaagtttgagtctgggtccgggagttggtcaaagtccagatccctgttcgagtccgggtcgtccaggtccctgttggggtccgggtcggggtctcgatccgggtcctagtcaaggtctaggtccaagaccaggttctggtttgggtttgggtacgggtttaggtcctgagtttgggtcttggttcgggtctcaattcgggtctgggtcttgcttctaggttctgatctcggtatgggtatgggtctaggcccgtgtccaagttagggtttaggaatttaggtttagtgtttatggatttaggggtaagtgtaaagagtttaggatttaaggtttaaggtttagggtttagggtttaaggtttcgcttccagttctgattccaatttcgggtcacagggtacgatttaaggttcaggtgtgggtctaggttggagtccgtgtctgggtctaggtccgtattcgggttcacgtctgagtcttggtcccaaatccaaacaccaccacatgtcgagtctagttcgagttctagtacgggtacaagttttggtcagggtctgggttccggtcaaggtccaattccctaatttaaacaccgactatggggtcgggtccaagcctctggtcttggctcttgggtcccaggtccaaatccagatcctggtcaagatctagctcatgtcttgggtcgcagtttgggtctcaaatcaaggtttaggtctaggtttaggtcttgggtcctgggtcatggtccgggtccccaattcaggttaaggtcttaggtccttgtttgggttagggtcccagtcccagtgcaggtcccggtccgtctttggtactggtccttgtctcgggtcttagcctggtctcggccttggtcacggctccattctcaggtcctaggtctgagtatccggtccaaggtcccactcccagtctcggttccagtatgggtactgttcttagtctatgttcaggtctcggttgtagtccggatctgggtcccagtcctaatctcggtctgagtcctagtctttggttcgagtttgagttttggtacgagtgtggttctaggtccaggtcccgagtcacgggtcctgggttccaggttctgggtcgtaagtcctggtgcaagtttgcgtctgggtatcgatcccggtctaggtctgggtccgggtccgtgttctgttccacgtctagatcaagtttttgttaaggtcaattcctgttccat

SEQ ID NO: 270005 - DNA, 785 bp, Cannabis indica
ggtcgcggtagtaaacgggctatatgtcgtatccacagggaggaaaaatacactcaaaaggacagttagtaattttacgagaataaaataagaaccttgaatgtgatgtgagaatattgagaaaatgattttcaaaaaattaaacaagtaattaaaatgagaagtgatcagaaaatgattatggaagacacaagctttgtacatgcaattatattttcctaataaaattgattctttaacctcaactataattctacaccattaattatagttggaaaatgtgtataattaagcccactagaaaaatatgttctctaattaaattaatactacttctaaaaatactatcatatcatataatttaaatcgacaaaataccaccggcagaatgcagtaaaaatcatataatataataaacaccctaataattaatagcctaacttacataagaaaagcatgactgaacttatataaaaggtactattaaatttaaagtgcaatttagaagaagagaaatttaatataataaatatggaaatgaagaacaaagagaatcaatatattagaaaaataaaaattacatgaacttacacttgagtcttgccaaagaaattagcctagaaaaggcattgtctttacaccaaaattaataaagtaaaataaagaagaaggaaagaaaaagataaaattttggtataataacactactaaaatctgattgctttttcattgtatttagctcctatttatagtgcacatttgctctccaaattggaattttcgta

SEQ ID NO: 270006 - DNA, 1788 bp, Cannabis indica
atgttgaagtttgttaacgatctcgaattcttctttaagtatccgtggggcgagcgcgcttttcgtaagctgatggagacattaggaaagaatatgcaacattacaaggataatgttgacaagaagaaggggaagaagattgctcaggaggcaaagtacacagttagtggctatgtacctgcctttcagtactgggcatacgaagcaattgagaagttggggaagaagtatgcccactgcaacgggaccaagttccccagaatgttgagctggaaaacaccggagggccagcggaaacaagatgtcaaggcaaccgacattgcactgttattcaacagtcgggtatgtttctttactgttctgtattttatttaaatttattgaaaatgaacattcgcgacattgttcgcgatatgttagcgacattatgcgatgtcgcaaaagaaattgctgtatcgcttatcgcgacatatgtcgcgacatgttatcgacatgtagcgacattgtgctgctttttgcaattatcataatttttgacttcttttcacagtttttaattattctgtgttttcttttttgtttcagttggtggtgaagaagtgcttgtttccccggcccagtgaagaggcatacttcaagagtattaatgagggtaaagcccctctttgctttgagatggacgtagaacaaacggtggacgttgatggtacacaggagtctgtgtttgaaactcaagcgaagaccatcaacgaggccgtgacaaaggcaaatttagttccaccaccaccggcacctgaagtacacgagccatctacttcagcaggtccttctgctccaaccagtacaactgtggacactgaccttgtaaagaggttggatagcattgaggcccggctggagaagcttgagtcccagcaggaagccgtcatgttggcacagacggggttagtaaatagccatctcagtatgaggcggtccttcacagagagtcagaaagatctgaaggagactctactggctaagatggacgagttgatggctatggtaaaaggagcgcccacacctggagagcccacacctgcaccgcaaaatgaggaacaagaggcgagtgataacgaagatgtcttcccagaagattgggaagcagatgataacgaggcaccgtcaactccattggaagcaattatcacggccattggggatacacaatcacaggacgaagtcctacttctacctggacccccagaaaatgtgccatttgtgaggaagaggaagccgccaaagtacttgaacgactacactgcggaaaagaaaaagaggcgagttcttccagagaacgtagacccggagagaccagcagaccgtagattgcttcgtacgttcaagaggtggttgattggagacattcccaatgcccgacctaggaatgtgcacaccggtgttggcgatgtcaagttcttcacaactttgtttcttaggtcggagtggcttcacgatgatgtaagtatttaatcattaattagtatttttgattttttttgcaacatatattttattgtcgatgtgttagcgacaatgtcgcgacattttcgcgacattgttgctgatacagaagttttttctttctgttttatttgtcgacatgtcgcgacattgtcacgacattctcgcgacatggtcacatttttagtatgttctgtttaacgacatgtcgcgacattgtcacgacagtgtcgcgacactaggcaaattcttctcacgacattgttcgcgacgtttcgcgacttt

SEQ ID NO: 270007 - DNA, 590 bp, Cannabis indica
ttttctttttattttttttgaaaaattacactgccataaacaacatgtcgttttcacaaaagggcaaaacgacacgtcatttttcaacatggagggctgatcacacggaaaaaacgacacgtcattttccaaagggcgaaaaaacgacacgtcgttttaacgactgaagctgtccagaacgacagaaatgacatgtcgtttgcgaccaacgacggctgccacaattcacaaaaaacgacacgtcatttttcacagtgtggaaaacgacacgtcgtttggcagcttcttcaacctccatccgggtcaaatttgacccgtttttctgcatgcggtccgacgaacccgacccaaacccgatcagaaaagagaattttgacgaccaaattacgtcctttaaaccccaaaagaaccaaaaaaaaaagagatctatgtgggttttatgcatctaaaacacgtaaaaagtcgattttaattccaatgaaaaagagttgggtcgaaacgtgttcttcaaaaaattttccaaattttgatatttattcaaatctttttcatgcacgaaatcactctataattttatatgaatgtgatat

SEQ ID NO: 270008 - DNA, 573 bp, Cannabis indica
tggtgggacactgtagacaaaaccatttatgaggataggtttagtgtcccattggagtaaatatagtgtgaaactacactatatttaatgttttagtgtcccattggagatggccttaataaaataatagaaatgacataaatataaataaaaaagtagtgcatttactgtggtgtaaatttacatcataacaaatattgtgctaaatttggcacaaaatttgatatatgtcaaatttacatcactttttggtacatcattggagcacacttttgttaaatgagctatattttaacttttcaccacttatttacacctccattggagatactcttagaccttgcattgaagatagtctaacatgatttaatttttatatcacaataagcatcacttttttatttactattttgccactcattaatgcaacttttttatattttatttatatatttaataaatatcaaatttagcccacaatagatataacttttttattttatcattgatcattaataatacaatatacattttttaattataatattttagtttctatttttttaaaaaaaa

SEQ ID NO: 270009 - DNA, 827 bp, Cannabis indica
acacaagatccctttgtgtcaatgttaaactcccttcaacacatttcttaatctgaaatctcttccaatcttcaagcctaagactcaaactaaaatcccttcaatgcttccatctcatctttgatcttgtacaaaaccttgaaccatcacccatgaagttcctacaagaaatcggtataacgaagaaagataaagaagaataaaaatgatccaagaccctcgaggtaaaatgatatatctcttcaatgaaactgcttcaagaaagcactatatcgttgggctttgtgccctaaataaaaccctattttaatgtaattttttctattcaattattaataaagaaacataattaatttcattacttatttagtatgtcatttggtacatgtgatcatttatatatttatttgatttataaattcatccaaaccttatcacattgatattcttgtttattgtgtcgtcaacatagtggaaagtaatcaagattatgtaattaaaagtattcctagatttatcagtacacagggtttaactaatatgataatctacaacatagtttacttgcaccttggataagtgctatgtcctttccagggcattagttaaagtaaagcttgagttggatgcatggagtatgcatcggaagggaccaatattgaacttggattagatatcatacatttaccgtaacatatattcaattcaatatcacctgttgatcctagatcaagtgatctaaacttgacatggtaggttcgatctcaagagtgtatttatgttctttgatttgtagtttagcctactttttggtctgggtgatacgt

SEQ ID NO: 270010 - DNA, 644 bp, Cannabis indica
tacaatccaagcatagtactcaattgagcctaagtgttgaacacatttcaaagcaaacctcacatggtagaagtcacctctaaggatgagaaattctacatttacaaccctcttatacactcacaaatcatggactagagagaaagagagagagaattatgtgtgagagtggctcagattgggactcccttgaatgaagttttatttttcatacggaaatgaaagtttgtcttttcgtttcattgattaaaaaatattagtagaaagtttatggaatgagaattttgaatatataaaaatagaattgaaaaatagcattttaatcgagaagaaaattttattattaatctgaaaagataatatggctggaagaagatgaaaaatttgatgtttatttcatttaatatgtatataatgttttttattttttgaataatatgaatttattttaattatttttcctaaaagaattattagtttggccaatactatacttacatgtagcactttattaatcaactaacagaatgataatttgagtgttaagtttagaaatttgaggatatcaatatgaactataatgatgacataaactttatatgattggaatataaaaataatgcattatgaaaaaatttgattca

SEQ ID NO: 270011 - DNA, 851 bp, Cannabis indica
ccactccatcaatcaagaaaagtcgtgtttaagaagcacaaacctctcctactactctcctagagttgagaataatgggattccatctcaaaatcaattgacaatgagtcgagtagctcatgttcttatatatggctcacttctctaccatttattccatgttgcacaatgtccacaatacctactcttcaagctttatatttgcagattgatggactactctcaaaaaggtttacacaaaaaggttgtcaccgccattgatgataatatatattgaagctccaaaaaagagtaggccaaataggtctcgtctcactctcgcagacaggaagacctcgctcaacttgtttggttgattgatcagttaaaaacacattaattaattaattaactaatttggttgattagataagagtgaaattaattaagacaatttggtttgggtaaagtactggagtttggaaagagttgccaaagtagacactggacacaccattattattatttcattaattaataaaagttatcacggttgttgtaggattatttttttagttgttgcattgctgttgtaattgttttactgttattttataaaaagacggtatttttttttataaaaataagggttttttttatttttatccttcaaaacagttttttttttggtcatttttgcggaattctacatagaaactcctattgcaactagccttgcaacctaaatcgcaacaaaaaaatcgtatagcaacccacatagaaactatcggagaaactactttagaaacccaaagcataaatttgaaaaaaaaaaagttaaaaaaactatatatgagataattaccctaaaa

SEQ ID NO: 270012 - DNA, 993 bp, Cannabis indica
ctctgttcgggtttaggtctctgttttgtttttgatctgggttcaggttagggtttaggactttgtcttggtcctactcctatttcggttctacttccatttgtgattctgagttcgagtttggttttgagttagggtcagagttcgagtcctggtgtgagtttgggtttgggtccggatttcagtctaggtccagatcaggctctgggtgtgggttccagtcctgggttttggtctaggttgggtccgagtaccaagttccaataccgatcttcgtcaggattcaattctgggtctaagtcctttcttctgatcctggtctgggttcgagtttgggtccgggtccaggtccaagtctagctttaggtctgattctagttatgggtttgagttcgtgtccaaatttgtgttcgggtttgtgtccaggtctggacgccgatctgggtctaggttcgactccaggttcaagttcaggtcccgagtgctggtccaacatttcgatcccagtctgggtcttcgtctgagtacaggttcgtatccggatccctatctaggtccaagtctgtgtttgggatcgggtaccagatttaggtctaggtccgggtcttagttccgttctaggtacacgactgtgtcccggcccgagttccagtctcagagtgggtctgaggctaggtctgtgttcagttctaggtctgggtccgggtcctggtcacggtcctagtcttgttctagggtcctggttcggcgatttatgtttaggttctaattttgggtctaggtctaggtgtgggttcaggtttggttcctcgtctgggttctggtcctagtctgagtccaagatttatacaccgaatattggtctgttccaggccctgttacgcgtatcccgagtcaagatctggatcactgtcacgagtctaggtcaagttctggttctggttcaggtcccatgtcccatttctgagtttgggttcgggatcgagactgggg

SEQ ID NO: 270013 - DNA, 693 bp, Cannabis indica
atacaggaccttccactcagccctttatatcgaatttctctggtaagaatgattttattcatcaaaacaagtggattattgatacaggggcaactcatcatgtttgtccttacattgaattatttaccaacatctgtcacaagcctatattgtttactgttactcttcctgatggtaccaaaaacaagatttcttgtactggtaacaccaaagtttcacaagaaattgttcttgttaatgttctatatgtcccaaattttaaatacagcttgttgtctgttacaactttgatgtcttcagctgattgttcttttgtgtttcatgataattcttgtatcattcaggacaccaagaagaataaggtaattgggaagggtgaaagacatggagatcttttcttttttaaaccttattctaatcctattgttcttgctttttctaattcaatcataaatgttgacactttgtggcattatagacttggccacccttcttgtatcaaagaatttcctttgaataaagagttgaggaaggtgttgccagatcttattgctgaaaatgaagggggctttgttcatggaagatatattgcgcatgatgttctggtatgtcaagatatggtgaggctatatggaagccaagctgcatgattaaaatagatttgagaaaggcctacgacaccattgaatggag

SEQ ID NO: 270014 - DNA, 1731 bp, Cannabis indica
cttgtttctttaagttcttgaattacttttattctgttaaaatcttgaaaattatcgattcgccaaatagaatcataagtatagtttagtggtaattaatccaattccctgtggttcgacctcacttgtgtgagtttactacttgattacgtccacttgcatattgttttacaatttcgtaacaggttctgataccgaaattgtaacgccagtatttaaaaactgactaattcagatttaaacttattttattatatttataaaatctcgtaagtcaggatcccgagtttaaaatcgttgttgaaaatacatattcaatatataaagttacataatatatttttttttacaaactacagggcaataccaaaataaaactcaaaatgtgataagatcgatttcctccaggttgcactgccgcgatatgtacaatccttgccgagccccaactcactgctcctccagccaagcttaattcttacctacacatggtagcaacagatgagtcgacagactcagtaagatatgcatataaaaaattataaaatcgacttgtgtctaggcacccatacacctattcacaagactaaccaaaagattgagaacgttcttaatggtcagtgatattgaccatgatatcacccactaccagcactatgatcgcactgcaggaccggcactacgttcgtaccgttatgataacatcaatagcacccaagagtacaattggctatgatatcactcttaaccagtactatgcccgtactgtcaaaccgacacaatggttgtgccgctatgatagcggcaattaatactctttggggtgcatatcactcttaaccagtacgatgcctgtactgccgaactgaaactatagttgtgccgctatgatatcacccaaaacatatacaatcttaaacacagcatgcatatataatatgttctatgctagtcttacctcgttttccatgcccaggtgtgtcggtcagcctgagtggaatagcttctcgacgctttacagggtcctatatcacaatattcataactttgatgagagacatgctaaaacagttctcaggacttaaaaccaaaactagaattatccctattgatggataacatgataatactctaaatatcacagaaacgggaaaattagggtttcataaaatgtcccaattggtagaccggtttcccaatcagaattttgattcaatggggtttcctcgagaccaaccggtcgactggttcttacaggtacccctgaaccagtcgaccaattcagtgcaggaacacctaaaaacatccccaacacttcaattcaactccaaactccacaatagcttccaaaatacctgtatataccataatgaacaaaattcaagcaataaacctcagtttcaaataaagaaacctaattcaccattaaagtgagtttttaaactaaaaccttgctcaagtgccaccaaaatctacaaacatggcataattcaacttaaatcaacctaactcaacttcagaacacaaacctaagcaccaaacatcactataggactaaaacctaagaattcatgccttaaaaccttaattccacaagaaaaaaacaaagaagagagtcaagaggtgataccttggattgaaactcttccaaatacaaataaacctacactgaattgagctgagaacatcccagctcctgcttgttcttgaagacgagagagagagagagag

SEQ ID NO: 270015 - DNA, 561 bp, Cannabis indica
tttaagaaacctagtctacttttaattttagtattttttgtagcagaaaaatatatgtttctaacatgtcaaatgatcaccttaaaaaaaaagattataatagtgtaatttttgtgtccaaatgataaattgtgaggttgaaaaaacttttgaaataataataaaaaaaaagaaataagaaataaagaaagtgagaatgattacaatttgtgtcgtttattcacataatttttcttttttaaaaaaaaaacttattgtatatcaactaggagagtaaataaattaatgtaaaagaaaaacatatggtttatttttatatggtttatttttaaaagaataaaatggtctaagataatttcataaataatttacaattcacgttgataaatgcaattatttctttctaaaactattaattagatttaaaaaaaaaaagaatgtaaaaaaaaaattgatcaacctatttattttcaaaaaataagattgttaaataaaaaaaaaaataaaaaaaaaaaaaaaaaaactacaatgatgtgtctagaaaaagaaaaagaaaaaaaa

SEQ ID NO: 270016 - DNA, 739 bp, Cannabis indica
aaaatagatatccaagtggtgaaaaattatggccaaaatactaaaatcggcctctcccaatacagtccaaccgaaattcttgttggtacaaccctaaaccaacaagaattccgattgtctgggcagaaaaacacgaaaatttctaatcttccaacccccataacttggtccaatcaaacccaaatgctaccaaactttccagaatatcaacataccacataaggaacctattacatagcttaaacacaaaaattatgctaagaatcaagattttccatggaagatcaaagtttaagctcttgagctcaaactttgtctaaacaacacaacaagcatcaaacgaaacttaattcaactcaaataacaacaaagtaacttctaaaatcataaccaaacttgaattaaacctacataacccaactcaacaatcctcaatgaaacctaaccttcaagtttgaaaaagaaaaggagacaaagagggaaaagcttacctcacaaattacttaagctacagctgttgaattcttctaaaaatggtttgaattgaacaagaaaattgctgggttttcccttggttcttggtggccgactcaaagaaagagagaaagaaagtgttttgtttttcttctaattttctattattgaataaaaagaataaatcctaatttttatctaatattcaataacttaaattcagattaactaagcttaatatcaacccactaaaggacaaaagaaa

SEQ ID NO: 270017 - DNA, 360 bp, Cannabis indica
ataataatataattcctcaattattcataattatctaattagggttttgctaatccatttcttaatttcagggtattacacactgactacttctacaatgaggtttagtccttctttcgatcttgaatcccccaaatcatccacatctcctcgcttttcttcattggtaatttgatcagtcgatcagagtactggcttttgaacaattcttctctttttcgccatgggagaagggaagaaagtcacgcacaccttattctttttttttcttactattcttactctaactaattttaactttttttttaattaatcacattttgtaaaaaaaatcttaattaatttcttttaacctttact

SEQ ID NO: 270018 - DNA, 936 bp, Cannabis indica
atccatccatctcaaaaaatttgcgtctcaattgtacaagtacatgcagccaaaaatgcttggttttttcaatttgaccgacttgacagcggcctctctaagtctggctaactcaagaatttctccaaagtctacatggggctcgccaattcttggcctcatctctctagcataatatcgaggaccagattccttcagtgtcaggcgccagcggagggtcctccttgggtggcagaggttggccattgagaccatcctgattggtggtgtcaacttggccaattgtggtggccaggtttgtagtgtctgctgagatggtaaggttggccacatccatcgggttcgtggagattccagttgtgactggaacacgaacatcaagatctgtagtcatagggtttttaggaagacccgatgaggaaaatgttatagccagagttctccttgtgttaatcatggcgtttgatcagataaattgacaactctctctcaatgaaagcaccaaactattaacctcaaaatttggccaaccgatagtggagtcgtatttaatgttgatgttttctacatgttacacaataagaacaataaagtaatttagacactatattttatagaggtttggccctcttaattagcgcgtaatgacccgatccccttttggttgtattgataccgaaagataatactactcagatcactataatgatgggatctgaagtagctctcttaatattacaatgtatgaatcagtaggcaaatctcgaaccttggagacgtgtgtgagagagagagagggggagcccttacacatgtagaagagagggagaagagacgattaggcttttcaaacttagagtggaaagcttagggagcttggagggttaaggacttagggtgttagagataggtgaatgctctttatatagtagagct

SEQ ID NO: 270019 - DNA, 732 bp, Cannabis indica
atggggggctagtcatctagaatctcaacttcttcctcttgggcgggaggagcaagaggtggagtcaacgacatgcgttctctggaaggaggagtcacatctctttgtctcagtgctttggcaggaggctattggctagaggttgttacgaaaattgtaaatagtacgcaagtgcacgtaatcaagtagtaagctcacacaggtgaggtcgaaccacaggaaatgggattgagtacccctagattaaatctatgtttctatttggcaaatcaatgtttttcaagttcaataatcgaataaaaattcgagaagcttaaagagacaacaaaattaatcaaaaatgagaagatagggaagagaatcatgttgataggtttacccaatcgttaatgcctaattactattccaattcttgttgtgaatgacagattattcaaattaacctagctcttttcagatcttctaggttctaaacctcatcctctctaattaatctcttaattagactcacatgaaatctgcattaaacaataatctaaatcgtcatataagtcatgcaaataccttcattttacataaacctagattatccaaattttagcattctcaattctcacttttcagatttcgaattgagatcctagatatgcaaaaggtgatcaagcttaaacatggaaataacacaaataaggatactttcacaatcaaaatgaacaggaatggcaattaaca

SEQ ID NO: 270020 - DNA, 751 bp, Cannabis indica
atttccctagaaggacttaggaagctgctagtaactaataatcataaaccttatactatcatcaatatgcaaatcgaatttctgggaatgtaagtttggattcaattcgaagttcaactcaatgatctttgaaatttttgatatccaccaaatattccaccacccctattagttcgcaagatctttaaccatttaccttaatatttttccaacattgctagaaattcatgaaatttctcaaacatttcaaatttctttgcataaggtaaaatctagagtgatcgtctaagaatttaacgataactcatacctacccctgaatgtacatccatattcgaatatagatgatcttactttcaagtggataggcatattttctctttgtagagaattatcttgtcaaaaccactatgaacaatattaaatgccatagatataatataatagttgtgttcttttgatgacttagatttagttacaacatagagttcttagaatagtccaagtggatactgatcacagaatacaaaactcatgttccatacataaacatacagtttggatccattgacaaaaaaatagatatgaaacttgtgaaagttatactgaatgtttaatgcattattagaaactgaaattaaaaatttctatttggaatctaaaatttaaagtcaaagacttaaatttataccaaatattcttgagtaatgattctttcttggaccaccactactaatctaactctaagttt

SEQ ID NO: 270021 - DNA, 503 bp, Cannabis indica
accaagattaaacccacttttggtggagcggaatgaagaataatgtggtagaatttgtatcccagtgtatagcttgtcaacagatcaaggctgaacatcagagactgatatgtttattgcaacctttgacacttcgtgagtggaagtgggaggatatcactacagactttgtgattggattacctagaaccacgggtatgtacaattgaatttgggttgtgataaatcaattcacgaagtctgcacattttctaccggtaaaaacaacatttacaatgcatcagtatgcaaaattgtatgtggaagagatagtgatattacatggtgttccaaagtccattatatgagatagagatctgaagtttacttctatgttctggcagagtctaaagctggctatgggtaccaaactaaaattcagtacaactctccatcctcagactaatgttacagtttgaaaggacaattcagatattgaaagacatgttgcgagcctgtgttat

SEQ ID NO: 270022 - DNA, 968 bp, Cannabis indica
taagaaaaaattagtaaatttattgtggtaaatgatacacatcaaatttttggtgtcgttgccttaatataagcattgtcctcaagatcatcaataaaatcaatgcaaaataaaagaaaagggtaaaaaaaatctcccattaagtttgctttgtttaatgtcgttagctcgactgtaagttgcgttgatgtggtcttcacgttgggtcttctaacaaagactcaatcattatgtacttatcaatggaatctaatacattgatttgagtgcttcaccatcgaattctattttaagtatccatactttcatattcaacttcttgatcgcagtgagtaagaaaagtctcccaaataaagttgatgtagaattgggatcaccctcatcttttatctcaatcatgtaggaattacttagagtttctcttaatagactaagatttaaagaaacaaaatttgaataagacataatattaataatttctcctacatctatcatgcaatgatcaaacctggttttaccaattgtgcattgaattgtacttgtcttaggcaacaactttctgttagaattattattgtggactaatataatcatgagcttaataccataaacacaatcattaactatgtgcctaatatttattcactaccataatggaatggttaataattaataaatgtattagaggcacatgagagcaccctaaaactataattggcccattaaattatagtccaccactaattatactcattaacccaataagcctaataaaatcccttagggttaggtgttggatatatataaagggttaatatgtgttagtatgatgatgagagagtttgtttggtgataagaaaaagggcttgctttcataagctcctcttctacttcctcttctaccatcttggagacacattcacattgaagattttggtgtcatagctcaaatggaaaatgccaatatg

SEQ ID NO: 270023 - DNA, 513 bp, Cannabis indica
tacgtggcttggcacgtaacaatcacctagtatatatatatatacatgaagttatagctatgttccaattttttcattcgtgctccctcagcacgttgtataaattagttataaaaattaatacaaaataattaattttggaatttttttaatttttacagtgtatttaaaataatattttttatatttttacagaaatctaagaactcacttagaaaccaacgataacttaaatcacaaccataattcatatagcaatctacgtaaaaatgaccgaagcaatctaacctataaatttaaaaaaaaaattaaaaatactccatatactaattttttaaatcacacgtttaaaaagtacatttgcttgaacatttattatctatctatgtatcaaaccttttctagctttcttttcctaacttaattattgaagagagagactgaagaacattaatacacaactaaaacaagagtacaagcaactgtaaagcattccctcaaaaaaaaaaaaaa

SEQ ID NO: 270024 - DNA, 591 bp, Cannabis indica
aaaaaaatattgaatttttctcatttttatttaaagggggtacgatttggtagttgccaaagtttaggacgtaaagtttctaagttacaaagacatgtcaccatttgaacgaaataataagacaaaatctaaaagaatgactaaatttcagtaaaggtgttgtagtattttcagcacgcaagtatacatatcattaacaagttatagactcactttgtgaggtcgatcccacaaggattgtagttaagtactttaaaattaaatcttttcttttattggttataccgaattttagagtaaattaaaactagaaagcaataaaataatgaaaataagaagcaagtaaattaataaggaaattaacgatgattaaagttagggctttcgatttcaattgcatctattgattatgatttaatatgattctattcctattaccaaattctatgcaatagcaggtttacttaggtaatttatagtcttctcagatatataaacctcaattacatgcaaattttctgctcttgtggtaaattaaatatgtaagaggtattaaacacagaattccataagctatccaaaccatatagg

SEQ ID NO: 270025 - DNA, 757 bp, Cannabis indica
taagaagcaatacgatccaaaaactgaattgttaccattacagcgaaagtggatagaacgattgatggcgctgattcacgatgacgattgaggttgaaaggcccaagaatttttcttcattatgtaatttttttagattaacttgtagttagatttattaacttattaatatttttgactaattttacattagtgtttgtgtaatatttaattacttttatgaaataaaattatgtattttagccaattttaaaattaatttaaataatatttaatttacattttaaaaaataaatatgtaatttaaattaaataaaataatatataaattaataaatatataattaaaataaattatataattaaatttgaaaaaactcaaatctgcccacttttggcatcggttgctacgccacatacggcgtcggttattagctaggaaccgacgccctatgtacccctatggcgtcggttcctagttaataacggacgccataggggtacatatggtgtcggttcctcaaaaccctttagcgtcgccctgatcagcgtcgctagcgaattttgccaaaattgacgctgaaagggcttaaaaaacgcctttaaagggggggggggtttgtagtagtgtaatgaggctacctctactttaaattttatttattagatttgacacaccaaagttatagtgtgtagataaaaatacagcaaagaatttctaggtaaaatcttaatcgagatttatgaatataagact

SEQ ID NO: 270026 - DNA, 595 bp, Cannabis indica
tcctactgatcttcatataaatacactagtcaagcttcatccttgctttagagtaagaacatccataccttccttgagtaatcatcaattatactcaggaagtagcttgctttaccaagtgtcttaactgttgatggcccccataggtcagagtgaatgtaatccaaaatttgtttggatgtgtgcgtacctattgagaatttcagcttgcaactttttccaaagacatcttgttcatagaaatctagtttctcatgcaatttacctttcaaaatcccattcccaaacctttgatgcaaaagtctaatttgatcagtcaatttgttactgttaactccattcttagaataggtggctggtgtggcaacaccagcaataatttctccaacaagatagtacaaaccatctttgtattctccatttatgacagttaaagatccttttaaaaccttgagacaattctcatcaattttgactatgcaacctttaggagcaagagaaccaaaaaaaattaaatttttttgtaggtcaagaacatacctgacattagttaatgttctttgaatattgccatgcatcttgatcatctataaaa

SEQ ID NO: 270027 - DNA, 907 bp, Cannabis indica
aaattttaaacatgcatgtataatgacaaataacactgacataatagtagtttatttatccatcccaccgcagcacatatatttgcagaacctacttcactatggttaaatattgaagatattcaaacttcactaatcattaataattaattaagaaaagttacctcgagtgttacaattaggtgtttaggccaaggaacgaacatgtttggtacttctctaacatatctgcacccttcaattgagattgggatttcagcatcctcttacagcatttcaaaaattagaacctgggcatgtgaatcatcgtatggcgtgcaatgaacagtgatttcaccctcatgctcatacatatatgctcgggccacaatgttatcgatattgtcagagcagagatatacttgcttattaaaggccctctagtcatcgaaattgtataggagaggtggctcgttgacaaaaagaaactcctcagcatagatttgtggtggaccctcatcctcacgagcgtattgttgttgaacatatgcctgatcagccacctctccttcttcttcttgttcggcaatgtttttcttctgtttaagggattgaatttggcttttaatttatcaatctccttctgttgccgagccacaaaatcagacactttccttttcttcctgtcgaacaatttagataccctggtcaggaacctgcaaatcatagaaaaaaaattagctatgattttttttgtatcactaaagaaacaacatttcaatactagcatacccagcagccctgacatgtctaggatgctctggtgtcccgagcgcctgcgtcaggatatcgttttggccttggacttgaatttgtccctgagtaagctgctcttataattaagcctaatgcacgcatatattcaagc

SEQ ID NO: 270028 - DNA, 1565 bp, Cannabis indica
ttcaaacgaagcaaggattgcttggagaaaatgaagtcggagaaaactcgcaggaaaaaggtcaaggacaaggatggcatgcaagtctttggacgaatttattggtgatccttgacagagaagtttaagggtttttctcaaactttctaaaatggtgcaaaggtggttcctttttttcttatttcatacccatgataatggtttcgttagatcagagaaagatttgatccaatgggcatgattcaaagcgaaagtggaaaagatggtcatttaattctaatgtacctcgaaactgcataactgccaaaattagagggaatgtgtcttttcaaaaaagaggagcatgacggaaataccctttgtaatcattaaaaagctctctttaattaaaaagaactttttaaggggcaattgttatactcgaaatttggtaagcacatcagaggaagaaacgtgtcgagctgggaataacgaataactcaaacacgcgaacgaaaagtatacttagcatggaacaactcgttggaaatataattcgcagggtatgtttataacacgactaactaaatagccttctatgagacagaaacgtacgaactgataacttatgtattgacgagaaaccatgtggatgcacacgttcgtggagaggccttaacctcgctgcgtgaaagagaaaacaacaacactaaaaatacttagcgtatattatacaatatacaaactgagtatagatagtgtgacgagtcgagatgacagagagcgaggcccttatctcactagaaggtggtatgcatgcgaggaagatcatctcgacaccacaaagcatagttatcaaagttaaaacaatattagtctcgagaagccaaatgataagcaactgctcgctacgaaagttatcttggctccattcttagcgaggcatccctatgagataaggcttattgtatttttatgattacgcattcatctcggtccaataaaagcgggatattcacaaatgtgtaaacacctcatttatttggcttgatttgtaatcagatcccacaattttagggataatggttgtaaacatattttggttagctttgtaattaactgccgctaatcaattataaataatggcaggcaagatcataaaagggggacgaaaaaactcttatgcaagaggccctaaacaaatacttagaaatctgaataagattgactcgtagactatgtagaattttaactgcaaaaccacgtaaaaaaatctggtgttcatattttttagtttttattatttctatgtgaattatcattgtcaagctcaaatttgattaacaaaaatctgcgtcaacaccctgtatcaaaactatcatgcggtctacttaatttactaaaaattatggctgccacataagaatgagtggccccatagtcaaataacatagagaagtaagagttattaaccgagggctgacctgttaaaactaaggggctagcttctgcatcagcctgagttaatgcaaacacccttgctggagcaggtttcgcagcaaccttctgctcttctttcttaagtt

SEQ ID NO: 270029 - DNA, 658 bp, Cannabis indica
aatggtgcctttaaggtatctcaacagtcttttgtaagcctcccagtgagacactgttggagctttcaaaaattggcctaatttgttgatgacaaaggctacatcatgcctggttagcgtgagatactgaagcgcaccgatggtgctcctgtacagagtaagttcttcaaacagctcactgtcatttaaggacagtttagtggtggtactgatgaaattagaacaggccttagctccttccatgtgtaatcttaccaacaaattagtaatgtagttcgattgagacaaaaacctttcctttgaatctctgtaaatgtcgaccccaagaaaatagtgaacatcaccaagatttttgagagaaaattcagtgtttagatcactgattaacttggagatgagttgctgatttggtcccgtgaccaagatatcatcaacatagactagaaaaatgatgagatttgaacccgatccatcaacaaatagaaaagtgtcagacttagaagctttgaaccctttctgtagtaaaccgattctaagtgtgtcattccaagctctaggagcttgtttgaggccataaagttccttgtgtaggaggcagacatgatcgggtttatcttagtcaataaaaccttgtggttgattcatgaagacagtctca

SEQ ID NO: 270030 - DNA, 680 bp, Cannabis indica
aaaaataatatacaattaatagttttgtttattatagttttttaatgagtgtgcattgtgatatgagcatatagaaagaggctcttgctcttaatctagggttaatgactttagatatgtaaatctctaatgaacttttttttgaactctaataaattatttggataataacttttataattttaaaatacaaaaaggtttgtcatcataacaatgccacttgaactatgacatgaaccaaatcatgccccctaaactcttgacgacctgaaatggtaaacaatcactgaaatagtacataaacaatcactgaaatagtaaaattgaatgaaattatataaaagtccttaaatccaacaatctcaatagttcaggggtatttttaacgacctgaaaagttcaaagggcatgatttggtacatgtcaaagtccaagggacaaaaatactaattagcctttttatttttatggtaaaattttcctcttatatattatatcacttttttctgcattaatattccaaattaatgtttcacattagtgctatgctagcaaattaattaagaaaatgaacaaaaataaataaagatagcatttgcaatatagttagagtttaggaaaaaaaattcaaaaaagttcaggaaaagatagtttagaaaaaatatattctatttattatt

SEQ ID NO: 270031 - DNA, 1079 bp, Cannabis indica
agggaatttacttagtaaattctacatctactaattggaagcttagttatataggcccatggtccccacattagttgagacaatacttcttgtaagactcagttaattaattttaattaatcaattataattctaaaattcgactatgtcttatttatgaactttcactaagctagggcttaaatatgaagaaaagagattttaaggtttatttgttaattaaaagactttattaagtctaattaataaatatattaaatggtaatttttatttgataattaattttaattattaaataaatagttttgacattaaagtggttgaattggaaaatatagtatttgtgaaagaataggataaataaatgagtaaaatagcaaaattgtaattaatgggccaacctcctaatggacggccacttaagctcaatttatccatttatttatcaatttttaatgccaaataatttaaacctaaggattcctataaatagatagtgatggagtcaaaactaagagcttagaatcattagtctttcagtcaaatttgagtcttctctttctttctctaattttcgattccttctccctattttcttcttcacagtttgtccctctttatgattgagtacatacccacacatagaaagtaagtactcaataatagtgtgcaagactatgaagaatccaacacttgaaggagaatcaggcttagatcttgataatactctgcgacagaatggaacaagggttagagatctgagtggaatgagtcatttaatttcgctgcagctaatgtaaggtttcttgaactttatatgtgtttaaactccattgctttataaattcatatttaggatgttaaacaacatacatggaagtaaatctagatcttggtaaaataatctccaacagtttttattttatttcttgtccagttcttcttcttcatcttgttttcatttttttttcttcagtttttgaaattttcaatgacgtttttttttaaaaaaataagagtgtgcttttttattttatttcctagaattgtagcttgcaatatagcatccattgcatct

SEQ ID NO: 270032 - DNA, 1381 bp, Cannabis indica
tctggctgctgctttatattggttagtgaggccacttcgggtctcctatccctagcagcttgaagttgcttcttgaaatccctagatagctgctcccaagaaataattgaatgacgagtgaacttgttaaaccagctactcgttgctccaacaagcgaggtggggaacaaaatacagcgtaaattgttcgtcatgttactcgctcgcattatcgtgttaaagttattcaaatgcaagaccggatatgtggttccgtcatacgacgagacatgcgggtttttgaatcccaaaggaaaagggatattcataatatttgggtgatacggctcaagctcctcgtcagagtcgtatctagatgatttccctaattcccccatttgatatctcctgaacttatcctccagctcgtttatccgcaattggattggatcctcttgctttggaccaagttgttgcgaaggtcaggtttcttctgattcaagtgctatccagttggaagtaattgctggcagatctcgtcttactcattgactgcgccccacttatagactttgtttttaagtggctcgctgatttacttgttctcatactctcctgatcattagctcgttgagtaatttctcctcttcgagttgatcggctatgagttttggatcacctcgaagtcacacttgcctcttcacgctctgttctttcctcccgagagcggtttgtcgtatttcccccatgagtcctcgctctatgggtttggcaagaacgctggtgattcctagcaggtgatctccattctcccggctgagttccaagatcctcctcattttcatgagggatttctcattcatcagtttccgattgtctcctttctggctgttcatcctgattctcagggggtgtctcattttccctgagttgttcttcccaggccttttcctgtctcctggttcatgagccacgaggtctgcctcgtggtcttctcactccaggttcaggttgattttgagcgttcgtatcctgtgtcgccctggccgaggctacctctcgctctaactcagcgtttagacactgcgcctcttccaaagggcgtcttaggcggtggctttccgtctcataagttctctctcccacagattgggcacctccacggtttaactcttcatccctgtcccgggattctgaccattcccacgttgagttctcctcgagcgcattgtccgcgtactgggaccaacgtcgggttgagttctccggggacgtgtggtccgagcactgggaccatcctcaggttgggctctcctggaacaggttgtccttttggactgcggattagttgatcttctagagcccatgggctattttctagaatgatggttagtttcctcat

SEQ ID NO: 270033 - DNA, 735 bp, Cannabis indica
acaccgagttccatgttaccggcaccggaaatacaaaattatgaaaatcactaaatgacataaaatgaatttcagaattcaataataacagtataaataattatttaaatatctataaataattttcataattaaacatgattaactgctaatttacaaattaaactaagcgttctttacagaagttttttctcgagagacgcttgctaggcacaagtgcgagtggaaggccctgttggagatgaggcagaaactcccttacttgaagcagcaggaggagacgtagtaggatgaggtggagaccccttcgatgaagaagacgatgaagtgtaaaatgtgtgtggacgcacaggtttccttgcaacttgttttggaattcgtttcagcttgggcttcacgggctgagatacaaattgaagaaccgatgaatctcctgggtttgatgtagttatagcagcaggcagaaagattggagtagtaggaggagcattcgagggggcttgttcggattccaccattttccttagatgccctaggttcttagtcttagccatgaatttctgaaagtaagaatgagaaacaaagaagcaagaacacaaaggaataggaatcgggttggttacgaaaataaatgacaaaggaaactggtttatataatcacgtgagagagaaacacaaaaggaaaccaatttcaaaaatgagtaaccaccagcacacgaacaccaaagaaaactg

SEQ ID NO: 270034 - DNA, 536 bp, Cannabis indica
cttttgttttatgttaagggtatgttagtcttttaccttagggaattttgtcattatgtggggatattagttgctgtaagttatgttaatattaatagaaataaaagggtttgtgtttttggggaaaaacctagaaaattacttctctctctctctccctgtttctctcgaattggcaagaaccagcaccaagctagaatttccttagctcaaaccagtgggtattagcaagaattggtgtgttatttcaaggtatggaaccctagtctcttcctttttgtaatttttgttagtaaagaggggttttgacccatgattgtaggaattttgatgtgatggtaacaattggtgtttgaattagattctggaacttatctatggttgtttagggttgatttaagttgtctttgtgatctatagtgaagtttcggcaaggtttgagtttgagtgttggaactattttaccaggatctagatttactaacaagtatgtttgattaacaacctaatatgaattctaaaacaataaaaataaa

SEQ ID NO: 270035 - DNA, 593 bp, Cannabis indica
aggcatttttcaactttaccccaattttcactactttattttctctttctcttttctctttgggataagttgataattacccttttttgggttaattaaccaaaattaccctcaaaagttttttagttaatttttaccttttttttaattaactttcctaaactacccttgcaacacaactcttctccttctttcttaaagtcaccaaattctacagtctttacttaatacagatatagtagtactagacctttacaacaattgtcggaaccgactctgctacaaccatttgaactacatcatcatcaccgcctctgttataaacaccgacactacgtctccaccatacaaattcttgagagaaaggaagggtcggcgaagaagagagacaaccacaacaacactaatggatgttgcagctgcacaagggagtttatggctacggtgtggtttgaacctcaagatggctccgattgctattgatggctgcgaagctttgagagagaattaaaaagtaaagattcaaggaaggacatgactatgaagttctagatttgttttttttgttggaagtgtcagaaagggaaaagtta

SEQ ID NO: 270036 - DNA, 832 bp, Cannabis indica
tttcttctgatgttgttagtttatgtgcaaaacttctatcgactatggatgacatgttttttgttgctatagtattcgagctggtggtgttggggtaaatcttcaagctgctgatacagtgatcatatttgacactgattggaatccacaggtagtatatacattcagtgtgtgtttattttgtcaagttgaaattgtgtgtgatgcattttttgccacatggttcattttttgtattgatgcatattcattttccaggtagatttgcaggcgcaggcaagggctcatagaattggccagaagagagatgtccttgttcttcgttttgaaacagtaagctacaactctaattgctctgaatttgtttaattgacattttttggttacctttccaaacctttgtagattactatccgcaataccattatcttactatagtattattgttgcggcaacaaacttttttcaaaccatttaattattgttttcgtatgtattcttattagaaagttggtagatgtttggctcctttgacatagaagagaatcaaaaagtctatgtcaaaagaattttcaaattgcaaaatgtttgaatgcattcaatttgaaagttctcattttgagtatctgtcatatttgttagattattcttttttatagtaaaaatctcatttcgtgagtaatttttaaaagtgaatctatgtatacattttataataaaatttcaacattgaaaaataaatatttccaaatcaaaaaaaaacaaagctattgattattatttattgtaatttatttggtcaaggataagacaggaaaattattattagtaa

SEQ ID NO: 270037 - DNA, 687 bp, Cannabis indica
ctgaaaggattgttgaaaccacgtacaaaaaccttgtgtgtttttacgtttatgcactctttgtttttctaggtttctctggagttacagagttgtattctgtaactacggaaaaactgttttcagtaccagtttcattattccgcatttaattaatcacttaattaaataattaaactggaaatattaaaatacgcaatttcaattggtatcagagcaagtcactaaattcttagtgagatcttgaggttattccgtttaatttgttttgtgtgagatgtctttgtttgtagaaggaagctctatcactcgaccacctctgttgaatgagtcgaattatccatattggaaggtcaggatgagagcattcatcaaatcgcaagatgagaaggcatggagagctatatttacaggatggtcacaacctactgaaaatgatgaaaaaggtaatactaaggtaaagcctgaactaaattggactactgaagatgaaaaattgtctggttataataataaggctctacatgctatttttaatggtgttggtgaaggctttattaaattaatctcatcttgtgattctgcaaaagaagcgtgggaaatccttcaaactcaatttgaaggtaccgctgatgtaaaaagatcacgttttaccatgttacaaactagatttgatgaattgagaat

SEQ ID NO: 270038 - DNA, 1222 bp, Cannabis indica
aagcttcacaacttcttaggcataaattttatttatctaaggaaaagtctcatactagtggcatacctcaagaaacagctgaggagtctctagtatcccaaggggcatgcccttcccgcataaccattgggttaatggaaactcctcactgtttcgagaaaactaaccagttgaagcatgcgattatgcaagaaaagagaaagctggccgcatgtcgcaaatggccaggtgtatcgcagtaacccaaggagttgcgatcgcacgcatgaacattaatgacacacccaccatttgaaggacctaaccagttttcccaacaaaacatacagagaacacaaggaaaaccctaagttctaaacaataggtcgggatgaccaaatccccgaaattcctaaagaaatatatatgcgagtattcaagatgttcatctcaatactcgcgagtattcaagacaacaagcaaaaaagatgtgaatactcaaagtgttcttcctaaagctcacgattatacaaatttcagggctattttctcctgagagttacccagttctttagcagagaaataaggctttatgtgtattccctacaatggcgtgcattttatactccctaaaatttaaaatgcagattgtttctcaaaataataaaaaaaacagagcaggtaatttcgaaaactaaccttgagatttgttgattccccccgtgatcgatttcgattgtttatgaaactcagaatttctagagaaaaggggataaaaattctggaaaagggttttgaatctgtcaaagagaatagggaagattgaaatgagagggaaactgtgaattgtgtttgtattatgaggcttaaataccaaaagccctcattaattgggatcgtgacacgtggcaaagggaatgcctaaggtcatcccatctaacggttatccatgggcacgcctacatgaaatctgaagagtttcgtgatgtggcaccctaaattggatcaaatgtaataattacaaccgtcattttttgaaaccctcgatgggacaaccaaagctcatcatctcgtgacatctcttcgcctgtctctcgattatagtttccctcatgacctcatctgtcagtcgcgaaactaggggcatgtgttatagtgagatttttctcacctagaaactcgagaccggactcctattaaaaagacacgtgtactcactttccttgaggagagctgagatgtc

SEQ ID NO: 270039 - DNA, 663 bp, Cannabis indica
tggttgccatatcaagctaccacgtggaaagctattcgtcaaccactaacaatcaaagaaaaacaactaaaaccaggattagttcacctggaaccccggaatatgtcagggattgaccctggatattgaaacaattgtgggaatatgttagggattgaccctgaacatcaaaacctgttttatcaaaaccagatgctcctagaagattgataaaataaacaattgaactggggaagttcttatgagattaatgattgtaaatcacatttctgatgtaatattttgaactacagttgtgaataaaataataatttctttcaacaagtaattgtaaagcgtaaaccctttaaaattacttgaggggcatatatgtatgatcaaccggaattaatctagaaatacatagtacaatgcaaacccatcgcttcaaaaataaaaagttttttgaaaactttttttttaaaaaaaggtcatctaccaaacctttttgacgaaagaggggtcgaactgttataacccctgaccaaacctttttgacgagagaggggtcgaatcgttataacgccttgatcaaacctttctgacgagaaagggatcaaacaactgtaatttttggtttaaaacctatctgatgagaaagaaaaatcaaaagttatgactagc

SEQ ID NO: 270040 - DNA, 915 bp, Cannabis indica
acaagcaccgcagtttgagctcaagccagtgatgttccaaatgctccaaaccatggggcaattcagcgggatgccaactaaggatcctcacctcgatctccgttcattcttggaggtgagtgattctttcaagatccaaggagtgagtgaagaggtgctaaggttgaagctattcccattcttactacgagaccgagctagatcatggctcaacactttgccgcctgattctgtcaccaattggaatgatcttgctgagaagtttctgaggaaatactttcctcctactagaaatgcaaaattcagaagtgagataatgtcttttcagcaacttgaagatgagtccacaagtgatgcatgggagaggcttaaggaacttttgcgaaagtgtccacatcatggcatttcacattgtattttgatggagactttttataatggcttgaatgcagcatctcgaatggtgctagatgcatcggccaatggtgctattttgtcgaagtcttacaacgaagcatttgagattttggagaccattgcaagtaaaaactaccaatggtccaacacaagagctcaaacaagtagaaaagtgttgggggtccttgaagtagatgcaataacggctttgacaactcaaatggcttccatgacgaatgttttgaagaatttgagctttgggaactctaaaaatattcagccagctgctgccattcaaagtgatgatgtctcatgtttgttttgtggaggagggcatgtgtttaagaagtgtccctctagtccagagtccgtttgttacatgggaaatcagaattttaacagaaacaatggggcattctcaaaatcttacaatcaagcatggaagaatcatcctaatttgtcttgggggtggggggggtcaaggagcaagctcaagaa

SEQ ID NO: 270041 - DNA, 1166 bp, Cannabis indica
attacgatgatgtgtaattgttaaagcatgattattgtatgatgtgattaaatgaatgttgtattgtttatagttttattcacttttcttgctgagtctttgtgactcacgggtgttatatggtgcaggtaaagggaaggccaaggttgagtagccatgagtttgaggtcgtagcagtattgtacatatcagccgtggtgtcatggcccggtggacaggataactcgtttcaattgtattttgaagtatagtcgtactttgtaaagcagttttagaactgaatgtaaatattttgttttaaggtggtccctgtaaagattagcacttatattttataaaagttatgagtttattttcaattgtaaaattttaattacccacacttttgatataattatataaataagaaaaggagaatttaataaaagcacacacacgtggcgtctctgttggtcagggcattacaacatgtattagagcgaccaatgtttaaagatcctgaagactggtttgatatgtacattggttgcgaagactcgttcgactcatggttcagtaagttttaattattagaatatctattaattacctgattgcatgtttattagaaatatgctagctgcttgaaaagagggaaagtttgagatgttcggaaatacttattagtattgttatttcgtggaaatattaccacaggtgtatagattatgcacctgaggtggtttggtagaggtaaccgcgagcttgctgggctcggggttggaagtgagggtgaaaatcctccaccaccaccaaactaggaagaattatatgtcgcgatgcaggagaccatccggcaacaaggtgagcaaatttgagagttgagggagcagggagtttagcctgctctaaatcccaatcctgatccttcggcacctctggtagtgccacaggaagttggaaatcgcttggagccgctgtatgagcggttcaggaagcagaacccgcagtgttcgagggtggtgctgatccactcaaggcgaaacagtggatgagtatgataatgttgtagctaaaagtcagtattttaatatttatactcgcaagtgcacgaatcgtttcaaaatataatgttcatgtaagtgcaaggtcgaactcacgagagttgactaacatcaaaagaaact

SEQ ID NO: 270042 - DNA, 1183 bp, Cannabis indica
ttgtatcacactttataataacatatacattatacatatgtacccacaataggattttaatccaacatgcgatgattacaaaatgttacaggaaggggaccgcaacgcacctacaatagacgaaagacaagaggtgaaaaaaaaaattaaaataatcgacaatgaagattttttattgttcttacaacaagactagtcttaatcaggttttggcttagcttgagtaaaaagtatggtgacatttggttgggaggaatgaaaatataggaatgtgaatgagaatgagaattgaaataggaatgaaatggaataaaatttaaaatgcataaaaaaattattaatttttttcaaatcttgcattggaatggtctttcttactattttaaaatgtaatagtcattccacccaaatagtggaaagaccattctattggaatgatattctaatactttaaaatgcaatcaaatagaaaaaatagaatagaaatagtttttttttattattgttttattctattttattagctccaaccaaacaccacctaagttccaacaacttacaaaggttattaagatgtttggttagagagaaagagttatcacattttaagaggaaagtttatacggctacattagttgctattacttaccatgtttgggaagttcgcaatgttgctctttgggacatatttaaggtgatcaagatttcctgtagatttttttactacgaatgagatatttattttcatgtgagcttttttattgataaaaatagtggtattggttaggaaaattaatttacaattcttgcataggctcacgttctagaagggactggtagttgtatttattttttaggaaataaaattttacttacttaccaacacaaaaaaatttaaaattcgatctagagatataattttgtattggttttattatattctagtttttattattatttttttaatattttacaagaagttaaattaaattaatagcaaatatacattaaacatataggttctgattttatttttcttaactctaaaaatgttagtttataagaaaattaattataatttcttggtgtctgaatgagttaacatataggtaaaatgtttgaaatattaattagtgagaagtgcttcagtcttttttttttgaaatcactacaaaaaactgtt

SEQ ID NO: 270043 - DNA, 848 bp, Cannabis indica
taatggaagctgacccacgtggcataatctaacacaatcccatgaattaggcagctgtgcctgtgtcagaccataaaaaaggctcacaacgaaagaaaatcacctttctagctgaggcccactactcttacatttccttcacaatcgacagttcatgctatgctataattgtcaatagtacctccatgtacggacaatgactgcctatagattgggcctcacctacctagcccaatagccaatattatattgtatttaccccatcggtgggctttgaacaccaaatagaaccctaataggtccaggtctgcctgacccactagccaacgcctataagtatggttttatccttttatgcaaatggttagaaaattttggtatgagaaaagcagtaaatactccatagccaaagagcttataaataatattgacttgtggagtaaggctcgttaatgtcctaaccacgtaaaaatattatcgtatttatttcttaatcttatttttttagctcaagcttcttttactttaattttcaaaaatattgataaacaaaatgtgaataaaaaaaaaaataaagatccaacttaagttaattgaacttaaaaaattaaaaaaaaaaaaaaaccaagaatgacaccacttatagtggttaaaccgcgcttgagattcctcactttatttttgtattttatttaaataaaaatatgagagaaaataataaacaagtaactaagaggtcataaatagaagggtgaagagaaatctttgtaagggttgaatcatcaaaactaaaaatctcttattctctctttaaccctaaagatgaagcccacactctctctctctct

SEQ ID NO: 270044 - DNA, 1093 bp, Cannabis indica
ttatagaatcggttatattttaattataactagtttgagttattttgtgtaatttaagaatcgattttatttaaattataacaggtttgagttattttgtgttatttgtttttattcattatgttatagaaccggttctatttttgtttatgtctaagacatctacttctagtgactttttcagtaactttttctggtgacggtgattttactggcaacttttctggcgacactaacttttcaagcgaattttccagttccatcgacttttcaaacgactttttcggcaccggtgatttttccggcgaaacttattattattttacaaatatgggatttctatttatttttgtaaaaatatggcataaaaatcccatataaatgtaaaaaaaaataataatataaaaaaaaactcataaccccatagtattattgagattataacattagataattaatagcgtatctatatcgtggaacatatagagtgttctatgtaactgagagtgcaattccaagttctatggtagatgaaatgaggaattaataagttagtggatttactttgtaaattctagatctgcttattggaagctcagttatataagctcatgatccccatactagttgagacaatactgcttgtaagactcagttaattgattttaattaatcaattataattctgaaattagactatgtctagtttatgaattttcactaagatagggcttaattgtgaagaaaagagattgtagggtttatttgttaaataaaagactttattaagtctaattaataaatatgttaaatgacaattttatttgataattaattttaattattaaatgaatagttttggcatttaagtggttgaattggaaaaattgcattttttagaaaataagataaattgttgaaaaatggcaaaattacaaagtgggggcccacatcctatggccgaccacttaaagggattttaccatttattttttcattattttaatgccaaataattctaagttaatcctaggtgaattccagtaaataggtagtgatggcctcaaaggaaaagatgatgaacacacttgcc

SEQ ID NO: 270045 - DNA, 839 bp, Cannabis indica
acagggttgcatttcgcaaacctgggcccatgatacatgcgaggcataaacaggatgcaacaaaattctacagattttacaaggtcattgagcaaacaatggatgaatgtcgtcaattgaaagacgagatagaaagtcttatctcgcgtggttactttcagcagtatgtgaagcgacaaggcaatggacaaaaccatccaaatccgcccaataacccaggcaaccaaagattacaacctcctccccttgaattaaggagaggacattttggttatcttaggaggaccacatctcgctgtagaaagtaataatgcccaaaagagatatatcaagaaaattaagaacgagcagtcagtctttgctccagaatcgtcaaagaaagctaagacttaggttcctccaattgtgctctctaaggaagacagaaaacatgtgaggtaccctcatgtggacctgctcgtgattacaatcctgctcgccaacaaaagaataaagtgggtgttggtggataatggaagttcagtgaacattctttataaggatacattgaagaaaatgggactagaaagggccaagttaacaccttgcatggtaaatctatgtggattcatagggtattgtgtcgccagtcaaggaataattgaacttccattaactgtaggtgaggcgcctttatccaataccataatgcaatattttctagttgtcgacttaccatcggcctacaacatattgctgggtcgacctgcactaattggactaggggcagttagttcaattaaacacctatctttgaagtttcaaacaccaactggtgtaggtgtagtgcgaggtgacca

SEQ ID NO: 270046 - DNA, 587 bp, Cannabis indica
aaaagaggacaatataaaaaatgtatagagtctaatttccccctatttttttgatctaataagtttctcttttcgggtgtatatcttctacatataattaggaccggctctgagcataagcgggctaagcctatgtttagggcccacctaacttatgggcctaaaaaaaattgtcctcttttaaaattacacttttttatattaattttaaaaaaatgttatgtttttcttaaataagtgcccagaaatattttttccaatatacactaaattttagaatcgaccctgcatataatgtaaaatagtaatatggctgcacttagattggcaagatatgcactctagatgaaaaatattggaagaaattatttgaccctccaaaaaaattaattattatattaaaaaaatgtaatttaactgttaaaaaaaacttggttggtttttttaataaaggcccaaatcgctaggattcatttcactattgttggattttacattggaatttttacactacatattaaaatttgggaaatttgattttctatacttaaaaatgttcaatttttttttttgaaccaatacatttt

SEQ ID NO: 270047 - DNA, 609 bp, Cannabis indica
tttgtatgttacatgattaactctacactaactaactagattaactaacttgaaaatttagttaaaaccggttgcttaggtgtcatattacttaggcatacaattctaacaaatctctacctttgacaagtaatatgcaaagaaactaagcaactacataaatgattgaacactgcctaaacttccattacattcagtagcttcaaacagtgacagaacttagaagtaggtagagctttggtgaggatgtttgctgcattgtcttcagtggtcactttgttcacctttacttttcctccaatcagtatatctctaataaaatccagcctcacattaatatgcttggttctctcatggaaaacctagttttttgctcttgtgcaagacactttgactatcataatggatagttaaacatccctggtctatgccaagttccatggagatacccttaagccacagtgcttctttcacagctttagtacatgcaatgtactctgcttttgttgtagacagggcaacaatggtttgtaggttttatttctagaatattgagcatccacttgactgaaaaatatatatagacgatctttgactattaagattgta

SEQ ID NO: 270048 - DNA, 596 bp, Cannabis indica
aaatatatatatattttttaaaaggcaatttttttatttgggcccctaaaatgggtgggccctaggcgcgggcctagcccacctatgcccagggccgaccctggttgaggatattatcaagggaagagagatgtgggtagttagatataaataacaaatagaaatcaatacccacataattttttttgaatgaaatacccacataattaaaataaaaagaaaatgaaaactttaccttcttaccttgagcaccatgtgtgcctcaaaaaggaaacacacaaaatcttcccaatttttagttaaaagtttccaaaaaggaaaaattaacaataataaaaggaaaaattaacaataataaaaggaaacacaataaataaaatacaataaaagtatgtttccaaaaaaaaaaaacaaaagaactaaaatggaaaaaaaaaaaaaaaaaaaaaaactaagctacaaaaaccaaaaaccaacgataaaatatgcccccccttttcttgaatttttttagtataagccattttttatatttgtataaaaaaaacgaaaaggacaacacacaaaagcaccaatcaacactttagagaaaaaat

SEQ ID NO: 270049 - DNA, 593 bp, Cannabis indica
ttggaaagctcgttctgaactctatatgattatctgtatcttgattgccatgtgtatattttaaaatgtgtaatcagttgttaaccctatttgtaaaaatctaggatttgtgactaagattaccggcacttggtcaagagcacccgaggatttggaatccctattattgcgggatatcaggtaagacattaattagcacgtagagtatgcgcggtggcgcttataccaaaaattatgtatgtgagtaattagtaaccgggattagggttatcaccctaacatgagcggttgaatagcctagggttattatcctagtgatatatattgtgtaaatgctatgccatgctgaatatatgattatattaagattcggggttatgtgttcaaggcataaccgggttggactcagtaactagaaccgagatgaaccgttctatggccttattgtatttagacgtgtgagcacaatacgtaggtctatgttacatagacataaataggcatgtgagcgtaacatgcaggtctgtgtcatacatgcatatgagaatggcattaatgtttatatggtgtgataaatatgtttatcgatattt

SEQ ID NO: 270050 - DNA, 643 bp, Cannabis indica
attcaaactcagttcctactatcattttagacaatgttcaggcttccacacctgtcattgatcaagaaatgaatccggaacctcaacaagacaatgttgaacaactcccaaatcaaaatgaggctattgttccagaagaacaaattcaacaccctcaagaacaagagccattaaggaggtccacaagagagagaagaaatgctatttcagatgactattttgtatttcttcaagaacatgaggatgaaattggaatgatggaagatgatccaatcaacttgcatcaggccatgaaaagttctaactctcaaaagtggattgatgccatggatgaagagaataagtctatgcaagacaataaagtttgggaagttgtcccattaccagaaggtgtaaaaccaattggttgtaagtggatacttaaaaccaagaaggatgaatatggtaatgtggtgagatttaaggcacgtcttgtagcaaaaggctatactcagaaacaaggcattgattatacagagactttctctccggtttcatcgaaagactcttttaggataatattggcacttgttgctcattttgaccttgagttacatcagatggatgttaaaacagcgtttctcaatggcgacattgatgagac

SEQ ID NO: 270051 - DNA, 619 bp, Cannabis indica
acacgtagcaagaaagatgacatcatttgagtagacctgagttatagcagtcgacttaggaggagaccttagccctgcacccaagttgattttgggagcttgaggatggaagttcggacttcaataacttaattctaactcactatcttttagtattctttaccatgaagacatggagcaattaaatcaaagcctcgggagctgaaattacaagaacttgcacaccgaaagccaacttggacacctagggtttcacctagcgtccaggttgacattcccaactagggtttcactttccaggactgtcttagtgcaaatgggtcaaactttgcattggaacatcaactagacatgacacggatgtatttgtggcatcagaatcagattcggagcaagtttatatttgagcacctgtagcactcggtgcataggcacccagcgcccaggttgacaatttgtcaatttgggcgccttccaagtatcagatcgacagttcgaattttgcatcttctccgtcttcgtaaaaaatagggaaatatgtactttcgaggaagaaactgcacctcctaggtgccaaaagcaaagcccagcgcccaggttgacatttgtcaacctgggc

SEQ ID NO: 270052 - DNA, 1297 bp, Cannabis indica
gctctttgtccttgttagtcgcttcttgcttcagcttcttgatgttctcctgaagctgggcattctgcttctttaaaagctcgacttccttggaaccagcaaggaaggccttcgagaacatagtcatgaactgcgaagccaactctgcagaacggggcataagttcgtcagagagagtcctctcaaccttggacatgaactcctcgcccacgaacttctcctgaagaactaggaaatcgcgagcccgaatagctggatcgatcacgactttcttccccttatcttgcgaaggcttagctagctttttagatgaattcgcagtagggataaccacgacatcgcttttcctcttttggggaacaacatgtgaagtcttcgttgttccagtcttcgccttgcgattaagaacgagtgcttgttttaggaaagtcatctctgcgaggacaagaaaagacaagttaaagtaacaatcaatccaaatgcataagtctgtatgtgcgatatgttacctgatgtcagttgagaagtctgcttggaaagacgcttgcctattttctccttttagttttagacggccccttgtatactggctcccgatgaaggctggcgttctctggaatcaacttgtgttcctgcagtttcaaagtcgtgcacagcaattggcagtcgcgatcttaaacagggagacaaacgagaacctcgacgacttctttgctggtcgagtccaataaaggtcgagccggtctatctgcgaacaatacggaagagcgtgttaaatcataccaagagataacatgaaaatcaactaagtgttggaatgtgcgacgtactaggtcgacgattaaaatcagtcctaattcctggagctttaaacacataaaaccacttagattatcaatctcccatattggaaaccatgccttccaccccgttgatttcaaatgtggcccacttgctgaagcaatagaaaccgttatgaaggcccacgttctttatttcgtaaaagcagctaaaatcctccatcgtaggctccctatgcgcgtactccatgtacatcgcataaaaccctaaagctatacgatagttgttcggggttagttgaaagggggacacatcgtaccgcttgagtatagcagagatgaatggatggaagggaatcgacactccacatcacagaatgggaatggacactacgacatcctctgaaggtatgatcgcggggttagtaaaaggaagctgcggcggtctttgggtagggcgaggatgcatggtgtcgagtcgcaataaatttaatctt

SEQ ID NO: 270053 - DNA, 587 bp, Cannabis indica
caataagggtgagcccacttctcaaaccctatactctccacatatgcagcaatggccaaattcatctttctaagcttctcaaactctatatcacattcagttttcgaccatgagtaagcaacactatatatttggttgtgaaaagcatcagtcttgaacttggagttcacgttcataacaatgtggtgatagcatgcacagtggactgcttcggggaaaacgagttcaacaacatgatcaatgctttgatgcctatctgacacaaacactaagttctcaaccacgccaattgctacccttaacttctgtaagaaatacgtccaagagtcgttattctcactgtcaacgataccataagcaaccgacaataattggttgttcgcgtcgtatgccacaacaactaacattataccaccatacttcatcttcaagaaggtgccataaatactcaaaacaggatgacacaaagtaaatccccttctacatgcacagagtgatataaaacagtacttaaaccactcatcctctaaaaacaagtcagtaatggtacctggattcttctgctccagcatgtacaagtatccagg

SEQ ID NO: 270054 - DNA, 573 bp, Cannabis indica
atttaccatgaaaagaagaatatcttcactttttgaattagggccattttaaccaaatttaatgcgaaaccaatcttcatatttacgtcttagtagcaggatttcaatgtgagtagtgccaaaaaaattattcttagatgggtctggaccacatttcacaaagggataccactattagaaatgttagattttcactatttcagttaaaatgactgttagtgcatgaaaactattttttctctcaacgtgtccaataaaacagtgatgcacaatggtcttggctttgatcccgtaaaatttcacgatttttggacatgtgtaggatgagattttaacagaacattaacgagtgtaagagtaaggaaaaacttgttaatatttaccctgtaaagaagagtattttaaatttttgaattagggggccattttaaccaaatttaatgcgaaaccaatcttcatattcatatcttagtagcatgaattcaatgtgaatagtggccaaaaatattcgagatgcgtacgggccacatttcacaaagggggtaccactatcagaaatgtgagattttcact

SEQ ID NO: 270055 - DNA, 850 bp, Cannabis indica
tttgtttttttttaccgttaaaaaatagcaatttaactcctaaactattatcaatacaaaattttgctcccttttactaaaaaaaattataatactctattaattctgaaaaaataataaaaattatttaaaaaacctaataaaaatagtaattttacttaaaaaaaaactgaaattaatccttaaaaatattttcaaactttattttatttataaacacgtatctcaaaaaatcaaaccaaaattattgagaatctaataaataattataataaatatgatttttcaaaaaaaaaaaaccaaacttatttatagttataaactcatatcttaacaaataaagaaaaacaattaaaaattcaataaaaacaaaattttattttgaaaaaagttagaaattaaactaaaagatgttatatttacttaaacaaatctacattttttgagaaaaacaaaatagactcaagcttgttcccgtaaaatttagtttttacaaaaaattaatttttaatatatttttgttaatatctaaatgaattttttaataaaaactaaaaaaaaaattaaatcgctttattagttttaaaatttcaatttcttttttaattttcttaatcattcaaaatgatttttttttaagatctaaattaattttttaagatttactaaaaaaaatgttgaatatttctcatttttatttagaggggttacgatttgatagttgtcaaagtttagagagcaaagttgctaatttacaaagacgtgtcagcatttaaacggaataacggacggaacctaacagaaggactaaatttctgcaaatgtaaaagttcaaggggattcttaacaa

SEQ ID NO: 270056 - DNA, 418 bp, Cannabis indica
ccaacattgcaaaacccaaacttccacattcgtctcaccagcgccaccagcttcgtgtccccatcgttcgtctcaccagcgccgaaatatatgaaagagaaagaaactgagaaagagaacatgaatcacaggagtttaggtctggaaaacaccaatcgatggagttggattaggataacatgggaaaagagacaggatatgagaatgagaaaaagaaaacaaggatggacctagggaagtcgacggacttgcttcgtggctgtgtggtggctttagggcttcagggttgtgaggcggcttcaaggcttcagagctgtgatgtggcttcagggttgccggagttaaattttcatttttcattagtgttgaacagagagagagagagagagagtagtagtagtagtagtagtgtcgtagt

SEQ ID NO: 270057 - DNA, 690 bp, Cannabis indica
taaatgatattttaggaaactaagataattccaaaatgaggtgtcaatcatttaaactcatttagccaagccctaaaggaactattatttcacttctaagtacttatagaagctatagatttcatatctatgactagcggtcccactcaattacactaccatgttcccaagatgtaagtatttgagctaaaccaacgggaaagcttttaacgaataaagcaaagaacatgtgaaacacaattgagctagaacataatcatctcaagaatatgatcattgatcaaagatcaacttttaaatatttacctcgaaaagatattacggtaagtttacgatatcttttccactccacatatcagtccagttcgatgtatatccaatatatatgatgctagtttactatactaatttcttggaaaagatattccacttatccaagtgtaagtaaaccccatcgttgattatcacatcagtgtaaatccactacactaataaatcattggactaaataatttgaagcatataatcacaattactttctactgtgatgacatcaccgtaattgtgaatgaatacgtaagacccaactagtttaggcatgctacagtacttttcataattactgtgtaatctttgctaatcaaaggatttatcaaaatgtgataaaatttaaactttaataaataaaca

SEQ ID NO: 270058 - DNA, 511 bp, Cannabis indica
atttctgataattagatttgaatatgaaaatgtaaaaaatcaaaaatgcaaaaactatacaaaaaaacggaagttaattccataaaatagcatgaaaaatcgtagaaaacgaaaaaaattgcaagtggtacggacagtatgcattgcatactctccgcgcgcgctcacagtggtgatctgccgagaaaactcagctcaaggctcccttgcatgatttccacgcgcggataaggggtttaggacacccctgggcgtgtcgctcggacaacgccctgtccgaacacgcagctgaccgaggaacactcggttccgcgcgagtgggattggttgatcaacctatcttttttcaaatcttcaaaaaatcataactaattcaaataaaatcgaaattgagttctgtaaaaaagtaaattgcttaatgtttttcaaaatataccaataaaataattccaagaaacaaaaaattgaactatttttacattaaaattcacaaacaccaatcaatcaatca

SEQ ID NO: 270059 - DNA, 1032 bp, Cannabis indica
tcttctattttgttaagggattctatgagcaagatgttgtttgtatcttggtcataggttgtcctcctatgagacggtggcactagctctacaagaaacatcgcctcatagccataagctagagcgaatggagttttcccggtggccgtcttctcggtagtcctatgcgaccataggacctctgggagaaattcaggctagttgccttttgcctcctcaaagcgcttctttagtgtgtccttgagggttttgttgacaacttctacctgcccatttgcttgaggataggccacgacaaagaagcttttgatggtgtcatgtttgttgcaaaatttagcgaacatgtcagtgtcaaactgctttccattgtctaaaacaatcttctttggaagtctgaatcaacatatgatgttcttgacaacaaaatcaaggactttcttggaggtgattgttgctacgggttaaggttctgcccacttggtaaagtaatgtacagagactacggcaaactacgcccctcctttcccctttgaaagttgaccaactaggtatatcccccatattgcaaagggccaaggagactacatcatcatgagctcattgggtggcgctcttagaattttttagaatctttggcacttgtcacatcttttgacatagtctattgagtctttgatcattgttggccaaaagtacccctattggagtatctttttggataggcttttcccccgacatggttaccgcaaaagccttcatgcacttctatcattagtcgctcggcctcaaccttcgtgacacaacttaagagcggcattgagaagctctgtctgtacattacttcatctaggattagataactagcagtgtttcttcttatcttttttgcctcattcttgctttcaagcaaggctccaatttggaggtaagctgtaataggtgtcatccatgttgtactgccatccaacatgtcaacttctttagcgatggtaatgcttggttcctttaggaactatatgttggaaattattt

SEQ ID NO: 270060 - DNA, 1257 bp, Cannabis indica
catgggatcattttacacgacatgaaattgatggtaaaactaaagtggtttgcaaccactgcgggcgtaagttggtgggagaaagttcttagggaactacgcatttaaatgctcacataaagaggtgttcagtcaaaatggtcgaacttgtcgttaatcctactacaagcccttcagttcatttcaattttgaccctaattttggaaggatcaaattggctaaaatgatcgttaagcataaatatccattgtctatggttgagcatagcgggtttataaaatattcaagtactttgtgtcccatttcaaatattgtaaaggaatacagttaggtctgatatcatgaaaatatttaaaactgagaatgaaaaatgcaggcaatgtttggaaaaaagtaagaggagaatagccataaccagtgacatgtggactacaaatcataagaagagggaatatatggctgtaatagctcattttactgatgattcttcgaacttgcacaaccagattttaggttttaagtgtgttccatgtcctcacgatgctccagcactacttgaggcactaagatcttttcttaatgaatggaaaatagaagacaagattagtacagtgactctcgataactgtaatgcaaatgatgccatgattgatttttttaaaggataatttgagcctgacaattttattttgaaggaaaagttgctacatgtgcgttgttgtgcacatattttgaatctaattgtcaaggatggcttatctgtcattggtgatagtgttgacgaaattcgagataatgttgcttattgctcgggcacaccaaaagaaaatgaaaaatttgaggacattgcttgtcaacttggagtaccatacaccaaaaaaatatcacttgattgtgtaataaggtggaattgtcctaggcaacatgtcgcctaaacctatgatacagggtttttcgttgttagtcaacgtatctcgagagttctaaggtttagctccatgcgacatgtcgcttggagccattttctgagagaagtgttgcaaaacgttgggaattatgggggatgttcttcatcaatcaccaatgtctcatctccattattgcctatattttttccctggtaaacattcatggctatgtgtgatatcaaaatgtgaaatccaaaaacactatataaggaggtctaaggtgctcatttgtgtaaaatagtttttgtcaaaaaatcactttgctagaaaccctaaggctctataatc

SEQ ID NO: 270061 - DNA, 641 bp, Cannabis indica
cattgggatgaaactggagaaggaagtaattggtctggaattagttcagaagaccaatgaagctatagataagatcaaggcacagatgcttgcttcataaagcttgtagaaaagttatgttgatccgaagcgcagagacattacatttcaggtaggggaacatatttttctgtgagtttctccagtaaagggcattagacgctttagaaagagtggcaagttaagccctaggttcatggggccatttcagatactcaagaaggtcaggcaggtagcgtattgactagccttatcaccagcactatcggctgttcataatgtattccatatttcaatgttgaggaaatatgtttcagatccgagtcatgtcttgagttatgaagcccttgaactgtagtcagacttatcctacgaggaacagccagttcaaatcctcgatgggaaggagaaggttcttcgaaataagaccatagttttgctcaaagtactctggaagaacagcaaggtggaggaagccacctgggaattagagtctgacatgagaattcaatatccagagctattcaagttagaatttgaagacaaaatctttttaacggggggataattgtcatgaccttatggattagtaaaggcaatta

SEQ ID NO: 270062 - DNA, 606 bp, Cannabis indica
gcttgcaagttggtagccaatggagagaatactaagtttgggaggatccctggattctgcatcgtaaaggcttctgtccgaaaccgagtgggggtacctcttccaacattaactgtgtggctgaccttatgttaaataacgggcagtgggatattcagaagcttcgagacacctttgaccgagaaacggtctcggatattcttaaaggtggccatccttcagggattggcaccgatagatggatttggacgttagaaagtaagggctgtttctcgtctaaatcggcttatctggttcaagcaatggaaagagctcctcactgtgaggttgctccgaaactttggaataagctatggaatagtaaaactctggagagacacaaggttctgtggtggtgtatcctttctagtgctctccctgttagagcggtgattggaaagaggttccatatagaggacactagatgcccattatgtggattgggggaggaatcctttgaacatctgttcctgtcctgcgatgtggcttttcatttatggcgctcctctccctggggcattttccctgtgtgtgcactggcatccgcgtttgggattgggtcaagtt

SEQ ID NO: 270063 - DNA, 1178 bp, Cannabis indica
aaaataaaatcaacgaacaagaagaagtgattagaaagttaagaaagcagggtgctcctgtagtgcttgctccagaaatcccagtggcacctgcccctgctgtcgaggccgaaccagtggttgtaatgaatcggatagaatctttgtatgaaaggttccgtaagcaggcaccttcagtttttttgggaggtccagatgttatgaaagccgagcactggctaaccgtgattactagaattttgaatttcatgggcgtcattggaaatgatagggtggtctgtgccacttttcaatttcaagaagatgctttagtttgtgggacatggtgtccatgatacatgacgttactacaatgacctgggaaatgttccaggaacttttcaatgggatactataatgaggcagtcagaagtgccaaaagaaaagaattcactcacttaacccagaaggaaaacatgagtgttacggagtatacgacacagtttgaccgtttggcgaggttggcctcgggtatagtaccaactgatttcagtaaaaaggaaaagtatttggatggactaaatgcgaagattagacatgatctaatgattactactgatgacaaaactacgtatgctgaaatggtggataaggcactgcgagctgagggcacagtcggatgatgacagagtctgttgggactcctgtggttggcaaggctcctatcctcctgcatcaagcttgagtaggggaggtagtggttcggccatggatcagagaagggaagcatccactgcaaccggtggcttaggtcaaaatcagaggttccgggggaaccagggtcgaggcagtcgcccgggtagttctaaaacccgatacacttacccagaatgccccagttgtaaaaggcatcatctggaggattgtagagggcaatggtggtttcagtgtggcatgtcagggcattacaagagggatttccctcaacttagaaccgaagcaccgaaggctccagcgaaacccacttcggcaagggtattcatcttaactcaggccgatgcagaagccagtccttcaatggtaacaggtcagctctcggtcaacaacttttacttctctgtactgtttgatgatagttatgaatcagggtttggaacccttttacctggtagagaattagttatctccaaaaggtggat

SEQ ID NO: 270064 - DNA, 518 bp, Cannabis indica
tttgttttattaaaaaacacatgcaatttcttttttagttccataaatttttaatatttgccacaaaatcactatctttttatatatcttaaaaataaaaaattatgtgtctaattttaatagtattactttgtttgtagtgcacacatcaaaatataatattttagatatatcactgaataagtataaaaaaatatataaataaaaagattacaaaaattggattacaccgcacgaagcgcggtttagttttctatttatattgtgttataaaataatatagaatagaggaagaaataagagaagagagaaaacaaaaagaagaacataatgggagagtgaacgagatttttctcagtattttattttgatggggtgaactcctatttatacaaaaatatggctaaaaaaatagaaaactaaatcaatgtaattaaaaagattcaatcaagcattaattgtaacgccctaatctacagggacgacacatgtgtgattttataaactagtttaatact

SEQ ID NO: 270065 - DNA, 595 bp, Cannabis indica
cgttgctctgtaatgtgtttggaagcagtggaaagagacgttgggccagtagagagtcacgttttttttatggtatccgggtgttgtagttagactttggaagtatcgagaatttagcgggatttgggaaataaccaaactacccttggctttcttttggcatttgacttttgactaggcttgaattggtatttcaattgttagtaatgtcctttgtcttttatgagattatatatatcaaataatctgatttcttttcatctatttaaaataaaacaaaagaaaaaggaaaagaaaacctagagaactctactcttttcaccatcaagcatttcctctctctctttccttcgaccaactaagggaaccagccaagaaatccttctgttctcaattgaattctgaagattttaggagggtttgatgttgagctaaggtatgaagttttgctcttttcttcttagggttttcctagcttaaagttatttatttatgcataatattggggattgtgtggttgtttgatttggggttgtttgaatttgtttcatgatgttagatggagatttttgttgctgaattaagcttagtgaag

SEQ ID NO: 270066 - DNA, 725 bp, Cannabis indica
accaaaattttagattagggggttagttgcaaaaacatgtccactttaggaggtttggccgcaaataacccttttaataaatacatacatatattacatttatttttttagatgagaaaactttaatattagaaaaataaagaaaatattttctctctttttatttatttattttataagacttttttgggagcacattttgttatttgagtttataaattataatattaccatttactctttaaattgatccttttgacaatgaactatgaagcatacaattttttattgtctttgtaaatgatgaccaacttgtaacatttttgttttttttttttttttttgttttttgttttttttttttaacaattgaacaaaattttatggagaaaaaataagtgttgagtacatcataaagaagaaatcgaagatcctctatccaaattagctcaccatccaccctaagtacatgcacaactaattcatgcatagtcatattagccgaatgatttgcatgaataagagacgccttaagaaaattggacagtaaactaaaaataaataaatagagtccctaaatcattacagaaagaaaatctcttaaaaaagacagagattaaatctaaacaatcatgctccaaagaaatgagagggagtccaattctagcaaccaatccaatgcaaccattataagagctataacttctgcctgaataactatgaga

SEQ ID NO: 270067 - DNA, 823 bp, Cannabis indica
agtttagtatagtttattataagcttagtataatttaggtaatgtttatgtgatatctatgtttaagtttctttaaattttgatctaagtaaattttaattttaattcttaatttatatatttatatgtattttataattagatttttatgtttattttcttaggtttaggtaaaaatattatttattgaatttgttattataaaaatgaattagttatttttaatttagtttatgtaaaattatattatgtgatttagttttagttgatgtattaattttatatgtaaaaaagttactaaaattatgttgttaatatacttagtcaagtttatgtattctccgtgatatatatatgtgtatttttagtttgtacatatttatatatatataagttgataatagctgtaaatattaaaattttatttgaatagagttatatttgttagtttaattgaatatgctaagtaatagaattttattttgataaaattaggtattatttaagtttttgaaaatataagctaagtatatcttatatatatttttttttgcaaaatttaatttatttttaatgatattgtagtgtgtatagctaaaaagtattataaaatatccttattacattttgaattaaaattttaattaaaaaataattcataaatatttttatagtttttaattttaatgtttgttgacctcgcttttggccaacgacagtgagtcttgattgtaagcaacaagtagtataaggtatatgtaatataataaagtaaataaggacacaagaatttatagaggttcagccccaagcagttcgataa

SEQ ID NO: 270068 - DNA, 501 bp, Cannabis indica
ttaaatagggtttttctttttctttttaactagcccataaaataaaaaggggcaaaacctagaaaatgagtaatttaccccccaatgaaaaattaaactttaaaataacctaggggcgttatggtaatttaactaatccaccaaaccgacattctaaaattctaaactagtccagaatatccccaaagtaattctcccattaatgttgtgacatttcagaccacatcgttaattttctgtagtcgtcgggcccgataaaatatctttatttcaaaaatagtatcctcaatacccccatatcccaatataatctctgtaattaataaattacgctttataatcattcaacaaatccttactagttaccctaagtaagatcataatcttacttcattaccaaaataattccatattcaataaaatatgtctgtttaaatatcattttattttctaggatattacaaactatcccctcattatagaaattttgtcctcgaaatt

SEQ ID NO: 270069 - DNA, 591 bp, Cannabis indica
aaaaaaaaaaaacacaagtaatagttttagttatagacaacaatttttctttcctttaatttattgttgtttttgtatggattttatagtcgcattttttttttttgacaaagtgattagaatcacttatgaatgtacgacgcagacgtccgctaccggcgctagaacctccttgaactcggatagctcatcgtctaaccgcagagcatgctttgtcaagccatgggccgctaaattctcagagcgagccacatggtacaaaactacccccggaaattcaaacaataaagctataacatcctcaaacaacacacccaaaaagctggagctttaacttcatactgcacgccaactcataaatatatcaagaatgatccacaaaacatctacaaaataaaaaaagataaaagtaaattaatcctttagcgataatattaaaagggaaatttgattttttatgcttacatttggttaaaaaaaatttcctaaacaaataataactaatatttgtaggatatgacaacttttatgatatctctaaaatactccccatttacacaatcgaaccccccatcggaccccacatcagac

SEQ ID NO: 270070 - DNA, 1097 bp, Cannabis indica
aaaaagacttccaattgttattttgaaaaaaaaaaatctatcgcaacctattatttaagatgttcattttaatatgtgagaaacatatatttttttgtcattacaaaaataaaacaaaaatgtatttttagtttcttttatatttagttaatcaaagaatttaatatccaaatagtaactaactgacttacgcaacatttttataataaaatattttattattttagatctaaaaagttacaatgtaatagttaaataaatttattttatatattaatttagataaattactaaaatataatttataaagaacataccagataatttattagcaaaatttataaacatattaatttaataattagttgcttataatattaataatataccaatgagttacttttcgtaatttttttttactattatacataaaaagacaactttttagttatttatgagatcaataagataccaataaattatattttcataaaaatgatttcatatacattttagttatttttattgtttagttacttttaaacttatatgttcattttttagattatattttattattttgttgtttaaaaatttttcaccttacctttttaattttagtaacatttgtgttaccttcaaacttatttaagaaattaatgtgttacaataaaataaaataactaataaaatttgtaaatatctagattaccaatctttattttaaaattgtatatcatgatttttttaatattatttaagatatatttttggtaattttaaatttattgtagaaactaattagttgtccaattagtcaaatttaaaaaataaacttgagttgttacctataaataaatatagggaaattaccacatttactattttataacttttttttttaattttattcgtttgggatttctgaaagtggttggagcgctagttgcaataggggtttctatacgatttttttgttacaattttaggttgcagcgctagttgcaatagagaatttctaagtagaattccgtaaaaaatgaaaaaaaaaaaaaaaaaaaaaaaaaaaaaaaaaaaaaaactaaaaaaacgttaag

SEQ ID NO: 270071 - DNA, 936 bp, Cannabis indica
cacgagcgaactaagcacattgagattgatgtcattttgttcgtgagaaaattcaacaaggtctgatctccacaggatatgtgaagaccggagaacaactaggagatatttttacaaaggctttgtatggggtgcgggttgattatctttataacaagctgggcatgattaacatctatgctccagcttgagggggagtgttagatattaaatgtatattagctgtaaaagaattagatatttagtagatatttagtagatatttagtctcctaactttgtatataaatatgtattattctatgaaatctacacacaattcgaatcactattttctacacaagtcatgcttttagctcttggaaagatttttcatattcctccgtccactcgaattgcttgtttcctcgcaggatattgaagaatgggacacacttgtctgttgattttgaaacaaatctgctgagtgcagcgattcgaccagtcaaactttgcacttccttggtcttagttggcgacttcatactcaggagggcttgaatcttctctgggttggtttcaattcgttgggcattgacaatgaagcccagaaactttcccgagcttactccaaaggagtactttaagggatttagtttcatgttgtactttctgaggaccttgaagcaatcgtccaagtcatctatgagccccccagccttcctggatttgacgagcatgtcatccacatacacttccatatttcgctcgatctggtctttaaacattttgtttaccaatctttaatatgttgcgccaacattttttagaccaaacgacattactttgtaacaatatagacccatatctgttcgaaaacttgtatgctcttggtctggtggatgcattttgatctgattgtatcccgaataagaatccatgaagcttaatatttcat

SEQ ID NO: 270072 - DNA, 1128 bp, Cannabis indica
agttttgacctagaaaaattacgaattctgatatagttatttctacaaaatttatagatctttaaattatctttccaacgccactgaaatcacctcaatccgagctctagaactccagatatgatcattttagtaaaacagtttttaatcctgcgaatttatccaaacctacgaatttttaacattaattaattaaactcactaaatatattataaaaccctaatggaccttcatattgggctttaattaaacgattacttactctgtaaaaataccataatattttactttcgtagttaatacaactttaactctctctagaaaattggtacaactactctaagcaataatatcaactcactaacaacacaaagaaacaagataattatcctcgctcaattaatatccaaaaaaaaaattaaatactattttaatctggatattacacaaactgcaacttttaaactccattattaattaatttgagatttttttgaagagttgattagtttgagatgattctgattttgaagaggtgatgaacaatatataatatagatatatccaacccatatttacatagtgccacatgcaatgaaggatccgaggctcatgtatatgctcatatttttttttcttttttttttttttgatgtttacaaaataaaaattaattaggtagaagaaaataactacccaccccttttaaataaatatgtatagttatatttgtatactgtattgttaggatattttattctgcccctgtttgaatgaagtctagcttggatctaccagtgaatatatgaattattttttaataatataaaagccattgatgagaatttttaaaaaataactataattaaatattaattttaaaaatatgaattttaaaaatgaaattttaattaaacgatcaataataaaagaaaattttaaatttaattacgtgcttaattttattatttaatttaaaaaatattttttttcataataaattaaaaatatgtttacatttaacattattttgattatttttttttattaggttttcatatttattgttaggtttatcaattgttttttctgataatcttagagttattgttttgtatttcaagatt

SEQ ID NO: 270073 - DNA, 589 bp, Cannabis indica
aacaagacaccatgcgttcccctgtgagcttagagtgttttgtccctttcgcgtcccagaaggtgtaggaggctttcggtcatggaaggaatagtgcatcttgcggcaaggcactgtgccttcactggacctgggcctatttcaggtttgtatttatcttttggggatcaagaagactcagacaataattaattgggtgattctactctactttacgccatgtgtgtcttcttcggaaacatgaataatacctggaaaagacatttttcatatctaagtgtaaataaatcttatcgttaattttcacgtcagtgtaaatacagtagactgataaatcgtgggactaaataatttgaagcatataatcataattactttctactgtgatgacatcactataattgtggagaactatatgtttgggatttaatataacttatatattgaaactataatcatgtataaaacatgtaaacaaaacatatgacaagcttatatgatctctaatctttattgaaagtaaatatgattacaatgaaattgaattttatttagcgtataaaatcccaacagtataaccaatacatct

SEQ ID NO: 270074 - DNA, 500 bp, Cannabis indica
cgcctaaggtagttagggtgttacaccattattgaaagaagaaccttcattactcaaatttctcctcggagcagaatctggacaaaaaggcattaaatttcgaaaaaaatataagggcttataactctatgtttgcattcacatcaatggaaggccgagttgatacaacaatcaaccaatcaaaaggaccttatgtttttcgaatgagtggtcagaattatcatcttattggttctttgttgccagaagttgggaaaaaaccacaatttgctcaactatacatctatgatactgaaaatgaaatagggaacagagttgacacattgcgaaaatatgggaggaacattgaaattgaaaacgaaatcgttcatgaattatctaaaatgttggatcaacataataatttggtcaaatcctttcgaatgcaagggatagattcaaagcacaaccagaatctacttttcgtttacaactcttaagtagcaggacaagagatggtc

SEQ ID NO: 270075 - DNA, 1124 bp, Cannabis indica
taatttagaaaaaataaaatataaattgtagataagtttataggtatataatttacctaacgtacacaaaattatttataactctgttcaaaaaaattaaaaatcatattgagaattatatattttataataaacaaaaatgtgattatatattaacaaaatataaacaaaaaaatgtgcatacatgtataacacaaataataacaaagaaaaaaatacaaatcaaaagaaaacacttgtaaaatgtatgaatacataatagtcaataatagtatgaaattaagtatttatgttaagttaaatttagcaagaattatagaatataaaaaaaatatatatatatatatatataatagtcaataattattactatatatgtattaataaaaaaaattttaaaaaaagtttttgagaaaatggtaattaagttttttgtaaatattttgtagttaattaaaataatgtatacaagattgtaaatacttctcaatgagtattagtcattaatgagtactaagccaatttaactgtaaatattaattttaaaaatattaaactattaaatttttgtccgatagcgaataataaaaagaaaaattataatttctatgcataatttagctacttaaattaaaaaaaatataaaaaaaaaatacttcttcttacacaatatcaaaaatatatttatataaaaaatatttaagtcaaattcaatttttttatcacctttttgccaaaaaattttttatttatttattttttttttctaattgatggactgatccaactcatataatgtaaaaaatgagaaatttttttaattaaattaattataaaacgaattttttaatattatttatttataggtaatgcccgttaaaagtacacctatatataatagatgtagacaatcataggtaacactgtaacagttcaatgaacgttgaagctattataaatgttttcacattaggtatttgatcaaactatatatcccccaacaacgatctgtaaaagtcttaaatccaaaatagtgaattttattatattattattttgagattgtatgcataaaactctactgtgaaaaatggtgtgtaactctcattcttatttctaatttt

SEQ ID NO: 270076 - DNA, 574 bp, Cannabis indica
tggttagaggtaataaatagaaaagaatcaatttttattctattccttagtttggttgcaatttaaagtattagaaagacttttttatcatttcaatggaatgttctatcattttagtagaataactattctattttgaaatggaagtaaagattattccaatgcaagaatgttttttattgtttttgtttatgcattttaaattttacttcattcatattctcatttcctattcgtgtattttcattcatttcaaccaaacgtatcctatatatttagctgctctgcccctcctccaagtgctatactttgttacttgaagatgaataaattttttattttatttaacagatatcaacctggagtatgcatctagcaaagatcaattctttgatattgtttggagaccacattctaagtattaatattttcatatgggaatttaaggaaattgattagaatcctacaccagttggacatatcgttctatatgataattttactcctagctgtatgatgcaccctgatacttacttaaataaggtactctttctgttcatatagaaattttggt

SEQ ID NO: 270077 - DNA, 903 bp, Cannabis indica
aatctttcataaaactcagacaaagtttcattttcagacattttaagatcatgaaatttggtttgaaacataataaaactagaacgcctaacatcagaagtttcttcaaattgagtttgaagggtttgcaaagcatccttagcagattcacaagatgatataagcttaataaaacattcaactactccatcaaatatagcatgtaaagctttattattgtaagcagataacttatcgtctttaataggccatttaagtacaggttttaactttgaattacctttgaaatctaccataacaggaggagaccatcctgaaagaattattctccatgctttctcatcttcagacttgataaaagtactcattctaactgtaatgaccgcattttagattatggattagtaaaggcaattagcgttaattattgatatttttataattatgcatgaatttattagattgtgggtcccattaatagaagtgggcactagagttataatttataatttgtattatataagatttttgtaatttttgctcggcgacgatggaaaatacgatggatggctgtttgcgtcaaatgggtaagtctagaagttttttcttagtgggataaatatttgagataaatagaatatcaggtttatgcagggttgtggttttggaccatcctacccctaggcttaaaataacttaaatttaatgaacaagagaattttggtcattttattattgagttttggtggccattttgtggattgatacctagccatttagtgatatcctgaagtaagtgaattgttgggcataattcgtttagagttaattaagaaaaatcaagaaaatgaagagaaaagttatctctctctttgttcagctcccacaagactggaaggaacc

SEQ ID NO: 270078 - DNA, 535 bp, Cannabis indica
agctatgaataaaacagtcaacaacatactaaagttttgtaatctttaatcaagggttgttagtacagttcactgatgcccgttctttggtgcaagtaatcttggtttggattactgatatagtgagacatcaaagtgaaaatattgtgtataatagataatatatatgacaaggacagatatgaataaagctatctttattaacatgttatttatcataaagacctaatttatatcataacgatgatcaatagtaaatcagcctaaatcctgagttatcatgaacttctgttcatattattagtttctttgattcactcgttaaagtttctcaaagaagatgattcttacaatttttattttgggaatctaataatatagatggttgggaacatgatctacaattatgaaatcctgactttcctaacagatcgaatgttggttattcaaaataaaatgaataataaacatttattttttagtaaaaaacttttttgtttataaatatcaaaactgtttaatatttatttttttt

SEQ ID NO: 270079 - DNA, 1135 bp, Cannabis indica
tttaatgcaacaataaaatatcaaaacacaataatatactaaaacataatatacttgtactggatattacaagttgaagctcaaggttggaatggtgaattagtatcggtctaagctagaggaaaagctcgcctcaaggttcagaataaaattttgattttagacaatgttttgtttattcaaaattttagtagaaactttattagtgtttcatgtttacaatcacaaagttatcaattgaatttttcgtgttctaattccactatttctcgtaatggcattcaattatgcattgctcacatggaacaagggttttatgttttaagaccaaatataccaattgcgctcatgaacgaactttttaatgttgctaaagctagaaaccataaaaagcaaaagattgataataatgatgaaatatatctatggcatttacgacttggcaatataggctatgatacacttcacaggttaatcgaaggtggtaccattaaaaaatgtcaccttgagtgaattaccagtttgtgagtcttgcctagaaagtaaaatgactaagcgttctttctctacaaaggaagagcgtgccaaagaacctctagggttagtacattcagatgtctatggacctctcaatgtaaaagccagaggttatgagtactttgtcactttcattgacaatttctctagacatagttttttttacctaatgtaaaataaatttgaaatgtttgagaagtttcaagaatttcatgctttggcttaaaattaatagggtaaaacattaaagatcttgcgaactgataggggtggatagtatatggatatgcagttcaatgatcatttaattggacttggaattgaatcgcaatatactgcccctggccctccacaacataatggagtagcaaagagaagaaatcgcacacttttggaaatggttaggtctatgctaagctattcaactctatcaacatccttctagaaatatgctattaagatggcaaatgatattttaaatgtcgttccatctaaataagtccccaagacacctgtagaactatggaatagccgtatacctagtttacgctattatagaatctaagggtgccctactcatgtcttaagaaagaaagaa

SEQ ID NO: 270080 - DNA, 624 bp, Cannabis indica
attatcaacctcatagatgtaggaaaagctctagctcgctaccagggttattattgctatgttcctagagagacgtcctagacgatacgatttgcaacatatctattacacttttacattgacccagtcaaagcagatcaatcacaactgtgtgatatccagatattaactgcattttacgtggtatgtaatcaaaccccacgatttcagttattgttgtaaaatatcagtctgatttgtaattagctagccctcttatgtaactataataggagcaggttacactaaaaaagggacgaaaaatttataagagaaaaggccttgaaacggtatcagaaatttaataagattgactcgtggactatgcaaaattttaactgcaaaaccacgtaaaaaaccttcgtgttcatattttttccgttactatttttattttttctgtgcaagtttatcaccatttaggctcatatctggttaacaaaaatctgcgttaacaggtgatgtgagtttgatattttagttttgttgagaaaactaaaattatcaaatggtatttcaaagtgaccttgaagagtcatttcaagaggaaaatacacaaaaatgatattttataaacactttatg

SEQ ID NO: 270081 - DNA, 601 bp, Cannabis indica
acctccagtttttttgggaggtccaaatgttatgaaagtcgagcaatggctaactgtgatcaccaggatcctggaattttatgggcgtcactggaaatgatagagtggtctgtgccacttttcaatttcaagaggacgttttcgttcagtgggacatggtgtccatgatacatgatgttaccacaatgacctgggagaagctccaggaactgtttaatgccaagtattataatgaggcagtcataagtgccaagagaaaagaattcacccatttgacccagaaggaaaacatgagtgttactgagtatacgactcagtttgatcgcttggcgaggttggcctcgggaattgtgccaaccgatttcagtaaaaaggagaagtacttggatggattaaatgcgaagattcaacatgatttgatgattgctgctgacgacataaccacctattctaaaatggtggataaggcactgcgaggtgagggcgcagtgggatgcgtgatagagtctagtgggactccagttgttggcggggctcctaaccctcctgcaccaggttttagcaggggaggtaatggttcagccatggaccaaaaaaggaa

SEQ ID NO: 270082 - DNA, 986 bp, Cannabis indica
tacatgaccatagaaaaaaatttgaactaaaaaattatttcgaatactaaaacaaataaaaatgtattagtgtatcccttttaagggtacattgtagaattttccaatatcatatatttttgtttacacttaataataaaaaataattatttgagtatattataataaaattaaaataatttataatttttataaatataaaatattataccggtataaatataaaatatttataccggttaaaaaaattatttaatatatattatttataaactaaaaaatatttatctcacaatttaacttaatataaatgttttaaaaaaaaataataaatagaataatataaataaattgaaaatggaaaatgggaaatgttgggaaatggatcatagtttcgattagattccctttctgagaagatcacgtgccttgtttcccacgataatgtctattattattattattattattattgtaactattattaattatgtttcgaaactcgagcataatttgtcttttttatttttaccactctagtctactctactctacacttttaatttaaccctattattattatattttgggtaaatactattttggaccctctgatttacaaaagttaccaattggaccttgtgttttgttaaatgacaaaatggaccctgtattttctaaaatagtacaaataggaccctgaattgattttttgtccaaataaagtttaaattataatccgatctaaaagtgctatgacaaaactatttacattttttatatctgttcgtattaagcattgtcttcaaagttggttgtattaaaaaaaaaaattaatcaaaaattaagctcaaggtcctatttttactattttagaaaatacagggtccaatctgtaactttttgcaaaaccacaggggtccaaaaactagtatttacccctttatatttttcttgtaacagtgtttttattttcaatttttcaa

SEQ ID NO: 270083 - DNA, 865 bp, Cannabis indica
gggcatttggtctagtggtatgattctcgctttgggtgcgagaggtcccagttcgattctcggaatgccccctttattactttttatttctcaaaatacaaaggtcgtgagaaaatgacacgtgtaaatctaaaatagggacagaataataacaagatgggtcccactcaccccccctagattccttaaatccttatcctttaatctagtctctactctacacctacccgtaccgaatcatttccacctcttcttcttctttttcctctctctgagatttatcttgagcttcttaatcaatggcaggtaattcattattattctctgtaatctgcgttctccactcgatgatcgcaatcaccagcggagctctaatgatgttctacatgaaagaaatctacagcttaggccacgggaaagagatcgcaatcaagctcatgggctccacaccacacgatcagctactcattcggacctccgattcgttctcgggtttgctgctgataaccatagggtttcttctgttgatggtttcgttggttagagacaaagagtttcagagcttcttcgctaaagggtgtacgattctccatgtgttgatgggtctgtggagattttacttcgaacggagggttgaagatctcgcttgggattggattaggcagacacttggcgacgtcgttttggctctctcttgggttttttttcttctttattcttggagagaaaaatatgattgatttttttttaatgtaaaagattaacttttgtatttaattaattttatgtatttataagaagaaaaaaatgtctaaaagggtttatgtatagtaaatattgtctttttttggggtgaataatgatt

SEQ ID NO: 270084 - DNA, 1252 bp, Cannabis indica
ttttttttttttgaagaaaaagtgtactctgataaatataactagttagacctcacgatcattatataaaatatttgtcggaatggaagttaacgggagaaccccaaacctcttgtgggtaaacgcccacttagccacattctgggcagcataattacagtccctgctaatataagagaaaatacaactagaaaacaaatgagagtaactattacaaaatgagacatagtttccaataacccagtgagactccttcccattaagcgcattgataactaccctcaagtcactctccacaattacaaacttggcaccaatatccttagcagtcgaaatggccaaacagcaggtcgccgcttctccacaaagagcatcagaaaagtcaacacaggacgtctgaacccaaaccaccctaccaagaaggttcttgacaacaactgctaagcacatgctatcaagccccactttaacatcgcaatttagcttgatccaatcctgaggtggaggagaccagctcaccttcgaacaagggctaaggttagggaaaattgtaccatgtaaatctgcataggaagaacatatatagtcaatacacttcttcacatcaagaatatagttattatgtaccttgttattttgagtgcgccagatggtatcaagcacaacagatgcatataggaaaacctcctccgcaccaatctccttgtgttaaaggtcccaaatgaattcgacccattcccacatacggattccggtgtcacagaccggataaataccccaaggagatgattgcaggcatggaaagccacatcacaaataagaaaaaggttttctaaagattcatcctccctcccgcacgaagggcaactcacatccttaatatgaaatattttcctgatcatagacctgacagggagggaactggagagaatacaccaccacataatcttatggtgctccaacactttactgttccaaagtttattccagagcgagggagcaacctcacagtatatgaaaagagaatcaagcttttatatgagactcgccccgttggaagtccaacactctcagatgagagaagtccaacacgctcatatgcacttaagcttaaagatagaaattgttaagatttataaaacactcaaaaatataaataatcatagatctaatcatatttagtgcttcaatataaaaaatcctaaatcataaattttctgctaaattaaagaagaagatgatgataaaagat

SEQ ID NO: 270085 - DNA, 491 bp, Cannabis indica
aaaatttttgaaatggtgaaaatttagtggcagaatgcatagaacggttttaagcaaattcaacatgtggtaagcaatcctcccaagtcttaatagttttactgatgatacccctcaataaagtggataaagttctattaactacttctgttggaccatcggtttgaggatgacaagtagtagaaaacaaaagttttgtcccaagttttcccccacaatgttttccaaaagtaacttaagaacttagcatccctaccagatacaatgcttctaggcataccatgtaatctgacaatctccctcaaaaataaatcttcaacattagaagcatcatcagttttatgacatgggataaaatgagccatcttagaaaatctgtctgccaccacaaaaactgagtccctcccacgtttactcctaggtaaacccaacacaaaatccattgagatatcaacccatggtctaaagaccatttggctgaaccctcgatt

SEQ ID NO: 270086 - DNA, 469 bp, Cannabis indica
gattgttagcttattcaattctcgatattcaatgcacatccgcaaagacccatctttcttcttgacaaacaggataggagttcctcagggtaataaacttggtcgtgaaaaccctaggtcaagtaacccctagagttgaattttcaactcttcatgttctgctagagccattctgtaaggggccttagaaaacggttctgctctgggtgccaagtcaatgaaaaaatcaatttctctctacggtggtaaacccagaagttcatgaggaaaaacatctagaaattcccgaaccaacttgatgtcttctggctgaacagactcaggccgagtggtatccaataccacggccagaaactctagacatctttctcgtaacaattccctggctgttagtattgaaattgttgggatatgagatccttgaacagatccaacaaaaataaatggttctttgccttttggttggaag

SEQ ID NO: 270087 - DNA, 628 bp, Cannabis indica
gcgccaaggtttttagatcctgaagactggttagatatgtatattggctgcaaggacctgatcgactcatggtttattaagctttaagttaaaagagagcttgttaattttctgattacctgattatttgaattatgttgatatcggaatggtgtgggcagaattataatatatggaaatacttattagtattgttattacctggaatgtgaccgcaggtgtatagattatgcacccgaggtagactggtaggggtacccgcgagctagctgggctcggggctcctagtgagggcgagaaccctccaccaccaccaaactgggaagagttatatgctgcaatgcaagagactattcggcagcagggtgagcaaatcagagaactgagagagcagcgagctcagccagctctaaaccctaatcctgatcctccagcacctctggtagtgccaccggatgtagggaaccgtttagaacctttgtatgagcagttccgaaagcagaacccgccagtgtttgagggtggtgctgatccactcaaggcggagcaatggatgagtatgataacatctatttttgattttatgcgggttgaagataatgactaggtcaggtgtgctacttatatg

SEQ ID NO: 270088 - DNA, 700 bp, Cannabis indica
agttatatttaagttggaaatttgattttagaacaacataaattaaaataattttttttctcaaaatatgtttttattttattttattaattattttcccactactttcaaattgcatttattttaaatgcagatattttgaaattttgaaaaatagattaaagtagaaaattaattatttaattttagactaacttaaatcaaataaattttacattaatgatttattaaataaatagactaaaatatattatattagaaaataaataaatagttaatataacacctagatgtttattttctaaatagacttttggtatgtttccagacgtatttaattaaatagaaattaatatttaagttgagttatttaagaaacttaaatatttgatatttttcttaagaaatttaattacataagaaaattatatttgtgttgaaaattaatttttttttaatttaattttagatcaacataaattagaacaatttttcagcattttttttattttattttatacaaatttcgaaattgtatttaattttaaacaaattggatgtcaaatttagtcatgtatatttatagaaaattaaacttgagttgaaaattaattttaattaattttggacttatttaaattaagtaattttcataatatttattgaaaatgaatacgaagatggaaaataattttatata

SEQ ID NO: 270089 - DNA, 521 bp, Cannabis indica
tttttgcaatagtagcattttctttccaatgacatttctgttcttggaatttagaattgtgtccagactttgatttcttgaaataacagtccttctccaccagtttctgacttgtcatcaacctttctctgaatttccttcgagttgagagctgctttaacttcagacatggttaatgtgtctttgccataaaggattgtatccacaaagtgttcataattctttggtaaggaactcagtaacagaattgcttgatctccttcatcaatcttgactccaatgttattcaagtccaagatcagtttgttgaaatcatcaagatgcctccttagttctttagtttcctccatcttcatggtgtaaagtcttttcttcaggtacaacttgtttgctagggactttttcatataaatcgcaccaagtttttcccataaccaagagcagactcttcttctgcaacttctcgaagcaccttatcacccaaactgagcaagatagcactgtgagccttcatttcgatt

SEQ ID NO: 270090 - DNA, 589 bp, Cannabis indica
gaaaacatgttctcctgcctaaaattcaatgtctttgcgcttaggatctgaataacttttctacccgctttgtgaagcaagctgtaaagaccgcttagctttaatttggaaattagcagataattaggacttaattatgaaaactatttattatcattgaattaattatttatgacgatatatttgaattcagaatgcattttatatatcatatatagaaatttcataattttgcatgttttgtgccccgcaacattagaacgcggtgtttggctattagaatcagatcctactatttttaagtatagcgggacaataaagttagacattgggaatggcggcattatctctacggagagagatgtgaaatttgtactgattataaaagtctcaaatatttctttactcagaaagatttgaatatgagatagaggcgttggttagagttggttaaggattacgattgtgagatcctttaccatcctgggaaagccaaggtagtggttgatgccctgagtagaaagggtctcaggcaggtaactagtatggtttagatttcacctcacttagcagaagacatggtcagatc

SEQ ID NO: 270091 - DNA, 682 bp, Cannabis indica
cacaggaaaaaaagaaagcatacaagaaacaaaccccgagccagcacctcagccaagtaaaaatgaagacaaaccgacctggaaactacatgtggatgggtcggctactgatgaattatttggcgcagggattgccctcgtcacgcttgggggcaacacctacacggtgcggtcaagttcgcaatcaaggcatctaacaacgaagccaagtacgaagctttaatcgctggactaaaactagcccgggaaatgaaggtcgaacacattgaaatctgcagtgattcataggttgtggtaaatcatgtatccggcgaatacgaggcctggggagaaaagatgatagcatatttgagcaaaatacaggacctgctcgcacaattcaaaagctacggtctcaggggaattccaagagaagaaaatacaattgtagatgcgttagctcgattggcaagcaacaatgtaagtgacaaggaaaacttggtccctatccatttccttgaagagcctagcatcactggcacagaagaaatcgaaatgattgacacgtccccaaactggatgacgccaatagcagcctacctcaactctagggaactcccagataactgaaaagaagctcagaaagtgagaaggaaggcaacactgttgggttttatgccctaaataaaaccctttacaatct

SEQ ID NO: 270092 - DNA, 521 bp, Cannabis indica
gggtaatacccattaagaaatgttcaattaattgataataatatatagataattaaaaataaggtgtccaccataacacattatttttgcatcaaacaatcaagttttataattttagaacaacataaataaaaagatgtgaatgaaagagtattagtggaaactacatagtcaatgtaaatcaaaataagagaagactatgtcaaatagaatgagaagaaacccataaaattttctatgatttatagatttcaaaaaatcatcaaaaaatatttttagtcattttttaactgcataattatcatcaaattcataataattattaaacaaagtcaaaaaattaatgaaaaatcatagaaaaatcgtaaatcaaattctatccaaaaggaaaaaaaaattgtcaaaaaatgacgctgagaggagctgcacgcactgttgagattttatgtcctaaataaaactcattttaatataatcagatttactaattaataaaatatgagaaatcattttatgttgca

SEQ ID NO: 270093 - DNA, 706 bp, Cannabis indica
taatctcttagtcaacttccacgtccgaaatcacatgtcgaaatatttttttttatagcagtattcatagttacagtatcatctgtgtaaattttttaaaaattctgaatagtttatagtactgaaaacagagttcctgatatattatagtttactacgcgcgttcaaaaaacttcaaacgtatttttagaactgtaaattattcgaaattttttaaaaatttacaaggataattttgtaagcataacgaacacccccgtgaaaaattttgaaaaaatattccgacatgtgttttcgagcgtggaagttgactaaaaggttataacagaaagttgacggtagcactcctctttttttatttgctaattataatagtattatttttaggaaaactaatatttattataatctatcaactattatttttttttaaaagaaaacaattagatgaataacgctgctttttattttttttttaaaaaaatccttattaaattaaaaaatataattaaattacactaattttaaagcaaaaagatcttaaagaagcgtttacattttgatttttttttttaattattttctttaatggaaaaacaatgtgtcactagtaatctaaatggttttgtttctatttttttcttaaaaaatattgaaatgaacaaaatgaatctaaatagtgatggattatttaaaatcatatata

SEQ ID NO: 270094 - DNA, 565 bp, Cannabis indica
tttatgtatatttgttttgagcaaaccagtaaacatatatatatattttcgacaaacctgataaattcaagatccacatatatatagttaagtattcaaatacgattgtaaaatctaatctgaaaacaaaatcaaatggacaatgtcattcatgctcaactaaaactatatatactgttatgattacatcaacccaaatattcttacttgttataactcaagtaaaaatgaagaagataagcaattaaaaaaaaaaaaactcaagaaatagatctagatcccaaatggagaaaaagaaaattaacgaatgaaaaacgaaagatttacattacatggttgataaatctatgagaaatgaaaaccaagagaaagaaaatcaacctccgtcgttgccgtttgcgagagaggagctgagggaatagttgcaccgttgtcatctgcgagtagggaagaaccatgattcaggtacctaaacatcaataacaaaaatagattaccaaaaaaatccttcaagtaacaaattttagcagggaagtgtacgatctaggtttaaataaagtattga

SEQ ID NO: 270095 - DNA, 693 bp, Cannabis indica
tgctttttcacattatagtgctatatctttgctaatcaaatatatttttctcgaaaaacgtgtcaaatcaaaacttttatattaaatactaacttgaatatatttacaaaattatttacaagtatcggaattccatttttaaacttttataaaaaaatattcaaaatacataaccaggtcgcacaatgactacaaaatgataatcccagatttcccgagaccgaacacttcaggtcgggccgccacgacatgtacaacctcatctcagccaggctcaatcctgttcagcttttgcctttcctttacctacacatggaagccaaactgtgagtcgacagactcagtaagaaaagcatataacatatcatataataccgacttgtatctaggcacccatacacctacttacatggcttaacaaatgagtaagaacgttccatactagggtacaaccactataccacatacactacgtaccttactgtacgagtgttggtagggtttgttttgcaccctgagtacactaagcgatataccacacacaccctgtattttccgtacttgtgctggtatcactataatgtactctttaacaatacacactataccaatgcactatgtaccataattgtacgtgtgttggtagtataataacatataagcatgcatatacacttaacatatacatacact

SEQ ID NO: 270096 - DNA, 996 bp, Cannabis indica
aggattaagatcatttgacctaggatcaactaggtgatattgaattgaatagatattacggtaagtttaacatatctgatccaaagttcaatatcagtccctttcgatgcatactccatgcatccaacccaagctttactttaaccaatgccctggaaagaacatagcacttatccaaggtgcaagtaaactatgttgtagattgtcatatcagttaaaccctctatgtacagataaatctaggaatatatatttaatcacataatcttgatttctaacaccctaactagcataggcgtgttaacttgatttttaacgtactgtgcagctcgtcgctaatcaaggaggttattggaaaaacgtgaataattaaaattttgctttttaatttaaacataacgtattatacttataaaatttcgggattccatttaaaaaatacaattacaaaagtttgctattcatttataaaagattttttgcctagcgactaaacaacagaagccctgatgtcccgaggatcgtacgctccaggcctaaccgccccgacatgtacaatcttcatctgctagctctcacggctcatcagctttagccttgcccttacctacacatagcaatagcattgtgagtcgacagactcagtaagaaaagcataacataataaatatactaaaatcccgggttataatcaagcgcccatacacctaaccataaccctaactgaatcaggaacgttcttgacaaagtatgactaaccgcgaatccagcctatactcagtactctaattgtaccgatgtggtagaagttattccatactgtttgatagcctagcatatatctgatagaatctcggtgcaactctatgtacacctcactgttgccctgatatgctaatctgatggctatataaaatttgcctaacatatatatatatatatataatatgttattctgacggaaactaacatttacgctaaatatgtataagcata

SEQ ID NO: 270097 - DNA, 491 bp, Cannabis indica
attgaccttgtaaaaaaaaacaacaaaaaaaccgggtatattcaaaatgcaccaaaacaaaagaaaacaacgaaaatgaaactgattatatttaaacatgaaccaaaaatacatgttctataaaaaaaaaaggttctatataatatatacaatacaaacaacttaataacaaaaaaaaatatataagataactaaacaaataaccggttaaaaaaaatcaacattaaacaacgacctttcaaactggaaaataaaccgataaaatatacaaataacattgggcaatctaagtaaacatgaaaaaaccggttaaaattaaacaaaaaactatacaaacaaaacacaatgtaacaacaacacttcacaaggaaaatgtaaaaaccattaaaatatgtattacaaaaagaaaaatcagaaaaaactaaaagtatacatatgctggaaattattttaccaagatctatttactatcatgtatgttggattaacaa

SEQ ID NO: 270098 - DNA, 772 bp, Cannabis indica
aaattagaatatttttcttagatgttaaattagaattaataattaagttgattttattcaagatacttaattatttgtttcttatatttaataattttaattaaatagaaaattaaatatttaagtagattttatctagacacttatatataaattattttcaagatatttaattagatagaaaattatatttaaattaggaaattttgaacaacttaagttagaataattttcaaaatatatttattttattttattaatcattttctcacaaattttgaaatgcaatatatttaatgcagatattttttattttttctaaaatagattaaagttaaaaaattttaattaattttggacctacttaaatcaagtaaatttttcattaatgatttattaaaataaatggtctaaaatatattatattttaattagaaagtaagtaattagttagtgaaatatctagatagttattttctgtatgcttgtggtatttttctagttatacttaattacatagaaaattaatatttaagtgattttattcaagatatttaaatatttgatatttttcttagaaatttaattatataggaaaattatatctgtgttgaaaattaatttattaattaattttagaccaacataaattagaataatttttcaagatttattttatttattttatgtcaatttcgaaaaatgtttttttttaaatacattcgatttagaattgagctatatatatttatagaaaattaaatttgagttg

SEQ ID NO: 270099 - DNA, 573 bp, Cannabis indica
tgtataaatgtttaaagggcggtccatagtatatttgtaattttctttttcacattttaattccatgaataatgacaattacaacaaaaagtttgaatttttccctacatggtcctccataagtatttagcacttcaaaggaaaatgcaaagccaaagcagccttatactagaattgaaacatctttattgttgtttgaaaacatgattaactatgcacttttaagataaatggaggagagatacaaacaaaatacccgtagatttcaactcttcatcaacttcctgaaggcaaaatttctaagaaagaaaggcaatcgacataattgtggaaaatcggccataacagaaccaagggggtggattcttcttcagtatagcttctactgtaaagaccgcttagtgtaatttggaaattagcagttaattatgtttaattatggaaaattacttatagatatttaaataattatttaggctgttattattgaattctgaaatgcattttatgtcatatagtgattttcataattttgcatttccggtgccctgtaacatggaactcggtgtttgg

SEQ ID NO: 270100 - DNA, 870 bp, Cannabis indica
tgttttcgatttgccaaatagaattataagtatagttagtggtatttaatccaattccctgtgggatcgacctcacctgtgtgagctttactacttgattgcgtatacttgcgtagtgtttataaattcagcaacacacacataacacgtatttacagtattattcacaagtaactctactctattaaaattttgcataaatataatgctatacaaaattagaaatatttgaacacatagtaattaaattcttctaaatttaaatattaaaatttaggataataaagaatatattatcaaaacaatattttcatttcatcaatgaatctctcgtaattattcaaaaaaaaaaaatgacattgtaataaggttgcgcatgctttggcgcgatcttctcttatggaagctaaccgtacttttaatagtgttgagttacctactgtaattgcttccttgattttggaagatttgagttaatgaaattttcatcattattcaaagaaaaaaaaaaatgacattgtaatcgattattctccctttccaaaaaaaaaaaaaaacaaaacaaaaacaaaaaactagattattctcttatattactatcaattaatatataatttgcttaaaactatagggtgtaacattttttttcaaaaaataaaaataataataagtatatatatatatatataaatagtagggtgtagttaggatattttggtctattattatgttatttttagagttaattttctttttccattgttaatttttagaataaaattatgattgttttttttttaatttcaagtttcgacacttaaaatgtataagttggtcaaatctacaaaaaaaaacaatctataaatagag

SEQ ID NO: 270101 - DNA, 957 bp, Cannabis indica
aaaaaaccctaagtcctgcaacattcacaactctctctttaaaatggagaataccactcccatagcagtaacccctgttgccatgttcgttccatcagtgtcaactactgttgatcctacagtcgtatctatagtcgaggctaatatgtctaatccctgttgtgacattgtcctttaccaatcggaggttgttggttctgctcgccattcgagtcctgagtcgactccgtccccgccttcatcgccaatcattcggaaacctcgtacgtttcaaggtaaggctcctcccctgtctaaaaaggctagtccttctatgtcgtcaccccctccgtctgtgtcaaaacgagtcactagttcatcgtcgagtctacagcctcaatccaaacccgtaggacctcctcgtgctccatctaaggtgtatattccttcccaaaccactgttcagccaaaacgaaggtcctcacgtgataccacgtatcaaccacttgaaaagaaatccgagaccgaacccatttcagtcccatctacagactcgtttcccaaacagtcgtctaaaggctccaaaaaatcgaaatgtccaaaagtccccatagcatctgttgacccatccactgttcaatgctttgttgatgtctccaaagcttcggtttaccaacgatggtttggtagtcgtgacctttggttcgaacaagtagtcatgttagatgattttcctgaattgcatgattttttaaaaattaggaaatgggtaaacacggtcactaacttgtctgcacctcatcccattgtagttcgagaattctgtgctaatctagataggactgttattgctgagggtcatccagggtgtgtgagtgcatttgttaggggtaatcgtgttccatttggtccatccactattgcatgcatgttgaaagttgagtccatcaggaatccaacatatgggaaacaattcaa

SEQ ID NO: 270102 - DNA, 849 bp, Cannabis indica
agcggcactgtatctagtttggacagctccgaacctggaaaaactagcctatacagctgcctgcgcgaaaacacttggtccataaaccataggggttgtaaaggtagttgctggagggtatatggatggagccttcatctacaaagtttgggcatttgttacaacggcataagtgttggaagtactccgtatgcttaggcatatgttgttggggtttatgccctgaaaatcctataaagacatttatgattattaataaaaagttgaacattttgatatatgcttgaatgttaaactattaatatttattattgaataatttatattgaatattataaaattctttattcatatatgaggttgtgacttgtagttgtgcagagaactcagaccacttagctatgaataaaacagacaactatatattaatgttatagaatctttaatcaatggttgctagtatatacggttcactgatgtctgttctttagtgcaagtaatcttggttcaaattactgatgtagtgagacatttatgtgaagatgttgtatataatagagattatatatgacaatgatggatatgaataaagttttttttattatcatgtcgtttatcataaagacctaattcatattataacgatgatcaatactagatcggcctaactcctgagttatcatgaattcttgttcatgttattagtttctttgattcactcgttaaagtttctcagagaagatgattcttacaacttctgttttggaaatctaataatgttgatggatgtgaacatgatctacaattatagaatcccgacttttctaacggatcgaatattggttccct

SEQ ID NO: 270103 - DNA, 613 bp, Cannabis indica
aaacactaaacttgaacaacgaaggaggggcgctggtaagccattagagcttgaggtggatcttgaaaccggcaaagtagttgggactgaagccagtgcttacgttcgatttatgggccagcaagtatccattttgtctccaggtcatcattataactttttagatgtaccccaacaatataaggatcaagtacctaatcaaataagggtgagtgattttcaattatctatgcttataattattttatatccttatttataaattaatataaatttcaaattattttattacatagtattattttaatattaacgggaatccccatcgagacctacttatggggactttatatacggagagggtggagaggtatagtgagcaaaagaccaatagacacaggtattttaaacaacattacactaaaccagaagattgagagaaagatcttcaatttcccctgactacctgtgtaatgaccgcatttcataatatggattagaaaaggtaattagcactaattattagtacttttataattatttatgaattaaattatttatggaccccattgttagaaatgggcattggagttataatttctcaattccggag

SEQ ID NO: 270104 - DNA, 782 bp, Cannabis indica
gcaatgagatctatgagaagcttcatttgctagttagtgaaatgaaggtggctggttatatgccatttattcatttcgatgaggaggtagctgaagaagaaatacatgaacaagatgagcttggaaatttcatgtacaatgcttagttttgcaactatttttaaagatatgttaagtttctctgaaacattgagatttttgagtaaacaaaattgaaccttttgtccaactaatcacggaaggatttaaattatatctattatctactcacaatgaaaagatacatcatcttataactagagaaaatatactaaatgatccaaatttagtatcagaatattttttgtgattttgaacatatgatgttttttttgtttttttgttttttaaattcagaaatctggtgagcttgtatgctcgattattcaaaacttaattataccgtacaacaatttagttagagttttttttttattttacttgttcgatcacttccgaagtcccacatattttatttactataattatttttaaaatcatccttaaaatatgcctcaaaacatattaatcctaacttctcaccaaaatatattaatatattaatagatatattttaagtataaatattgtggtattttatgtccagatgtgaaattagtatcaaattcaattaccttattttattaacatttagaaataagcatagctcatttttgtttacatgcatcatattgatatagtttgatatcaaaaaataacttgtgaaaaagtgaaagaataat

SEQ ID NO: 270105 - DNA, 557 bp, Cannabis indica
ttttttgaaattgcccataaatcacctcctcgctgcggcgccacgacttcctcgtcacgggcacaaggttgctcgccgcggccatgacttcccgctgaaattttttttgtcacgtgattcgtattttggccataatgttttcaatacaactcaaaattagacgattcaagatgttccagaaagctaaaaatgtgatctacaactttcattttaagctctaagtccatttctgcctttaaagtcatcaaaatttgtaattaagttttgttttgaaaatcgagctcgttggcttccactattttccaccaaaatgtgctaacatccctccaattgaccctaaatgcatgattagtctttaaaatatccaaaacaattaaaatcacactaatcaataatttaaagaatcaatttaagaatattaatacataaatttatcatatttataagacaaatatggactcatgagtgcacttattaatgtatctttgtccttgtaaatctgtctctttctattgtttcgtgtcatttatctgtgatgataatcatttctgtgttgt

SEQ ID NO: 270106 - DNA, 702 bp, Cannabis indica
ctcaaattaaaagatgatgaacacacttgccttcagtcaaaattttgagccatcttctctatcttattcgaacccttcctctctctttctctcttcaatatttcgaaccctatagtgatagagtaagtgcccacacacatcaagtggtactcaatcatagtgtgtaaggctgtgaagaatccaattcaagagaaggagaatcgggctcagatcttggtgatactctgctacagaaaggatacaagggttagagatctgagcggaaggagtcatttaattccgctgcacccaatgtaaggtttctcaaactttatatgtgtttaaattacattgttttagaaattcatatttaggatgttaaataacatacatggtagtaaatctagatcctggtaaaacatattccaacaacggtgtctgtttgacgagtcgtcttcaccactagactcatctaatcattgtagagaacaacctacactaagccatttcacctagccctctactttttttggtgaagttttggtagctctaccccttttcggtgactttccggtgatattgtgtaccgtttcaataaatggttggcatgggtgtgatctactcgttgagatcatcgtttttgatatatatgatccctatttttcagtgacatttccaatacaccgatttctgctaccaccgatagttaatgtgcaccgctta

SEQ ID NO: 270107 - DNA, 709 bp, Cannabis indica
accacattgcatgttaagatatgatacgattattatcatttatgaattgattatcatcgagtattaatgcagtaattatacgttttgtaaagaaagagtcattactctatactaaaattattattaggtttcttacttttcagttacctcattaggtaacgacagtgacaatagatgcctgggtaggcttatcatgattgtttcattaggccacagtataaagagactactactctaattgaaatcattgttaggtttcttatttatctattgttaattaaacaataatagtgacattgattgtctcatttggaaatgagaattagcagatactttatgaaatatcgagaatagtttgttctattagaaaaatacttaaaattgttaaagttgtgatatattgaattaatcaatttgaatatatatataggagatatctactgtacgtcctttagttttgatcccatagtataaggtagtaaagtaaaccaatgagaagttaaatagatgaaagtcttctttaattacagtggactgttgtacattataattgaatttatttattattttatataattaaaattactttatataaagggaataggcatacttgaatattttataagcgcgtgggaaaatggagatttgtagtttttttattgttttttttttctgttttttttagtttattattactaaaacttaatat

SEQ ID NO: 270108 - DNA, 1069 bp, Cannabis indica
tttgtggttaagtatttaaaaatataaaatccaggtagttttgctaccaacattcctacttaaaattataacataggtatgaggtatatattagtagtgacccccaagaaacaaaagtcattctattctcatcttctccaactaaagaacatcaactcttgtattattgaaagatcattactcaaaatcaccacgaaagtcatctctatcaatggattaaagtacgcttttgttattcatgttcttattctttttgaatcaatacatgtattatttagatttatatttatacacttataataactacatatgtttatctatagaattaaatcttgttattgcatattttatgaatgataaataattataacataccttaccattgattctaattacttattagtatacatgttgttgttacagattcacttatttacccttaagttgaataacaccactcatagggtttgacaaatatacccttacatcagatacaacaaatatcaagacagttacaaagacagttacaactaaaaacagttacaaatatcactagggctctgccctagatcagatcacagaacagtatataaaaggaggtgcttttctcagatacaacaagcaataatatacagagcaaaataagagatacaacaaaagtaaatagtcacagccagagagaacaagagatttaacaacagagaaaatgagagccttttggctgtgagttgtcatctccatgtgagctcctcctagagtgttcatgtaaaagaaaagagagttttgttagtatcaaaagtgagaaaaacagagagaaatataaagttgtaaatcaaagattgtaacctattttgagatgaatggattcaagctttgagggcttgacggagaagtagccggttgtttgggcgaactccgagatcaaagttttggtgtcatcttcttaatcactgtttgcattctctcatctcactcttattacttttctggtatttgtatttgtgtatgtgttcatgttcttgagttttcgggtttgatatgttttggccgaaagtttaaaggggatttt

SEQ ID NO: 270109 - DNA, 1080 bp, Cannabis indica
tgcccggagtggctcgcctggtcgctgttttacttcgacctaatctccaagatgcaatgggagttggcgtgaggaagagaattgtccatggaattccgaagagaaggttttccatgaactcaactttcctggagcaaacttgaaataccattgctgtgcggcctctgggagagttgcgtggaagattctgcaacatacgtctcctcgcaccccttgtaaatccatttgcatctcgaaatacttgagatgagagagaggatcttctctcccagtgtacatcttccacgttggcatcttgaacttgtgaggtagtggcaggaggttgatttctggtgagaagggagttccgcgtgcacggtctaactcaagatcgttgttacgctgcccagccatgccatgaaacatattcttcagttcgtcaagctgagcctgtacggctgggctgacttgattggcattctagtcgggttgggccacgtcagcatctttctgagcggggatttgagtatgggctccggactgcacattcgttgtagtattctgctcgtctgttccccttcttctgtttaggtcgtcccttaggtcatgggttgttcccaacctatcgaacatagaagaacctggctgccttagcgattggttcgcttggttggcaggtggaatggctccattattttgcgtggatccatcgagcatgactcctcctgatgaattcccggacaaggtctgtccgcctacctcttggcccacgagtggaactcgtgaccggggattggacggctgactgttggttgtctgggaagcattcaccgttgggtcatcctcggtttctccaaggggaatgacgctcggcgcctgctggcctacagtctgataggctcttcgtatcagcacagtggcttgccgactacgatcttcgatttctgcatggtgagcccttaatacctccatctccttgtccctccactcggcgaacatacgcctctgttccgtcaaacgtcgaggtttactgcagcacgtaattcctcctgatcgtgatgcagggtatgttgtgaccctgcatgagtccaagcgcagcgc

SEQ ID NO: 270110 - DNA, 519 bp, Cannabis indica
gcccgaaatgtaattggaattgaattattggcattgtatttattgatgtacaatatgaaagttatttgagttttaatgggtgtgaaaggacattttcgcccttggtttatgcttaggctttatttggccctaggggcaatttggtcttttgacctttaaattagatatgataaaagattgaatttttggattaatgaacaggaaattctggttgtctttctctcttgcccgacccctctctctctctcaaacccttttctttttcaattttgatttttgaagaaattgcttggaatttgccttgaattgaagctttgagtttgtagatttttgagcttgttcttggattgagtttgaggtaactttctatggttttaatttgagttttattgctgaaattaattgttgaagagcatgaaaatatgttgtggtattgctcatgagcatgcttaaagctttaaattcataagtttgtatgggttaggtttggacagattttagaggatttgattagtgtaa

SEQ ID NO: 270111 - DNA, 822 bp, Cannabis indica
ttttcttatttattttttttttaataattaacttattcacagccaacaaaatagctaacataagacaaaagaagtcttgcaaaaagaccttcttgcccccttcactaataaaagtaattaaaacatcacaagggtaaaatggtcatttactaaatcccgaaaataccaataccattaaaacctaacaaagataccccgaataaattctacattatataaaatgcgactctctataggcccaacgtcgctttccacagcttccgaacacaatcacagaaattgagaaaatttacataaataacataataaatatatacgaactcaaataaattcccataattgtattattattaataataataaaatctcatacataaaccctaattatttaataattcaaggtattaatcatatgcggtctttacaaagacagagactgcatgcagcctcaattggccgaggatactcggcatgtgcaccccttcagacagggctgtgtccgagaattctcggtcagctccttgtctgaacgtgggtcctgtccgagcgattcctagctccgcgtgcgcatacgtgtgcaaccaaaaatagatattttcattcaaattcaaaaaatcataactaattcataaaaattcgcaattaggttctgtaatagcctaaatttatcaatttttcgtctactttctagtaaaaatatttccagaatgaaataaaaaatatttttataacatatactacgatttacaaagaatcatcatataagcacataaaccatcatgaaaccatccaaatcaacgcaaaacatcgttttaattcata

SEQ ID NO: 270112 - DNA, 563 bp, Cannabis indica
tcattcaagtgagtttcattttactagattgttgtttcttggccatgaataacaatttgctaagctagatcttgtaccagaagggctagatctagtacttcaacttgaatggagcaagtggaaaacctagatttaggtttttttatgtaagtggaataagaatatttcatttaccttgcataacttataaaattaatgtttgaatagtgttctgcttgttggtttgatataggaatatattgagttaagtggtagactgaaatttgtgagtgttggaaaattctcacaagcctagaggaatttttgttatctctgtgtagaatgctggagtaatgctgaaccaatgttgtaacatcgggaaaaaaacctgagtagaaggaattagctatttaagccatttttgccatattacatttttcatcttgcaaataatttttctagcagtagtagtattaatgttagcaagtttaattcatgacattttttattttgaatcattacttaaccattcgcatgttatttcctcttgctttaagttgtaattagtttgttttacatcaaac

SEQ ID NO: 270113 - DNA, 825 bp, Cannabis indica
ttcacagccgccagcgtcccccccccccttcttctccgctcgtcgtcgcccccccacccttcttctctgctcgtcgctgccggccagcctcatgccatcccagcccctcgactcccttccagccagcccaacgtagacgagcgccggaccttcacccacccagccagcgtagacgagcgccggacgttcacccagccacttcgccggaccttcatccagccacttcgccggaccgtcgacactccacaaccgatctcctcaattcctcgggtatggtattatttatatatatatatgttttttttatttgtacagaataataagttagatttatatatatattatttaattttaattttatatacatatatgtttatagctgtggtagtgatcttcacgtttgattgtgattggtgtagttttatattatccacaaaccctttaaattggtaatggaaatttcggccaatttggatgaatcggtaatttcatattaacaaccccttcttgtatatgattctttctaagtatggaatccctctaattaaattcagtgatgttaatttgtttattaggaagatgagtttgactcccaatgcaatgttttgctgtgataataataaatctgataatgttttgctactggtttattataaatacacaaatgcatgttttctaatagaatagagtatggtggagttttggtagtgtagtacttgccacttggttagttatttcatctttattctacctaattaacatgtacaatttcatataataatacattttacttttatatttgcctttatatgctcttatatattc

SEQ ID NO: 270114 - DNA, 1308 bp, Cannabis indica
gtcagcttcacatcgagtctcgaacggtcatactcgacacgtgtccccatccaaaggcagagccagctcggaagaagtctacacgcaacctcagaggtcccgtacagacttgggggccaaatgttatcccaaattttgcactctgacgttgcatcacgagaatggtgacacgtggagtccacttggagcatctgctcgggaagaatagaccgagcaggatgcctcgctggcacatccaggatcagatatccagcaatccgtgcagagcactcaatacttagcgaattcagctttcgcatcatgagtcatcagctcaatccctataactcagggatcaacttacgtggatacggcatacacacgatcccactatcagtgtactcagcctcaatcccacgatccttgcattcagcattgatcacacgatctttctgtttatgcgcattgtaacgagagaggaaactcttcctcctcaagtttcccagccctataaatagtgaggaatgttcactgggcaaggggaccgagagattgaaagtcgatacgcagctaagctaagactatattattatctaagaattatatattcagagatactgttgtaagagctataagaaaaggaatcttcttccttgttcttaagtcaatacaaataacgaggattaggctattaccgaactgctcggggctgaacctctataaaattcctgtgtcttattattgctttattatatattcattacgacatatcgtttattgcttatcaaaaagactcattgtcgttggctaaaagcgaagtcaacaaagataaaataatcaaattttaaaataagataattaattaagcaaaaaaaaaaatagatttttacctaattcaaattcaaattaacactaatatcttacattaattttaaaaaatccaattaatttaattctgataattagatttgaaatatgaaaagtaaaaatcaaaatttaaaactacacaaaaaatgggaagataatttcatgaaacagcatgaaaaatcaaagaaaatgaaaaaaaattttaagtattgcatactgtccacacgcacatgacgggcattctgaccgagagagcacagcgcaagaggttgcatgcaccctctccgcgcgcacccaaggtcgtcttttgaaaactcgcctacagaccgagaaaactcggacaaaatatgtctgaagccgcatgtgtccgaggaaaacaggtgttctgcgcgcatccgggtgtgtgatgcacccctgatatttttcgattttcaaaaattcttaactaattcaaataaaatc

SEQ ID NO: 270115 - DNA, 760 bp, Cannabis indica
agataaagtttcaatcgtttctctgcatttatggctgcacgataaaaagacatgttcaagtagagaaatcaatttagagcataacagaatcaactcagtatagtatgctcttcttctagactatttttcagagcaaaacaagggttgatttaattactttaccactgatcagaaaatataaataaaactacagtacacaaccatagaagcaaacagaaacaaatcaaaaaattatggaaaggaaaaaagaaaatctctgtaaaaaatagatgaaagcacgtacctgtgagtgaagtaattgtttatccgagcaatgaggaagcgcaggtggtaatgaaggcaaacggaattccccctctccgatcagcagtgaacgaggttagggtacctgtgatgagttagtcacagaagaaagagagagatcgattaacggagagagagagggtgggtgaaagttgtgctctttggttgggcttctgatattgggcttgggcttgcttctgatattgggcttgggcttgggcttctgatattgaccttgggcttctaataaaattccatcatccaaactaggggtgttcatccgatccaatccatacttttttggtcaaacaacatccaatccgcactaggtgcggatttcatattttggatccaatccgatccgcatgagagtttaaatccaatccaatacaatccgcaatagtgcggattggatcggttattttggatcggttatttttttaataataaattattt

SEQ ID NO: 270116 - DNA, 761 bp, Cannabis indica
tttaatttcagattattgatgttgtttttgttttttttgttattttagattattttaaaatagaaaatttaggtataccctaattttttatttaaaacttgaatctaaatatatatattttattttaatttcagattatttatgttgttgttttatcaatattttttttttcttattttagcttattttaaaatagaatttgttgagtacaagcttaaaaaaattgaaagagcaaaaaataaattaaaatttgggtatactctattttgtatctagagctttagtctaaatatgaaaattaaaatattttttaatatgataaaaatcttttaaaaaataaatattataaattataattttagttttaatagaataatagaaaagttaataaagttttgacctttttgatagtcaaagtttacatgaaactttttttttaatactatgttgtctactctctaaatcattactttattggaaaataataattttttagtgccattttcaaacttacacttgagtaatcgacctgatattagagagacgatcacattggcattccaaacttactacagggcaataaggaaagaaattccaccgaagctaaaagttcgacgccaaactgtacgtattcttttttttaaaaaaattccattatatttttattaagatttttattaattcaaagaaaaatctttagcgtccacatcaaccggaagacaccaaatgtggatattatgtaatgaagatgatgaaagatt

SEQ ID NO: 270117 - DNA, 517 bp, Cannabis indica
acgatcactctagattttaccttaggccaagaaatttgaaatgtttaagaaaaatcataaatttctaacaatggtgaaaaactattaaggtaagtggttggcgatcttgagaactactaggggtggagaaatatttggtggatatgtagttcaaagatcattaaggtgaatttcgaattgtatccaaacttacctccccataaattcaattttcatgttaatgatagtgaaaggtctatgattagttactaatagttgcctaagtccttctagggaaataccctagttataggaaaattttagaatgatggaatggttgtatacttagtgtaaactattactagattcatgggtctcctgatcgcgaccttaagaaaagctagaactgttaactaaggtttgcatgtttgatagctattttaagtgattaggggtggaccatcctacgatcattaagataagaaagtgtttgtttcaacaaatacttcttttctaagaatatgactaagtctaaaaa

SEQ ID NO: 270118 - DNA, 529 bp, Cannabis indica
ttgaattgagtgagcccaagtgatttttgaagatacaaagaccccacttcacattgtttaatcagtcttgggcccaattatttggtccactgggccccagcaagttttgaccaatccaattaatggtcaacccaacctcaaccctaacacattcaacatcatctttttcatttccctttaccaaccgaaccagtagctccacttgaagcctccaccaccagaattaacccgtgatcaccatagcctccgttcaagccaagctcgacccagccacgaaccagcaacacccaagccgtctgcagtcgtcttcgcctgaactcatagcaacccgaatcaccattcgaaccaatctcaaacctcccaaccatttcctccattcaacccgagccacctctaagtcgacaccaacccacctgaaatcaccattgtccagtcgaccagcctgcaaacgtatcaccatttcccactcgactgaactccacccgttcaactcagcttaaccatcaaccaagtcgaacccatccctgta

SEQ ID NO: 270119 - DNA, 801 bp, Cannabis indica
atgtcaaagttcaggggcaaaaatcctaattagcctttttttaaaattaaaataagtgaaatagaattattacatgaaaaatataaattgacacattatttataaagatacatctagaaggtgtggacaatatttatactttttatgtacttttattttccaaaatacctcttacactattagttatacaatcagataaaagttgttgggtggttgcgcgaaggttgcattagacaaaagttattgggtagttgaccgaagattgcatcagacgaaagttttaattccaaaaagcatggatcgtgagttgctgttgaaactgtaatgcaacagtttttgtagtgagcacactaacgtgcaacttaattgcaactaaaaaatataaaatgtgaatatgtatatgcaagaaactatttatcagtattttttttgtcactgacgattattacttgtaccttaatagtaatatgtagaaaaataactgtagcaaaatattcatgcaactgttatgaaacattaaaaattagaacggtatttccacatacgtaattctatctatgtctcttcgttatttaatatgaacaaattcatcactaaaaatttagaaaataacgaaaatacaccagaataaatattttactatagtattgatgtaattttttttttattatacttgagttggattgtttgggaactcctgctctgctttttgagatctgcatttcatagatctaaaaattgaagtcaggacattagttttatgcgaattaaactggtattctagttaaattttagtttcgt

SEQ ID NO: 270120 - DNA, 1517 bp, Cannabis indica
ctattgacaattggactatgattaatttagatcattagatctatcaactgttggaagttattttaccgggatctagatatactaacaccataaacataaattcctaaaacaatgaaaataaacacatataaagttaagaaaaccttacattggtggcagcaaaataatgtgtctccttccactcagatctcgaacccttgttcctttctgtcacagagtaatattagcaagatctgagcctggatctttttcaggtgttggattcttcacagtcttccgcactatgattgagtacttgccttgatatgagtgggcataaactctatcactatatagggctcgaaatttatgaagagaaagagaggaaaattcgaaatctatagaaggaggctctcaatttttagttattattgacagagttagaaaactaggttatgatagattggatgagaatgaaagccatcttataccttatataggaatttccttaaggttagatttaaattatatggaattaaaaaagataaaaattggctaaaaatactcaagtggtcagccatataatgggccccactagttaaaattttgtcattttattcaacaatttatcttttctttcactaatgctacatttttcaatttcaatcccttaatgtcaaaagtacttattaataattataattaattaacaaataaaattagagaaatgctaaagggcaccagtggtgcctagcaccctcctacatgttaatatcgctattggtctaactaagtatcgggtctcatataatttaatataatagcttttagggagtatcgctaaccaatcgcaacgtgacatgtcgagaaggtgctaggcatcactggtgcctcatagcaatgctcataaaattagcatttgacttatttattaattagacttcataaagtctcttaattaacagataaattctaaaacctcttttcttcacaattaaatcattgctaagtgaaaattcataaataatgcatagtctaattttagaagactactacaaaactcacatttagcatcggttttaaaatgatacataaagaatttccttcggttggctaaactgacgctataaccgtagacgcaaatacttagatttttgcttcattcattaaccgacgccagaagttttttatttcagttcataattgaagcaaatagtaatgcactgacgccgaaagtttttgcttccgtaataaattgaagcaaaaaaaataaaaataaaaaatctgaaccaacaccaccaccacacctcatcaaactaccacaacaacccatcaccaacaacaaatattgccaccaaaccccatcggaccaccaccacaacccatagaatcacctaaagtaccacatcgaacctccaccatcccatcagaccaccaccatacccctatactgttggaaattattttaccaggatctagatttactaacaagtatgtttattaacatcctaatatgaattctaaaataatgaaaataa

SEQ ID NO: 270121 - DNA, 929 bp, Cannabis indica
ttgtgaagaaaatagattttagggtttatttgttgattaagagactttgtaaggtctaattaataaataagatgaatgataattttatttaataattaattataattattaaataaatatttttgatatttataggattaaaattagaaaatatgtcataggttaaagaaaaataaattgttgaatatgacaaaattataactagtggggtccacatcttatggccggccacttagtgtttattttgctattattttattttttttattccatataatttaaatccttaccctagatgaaatactataaaagggataagatggctttcatattctcatccatctcatataacctagtttttattctttttcagaaaaaactagaaaaagagagcctccttcctttactattttaaattcccttcttttcttcttcatcaattttcgagccttttgtgttcggttgctggaagttgttgttgttgaagagggcggttaatgaggctaaattaatagagcaaaatgcatttttataaatttttgttgctgtataaatatttatagggtctgtctaatgtattgtgtaataattttgacattttagtatatacataaaaaaaaagccttaaaaagggataatttcacaaatacacaaaaacaaaaaaaaaaaattaaaaaaaaacggtttcacggaattttaaacatttttacaatttttttttcaatttatttacagaaaatacgggtttttaatgttgtactcttgttaatttgttgttatctgcatgttatttttatttggtattttgatttatttaaatgttatatttatgttactttgtagttttcttattgttttcatgttatttttataaaaaaccgtaaaaatgtaaaaagaattcattaaatgtaaaatgtattttttttttt

SEQ ID NO: 270122 - DNA, 561 bp, Cannabis indica
gtatttataagagtgaaacactcaccaaatacattctctgtattaaatacatccataaataatataaactcgtggactaaggctcattaacgccccaaccacgtaaaaatccttctctaattttcttacagctctataatcttataatattttattgattgccgaaaacctcgatcaacaatagaaaatacagatatcattcaccaaaatatacatactaacaataatatatatatattactaatacatatatgtgtatactatactaatcaaattatataccaccattgtatataataaaatataaactaattaaatattatttaaaataaatatatatctaaaaaactatataaacataataattaaatatatgtaggatgtcaataaaatcatatatgtgcattaaaatgtttgtattatgctaacaaaattatataccactattatacatagcaaaataaaaaataaatatcgtctaagaatactaatatactatacaaaagtagaaaaaaaatctaatcgacattacttttaaataaaaaaaattaacaaaactaa

SEQ ID NO: 270123 - DNA, 565 bp, Cannabis indica
cccttcttgtggactacattgctcataagtttgacagctggtatcctagattccatgtccaggttaactgtaacgagtcatattatggtatagctgagcaatacggtactatggatgataggacaggtcacatatatgtgagctgggatttagaaccaattgagccttttgatttattcaagattataggctgtagggattttaatggatattatattcctccctttttcatcagccttcttaataattgtaacattttgtcttattttgcagacatggattatgaagatattatggaccagaaggggaagaaatggggaaccaaccctagggtccctacagttgctaaagtggttcctcccaagaggcaaaggaaaaccactgcccctaagaagaaatcacttgccaagcccatcgatcttgaggcctctgacaatgagatccaataataagttcctcctccaatcgtttctgatgccaatgctcctcgtcccgaggcaacccctgctactgattcttcgagcaaggccattgagaccttgtcgctgcagcaggagaggtcggg

SEQ ID NO: 270124 - DNA, 621 bp, Cannabis indica
agatcatcagcaaaggagattcagcatacaaagattcagagaaagagacttcaccattgacaagaaagaaaagttgtagtagtaaggcagcccatgataagcataatccaaccatctgcaaagcctattttcctcataacttcttcaaggaatctccattcaactctgtctaaagccttgctcatgtctaattttatggatgcaatgccatttcgtcccgtagttttatttttaattgcatgaaccaattcaaaggcaaccaaaatgttatccgtaatcaatcgattaggcaagaaggcactttgcgtagcgaaaatgaccaaaaggaggacctccttgaaccgcgccacaaggatcttggtaaccatttttgaaatgacattgtggtttcttgatttttggaatgagaattatgattgtagggttgaaaattcatgggtcagctccattgttcaaaatactaagcatagcacaaagtttttaatatttttacaatttttaaaattttatttacataaaatatgatattttggtgtatttttatattgtcttcttgttattttgttatttatatactctttttatgttgttttaatattattcttatgtcttttttttttg

SEQ ID NO: 270125 - DNA, 1108 bp, Cannabis indica
tgtgggagtcaaaggtgaggtagcggcccgacagtggaagagcggggcccaacactctaaaatggtgttacaataatgggttgaagattgattgcatggagagtgattgtcttaatgtaatccatgcaattaccaagggagaaaataataaacctcaagtgcatcgaaataataaggaaacaaagcaaaaaaaaaattactcgttaccaaacccacaaagagagatatatttcacttataactcaaaattacacactcactatcttaatctctccaccaaaatctcaatacaccattttcttcttccacactctcactacactacaaactcacactcacttttcttttcataactcactcttcttctcacacacaaaacacatatttataggaagaataaacttgggcaccaagacatttcaaagcttcctaaagaagactcttcaaaacttggtcaccaagattttttttgtcatacaattatttaatgattacccaaaattagtttgagtcaaatatctaacaatcttcaccttgactcaaattccctaaatacgcaactcaaagcatcaataagaggatatatgcatcgagctcattctctcactgaacttcatttgagcacttgtcttcacattcttcagtctttcattcatgccttctttcttcaatcaatctctaattgaaattggagtcttctccatcttgttgcattccttcactctaactggatgcattttttgcactacaaaaataccacttttagtgataactttttagtcacaacaaaaaaacttttgtggctaaatgtgacttttagtcacaacaaaaaagtaacttgtgactaaacatattatttagacacaaattgtcactaatttgattttagtcacaagtattgtgactaaaaatacatttagtcacaacaaattgtaatttttgtgactaatacttttcgccacggactttttagtcacaacgtgagaatgataatttataatcagttacaactttttcacttttagtcacaagttttgttgttgactaaagtaagattttttgtagtgttgacttgactccaccttcacagctccacctaaatagtctt

SEQ ID NO: 270126 - DNA, 682 bp, Cannabis indica
ataaataaataatgtaaaaaaatgtgagattaaaaataattaaagtttaaaatatatataaaaaaataataaataaatttaattaaacttgtaataataagtttcgcttgaaaagtcaccagcaccagaaaagtcaccgaaaaagttattgtcattggaaaagtcattgtcaccgaaaaattcgtcagaaaagttaccagaagtagatgtctcagatataaataatagtagtttcaattctataacataatgaataaaaataaatgactcaaactggttataattaaaatataaccggtttcatgaataaaaataaataactcaaaataactcaaactagttataattaaaatagaattggttctataacagtgctataataaaatcaaataacacgaaataagtcaaaacggttataactaaaatagaaccgattatataacataatgaatacaaacaagtaacacacaataactcaaaccgattacaattaaaaaacaaacaggaaattcgtttctgaaacactgaaatataaattaaaaacaaaactagttccataacaaaatacatcataacacataatacttcataaaaccggttataatttttttaaaaaaaaaatggggaccaattccttaaaatattgaggcataaatatgaaaagaaccggttccataacaaa

SEQ ID NO: 270127 - DNA, 721 bp, Cannabis indica
tattattcttatctcgcataagattaacagctagcgagtttgaacatttatatcaaacttgcatttaattggaacaagttatttaaattgcatttaatgatgcaatgtcattattatattctttgagttgatttatattccttttgtaggacatgtatcaacttctagtacatagccgaattttgggtataacaatatatataatatacataaatttttattctacttatatataatatatataaaattttattctatttatatataatatatatttattttgtttatatatatatttatatatattaatttttgtgtatatatagttatatttgaatttatttatatatattttgttatgtattgtttttttatatattaattttatttctataattgaaaatatttaattttgttatttttagattgggcaaaagtgtttttttttttatggttttatataaaattttggtaataaaatttaaaactttttttttatcaagaagaatacttcattaatcaccaactgagcaaactgtacaaacaaaaacaaaaacaaagggcagcccctcaatcaaaataatctctcaacaaaacttctctcatgccctctcatacttctatttttgaccacctataatctatagtaaataattttttttacatcagtaacaatggagttgacagaaaaagaatgtctattgaaaatacaattgttcct

SEQ ID NO: 270128 - DNA, 532 bp, Cannabis indica
acttgttggttcttttagagctaagtaagcttttggttttcttattccagatttggaacggatctgcatgttatcagagttaacaacagctggggcatcagtggtagtgacagcagtatttccattgtgaactgctacatcagttgtgatctcattgggcacagaagcagtattttcatggttgactgctgtagaagagggtgcatttgtgatctcagcagtgttgggaaaagaatttgagtctataggagcagggataacgttggatacttcagatatgggcaactttgaagtctgagttgctgtagcagttttgtgtgctggtgctgttgtaggaatggcagagatgtcacaggaggttgctggtatcatttgtggtgcctgcacaagggttaaaaaaactgagacagcatgtgtatgagatgaaaatgatgcagtatgttgatgtacaccaggatgaggagtgtgtgacagttggaataacagcgagagggataaaaaggaggccactgttctggtgtataggagattg

SEQ ID NO: 270129 - DNA, 491 bp, Cannabis indica
ggtgcacctgatgtttcggtagcggcgtctctcctctcgattgcagctaccttggccaacaagttagcatagtcttgagccaacgtggcaacttgttgttgtgtcgctgttggccctgagttctaattgatggaggttagatccctgaccctctcatccaggacatctagttcccctatgcgcttctcaagctccttaattctttgggtattgctcaccattatgtcatgttaccaaccttccctttctgttggctctgataccaactgtcacgggctgactatttagacacccccaagtagacagaacgtgcagcactcactaacacaatgagctagcaagtcagcctaaacgtgcctggaggcaaacaagttcaaagtttaggcacgatacatgtctcgcacatgttgagtgcaagtaagaagcatgcgcaagcaaatacaaaagcgtccccatggaccaatctcacacaacccacaagcaaacatata

SEQ ID NO: 270130 - DNA, 504 bp, Cannabis indica
tttatcgttttagaaagtttttatttaggatgttaataaacatacttgtgagtagatctagatcctggtaaaataatttccaacaggtatgaccttgcataagtccaagagcagcacggaggttttggatcttagtatcatatccaatggtcgttcgaacattggtagcaggaggaacgactttgttatgaatgccctggctgggtgctgaattggtattcccagtctcttgcacaccagacgtaatttaatacacatgagtcgtcacaccaggacccgcatttgacggatgcttgcgattaacagctggcggaacccttatgtttttttgggttctgcaatgcaggatccaccgcctgtggatttgtaggatcaaccaggcccctatgagtctgtaccaccatcgtacttgtggttaaatttagaatgaagagcgattctcgattctgctctcaatgaaagcaccaaaatgttgacctttcttttaggcaacgacagtgagtc

SEQ ID NO: 270131 - DNA, 548 bp, Cannabis indica
ttaatttataaggctcaaaagaagaatgtgaatatattttacacacagaaaaagtgaaagaatatttcatatttttaatttttttaaaatatatatatagtatttcatttagtttctcttttatatttgtttataagataaacttatatttttattaataattattttgctaatataatttattttaatattttatatattttatttatttattcagaaaataaatatatattaaatcaattttgaagaaatatttaaattatatttctttaacaatttggagtcattgttaaatttttattgcatagttttttttatcgatttgataagatcatataatcctggatttacaaaatttataaatttatgtatttctaattatacacgtatgactcatttttagaaatgaattaagttcataactattaaacctgaacctgaacctgatgtttattgaacctaaaatttaatgtcatatagtatgtatgggtttaaataaatattgattcattgtgatatattgaaatccctacaggtatattaatatt

SEQ ID NO: 270132 - DNA, 672 bp, Cannabis indica
actcaattttacagatagagatcgatcacagcagtcatcacttattattattattattattattattattatttaatttgtttaatttacggttgtttaaattattttaatagttgttttggtaggttttttatgacctcgtttgctatatggacttttgtaacagtgagtagtctcatgatccataagaagaaataccgagtaattaagttgtgcagtcccacactgcttggggaaggtcaagcgggatgaatctgagactgtataagtatgagactacatagttgaagatgacttaaatggattgattggtactacctatatcaacaatgtgcatcttgttttctagtagcccatcacgaaagaactccacaattaagcgtacttgacttagggtaatttcaagattggtgacttcctgaaaagttttcctaagaagcgtgcgagtaaggacaaagcacgctggaaacactcgtgttggtttgtggggccagttatctatccatgaagcaaccggagtaacgtactcgtgtataagagcaattattccataggtgtaaggacctaatggaagcttgaagcggggacgctacaattttagttgcgatttaagttgctcagtcagttgttatatgtgttactatgtgaatttcgtaaaaatatataaaaaaa

SEQ ID NO: 270133 - DNA, 722 bp, Cannabis indica
atgattgccgaaaacctcggtacaagaaagtcaagtggcttagggagattcaaaatccaaaagctttgaaagatatgaccaataatgtgaattttcatagcgatcatggacacatcacagctgaatgtgtagcactcaagtttttaagttgcatggctacttcgtataggacaactatgagatttcctttctgataaaggcaaagcaactgtagcagaaggggataaaagataagagagtccaccttaacccgttcagaatgcgaggaccatgaatgtgatctcaggaggatcagaagttagtgaattatatcttgagcagctaaatgccatgcacgagaaccaataaatagtcaaggaaagccgagaaagccagagcagtcgttggacagaccattagctttgtcaatgacgatgcaatagatttgcttcaccctcaccatgatgccttagtcatttcattatatattgcaaattttttttattaaacgtgtattaatctataatgggagttccaataacgttttatttctcactgctctcaaggatatgaaagttgatgagtcaacaatcacccgcaaatctacagtcttaatcgggttcagtggtgagcaaaagaactcaattagagaggtcaacttgcatgtttgggcagaaggagtaaaacctccaaaccaagttcatcgttgttgactgtccttcttcatacaatgccatcattgg

SEQ ID NO: 270134 - DNA, 178 bp, Cannabis indica
aattaataattaaattattttccttttgttattttttaacaaattttaatatacattaatttttcttatcatctggattactttgaaaattgataaaatacccaaagtgctatatatatatatatatatatatatatttattgaactatattcatatatttgttgatactatacatgc

SEQ ID NO: 270135 - DNA, 780 bp, Cannabis indica
tttttattattattgtacgttcattcttatttctcctttattagtattaacgaaattgattattcaaactattttattgtttcggttttcattgattatatctatgttggtttttttttaattttttatatcaaatatataattgatatttttcaattaaatttgcagatttatgaattaagttgtacaaaatacaaaattgaagagtttgattggactggacttggtaccataaataataatatcacaatatatattattattatctaccacaatcaaaaaatagatcaaaggattaagagaaattaattaaatgataaacaagaagaaaaaggtatttggtagttatatattacaacttttgttatgatagtaatttttaatattgcgagtttttattagtattaactcaattgaggataagcaaccattcaagtttaaagtgtaaaatgtattttaagttttttttttttgtttgaaacacaatgttgagatctgtgttttccaatacatattgaatcattttattttgagtttggatgagaagtttatatattttatcaagaaaaagttgagcaaaggcttttaaaattacaggcggagacatgtcactatataacttgtggatagggcacagcgaaaacactaataaaagaaaaaagagatacaacttgttgggcaaaaaaatacattggagagacaataatattatttttcatcttttctagtccttttattaatgaacaatatatattaatattaggattataaacgatattg

SEQ ID NO: 270136 - DNA, 1139 bp, Cannabis indica
atctttccacaaacatgttccaattgctgcaacatgtcctttttgtcttgctgctcctgaaacgactctgcatgttcaggtggggtgctcttttgctcaaagttgctggagtaaggttccaattaatgttgtggtgcctgatgcgatgttgttctcgagttggtttgaagctggattggcatcgtggaacacggtcgaggctcttgaggctggtatgatttgttcgtcagtgtggactcatcgtaatgatttggtttggaactccaaacgtcctgatgcgagtgaggtagtgacaaacgtaaaattaaattatgttgaatggtttaatgctcaaaaacataatgtcacggatgcaagtttaaactggccgactgcgcttcccgtcgagcattggacaacacctgatttcccttttgtcaaagttaatgtcgatggtgcactattctttaaccaagggcggtatggtctgggtttgattgcaaggtctgctgcgggaatggtcttggaggccagaattttatctagagaaggctctttacaatctcatattgttgaagccattggtatcaaggaagctctttcttggagtaaagcgaatggatggtcacatgttgtagttgagtcggattgtttaagggtcattaatgatttgcaaaagctcaaaagtatggcttctccttatggccatattctttataattgtaagaccctagttgctgaatttgatgttgtttcttttaattttgctaagcggtctgctaataaggttgtgcatgctttggcgtgatcttttctttctgaggctgaccgtatttttagtaaggactcttttccttttgtaattgaatccttggttttggatgatttagtttaatgaaatttaaacattattcaaaaaaaaaatttaatatttttttaatgtatatatataaaatatctcacttaatgagggaaggcattatttttctaagcgctttttcaatgggctactaaaatctcaaaaatagtagagtttggacacaaaaatactttaaatggaacactagagtgtcccagtattttaacattaaaataagggaatgtttatgataaaatttttatatttatatacatattatagtgtgagataatttaataaa

SEQ ID NO: 270137 - DNA, 832 bp, Cannabis indica
tagtttttgtttagttttttttttttttgtgcgaaatgggattttaaaaaaatagattgtggttgtagtttctatacttgtggctggtggtgtttacggtggttatggatggtggtggtttcggtagtggatggtggtggtaacagtgtatagattgaagaagaaaaatattagagaaatttttttttcagaaaatcgttggaaaatatatatatcttttttattttttttaatataattatttacgtggaccaataaaattgtactacatgtacactgtgtccacgtggacaatctaatctggcagttaacagctaaatttggatggaagttgtaatttgctaacggtattgtaattttgggagttttactgccaaaatttggattttgggggttaattccaagcaaagtaaaatgttatagtgagatttctctcacctagaaactcgagaccagacccctatttagaggacacgtatactcagatttcccaaagaaagctgagatgtccctgagggactcctcgaagttttaaacctcgcttaagatagaatcagcgagaggaagtgagcatgaccgaagtctaatcgcatccaagacaagagagtagctcgcatacatcgaactatatgcgagtatcctccccgtgtccgtgtataaaccaggagaacgactctctgtaaatgcaagttggttctaagaaccctgcagccttgataaaccaatatagacttgtatgcctaggtcctatccgcccgtcatgcgatgtccacaaaaggcgactatctaaggacgcggacatcctaaacacgataaacccgcgagtttatca

SEQ ID NO: 270138 - DNA, 411 bp, Cannabis indica
atcacttgttcgaacctcgtaaagttgattgtgttctgatcttactctccatttctatttgatttcaattgcttgattataactgttcaattttagttcttgttgctgatttcactactggtttattgcacattgttcacattagctttgttcaatattcaattagttagtttatgttcttgtttaacttctttgtattgtgttgtttgcgaggtgattgatcatgcattgatcacatcaaatggtatcagagctcagtcgaagggcatcatcaaagaactaaaacaaggacatcaagaatcaaaaaaaaaaccaagaactgatctgctatggcttctactcgatttgaagttgacaagttcaatgggacaaacgattttggtctatggagaattaaaatgaaggcattcc

SEQ ID NO: 270139 - DNA, 537 bp, Cannabis indica
atcatgatttccataaacctcgttgattagcaacgagctgcacagtatgtttaaaaatcatgtaatacgcctatgctagttagggtgttacacctttactctccgggagctagaaatataacaatgcatctctgggaggagaagagctcgttcgagcagtcatttcgcatataatgcggcatgggggaaacgtatcagaacctccataagaggatttgacagatggcataagcctcttttacggcgattacacgataatcaacgagtctagtgacgactctattatgaagactcacatcaatcaaggaaggataaaagattattttcacctaatccctaagatacctacgacataggtcatgtatgtcctattttatatctgccatgaatttgttttcctaaggggctgacacttaaagacaagtgatccttttctagtgattctccaaaaaaacactataaatacccaaaaaaaagaacgtaaaaggggttgatcgattaattaaggaatcgaagggagtaaagaagagagagaga

SEQ ID NO: 270140 - DNA, 1230 bp, Cannabis indica
ttttcaatagaccacctttggttaacctgtgaagtctatcatagcctatatgaccaagacgtaagtgccatagatatgtttcatcttcattatcgatcttttgctttttgtggtttctaggtttagctactttaaacagttcgttattaagcgcaaatggttcttctggtcttagaacataaagcccctgttccatagatgcaacacaaatttgaatgtcatttcgagaaatggtagaaccagaactcgaaaaatctaatttgtattgttgcaactgtaagcatgaaacagaaatcaagtttctactgaaatttggaatgaataagacattgtctaattctaaaattctgttctgaaacttgagtttggcttttcctctagctctaaccgataccattttgccattaccaactttaagtttcaactctccaaatttcaaataattccagttttcaagcaattgcaatgaacaactaacatggtttgtagatccagaatcaagaatccagatggatttatcattctctaaaacacatgattcaaaaactaaagcatcattgcttaacaatttttggattgttctaattgctggttcaatctgttgtgaaggataatctgaggaagtggaatcactttatctattcttctcaattgagcttgaagtagtaggattgtcggagcaatgatctgctcttcagatagaacaattcccagcttagctgctttctggaagttcatgttcatcatgagcaagtgtgaagtgttactctgacctggagtcatcttcacactttgaagttcattcctagaggcatattctagatgaggattggggtgtaggttgtacattttgacactacaaaaatcaataaacagaaataaattattggttcaataaattcatacacaagttcagaaaataacaagtaaaagaaatatgtttgcaaaaataccaaaaactaaacatatgtattattttccaaggtttctaacataatgaaatacagtgtcccggtaggcgagagtcaaagataacattagttgaatagagtagtcatctcatctaaaatggacaccattttagcaaccttttattcgatcaaaatgagaattcaacattgtcccggtaggcgagagtcaaggttattctcattttataagcttccaccattgtttcttattctgtaaatttatctctaagtagtcaccgtaggggagagtctaatagag

SEQ ID NO: 270141 - DNA, 1053 bp, Cannabis indica
tttgttatattatttttataggataatgaaccgctaatgagggcgctgtcaaaactcattaaccttaacaatccagacctagtcttgtttgttggggaggcactggttggaaatgatgcagttgatcagctttccaagttcaatcaggtttgaatttgtaaacattctttcgttattttctcgggtctactcaaattgtggccctttcaaaatacttacaatgttgaaacaattcttctttgctgttctttgcagaaactagcagacctgtcgacttcgcctaactcccaattgatagatggaattttgctcaccaagtttgatacaattgatgataaggtaaaacgatttttctcttcgaacaattgaatcatctgaataattcagatataacagaggtgatacttttgcagttggagctgcactgtcaatggtttacatctctggagctccggtgatgtttgtcgggtgcgggcagtcctacacagatctgaaaaagctcaatgtgaagtcaatagtgaagacactcctaaagtgatttgagttaaaagtgtcgatttggttatgtgctttattgatcactactactgtacttttggttctgttgctgctttgttttaaacctctatgatgttggtgtttttatttcctttgagttctccccactacttgtctttgcaatttatgttaatgtaactaacttttactgcaaaattgtgttttcatctttttttgtttttctttagcttcattgataagtataattatgactgtgataagtaaagaaaataaaagggtcactcaattgtgttagggaaagaaaagggagaggagggagatagaatatctatgggaaaagtataagagcaatgcaacattgtgtaattttattactatcattttcttccccatttatctgcaacactcaaaataacagaaaatgaaccatattctctattattattatcattattttactatgttattttacatatattttcaaatttaaaagatttttttttaagtattcacattgttattattgttattgtc

SEQ ID NO: 270142 - DNA, 547 bp, Cannabis indica
gcctatctcctgctgcagaaaaacaaatctcgacattttggacctgataattctggattctggcgtaaattgtggcaattaaagatcccgcccaaggtcaagaatttgttatggcgtgcaattactgattgtcttcccacttgtcttcaattggtgacaaaacatgtaagtatctccgcaatctgccccgtttgtactgatcaagccgagtctattgtccatgctcttctcacttgcccttttgctatgtcatgttggcgtactcttggtatcacttattacccggtacacccattatcttttggtggctggtttgaaaaggcacttacaaaccttgatgaggagattgcttcacgagctggtatgctgtgttgggcaatttggaaggcctgaaatcttgttgtatggaagaataaagcatcctcaagaactgaagttattgcatcagcacaaataactcttgatcattggcgtaacgcttaagataacacttccttatcttctttatcttttgaaaatagaggagatggagctgagcgttggacta

SEQ ID NO: 270143 - DNA, 988 bp, Cannabis indica
tttgagatttctagcttagaggagacttaagtaacttaggttttcaggtagaggttaattccttaatataggaggtctaaacactaggtttacaattcaaatcccttgaaaataggatacttagctagatatttacaaaagactaaaatgcccttagattctagatattattcagcctgtctgttgggcttatggggcctaattagtagaccacaaatgttgtccacgtgcacgggagtcatgtgggacctactaagcaatccttgcccggccaaggctttgtgctggccaggttggccggccataatgatatccctggcctggccgaccatgggactgggcaagggtggctggccaactcctgagagtgagctggtttgtcacttgatcccaattttagtgtcgctgtcttcgttggctcgggtgttgacttggccttcctcttggtgagttgtactgccatgtggcacatgttttatccacgtaagcatgccatggcatgagtaaaaaattggaataacattgttaaatgtgaagagttatatgagtaaggcataaataggttagactcagtaactaaaactgagataaaccctattaagaccttatatataaaagagacgtgtgagcgtaacacgtaggtgaatattatatagaaattagatgtagtggcatcattgtatatgagataatgtgatatacaatgcggtggcacaattttatgcgcaggtgtgtaatgtatgaaatgtgattattataattgttcatatattgttttattgttctatcttattgggccttggctcgtgggtgctctattgtgtaagcaagggtaaaatagtattgagtcagccatgagttgaagggttttaaagatgaattgtacatgttctggccaagctagaccacgagagttgggtccaacaaggaattgcataaaaattctattttgccacttaggtcggcttgtatgaaataacttgtaata

SEQ ID NO: 270144 - DNA, 633 bp, Cannabis indica
tagcaaaaccgtgcaaggagaacaacaattttttgcagcccttttttttcttcagaagaaagatgttttgcaagaattaatgattgctcaaagcgtgcaaaactttttgtttttatatttttatttttgatgcaatttggtttggttgttaacactgggcaacctgctcaaaacaatgaaagtgaaacagcaacagactgcccagatttaagattcaaaagcccatgaagcccaaatacctgataggggtctttttatttttgttttcttttatagggaacagcattgagactttaaagtggtcgaacctaaaaggccgttctgttaataccattgcaggagtggccattatttgaagtcaattatagaatagactcacatgcttcaatgcattaccaaactatacataaatcaagattaaaagattaagaatgatcactagcttttctattgaataaaatgaagagatactggtatcaacactagcagttagaaactaagataactcatttacaaatgcggctatatgaccttaaataattaggatcaagcataaaaatgtacaccattttaggctctacattttgaattgggcacatgacgacacatcagcattgtcaaagtaactgaaaa

SEQ ID NO: 270145 - DNA, 880 bp, Cannabis indica
cctcatttttgttagttggaagttgtccgttgagaagatagttgattatgggtgtcctccacgtgggcgagctatctatcatcatgacatcttccttttcacatatacttgattcatttaacatctccaccgaaccaagttcaattcatccaattcattctgcgaggccaattttgctaaggcattgacattagagtttactcctggtatttgcttgatttcgaagtaatcaaacttttccaagttcttctaaactttctctaggtactttgccattcttaagcccttagcctggtattccctgataacttgatttataatcagctgtgaatcactatggcatatgagatttttcaccttcaacaattcggctatcttcaaaactgcgatcgagattcatactcaacctcgttgtttgacgtgtcgaattagaatctcaatgcatagtgaaacttacagccttctgacaaaattaatagcacccttgcacttgagccatgctcattggatgcaccatccacatataatttccaagtactcgcgtcttgctgaacaagcagattttcctctggaattattccttctatcagtgcctggaagtaaggccgtaacttgtgagatgcgtggattaggcattaggtaagtttttcaagagggggatacctcgattctgcccctgtaacctcttactaacatagtaaacaggtggctagtgctttctctgttctcacactattgcagaactaattacattttacgagacagccaagtagaggagtaatatctctctagttactggtttccccaaaattgggggtgtcaaacaatgcctttttatgctcttaaaggcctctcgcactcttctgtccacttcaaattt

SEQ ID NO: 270146 - DNA, 1574 bp, Cannabis indica
aatatagggttaaatttaaaaaaacaaattcgctgacctaacgctctctcaaagagttgtaatagctgaataatactcctagcttctcgctcattttctttgtaataaatataactatcgtctgcaaaaaccatacgagaattaacaggagctccattgaaaactcggtcatcatgaatatcacgcctcaccataaaccttttaattaaagaataaaatcctttggcagaaataggaaacgaataaggtgaataaaaagtcaccttggaggataccccaacctgaaacaatatggcccatctcccttccattgcttgtaacaaaataattgaaggttaagatactgttgattatggttacaagttttgtcttttggaattagaagttgtgaatctacagagcagatactggaagcttagtgtggatctaaaaaaccctgtgcaggaggtcttgttgaattcagaagatacttctaaataagcttgtaccgtgtatgaaatgtctctctaggatagcttgtcattaattcgtaggtgtactctcggacaactctgtcagtcttgaaggttcacatgaggatgaagttatgtatgtatcaagatgaggtggattattgttgctggtgttgagttggatcatttatggccgtataaatgcaccatgatgatttaagagatatatttggcaacaatgcaaatctatatatagctgtaaatctttgtaacatgggtgagaatcagacaagatttttcttgagtgaaaattgtgatagtgtaaggtaaggtctaaactagagagagaaacctcttctcgtaatctttgagaagtttgtaaagattcttgtaaccttgtaaacactaatattaataaagatatgactgttgctgttccaacagagatgttccaataaagatatggctcaaactcgttaaatctggtgttattcttttctgtgttactgcttaattcatcatcttaaattcttgaaatctcttggtatttagtttcttgatcgtattgcgtgtttgttggtactataaattatatcgtaagtcattgattgttttgtttcgcacaacaagctggtatcaaaatttggtttgtaatcataattgttgccgaatacgatgtcaaaaaatttactagtacgaatgattttggattatggagaataaagatgaatgcattgttagttcatcaagggttgtatgaggctctgttaggagaaaagtctcttcctgatttgatgtctgaaaaagacaagaaagagactcttgcaaaggctcatagtacgatcattttgttatgagaaaggttgcaaaaaaagatacaaccgtaggtaggggtgttcatcaaaccgtccgcaccgcaccacaccacaaaaaatatgcggtttgaaattctttgtggtgcggtcgcagtttgaatttttcctaaactgcgcggtgcagtgcggtttgcgattttgaattgttaatatgcgattcaaatcgcaccgcaccgcacattataaaaataccaatttttataattatttaggtccaatatgtaaatgttcaactcaaagtccacta

SEQ ID NO: 270147 - DNA, 736 bp, Cannabis indica
gctaaattagaaatacttaaaattaataatctagctatagttgactaactaaaaaaaaaaaaaaaaataatctagctatgaggttataaattggtagtggtaatttataattttacacaacctattagtacaagttaatataaaatataccattgtatcaaataatactaatataatataatacaatccaatacaatactataagggcccgtttggtacgcaagactgaactggaaaggattagactaaattggataagattggatcatgctgaaagtaatcgtgtatttggttttagaatagagtggactattttatttatttccttttaaaaaaaaaacttaaattaaaataaaaatatataataataaataaataaaaatgaataattcgcagtaaaaaataaaaaattaataataaaaacaattaaattataaaataaaataatatatcatatataatcaaatatatatcataaatatataatgaaataatttattatatttttatttaataaataattaaaatagtaaaataaaaatacttgaataatatataattatttatgctaaacactaatttaatattttaaaatattgatataaattttctagtaattttttttaaaaaaaagatataattttattgtcatattgtttctcttaaaatttaagtaactattgtttaaataatattatttaaaatttgtataacttatgtatgataattcaaaatt

SEQ ID NO: 270148 - DNA, 540 bp, Cannabis indica
aagtgttagagatctgagtggaaggagacatattattccgctgcacccaatgtaaggttttctaaactttatatgtgtttaatttcattgttttagaaattcatattaggatgttaatgaaacatacttgttagtaaatctagatcctggtaaaatatattccaacagatgattattcagaaataactacactgcacttattatgggaagtttcccttttgattgcgatgcgatattatggcacgatctgacaatggaatttccttatctacttgtagaaataaataggggaaccggaagggtctttcgggaacacaatatctttcccctccaggctcacaacaccgaaggtgtcttccgggctcagtcagacaaaggcggaagactttgcaagtatgaaactaggatggttcccagagaggcatatccagataggcttggcctactttaccactgaagagggtcccactgatggatcctaaatgctgacctggaatccacatgtccaaacccagaaacgcggataacatgttctatgtt

SEQ ID NO: 270149 - DNA, 577 bp, Cannabis indica
tttaattttaatttattaggttttttattataagaattaaaattattgggagttttgaaaagaaatgaagaattgaagagaaaggagtaattttgtaaaagaaaatcagattttgggcctgggagaagcccactcgcgcgcagcccaaagatccatcaccagccgtcggatcgaagatcaaaggggctcagcgcgagcgtgtagtccatggccagaggcgcgtgagcgcctgtccctctctgcccagccagcttctttccacacgcgtggtacccgccagcacttctctctctccagcagctcctcacacgtcgacacgtgtcccgcctgtgcagcctttctctctccaccagccattacatgctcgccacttgtccgctcctccttcaagctgagtttcaacagcgaatacatgtgcgccaagtgtcgtctcctccttcaatccgccatttttcaaattgttttgaaatgcaatttcaaaatacattataattttatattcctttgcatttatttggctcatttttctatttctctcagccaataaattgcacattgtatgttttaccattctacc

SEQ ID NO: 270150 - DNA, 657 bp, Cannabis indica
ttaatcacataatcttgattactttctactgtgtagacaacacaataatcatgaataacaatgtgataaggatttaaaagaatttataaatcaaacaaatgaccatgaagcaaacatgttaaccaagcattaaataagtaataaaataattatgttcccttattgataaatgaaattcaagataacattgaaatagagttttagttagggcataaaacccaacaaactcccacttgcactaacataaaataatcaatacatttcaattaatcctagattctctctgtgcctttcaaatgcagtctctagaaaagtcttagtgaatgggtcagataggttgtctttagtattgacattctttacaagtacgtctcctcttgccacacactctctgtaacactctgatgcttaggcgcgctatagtgattttccaataaatgtaccacctttgctaatcaaaggggtttccttgaaaatcgtgtcaaattaaaacttttgatttaattgttaaactttataaactttcatatatttatttacataagtcgggatactgtgtataaacttttacaaacattatcaaaacacatttatattctagtcgcacaacgactacaaaatataatcccaaatgtcccgagaccgaacactccaggt

SEQ ID NO: 270151 - DNA, 513 bp, Cannabis indica
aaacgataaaaaaaaaatctcacctgcatggaattatttatcccaccctgctggatgggataaataataccagacagatgaggttaactggattagttatccagacttctaacatgcccaaacactggattggacaaattagcctgtctaatccaatccagtcctgcctactaaacgggcccttaggaaaagttggcccaccctagctttggattttagctttcaagagaagctacaattttggtttaatgaatttttcatttgacccaattgcctcatctaattttaaaattctccatttactaattaattttaaggcttcttacattctttcaatctcatccttattcaaaaaaaaaaaaaaaatccttaaaaactactcaatagtcatcttattattattctaattattattattagtaaaagtctaatttattattttattatataaacatttaaaaaaattaaatattataagaaaaaattaatcataatttataatataataaataa

SEQ ID NO: 270152 - DNA, 1526 bp, Cannabis indica
gccaaaaagtaccttttataaaaggaccagatagattaatttcttcttcattgggtaacaatagtattggtccaattacgtaatatcactaatttaaaacccaaatttgaaaagaaatacttgaaattagatgagtaaaataagaaagatattttttataggagaaacacaggttagtaagtgtgcagaaaccacaattattatattcctatttttgtcagcaaatgggttttggttgataataaggtatttatcatgcacatgatgctagctgacaaccaaaaacaaagtgcaatattaggtaatgggaatttggcaccaatgcagtgcccatgttactttgctttttatatttttcttttttctttttcttctttagatcaaccaatacatatatatattttttatatatacacgaatgttgtagttgacgtcaatttattatatattttttatttgtatataggtcaatttattatattattacttttttttttgctgaaatttttattatattattaattaatgctgcatgaaagacgaaaactgatatcactaacaatatttatgtaattctagttccttgatttcaaaataatactaaaacagatgcatgcatgccgtattgaacttcttgcattgcattttcatgcattaaagactcttaaaaatacccaaagaaacgtaaaaaatgtggagagagaatctgaaattcacactatcttaatcaatatatggttgccatttaaatgaaaaattacaagtattattacatctatgctattaggttgttatatacacataatgttaaaaatatatactatgagtaattaaatagcatagaaaacatatatatatatacttgatcactctatagaaataattgaaaaataacatagattggtatagctatactaatcaaataaaggttccattaataattgtcttttaaaaaaaattaggctactaactatatgagctaaaaaattatttgtcaacccataatttaataaaataattaaaatattaataatataagcttaagataaaatcgttagacataagtgaacagtgcagtgccacgtcaagtgaaaaacctgactgggaccgatctaaccatatacccctctcacgtcttaacaaatcaacaaattaaaattacatgtgcactttatatatacattaattaccaataccatgtgtaaatatattatcaactacatctaaaactatataggccggctatatatataaagattatgatatatgtaaagaaataataactcaattttttatatgagaatgtgaacatatatattataattattttattaatttttttcaaagaaaaaaatatattgaataattacacagtgccaatcacaaactgtacaaataatttgtttaattaatttcactcgtgtgtaataatgcatgctttaaattacacaacttactttgtctttttcaatatatatatttatggataaattataatttctttagttttatatatagatgtacac

SEQ ID NO: 270153 - DNA, 697 bp, Cannabis indica
ttttttttattgttttgacgtgttaactaatagttttgaataatcaatatatatagttggattttgagtttgaaaagcatttacactattgtttaatatatttttatcaaaattcaattaaataaaatattataattatttttcaaaaaatggttattattagcggttacaaatcgtggtttttctctaaggggtgtttggaataggttaatgttagcaaggaaatggtaatgttaaacattaccttgtttgtttggaaggtttaatcttacaatgttattccattagtaatgtaaatacccttgaggagggtaatgttgatacattaaaaaagggtgggattagttaatcccttccattatattaatttgaataacattttcaaattaataaataaatttaaataccattaatattatgatttattataaataaaatattacgatatatatatatttagtctgtaaaatcgattttttaataactgagttatttttatgttattagcaagagtaatttgtggcaaaaccccccaacctattaatttacttgtaaaaaaccatcaaacctcatattttggtgggaaaaccttccaaagtactgttccgttaacatttttaaggtgtcatctgtccagtctcgttaagtcctaattttgcctacacggcaatgacaagtcactaaaaaattaatccta

SEQ ID NO: 270154 - DNA, 553 bp, Cannabis indica
taataccttgttcaagtcatggtgatccccactaatctacaatcaaggttatgaatgagtgtatacatatatatttctcttgctatatatattatattacgtgtgttgtaatcttctccttctaactttcatatgtatatatatatgcaatatatatagtgtatatatatgtgtattgtgtaacatatatttaatcaatctcttttattgcctttgtattatttttacaattgagttgtatatatcttgatttatcttccattgtaataaaatctctaatattctttttaattaggtaggatttttattcacttataaattgtataatttttaagcattagtgttacaatttaatgaaattacataaaattaaagaaactatatgtagacaaaatataacacttatattttaagaatgtaaacaatttaatgaaacatatttaatcaaagagtattatatttttgcataatgaaaaattaagtgaaaatatgctttaacaatctaaaatatatgatattgaaaatgaaaatgacatatttttgatagaaaaat

SEQ ID NO: 270155 - DNA, 595 bp, Cannabis indica
tccctgtggatacgacaaagcccgtttactaccgcgaccgcagtgtaactaattgggcgacatcagtagttcaacaaagcaaagttttttgtgtgttaatcatcttatgtttttatttgttgtctatgttgtgtttcaagtctaaattcgtgggaagctttttgttttgtttaattttaaagttttggaattatttaattaaaatgactttcacatcattttaatgtacttgaatgtgtaacatgtaataagcattaaaactaaatatatgagttttacactctctcttaatctgttatagggtgtgttgtttaagtaatataatttatttcaaaaagtattcttgttgtaaatattatttgaattaagttgtttttagtgactttaggtaatgataatatatgattttaaatgtgtagtagaatttctattgctctattatttttctatagtttatttgcgtgaaaattacataaaatatgagatttcataaaaaagttagaaaaatatggtatttataagtttgccactcttgtatgacattttttcacatttaaaattttttatggtatttgatatgccatatttttataaa

SEQ ID NO: 270156 - DNA, 630 bp, Cannabis indica
attgtcgataattggatacatgattttttaaaattgttggtacactctcttatattttattttcggtacactttcgagatttaggtgaatttgttaatgtatgtagtggtttttttttaggattatccataaattttttaaaataatttaagatatcaaaaataaactccacccatatataaaaaatattagtgcaataaaatatttaaattttattttcaacacaataaattatttgagtatcttcattattaatagtgattcaattatggtaattggttagattaataagtttcacattaattttaatttttagtctattttattaaaaatctattcttgcagggccattctgcgaacagcgaatggtgttgcccacacactagcaatctctattactagtttaagagattgtccataattttttaatttttttgtaacgacaaatttatcttagtgaaatttatctttctttaaaaaaaaaatatttaggatcataaaaaaatatgaactaataagttcataattttatttatttatttattttcatgtgatgagcagtactatacttctatgggttttttttttttttttatttttttgaagtatagtacttctaagtgggtttaa

SEQ ID NO: 270157 - DNA, 671 bp, Cannabis indica
tctcagtgcagatgaagcttgtaaatcgttgtgtgatatactgcttgattatcgattcatgtctataattcatatcttgaaatcaatcaatctaaagataatcaacttggtaatttggatcgttaaaatcaacaagttgtactttcattctctattaagccattttctttaccaaaacccaaataaaacttaataattctcactaacaactccaaattattcaaaagatcataaaaacacaaaataacatatattctcacaaaatgagaggaaaataactaaatataagttaaatacacacataaattaagctaaaagaacatgacaaataactctttattcaagagttatcaacataaaatatggaaaacgtgaaatttcatatacaacatgaataacacacctagaatttaaatatatctccataaattcataaatcataattaaaaatctaatttcaaaattaagccctaattatctactagttctcatactaaaatcggtctttacaaccagctccatatcatactcattaactagcagatcacacgatattcgggttagctcccaagatcttgcttgtagatcctatcttcccaatataaaaaaatagtaattgagtatcaagtatttaatgtatctttattatccatgattataggagacgaatt

SEQ ID NO: 270158 - DNA, 598 bp, Cannabis indica
actagaaacaaagagtgaaaactaaccgaaaatatgacccgaaacttagactaattttagcctaacaacttgctgtttccaaagaagaaaattgtgatcatttaattttacagaaagattatgagtaaaatgaacaggggagaactcatcgacatctctatttcgacttctctgcagattgggatgcgtattcgttgaatttctaagattcaaaggattggctaggttttgagctgccgcagtcgccatgttcgccgtcaatggcgaaaaaagctctggtaccatattaggattggtattccttcgattcatgatgaaaaagatcaaagaacaatcaaaggtaaaaatgaacaaagaactgggaagagtgacagaaagcaagagaaaaagaattggaaagagtcattctattattgttgtttgattacagagtacaagtgacttatatatatgtcacaagagataagcaaccggcttaacagaaaataactgaaaaccagttagtacaactcagcaataacagaaataacaaacaacagtaacagactaacaatggctccttaataaacagcaaaccatattatgaactggtgtttag

SEQ ID NO: 270159 - DNA, 1138 bp, Cannabis indica
gattgtgtgatcctttatcaccctaagaaggccaatgttgttgccgatgccttgagtagaaagggccaaagtcagataaatacagtaaaacaaatctcccaacatttagcaaatgagatgacccaagctaaaatcgagttggttgtagggcagttggctaatattaccctgcaatctactcttttagagcaaattagagaagcacaattgcaagatccagagttagtgaaatcccaagatagggtttcagctgggaagactagtgactttacagtggatgaaacgggaatgctaagatttatgaatcgggtttgtgtgcctatggatgatggtattaaaatggagattatgaatgagtctcatacgactccctactcagttcatctacagtcaacaaaaatgtatcaagaccttaaggccatgttttggtggccaggcatgaagaatgacatcgcggagtatgttgctaagtgtcttacttgtcagcaagtgaaggttgaacatcagaggcctgcagggttactgcagccattgaatatcccaaaatggaaatgggaagacattgctatggacttcgtggtaggatttcctaaaaccacgagacagtatgactctgtgtgggtcatagtggacaggtttacaaagtcagcacacttcctacttgttcggatgaacttctccattgatcagtatgctgagttatatgttagagaaattgttcgtcttcatggtgtcccaaattccattgtttcgaatagagatccgaaattcacatcaagattttgggagagtctacattgagctatgggtactcagttaaagtttagcacaacatttcattctcagacggatggacaatctgagaggactattcagatcttagaagacacgcttcgggcatgtgtgcttgactttgaaggctcatgggtaaagtaccttccctgatcgagttcttgtacaacaacagctatcaggcaacaatcgggatggccccttatgaacttttatatggaaggaaatccatatcacctattcactgggatgaagtaggtgaaagaaagttcttaggtctcgaagctgtccagagaacaagcgaggcagttgacaaaattagagcgtgaatgctcgcgactcagag

SEQ ID NO: 270160 - DNA, 548 bp, Cannabis indica
cacttcttcaatataattgacagattaatctccaaagttttaaattgcacttagatatatataagatcatcattaataatattaataaaaaaagagattacatgatactagggatagagaatacccttttacaacatgcatgcatgcatgcttttaagagtactgtagaggacatgactcaatactaactaaagttactaataaacacgtgaacacaaactaaaacacaacatactcttagaaaaacaatataaagcataccataataagaaaacacaacaaaatatcataacataatttggagaaatgtaagaccattcataggtttggagaggatggggccagtgaatggtgcacaaaaggcgagttcccaagacctcaatcgagatgaatcacctcagggactctcgcttcacctctgaggtagtcattggcagcttccaaaaatgcttccaccgtcttcacttggtcacttccttgaccctggagcttgttttgttggtacatggtcgaagcaagctcgataatcctctttcgagcctcatcta

SEQ ID NO: 270161 - DNA, 636 bp, Cannabis indica
aataaaattatataccactattttacatatcataataaaaaataaatatcatataagaataataatataccatacaacaaaatagaaatataccgtacaacaaaatctatataccaacaacccaaaacaactcataattaaaaaattaaaaaaattgacataactttaaaataaaaaagattttaacaaaactaatatagatataccataaagtttaaataacttgcttctaattctaaaaaaaaaaaaaaaaaaattagaaatgaggacatttactaacatagtcttatgatttagggccatttgctatatttttttgaaatgaggacataaactaacatactcctatgatttggggccatttactataatttcccatgatatatttattttattaaaattaaaaaagaaaaaactttgttaaataaaggataaaagaaaataaatacttttcctactatttttttaagaaatgctatataatgactttatttatttttattttatttttaaatattaaatatacaatgacaattttatcctttaaaatatatcttataaaataattaccatatattataatttaactgtaacttagttaatttaagtattccaattacgtttcttgatgaagta

SEQ ID NO: 270162 - DNA, 584 bp, Cannabis indica
aaattttgaaaatggagaaagtattgagactgacacaaattagggtgaaaataaagaaaaagattctctccccatttttatataaaatacattttcctttcctaacttaatttattttaattttaattttattaattaaaaataaaaaagacaaatatatcctttaaaaatctataaacaaaaaataattacatgttttaataatgacaattttatcaaattagagcattctgattacttttcctagttatgtaacaaaataatatgattcttgttttcttttcggacagtttagtaaataacataattaaatattatttccaattatttttattttaaacgattcatttctttcattgattaatctgattccattgattgtgctagcatgtttattaataaaggagaatgagaatcaatttgtttactaaatttggaatggaagaaactaatggggtctacacaaattaaggagaaaatagagggaaaagttctcctccattttcataaaagaatacctttccattttcttaacttactttatatattagttatatttttagggtaattatatttgcacccca

SEQ ID NO: 270163 - DNA, 740 bp, Cannabis indica
gatttttttttaaaaaaaattgaagtatcaaaaagtcaatcgaacattaattaaccttttccaatgtattatgtactaaaggtatcataattacttgttattattatcttatgtattcttgtacaattattatcatcttcttaatacttaatcaactattaattttgaattgagttttaggattttatatttgagagagaggtaattttaaatttgatttataaaattgcatgacacagaaagattgtgccattgagaaattccaagaatatatctgattttcacctaaaagaaccatatattgattaatattaaattattaatagaaatatatatcttgataattgattaaggatattttgtttatacttagagaaagttatatttggcaaattaaaattcataacatgaatatagcgaactcaatgttctagtgcttcataatatttgaaatgttagttcttatcactcattaattgtaagtttcatttgttataattttgattcatctaattaaaattaaagagtactcaaaaataattaattaaaagatccatatgagtttaatcaccttgattcatctaagaataattaattaaagacttaaaaataattaattttgattcattttgagggggaatattgcacaatattattcggggtaagttgaaaaatactctttttattaattaattaatcaaatttacctttaattttatatttatttgaaacatacctct

SEQ ID NO: 270164 - DNA, 519 bp, Cannabis indica
gttatggtataattagctgatctagaagttattgtgaggtttcagtttgaattgaagtgtgtaggtggtttttggtggtttttgcactaaaccagaattccaattcagagggacctgtaggaagtggaatttcggttggtccccatgaaaccgcacaaaactggaattctagttggggaactagtctaccggttggggcattttagggaagcctagtttttccctttttttgcgtatatttagggtatcgccacgttatccttcgatagggaaacttttattttcaagtttaagtccccaaaaacgttatttagcgtgtcactcattagttttacgaataatttaacttaggggcccgtaaatcatcgagagcctgttgtcactcaggttggctggcacacctgaatttggaaatgatgtaagcttagtataatgattgcatatgtgtttacgtatttagagtacatgttagttaagtctgttagatttacattataatagcgatatcaatatatttag

SEQ ID NO: 270165 - DNA, 778 bp, Cannabis indica
ttgaaatattaattgttaatttattagccgaaaaccgaagggaatcccaatcaacttcacatcgagtctcgaacagtcacgctcgacaattgtccccatccaaaggcagaaccagctcggatgaagtctacacgcaacatcagaggtcccatacagacttgggggccaaatgttatcccaaattttttactctgacgtggcatcacgggaatggtgacacgtggagtccaattggaacacctactccggaagataggccgaggaggatacctcactagcatgtctagagtaagatattcagtgatctgtgcagaagcaatcaacacttagcgaattcatctttcgcatcatgactcatcagctcaatccctataactcagggatcaatatacatggatacggcatacacacgatcccactatcagtgtattcagtctcaatcccacgatccttgcattcagcattgatcccagatctttcagttcatgcgcattttaacgagagaggaaactcttccttctcaagtttcccagccctataaatagtgatgcatgttcattgggcaagggatcggtcgaaaagcagctaagctaagactatattattatcgaagaattatatattcagagatactgttgtaagagctataagaaaaggaatcttcttccttgatcttaagtcaatacgaataacgaggattaggctattacggaactgctcggggttgaacctctataaaattcttgtgtcttattattgctttatcatatatctgtta

SEQ ID NO: 270166 - DNA, 989 bp, Cannabis indica
gaattatgatttactaataggtttttttgactttttagttttaatgatataaatataatttaagaatttggtcttttattaatttaaattaatgttgagccttttttgaagtatggttggtatcagtatttatttcatttattattgattgtatatgtttttgtatatagtaattttttttacataattattataattatgactaatatggctttttagtttttatggttaatgtgccttttagttttgtaaggcaatatgtctagttttgtaagtggtttgtttgttaattttgtaaggccaatattgatagtttttttgtagggttaatgtggctagttttttttttgtacggccaatgtggctagtttttagttttgtaaggccaatatagctagttttggttttgtaaggctagtatgactagtttttggttttgtaaggctagcatgactagtttctggttttgtaagactagtatggctaattttaaattttgtaaggatagtatgactagttttagtttagtaaggctaacatgactagtttttttgttttgtaaagttattatatggctagttttaattttgtaaggtcagttttgtttaataataacacagcaaatgtagtgtagtcactgtcaacaatggagatgagaatagataagttctagtatttacatcagagaattctatgtaactatttatataaaatttcatattttattttattttatttgtaagggaaatttcatattttattaaatatttattatgtattgatttttttttcttttattttgtaggtgttctattagtgggttggaagtgaaaactctcagttttgaggttttcttttctgatattatggttttattgtctagttctcttagggtatctctgcatgcccttaggatagacaatgaactattatagatggaagaaaattctcctctggttacgtaactttgttaccgttgttattttaac

SEQ ID NO: 270167 - DNA, 632 bp, Cannabis indica
taaacaactgctaatttccaaattaactaagcgggctttacattgttgctcgtagttgttgtactaagtttttaggttgaaataaatgttgattgactatggatttgaattgggtgttttaactattttttgtgataaaactagtgcaataaatattttcaaaaatcatgttcaacattctagaacaaaatacattgaataaggtatagctttattcaagaacttattgaaaataaatcttcgcagttagaatttattgttactgagaaacaattagctgatattttcaccaaggccctagactcaagtcgctttgactccctcagaaaatcattgggagtttatattgtctaatctctcttgtttttgtttttgtacattattttttagttattctttgcttgcatctaatcttgtttaattcttatttgacaaatcttgtttatgcttttggattataattagttaagatctcgtacttatcatacttttgaggtagagttaaaagattcatgttactttttatgtgtgattgggattatataatgttcttatacagagttgagcgtgtcttgtttcagtttcttgtcaggccccttactagaatagagctacccatactgaggtgtgaa

SEQ ID NO: 270168 - DNA, 922 bp, Cannabis indica
taatgtcattcggattgactaatgctcctgcagcatttatggatgtcctgaataggttattcaaggatttcctcgataactgctttatagtgtttatcgatgacatccttatatactcttagtcagaagaggagcacgagcatcatcttcaaatggtattgcagcgacttatggatcacaagttgtatgcaaagtttaaaaactgggaattctggttgtctgaggtatcttatctgggacatattgttggaaaggatggaattatggttgatccaaataagattgagtcaaagaataattggccgagtccaaaatctatgacggaggttcgaagttttcttggtttagcaaggtattatccacgtttcgtcgagggattttctaaaatctctatgcccctaaccaaattgactaagaaaatcagagatttgtgtggtcggaaaagtctgaagcaagttttcaggaattgaagcaatgtttgataacagctccagtgttagcttttccatcagatcaagagaaattcgttgtttattgtgatgcatccaaacagggtctgggatgtattctgatgcaagcagacagagtcatagcttatgcctcttgtcaattgaaagattatgagcagcgctatccaactcatgacctagagcttgctgctgtggtttttgctcttaagatatggcggcattatctttacagtgaaaaatgtgagatttacaccgattgtaagagtctaaagtactttttcacccagaaagatttgaacatgaggcagaggaggtggctggaattggttaaagactacgactgtgcgattttgtatcaccccaagaaggccaatgttgtggctgatgctttgaatagaaagggtcccccgcagatttgtaccacggttttgatagcccttcaactagcctct

SEQ ID NO: 270169 - DNA, 537 bp, Cannabis indica
tatttaggatgaagtatcactttagccagtagatctgttctctattttttttgtatataataaataataaattaaattttttatttacctaaaataaatagaaatattaaattactaacagaccatgagtattgatggttttactatcaaaatttgagtttttaaggttaaatacaaacaaaataaaagtattaaaggttttgctgcaatttactcttataattattttatctatttttaaagaatatatacagcaggatcgaaggatggaggaattgtgacgacccgaatcctgccacgatatgtaatctttataaatttgggtgtaaaagatcaagctttgattttttgttggaaaataatatttttaaataattatttattatatattacaatattatatataaaagaataactcttacaataaatagaaagtaattgtaataaattatgatcacttattaatatactagcaaaaattacgtgcgaggcacgtatactaaattttatgctagtttttttctatgttatttgaaa

SEQ ID NO: 270170 - DNA, 599 bp, Cannabis indica
tttttttaaattattctaattttatatattttattagctgttttaaaaatctattcaattcttaattaactttcatttagtttttaattatattattaaatactggaaaacaaactgctcacgatgcggttgtattttatttagtaaaattaaataataaaattatatcaaagtttgtattttgtatttcaaattttgattgtatattttttttaagggtaaattgtggcacaaatacctaatatttttatacacttaaatacctaatgtttatttttggtggcaaaaatacccaatgttataattctcttacaccgttactaccacttatgttaacttataaaaatggacacgtgacgggttcagatgcattacatttatttttattttattttaaaacttaatattcttaatatcagaaactaaatgctagttgtttcaaaaaaaaatacgtgttctcattaacaattttcacatgatattagcacttcaattcgataatcatgttccatatactatactggttcactcagctatggtaatttagtattgcatctctcttattttttttaaaatacaaataatatttagttttttat

SEQ ID NO: 270171 - DNA, 914 bp, Cannabis indica
gagatagaaatattaaattttaagttttttataaattgtgtaaatctatcataatctacatctaaatctaatcttattaaactaaaaatttagcacacaaataatttttatttaataagattttatatttaagtatttttatacattggtaaaaatatgattcatttaaaactcaaaactatattttaataattatgtaattttattacataactattcataaatttttacaatactagttgaaatttcaaaaatttattctcataacttcatctagaatatacagatatttaatgtgtaattaaaaaagaaataaaacacacttcattatcaccaatgaatttttaatttattttgtatgaattcattctaatataattaatgtgattattaacacatagtggattattttagattgttattccacattcataatttcttacaaggtttacaaataaacctgaaaaagtcaataactgtgaggaaatcttatccacagacaagagttctcacatttataaactttaagaacaaacaatatagtagtggcttggttttaaaattatcaaatctaagtttctttagaaacatatttaaaggactttactgtattaaaataaggtcactcataaagatatgcatgttcaaactgacaataagaaatgtgttattaattagaatttctctacattatagcaccaaagattatagaacatatctctataaatagaataaatattagtaaatggtgggaatattcattatatttaattttactaactttatttagaacttgtgtgaatttcattaagaaatgtatcctaacaagtcaaaatcggtgcacgttagaattctatcatattagaaatcatacaagtcaactaattttgtagacatggacttaaattttgcat

SEQ ID NO: 270172 - DNA, 530 bp, Cannabis indica
aaagagagtatataaaagaagcaaaggccaagagcatgagcaatacggggcaaacaaacatcatggcaggccacccaaatcatcataaggtattactcaatctccatatacatatttgtctactcataacattgtagcatttttttttttttgctaaataatcctacatcatcaatccactttaaacgataagtacgaagtagctaaaagctttcaaaagaattgtgcgatacacacaatacagtgccacaaccaaaattaaaaccaattgtttaaaaaaaaaaagaatattgtcatacatatgtatcaagaaagaaactaaaaactcaaaccatatatatgtagctaagccagcaatagctatctaccaatgtaaattatataatctaaattacattggtaagtaaatgtattataacgtgggtatattaatgcgaacttgggaattaaaattcaatatatatgtatatatattgcaatcttaaaaaaaaaaatggacaaatttgcctcgttcctaggtgacattgtat

SEQ ID NO: 270173 - DNA, 610 bp, Cannabis indica
gtagtagatgagtaacagaatttctgttgcaaaacaaaaattcggttaggtctagttgcagtttgttgtgtctggtgagtgagtaaagtcacaagccttttatttgtattttatcctttctgtaaaactgtaaaacaagtgattcgggggggatctaatttaacagtttgaagtaaaatagagaaaataaagtttttgtgatatatattttgaaggacagagtaaagaagctgatgagagtactgtaagggtttaaaattgatctccatcaaacgctctaaaagcttacatatcgtaatttatccctacatttagcttaatgaacagtgttacgctaaacatatttatatattttttaaactcattctataattagtaaacagactattgtttatagaaatttgaaaaaatatatatataaatattaattgaataataaaattatatcaaataattttaaataattttttatgaataagttcaaaaatataataaatctatataaagaactctaaataactccttaaaaataatcatacaattttttataggggaattaccccatatactatttttaattttttttttcaaatttacggtttgggtttct

SEQ ID NO: 270174 - DNA, 506 bp, Cannabis indica
tgttaatgaaacatacttggtagtaaatctagatcctggtaaaatatttccaacacaaacttcaatataaaagggtgaaaaactacctcaagatcttctcaacacaacaccaaaacccaattgaaaaccaagaacaaactgaagagaatttgagaaagagagaagggaaggggatcagttagggctgagagaagaaactagaaaattgcatttctaattttgcaaaaatctcttttgttgataattagctaatgggcccaaaagaccaaaatgccccttgggcttatatataacatattcatgatacaaggataaaattgtcattttgtcacattccacacttaaacaaattttcagaatattcacacactaataaaatgccaataatttatcccaaaattgtatttcggccccgaacccggttcggcccgaaatacctggttgtgactataccgccccaacttgtcagaacacacctgaaaaagacaacacaggcatactatata

SEQ ID NO: 270175 - DNA, 523 bp, Cannabis indica
ttttttttttttgaaaatttttagatatggactaaaaatttgaaaaacgttacaaaaatattagtaaaaacagtaaactattttttcatttagagtaatgtatacaaaagtacaatacaagaggcaaataatactagctcaacaacttgggaagtggagcaatgtgtgttagcactgtgtgtggtagccctagctcgtgcttagagaaccattctgtggattggttccaagagataagagttttttgatgcgctgattggagaagctgaagcttgttagttggctcttcagacagtttctttgaaggagcaccattttattttagttgagagtgactcggaagttattatcaatgtattgcaaaaaaaaagatataagtagcggcttgataactatgttgtgaattgtaatagattgtagtttttggaattgtaattttcttattactatgagaacacataactttactgtttataatgttgctaaatgagtgtttactaaaaacttaacaagaatggttgag

SEQ ID NO: 270176 - DNA, 1026 bp, Cannabis indica
aataattttagaacaaattatataaaagtatagatataaataatatagggtaaatactattttggatcttatgttttgcaaaagttaccaattggatcctctgttttgttaaataacaaaatagacaatgtattttccaaaattataaaaataggaccctaagcttaatttttgatattttttttttaatataaccaacttaaagaaaatttataacacgaacaaatacaaaaaatataaacagttttgttataacacctttagattgtattattattaaattttattttgacaaaaaatccattcagggtcctatttgtaccattttagaaaatacatggttcgttttgtcatttaacaaaatagagggtctaattggtaacttttgcaaaacacagggtccaaaatagtatttacactactacaatttagccttttagtgacactatttagtgacacacataaaaatgcacgtaacgaaagagttagaagtaatttttaatgacacgcacaatttaatactaaaaaaatggtttttctcgacatttttaaatagtcgtttaaagtattcccgtcggtatctataactgtcgcctatacgagcgtcgtaaaacgggcaaaataggcgacggttaaaaaccgccactaatgtggacttcccgatggtttaaaaccgttgggaatgtaaaaaaacaagagaaaaaaatacacatttttctgtccattttttcctgcattagttttataattttacctaaattaaaataaaacaactaattaattttattacaataacaactaactttaaaacacattaaatttatacaataacaaaataaatatatgtaataaataaaaaagtatataaataaataaataaatgtatttataccgagcttggagagagagagggagatggatgggaggtggtggtggtccgacgtatgcaacagagaggagagggggaccgacaggaggaggggtgggtggagatcgatggacgagagagacgagaagaaatggaga

SEQ ID NO: 270177 - DNA, 1091 bp, Cannabis indica
ccaactatttattgagaaatctctgtatatgatatgaatgtatatattatatacatgacacatggacatatatagagaaagagagagtggtgtatgtgagtgatacactaggcaggagagcaagctagctaggacccatggcaaagattctctattagtgtgtgaacggatatataaggttgtgtacaagtacataataatgtacatatctatctatatttatgtattaatacaaaataaattttaaagaatgggtcgcatgacatatgtgctgatatgtgtatatgtttaattatatttaattaacacataataagatctagagtaaattaataatggtatctatgtatgtgattttgtacacttggtataatttttgtatattatacgcacgcataattaagctagaatttttctatattaaaccaaaaatacttttactagcaatatagcttgtatgacatatattattctaattgatgagaattatagaacgaaaaggaataatttataacatgtgttagactgcataaagacgcatgtctattggaagatggggattgattattgatgctgataatgaaagtgatgatcgatagggatcgatcgatgtatatatgtgtgtgtctctgtacttaattattaaatagggaactgtggtgagacagtgtatataactctcattcatcatatcacataacgcggtattacagtcaaatcttaggaccccacttataattatgattatcatgtcataattctggctcattgcaatttaatttataccatgatgatttgatcatatatatcatacaaatatatattaatattgcaatcataatatataatgctataattagtaccatataattggtaatatttagcttttttaataaaagagtacttcattacatgtggcttaagcttaagctacaagggtacagatgatttagtgaaaaacatatgtactaagaaacagataagctcgaccaatgtcccactgctatatgacctcacgtactgacatctctttcccggggcttaaaagctgtggtggaaaaaatatatacctttaaaaaaaaaggttaaag

SEQ ID NO: 270178 - DNA, 602 bp, Cannabis indica
aagaacatcatatgccggttcgaactaccgtacaaaatagtctcagacaatggcaaacagttcgacagccaatccttcactgatttctgtacgaaccatggtatcactactacaaaaaagactttttgcttcagtttttaagtgacatataaagaatttgcttcggttggtgtacccgacgttataaccgtagacgcaaatagtgatcttttttgcttcagttatgaaccgaggctaattaattatttgcttcggttatgaatcgaagcaaaaaaaaaagttttagcttcagttcataactgaagcaaaaaatttgtgcaccaaagctaattgttttttgcttacagtcataaactgaagcaaaaaattttttagaaaaaaagaaaaaaaaactaggtaattataaccagtttgatgccacacgaattttttcagtttcacacacatttttcagttttacataaacaaatccaacatctcaaatttaacaacaatctcaaattttttgagagttcggaaagcacaccaccaaaccactactgcaccacggcaccaccaccacccctaccactgcacacttgaaaaacagccattgataaatg

SEQ ID NO: 270179 - DNA, 641 bp, Cannabis indica
tttttttagtataaccaacttgaagacaattcttaatacgaacaaatacagaaaatataaacaattttgtcatagcacttttagatcgagttataattaaattttattttaataaaaaatcaattcagaatcctatttgtactattttaaaagacacatagtctattttgtgttacttaacaaaacagaaagtctaattaataatttttacaaaatataggatctaaaatgatatttacccttctaaatattaattaattaattaactaaaaaaatcatcatacataactaaatcaggtcttcttatccggtttagaatttttaacttatattctaattaattttttctctatttgttttatatttagttaaatcaacaaaaattgattaatttgttctttatttcttttgtattttttcttgacaaaagaaatatatatatatatatatatattggagaaatataagacggtgacgtattactctaaaatcacttcacacacttctaattattctctcattatttctcttacttttgaatatttttattaagataattttatttaaaatacatctattgatttatctttatttttaataaatttttaacgttttaagtatataaataaaattatatatat

SEQ ID NO: 270180 - DNA, 534 bp, Cannabis indica
cagatttaaaatagaagaagattagaaaatattaaaggaataaaagatgacatataaaatagagaaaattgtgcaagaaaataaagctaaaacttcatgcttgaattcgactatgttcttattagattttggaaaaagtcataacataaaagctctagatctctcttttatctttacagaacatcttgaatcgtccaatttcgagcaatataaagagaaatggccaaaatactatcagtcaacgcaatagaaaactcacctcctcttctaatcttaaacagaataggttttctaatgatcataagaagaataggttttttttttcttcagcgcattttattttattttattattttttggctataaaatatacttgaataattttgggggaagcaattcggagggaaataacagcagaatatagagcacgaatttcagagatcaactacaatactagaggcattcttcagagggttttcgacattattttcttctcttttcttaaagttaatatgtatgattttgctttcataa

SEQ ID NO: 270181 - DNA, 1133 bp, Cannabis indica
atcgtgcttgtattatcaatgccatgttgcatttcagtttctttataaatttctaattataatcaaaatttcaaaatttcaagaaaatgaaccaatttcatttctaatatagttcaacgcacaatttgatcaaataatgaaaacaatttggttaatggacattttagtaaacactacaataatattccaaagtaatgcaatgaaaatctcaagataataaattacaataacaatttttagatataatattatttaatacgattaaaatatcatatttgatatattaattttttcaattgcttccatgttgtgttaacaatttttatagttgttaacaaatattgaagtatttaaagcaatgatttcttacaaaaataacctcaaactacaattcgttgtttatcagttcataatagttgtttaaatattttcttaacaatatctaattacataattcatacatgaaggttctcaatgatattgtaagtgtaagtacatgggaccttcaatttgaagtgatcggttcaaagtacttgtattcccatttctgaaaaaaaaaaaaaaaaaagtcaaaatgactgatgattcaacacattgtaacacaactacaatacaactattaaaaatctattaaaaacaaccaccataccaaacatacaaaatgctaaataatcataaaaaagaaacgaataacataaaaaatcaatacacagactcattacaaaataaaaagaataaaataaaatgatgaaaagttaaggaccccaatcgatatcaatcagcaagctttgcaaaatgtaattgtaaaaataaacatgaaactgtcaatcataacacaatttagttttcaaatatattaacttacaataattatgggttggtggttatgtcattgcttcctggtagcccataatttaaactccctcttctcaactgcagaatttgcacattatttgaaattgaaacaatgtctcttaatatttttattagcctgcatgtttcaactttcaaaatttgaggcaagtaaaacaggaatacaaaaagaattaaatcataccttctgaacagcatcagccatgactgagacatccgcctctttttcctttaaaccttcaatttgagctcgaatgagg

SEQ ID NO: 270182 - DNA, 575 bp, Cannabis indica
tacggaactcgattccaataaaaattgagaaagttctgaaaggtttaaaatttgggtgcacatgcctcaatcgcacgcacaccagtctttcggacaaggtgttatgcgcgcggacaagggaaatcgtgtctaaagacacggtcagctttccctctgacaggagatgcacgcccacgtgatgaccctgcatcctgtgcccatgaaccctgcaacccgccgagatttctcggcaaatgaggctgcaagttcctccttcgtgcgcgcgtcttggcattttgcagcctgttttggctgcacgtgtagccttgctgccagtagctccaaaaacccaaattttgtgagatttttccccaatttcaaattttttgcaattttcaaaaccctaaaattaaaataaaagattacttttaaaatatttaaacttaaatatcaattttaaattaataatattaatttttaatagattattattaattctttaatattttgaggtttaaatttaaaaattaattattttattttttaattatggtgagatttaaacatttgttaatctctttaatatttatatatta

SEQ ID NO: 270183 - DNA, 591 bp, Cannabis indica
caaagatttgaaaacctcaaacaaaagtatcaaatttttctcttaaaaagtctacccatgaaaaacgggaaaacttattaacacacacaaaaatatacgtcttaccattcaaactttcaacctgaattggacccattaaataacagaaccctgcaaggtagagatagaacttccagaaaccgaaatattagatttaacaaatttggtattagatttagattgagtcgaaacataacctaaatcagcatgactcgtttgactagaactttgaatcttttcaaaaatgttggaacctagatttaacattttgacatttcttttaagaattttaagttcctttgttaaggaggtaatttcagactcttttaaaatcaatttagattcacaatatttatttttttcttcaagatcttggatgttgtgacacaaatctttattgactttaaccaaggaataattttcagcataaatttctaactacttaccaaacattaccttgtaggattcaaccaaagagttctcatcaagttctgactcatctaagtctgatccatctcaattctttcccattgacatcagtcaaagtgttat

SEQ ID NO: 270184 - DNA, 517 bp, Cannabis indica
tgagtgtttgcttttggttttttttcttgttgttttgcagttgattcctgacaccacatttaattgtttgttagttgttattaagttgttcaacaaatagaaaaatgagtaaatatttagttcttttgtgggcattattgagttggtatacaagtattttgtagttgcttgtaaatttattttatacattaatttttatttataaaaatatacttttaaagttaaaaattacacttttctcaataaaaaataagaaaacaactaaaaataacgagaaaacaacatcacgacaactataaatcaactaaataaattataaaacaacaaaaattaaccaaaaaaataacttcatgaaaactataataaatgatgtgttcaataaaacaaaaaaaaaaataactaaagaacaacttaagaaactagaaaataataatacaacacctagacaacaatattaaaacaactacaaaacaacaacaaaacaacaacataagacaacaaaatttttttaggattt

SEQ ID NO: 270185 - DNA, 753 bp, Cannabis indica
aattgcttatcctttttgagatgtacatccatccatgtggcgatgtaatccgggtgctcctataatttatgaagtaaacattagagattatacaatttaatataacttaactacaattatatttaaacttactaattcatggcgcctctgagccaaggattttgttccttgtgttgtaacatatttcatatttcctcgatttatcttattttgttctgatcgggcaagaaaagatgggctagtaaaaaattcacactgtttttgccattgttccggagtcatatcaattggatgatgtattagcgcttcctcgtaatcttcaggttttgagtaaaaatgtttgaaatgcacgtgtcgactagttttctttgttctgtatctattagcgcactcagtgtcgagacagctcaaaatttgttcagcattaggattctcgtcaatttgatagtaatactacaaaaaaaaaatgtttaagtatattaacaaatttaattatagcaaggataaattgtctaaagttatttacccgagctcttacaagcacttgatccttgtactgttggggcactgtcttccaattttggtaatgtgtaggacaaaaggcagcaatgtaatcgctcaaaacgcgtgggaaagctgcatgctctactcccactatcttctctgaaattggacaatacactaatggcaatggctcttttgcttccttcctttttttctccaattgttcacgaatagatggaccacgaccct

SEQ ID NO: 270186 - DNA, 569 bp, Cannabis indica
gcgaattcaggggcaacagtaattacatatgaatttttaatattttaattggcaaaatagttagtaattacacgagaaaataatatttttgagtagttcatgttttaaatggaaagtttttgtaattacacttacctcaatcactttcaattacacagttccagtgtaattatatggtcagacaaacatactaaattgtgtaattacctctaattacatacaaattaaattacactgtgactttcttaacgcgtcattataagcactcaaccttcttattctagttaattgaaagaaaaagaaaaaatacactttaccaatttaattgattattttaatgtagatggtagtacaatagagatgaattttgagcaataaccaattttaacaaaatgtatacccttacttttaaatggatatataccagccttaggataccaaaaaaaacactctctttatcaatccaacagctaagaatgtttgtggttttgcatccctcataataccaattgaggttttacataattgaccttaaattaaattcgatttgttcgttgatattttatagt

SEQ ID NO: 270187 - DNA, 755 bp, Cannabis indica
gatgcgccttcaaacgtttggaggagttgtaatacatggctggcttcttcttccgaagcttggcagtacacatagctgtcatccgcgaacagtaggtgagaaatggtaggggcacttctagcaactttgcaacccgttatgagtcttgaagcctcgtaatgtctaaccaaggatgagagtccctcggcacaaacaatgaacaagtaaggtgataacgggcaaccttggcggatacctcgagaagggacaatcggtcccatcttttgtccactattaagaacatggtaacggacggaattcacacaaccaagagtcaaacttatccaccgatcgctgaaccccattactcgaaggatcgaaccaagaaaactccattcgacacgatcataggccttgctcatgtcgagcttaagagccatgtagccttttttgccattagtcttccttttcaagtaatgcattgcttcaaacgccaccataacattatctgaaattaatcttcctgcaacaaacgcgctctgagtttcagagatggtatgattcagtacacctttcattctgttggccactacctttgaggcgattttataaaggacgttgcaaagtgagatcggcctcatgtcactcatatgtgatggattctttttcttgggaatgagaactatatgagtatcattgatagattccgggagcgtgcccgtgtcaaaaaaaatcacgaacaaattggactacatccgcccaacaatgctccaatg

SEQ ID NO: 270188 - DNA, 954 bp, Cannabis indica
tattctttggttggctatgcacaacaagttgaaagcaaaagataggctgctgaatttggaatccaagttgaagagaattgttgtctctatcaggaaaaaaagaaatagcaatgcacctgttcttcgactgcaaattctcaaaggagtgccttcaaaggatcaaagactgttgtattggaaagcaagaagtaatagcttgccccagctgatcagttggattggtaagtcaaaagccaataagtttaaaaaacaactactagcaacagcttgtgcctcactggtataccatatttggagggcaagaaatgctataatttggaaggaagagcagctaacactgagtaggcttgtcgaggggataaaagaaagcctaaaactaagaattacaatgttcctacccaagaaactcaatgatgaagacaagaagtggtgtcaatcattgtaaataaatataacttgaatgtaaaaagatgtaagtagctgctgatatgtttttgggcctctaattgaggtgcctttaggttgtacaaaattttgtcatgagcaatacaatttcttgatttatataaaaaaaagaggtataacagactgtgcatcagatttttgtttaatgaatttgacccaagtaaaccttgagcaatcatccacaatggtgatgaagtatttgtagccttcagcgatcatggtattgtatgacccacatatgtcaatatgcaataaatcaaagcaattgacaacaatattgtgattggatataaaaggcaatttttttttgtttagcatagtgacacacagaaaaatgaaaattaggactaggatagtgtcaaaattgtaagcttttattaagaggatgttgttttatacatgaaggatgacctaaatgataatgccatacagtattatcaacaaatttcaaaatcactaatggcaaaaaacatagcaggaggaatggaa

SEQ ID NO: 270189 - DNA, 570 bp, Cannabis indica
tattttggagtgtcagtgctcgcatacaatgccacatgggctgttgcagtgtcctctatcaaccctcatttaaccacattactcaattaagagtaaaatgtatcagtctgccttgtgagccaattttagacccaataacttcagaattgagccatggctgtgagacacacttatatccatattgaaattatctttccaatgccagttgaaacagatcatttggataaaaattcagagagttacacctattttactaaatgtagtttatgctatcttgtaccagttatgagcaccgacatggccaaatagcagtgctcgaccatgcatgttctcggacccctcggggtgtgttttgataggttttttgatggcgagtcatattttaggggtctcgagacccaaaatctcattttgacatctgaaaccctaacaggaggcactgccaccagtttgagttggacaatggcagtggtcggccatggcttgtgggaagccatgtgtggtgtttttcacttttatttgatacatgtatgttgaaaatataacttggcaaatgaaacttctttcctg

SEQ ID NO: 270190 - DNA, 807 bp, Cannabis indica
ataattaattttgaaataaatgaaattaatttttcgttagattattttaaaattaatttagaaaaatacacttagtttaatgaaatattctagatagtaatttctggtaaataatttaatttttgtaatatttaattaagtagaaaaatataagttgaaaattaatttgttaattaattttcgaccaacttaaattatgatatttttcttagaatttaaattagaattaataattaaattgattttattcaagatacttaattattaatttctattttaagaaatttaattaaataagtaaaatatatttaagttaaaaattaatttttattaattttagaacaactttaattagaatattatatttagatattagattagaattgataattaagttaattttattcaagatgcttaattatttgtttttattttaataaattaattaaatagaaatttatacttaagttggaaaattttttcaatttctatattaacataaattaaaataattacggagatttatttgtaaatatgtaaaatataaaataagtaattttagagataaaaaatatttttagattcggcaaccttcgatcgatcctattggaggccaaaaatatcacaacagttttagttagaaatattattgggattatagaaataagtttattttagaaatattgggatattttggggtacttggagttggccaaataccctaaaattaaaaatttcttagtggttaagaaataataatataactattaataataaaaattttattaatattattaatatattatt

SEQ ID NO: 270191 - DNA, 801 bp, Cannabis indica
gaggtaatataggctagtccactcggataattattgttctcaatgcttggagggagttcttcagagttatgtcctccaatacttcaattctcaagtgagtttttaaaatgtgagaaagtgagagttcgagagaatccgtcccttttacaagtgacttcaccaccttacattatagggtttaaaatttcttaactcgatatacctcatttcctaaatatagttgagttaggtttaaaatataaaataatattttaaaacaaatatctaatacttgttgtagatattcttggatgattttgagggcacgttgttggattaaaatcatattgtgggcacatatgtataatgtatatgctattataaagtgtgatacaaaattaagtgactaattatgttatgggtatcaaaatgatattaaattattatggaaataatgtgtagataccataagttaatttataatttgatgagggaccaaattataaatattcaaaactcattctaagattagtctataaataggtagtgttccccaaaaaacactagggtttctgtattctctctttccctataagagaaaatacctaagaaatagtgtattcttggaagatcaaaacattctctgcaacctccaacaatgacttcaggttagtgcttttgcttatcttttatcatcatcttcttctttaatttagcaaaggttctataaatttatgatttaggattttctatattaaagaacttttaggaatatatttagatctgtgatatttatatttcttaagtattttataaatccta

SEQ ID NO: 270192 - DNA, 531 bp, Cannabis indica
attaaaattaaatattattaatttaaaattgatgtttaagtttaaatatattaaaaataatattttattttgatttttagggtttaaaattggaaaaattcgaaaaaattgaaaaaataacaaaaaaatcgggtttaggtgtgctggctgcccagcggtgcacacagaggctgctggcaacctcgtctgcgcgcgcaggaggctgcattgcagccttcgtgtgtagaaaatggtgctcgctaggtgggccttcagacaaggtgttaggcttcagagttcagacacgcacggacaagcaccatgtggtccgaattgctgtgtgcgcctggtgcgtgtggtatcgagcgacgacaccatgtgcacctgaaacttcaaacgaccatatctccttcgtttttcatcgaaattgagttctgtaaaaaaaaaattgcttaatttttcacaaggaatccaaagaaaatattttcagaatgacaataaaaatattttcatggaaaattttcgtaaatcacatataatcatcaaataaca

SEQ ID NO: 270193 - DNA, 826 bp, Cannabis indica
ctaaacttgagtttcaaagctcaagcttacccaattccatttccacctttcaaaactattaaccagagcttacaacaacttaaaactaacctagaaatctgattacataagctttaaatcttaacagccactaaatcacaatttcatagcttcaaactcaagaaaaagcttaaaaacataaacttatggtctaaggtttaccttaacttcaagaatgatcaaatccttagcttcaattcaacaaaactccaagatttgagggtgattccctctggttttaccccagccgaaagagaaagagagggagcttcaaggtcaggcccggtcctaagcataggcgggctaggcccgtgcctagggcccactctttctaggggcccattttaaattttaagacctcattatttcactactatatttgactaaaattaacactcattttcatcaaattaggcccagcgtagtggccgttggatgataggatttatgttgtttggaacttaagttcgatcccaccaaatttcacttcttgttattaatttttttaaaaataaaattatttaagaaacaactacaaattcatatacttgataactaaagccaaaaaaatttaaatatataaatattatttaaactttctttctaaatttaacattttataagcttatctattttttttttatttcgttattatcttttttcctacttttcttattatgttattattttcctatttattttgccttcaatcaaaattacatttttaatattatgaaaacaaaattattaatcaagatataatatttaatttcaataataataataa

SEQ ID NO: 270194 - DNA, 559 bp, Cannabis indica
gactcattccgttcagatctctagcccttgattcctttctatagcaaagcattatcaagatctgagtcatgctgaacgcgcgcggatggtatgcaatgcataccatccgtataacttgtaattttttcaattttcttcattttttcatgctttttcatgaaattaatttcggattttttgtgtagttttgtatttagatttttatttttcatatttcaaatctaattactagaattaaattaattagtatttttttaaattaatttaagatattagtgtaatttgaatttgaaatagataaaaatctatcttttttggcttaattaatttttttaaaaaatttgattatcttatcccattttaaatttaaggttgatatttaatattttttaaattattctatttttttttattaataatttggcttatattaaatttaaaatatgattagtttaatcatgatattttgaatagaaataggatattatgctaactttaaattttttatttttttatttaaattaaattataaaatcaaaaaaatagatattaaattatc

SEQ ID NO: 270195 - DNA, 935 bp, Cannabis indica
cataaaacccaacaataccaccctaggaaaaggcacaggccgaggcagttgtcgatctttccgaggagctaaccattgtggacccttctacccgaaagctgtgtagtccaaagggcagatccgagctggccaaaagcggatctgagcacatccgggcttctaccccacctccattaatgcatccagagaccaagagtggcgaagatatgctcacccactacatgaatcggttggtccctgaggtgaatgagcaactggccggagctgacaacgagccttccctagagctgttgatgggaggagtcctgaaggagtttatgacggtgagtctttcctgacatttccctttaacccttctttacttggctcagattctaacattttttctctgtgcagactgtctgaagatggcttacacttattctcgggctaagtctgctacctccaagaacattgccatgtccaacaccatgagggcggaagtggacttggccaaggaaggaccctgatgaagccagggttcaacttgaagtcgtccgaatggaactgggtgaagtcaacaaaaagcttcctgctaccgagaagaaggtggccgagctgaccaaggatttagaggcttctgaccaacttgaagctgccatgacctccttgtcccaagaagtgaatagccttcagcaagaaagggaggttcttcgaactgtctttcgcaggttggaagcagagaagaagatcaaggaggaggagattaatgctgaagtagagacgctcaaagggaaggtaaatgccttagagacagctggtctcgagattttttacgacttttggaaggctaatcatcaggcgaattttgattacctaggcgatgccaaagacatgtatctcgagtactatgctttccaagtggcctatggagagtttgaggcaaccacttctac

SEQ ID NO: 270196 - DNA, 673 bp, Cannabis indica
aatgtgaacattttaaaatgtggaaagcatatattttttactatttctaaaataaaaaaaaattattaaattgctcatgataccaatcatatactaattagttacttttattttttaatcttaattattatttgttttagaatttagttaattagattatattatactaattagtttctacaataatttagattaccaaaaaatgtatatatgcatgttaggagtgggagggatattttgaatcagaaaattaggattccgtcaaaaatataaaaatttctttatgtaaaatgcatgttatatatcatttagttttcagtttagaaaaatcaaaaatatgaatttaatacacatggataacttgtttgttaatttatttatgaagaacttttttttttattattcttagtttaataaaaatcatcaggttttattttgtttcaatatgcaaataaactaataagtttatttgacatatatgagtatagacatatataccaaataaacttatgaacaagacattttattatattcaaatctctaacaagtgtatatattgttatccaagtttactatgtaagacatattacagtcatgtactttgtatacaactagatttgatgtcttgacctaaaaaatagactaattagtttgttatttaataggcatacat

SEQ ID NO: 270197 - DNA, 949 bp, Cannabis indica
cataaacaactaaaatcaagcttaaaaacagtttttaatacattcaacctcaaataaaactactctcgaattcccaaaatcataatatagaaccaagcttaaaccttaaaattcaaagaaagaatagaattaggattaccttgatgaatctctcaattcctactcaaactatagctgaaatctttgctggatgatgaagaaactgatgaacaaaatggttgaatctccttgatttacttcagctcaaagaaatatagagaaaggaagaggttatgttggttattttctctttttttttgggattattctatgtcaaaaagagttatctactgggatctgggtccagtttcaggctacgagacggttacgtttgatttttaaaaatacttatatcttaatctttgatgaaaaataagaatatgcccagaagatttcttgaaaaaactccttggaatcggcccaagttgattaaatgttaacttgggcgttgggccccctttttagccttcagcttggtctgtttcttcctcgaagtatcttttccttatttttgattgaagaaaagaaaaaatacgagatagttctttggtttgatgcttgaaagtgcctaaggttgataaaatgtcaacctaggcactgagtgcttggggcacctggtgctccaggtgctttaaaacgaaagtgctccaaatttgattttgatgcatcaaatatatttgtggcatgtctaattcatgtcccagtataaaattttgacctattttcactaagacagtcccaaaaattgaaaccctaattgggttgttaacttgggcactagtgaaaccctaggcgctcgggttgatttttgaggtgttatatcatgtattttcagttgtcgagccgtggacttggatgctttatgtctttatggtatagaatactgaaagatagtgagttggaaacaact

SEQ ID NO: 270198 - DNA, 655 bp, Cannabis indica
ctcttcttgacgacgagcctggtgatttggttgctcatcatcaggggcatctttagtctccccttgttcttcctgagcattttgagagtctctgagttgtctcctgcctcctagtttaggtgccgcgaggtctgcctcttggcattcttaccttaggatcaggttagttttgagcgtcatttgcctaagcttccctggttgcggcatcctcctgttccaactcagggttttgtgagttttcctcctcaaactgtcacttgaggtggcgattttccaactccaccaatggcatgtatctagtgggatcataagcatcctcctccctaggtacataaccaccagcttcagtatgagtttcctcattcccagttttcgggttttggctaccttcaggttggttcctccttgaacgtgtcgatcgtgttgttcatgagttgggaggccttcgtgagcccatcagctcttttccttgatgatgagtaatacttcaggatgagtatcattattttccccgttgttagccatggagaaaagtttttcttttagttaggagggattttttttgagctttttccacgtaggccatcaaatatgaaagcaccaaactgttaatgcaaatttttgttaacgataataagcgtatttcgtgatagga

SEQ ID NO: 270199 - DNA, 656 bp, Cannabis indica
tttgtgactaatacttttaaccgcactttttagtcacaacatagaaattatgatttataattagtcacaattttttcacttttagtcacaagttttgttgtgactaaaagtaaaatttagtgtaaattcgatgactgcaagaagttaggttgttaagttagttaggcactaactaacttaaccaactctcctatgagtgagatctccacgtcaacataattaagagtgcatctgagatcgtatatgagggctttcagaatcacgaactaaggcactcgctgaaggaactgttaactcaaactcttaggtctccttattttgatgattaacaaatatttgattattacttgttactaatgatttgttgattttgtagcaaaattagaagagaaaataaatctttcatgatcaattggtatttttaccaaacttttcaaagcaacccaaaatggattcaacaagcatatccagagaaaaagtttcatcaagggataaacaactcaagaccctattcaaaagaggtcttcaaaagcccaaagtgaaaagtcaacccgagagtcagtcaaagtcaaagtcaaagtcaactctcgagaaaagtcaatttgggatgaaaaacatgcaaatcaagctaggaggttcatctacatcaagactac

SEQ ID NO: 270200 - DNA, 693 bp, Cannabis indica
tgttacttttagtcacaacaaaaataacttgtgagtaaaatatagtatttagatacaagttatcaaaattaagtttaatcacaacaagtactgtgactaaaaacatattagtcacaacaaattataatttttgtgactaatacttttagccacagactttttaatcacaacataggaataataatttataattaatagtcacaacttttttacttttaatcacaagttttgttgtgactaaaagtaaaaaaaatttgtaatgactgtaatcaaaataattatgtttgatttagtgtgataatataatggaataaaatattgaccatatttttattacttttatttttataattataaattatttaaataaaaggtaaaattaatttttagtttctttattatatatatttttatcataatagtatattaattttgaaataaagtgtaattgtaatgaccattataataattttttattgtaatgagttttaccttatacaatatacaataactattattacaatgtaatagattataaaaattttttaaaaaaaaaatgataagcaaagtaaaagacatattaattactattacaattatcattcctataaaccaaatattccctgattttcccaattaaggacatttactaacagtattctttaattaataatatattaccgacctggatat

SEQ ID NO: 270201 - DNA, 647 bp, Cannabis indica
tttgtttttctttgtgaaactttgtgtcgaaaacatgttattgaaaggctaaaagtggctgtgggctttgaaggaatgttatcagttgatgttagaggtcacagtggtggaattgctctgttatggagattcaatgatgaggtaaagttaataggcactactgtaaattatattgatatcgaagttactttggcaagagaggaaccgtggagacttacaggcttctatggcgaacccaaccgaagtcagcgacataaaacatggaatcaaattcgaaccttacatgctgcatcggctttaccgtggtgcatcattggggacttgaataatgtcttgtctaacgctaataaaaaaggtggtaactgctaccctcaatggcttattcgtggattccagcaggtggtgaattaatgtaatctccatgacttagctctttcagggtatccttttacttgggaaagaggccgtggtagaagggaatggattgaaattcgtcttgacaagtcttctgtcttttttagtgctaatattccaagtgatttgcgtgatagactttgtcaacgattgggaatgagggctgctactgaggacagtttttacctgggtcttccgtgcattattgggcggaaaaagaaggcaatccttgg

SEQ ID NO: 270202 - DNA, 530 bp, Cannabis indica
gaatccacattaagaaaatcgaacctttgcccacatagatagtgacctaaactcgttcaaaaatcatcgcaatttcttctgagtatcggctgaagaatgagtgagccggtgaggtgagtgtctgagtgcccgaggctctcgtcgctggatctcctaaggttttgcgccctcagctcaatgtcgtccttgctgtggctcggttcctttcaaaatgcccagattccgccgatctccgtcctaaagcagtggtcttggagttccttcgttctattttggcttcattcaatcaatcgttttggccacaagcatttggcactgatgcgataatacttaactacttcccagttttttaggttttagttaaattgtataatattttttttttatctttttatttttatttataattttttatttattttattagaataatttataaaataatatcaaatcaattatgaatattctgttacagaatggtatattctgttaaaataaacagataaatcaaaaagaatcgttaaaccaag

SEQ ID NO: 270203 - DNA, 798 bp, Cannabis indica
ttccaaattaccaaaataatttgttttataaatattctgcaaggtgaaacatttaggtctaatatgtcccttcctaccacaaaaatgaaataggcacaaatctccttacctgtgatcttacactttttgtagttcttggacattttgcttttgcaaatacaacatcggaagtgacaagctttgaatctgatccatcaaccttcaaattagcagcatcaggatagtttgttggaatgctagattttacaaatttcgtgatcccagaacttccagtaccatctgaaccaatgctagcaaagcctctttgacctgcattctgagattcttcaaaaatagaagatccgggattaagcatttggacatttttcttaaaatttttaagttccttctttaaaagagtgatttttttttcatttttaatgcaaaactctgtctaataatcttttattttttactcaaaagtttcaatttgatgagacaaatttttattcattttaatcaactctctattttcaggagtaacttgtattcatttttcatacatgactttgtatgattcaacaagagactcttcataaattttagaattatcagaatcagattcttcttgtttagtggtattattcaaacataccaatctagctttcacatgtgaatcacacaacacattagtcataacagaagttagagcaacattctcagaattttcttcatcactctcagtttcatcatcattccaagtgacattgaaactttcttaatctttttcaaagtatttgcacactcagattgaatatg

SEQ ID NO: 270204 - DNA, 615 bp, Cannabis indica
ctccttggggcaaaggtcttgctgccggaaccgggttaagatgaggcagccggttcttaatccactcatagagatgacccaatcaaatcaagttttcaatctcatctttaaggtttttgcattcattggtgctgtgtccattgtcgttatggtactcgcatcttttgttggggtcccttctgaagctatctctctatagaggaggcggtttctggtagtgcgtattttgcctggtggcaaaatacacacgttcctgggagtccgtcagttctgtgtactgggtgtattgttgagtgtacccccttttctgtcgcttgtcctccgtccggttgctacctttcgaggacctcttgctccgagagccttgagaaggtcccgctaggcttgcagcaggagcggagtgagacgggacttgtccactcatcctagaagaattcccataatgagaagatgcgggagccaatgcctggctcggattgtatcctgggttagcggagaattgtattctgatcattggtggagtagccgatggtaaggttcctgggagctggactccgggcagataccctgcaactctggtcggataatatcccccataggccactatttgggcct

SEQ ID NO: 270205 - DNA, 545 bp, Cannabis indica
atgataagttgcaaatatatgaattatttttttgacctttttttttcaccctataaaatgctacactacaacaaaaaagaaaatttagtcttcaaatactaacaatcctttcaatcaaaacagtaaaaaaatctcattttttttatagtcgtaccgctttgtaaaatgtggcccggacccatctttcgaaatatttttctctactagttacaatgaattcttactattatgacgtggatatgaagattggtttcatgttaaatttggttaaaatggcatggccccttaattcaaaaattgaaaatgttcttctttccagtgtaaattaattttaacaatttttatattactcttagactcattagtgttctctaataatatctcaccttataacacatctcgaaaattcgtaaaatttcacagcaaggaagccaagttgttgcccatcacttttctatttgacacgttgaaagaaacctaatttccatcactaataatcatttgtatcgaaatagtaaaaatctcacatttctgataatggtacc

SEQ ID NO: 270206 - DNA, 521 bp, Cannabis indica
atttgtgattattttctttcatctctcacctgaattgtattgtttttaatcataaaacttgtcatcgtgtcgtgttcgtgtcatattttgtgtaacccgtttttataattcgtgtcaagcgtgtcgactattttttaactcgtgtctaattatctcaaccctaacccaacccataaaaaatcgtgtcgtgttcgtgttgactcactataacccattttactattattgaagctagaattgtaaagaaaaataataaatttaaaatattcttaatttcatgttaaaaaaaaataaatttaaaattttttaatttaatattaaatcactaaatatatatttttatataattatattattattattaattttttattttattatatttaaaaaatcgtgtcaaacgtgtcgtattcgtgttaagcgggtatcgtgttcgacccgtttttatttcgtgttaaatcgtgtcgatccgttttcgacccgcgtctgattttcccaaccctacccgtaaaattcgtgtc

SEQ ID NO: 270207 - DNA, 519 bp, Cannabis indica
ccatcacatatatgtaaataaatttttcctattgtctttcattttcaagttgatgaagttcaaaaatatgattttttgtagagaatgaatgtgtctagacatcataaaataaacaattataattatatttatatacataagtgactaaagaattgaattaccaaatcaatattggtatatagtacctgttgcaataattccactggttgttatacttgcatcttttatgagtgaattcactctcatgctacattgaaagatcatgtatgctttgaaaaaagcatactttgaaaaaagattattggacttgtatgcttacttggttaacatgaaataaggattggttacagtgaaatggcattgagagatgtgattgtgaatttggcaaagcttgactaaaggagtcttcaaaagtaaattgcttatttccaataagattggcctgaacataaaacataaattatttatgtaaagacaaatattgtaaaaatgctacttagaaaaaaaaaaacaaaaaga

SEQ ID NO: 270208 - DNA, 551 bp, Cannabis indica
tgaaagtacaataacgggacaaaatcatatccctccctatatatgcatgtgaatacaacgtaataattttttggaaaaaatgtagtacaccattttaaaaaggtgttttaataaaattttatctgtttttgtatttaagaaaaaaatgtattcaattcttttattataattgtttatattataattatttaaaattatctatttaaaattacttgtaatttttaaaaaattctaaataatttacaattaatgttaaaaataaagtttaaacaattacttactacgtgtataaaaaaatacaacctctcacgtaacaaaatatttaaaactcaatttcggtatatatttaaaattttctaaaacttacaacctatataactaaaatgtacacgttcaatttaaaaaaaaaaaataaaatcctaaaaagctattccaaattatgaggaaatagacagaaattaaatctaccaaattacacacttttgggatgcaatataggtttaccccaaattttaatatgattagtaattgttattacgttatattaaaac

SEQ ID NO: 270209 - DNA, 534 bp, Cannabis indica
tgtgtgcttgactttgaaggatcatgcgtaaagtaccttcccctgatcgagttctcttataataacagctatcaagaaaatgattgggatggacccttatgaacttttgtatggaaaaaagtgcaaatcacctattcattgggatgaagtgggtgaaaggaagttcttgggtcccgagactgttcagagaacaagtgaggcagttgataaaatccgagtgcaaatactcacagcttagagcagacagaagagttatgctaatccaaagcgacagtatatcaattttcaggtcggagacatggtatttctctgagttttgcctatgaaaggcataaagcgctttagtaagaaaggaaagcttagcccaacgtttattggaccttttgaaatccttgaaaggatagggcaagtagcgtacaggttggctatgcccccagcgctagcagctatacatgatgtgttccatgtttcaatgcttcggaagtatgtctcagattcgtcccatatactgagttatgaagcattggaacttca

SEQ ID NO: 270210 - DNA, 660 bp, Cannabis indica
agtcaaagttatcttattttatagactcattgtttcatattgtaaacacaagtctaagttgcatctttagggatgagtcaattagatgttgcatgtacaaatattaatctgtcgagatctaacactattatgttgtctaacggatgacaatctttaggagattgtcccattaaaataacaaaccaacttagaccaacaatggagactcaaaatttatactacatgattaataagagaaaaaatacaggttcaatataaatttatacacaattaaaaaattattaaatatttagcaagtaacaaagacatgtgaaaatacaaaataaacatatcttaaataatttttgagattttcaacaaatcgatatcagtgtcccgtttaaacgagagtcaaagatatcattcattgaatagagtagttagctcatctaaaatggacaccattttagcaaccttttagtcaatgaaaatgagaatcaaacgttgttccgttaggccaaagtcaaggtcattctctttcatgagcttctactattgtttcatactttgtaagccctactcttagcagtcactattggggtgattgttactaagaataaaaaattaacaataatacttatcattcgagataatacggcgtttaattgctaatgaatggac

SEQ ID NO: 270211 - DNA, 719 bp, Cannabis indica
gaaaaattaagcaattttagtttttacggaactcaattccgataaaaattgaaaaagttatggaactttaaaaaatcaggtttaatggtgtcaggggtggtgctcatgcccaccagaccctcggacaagacccttatgcgcacgcggattcagacagccttttgtctgaattcctccgtcaggcctccttcggacacgagatgcctcgcccgcgaccgtgcatcccacccttgtcctaggctgcaggcgccgagttttctcggctcaccaccctgcaaatgcctgcttccgcgcgcggatatggctgtttgcagcctctggaggctggacgtgcagccttgttggcagcacacccacgaatgcaatttttgtgggatttttccataaatttcgaattttttacaattttcaaaccctaaaattaaaagaaaatattatttttaaaatatttaaacttaaatatcaattttaaattaataatatttaatttttaatattttggagtttaaatttaaaaattgattatttcatttttaaattatgtttagatcttaaaaatttgttaatttctgtaacatttatatattatttaattataagatcagatattttaatatttgacatattttaaattaactgataaccttatcttttaaatttgaaattttatattaaaattatcttatatgataaattaaataattaataaatttgaaatt

SEQ ID NO: 270212 - DNA, 592 bp, Cannabis indica
tgtggatgtttgtaatgagcaattcagaaaagaatttaaagtgaatgagcaacgtctaaagtattatttgggtagtgaggtcaatcgagcaaagacctgactcactttggaggatgcatgaagcgaaaagtagttgggttgcctcgtgcttggattgttaattcctttttgaagcaaccgaaacaagttttgtgaatatttttgttaaagaaaaaattaataaattattaaagttaaaattatatatgaaggagttttttcatggatgtttatttttttttattttcatttttatttttagttttttggtggattttgcacttggtttggtgtttcaggtgttcttggaacataatttggagtcttggatgtgatttggaggtttgaaattttggctaaattttgctacagcaaaactgggcatgaacaaaaagcttttgtcgttgatttgaagaagttctcctgttggagcaatattctagcaaaattggttcaagttaaaggagcaatcagcaatattttttgttggattttttggagaaatattgctacagtaggtgtaagttggcattctttgcgagatgtgaaagaa

SEQ ID NO: 270213 - DNA, 596 bp, Cannabis indica
tcgttttttgaaaatattttatttggattccttgtgaacaattaagcaattttgtttcttacggaacttgatttcgataaaaattgaaaagttatgaattttggaaaatcgggatttcgggtatgcatgggtgctcaatcgcgcgcgcgtgacacgcccgtgtcaccctgcatctcgccaagatgcaccttgcagctgaccgagttttctcggtcaggcaccctgtaggcgctgagcttcctcggcgtgagcccttgtgtccgtgcacgtattgggctgctggcagcctcctgggctgctgcatgcagcctcctgggcagccactttcctaaaatcgaattttgtgggatttttccccaaaattcaatttttttcatgggattgtttcccaaaatttatttttccatttttaaatatttgaaattaacatagatatttttatagatatacttaccataatattttcaaatttataatttattatttagttaagtatttaattatttatatattataagtttaaaaatgatatttttctatatatatcattttttttcttattggaaatttataaatcatatcttaaatatttgaat

SEQ ID NO: 270214 - DNA, 668 bp, Cannabis indica
ttaagtattttatattttaggatgttagattatatattgtataatcaaacatacatgttagtaaattaagatcttgataaaataagttctaacagttttcattgctattgattatcctttatgttccttgggacttgaatcattactgcatgatatttgggggtgcaacaaccttactttggttcgtgacaccaatcacttacaagttcctatttttccttgtggcgatatttatgaatcttttgttttttttagacaatatgtcaattttttttttatttgaaaagctcattgtttgtctttggagtaggggtttttgcggtgcgagtggtgcagtttttgactattttttcaaaccaatccgcacatgcgattttttcaatttcccaaaccgcacccgcatcgcgaaactaaaaaactacagaaactgcaccgcaaaaaatggtgcagtgcagtgtggtttttgcggtctggactatcaccgaataattaaactatcacaaatacaacaaagcttgagcaacacttgtcaaaaataccataaggcttaaaaataaatataaaaaaaacttttacgtttcaacaacacaataattagtgggctttgagctggatattcacatattagaactaaataaatataaaaatgggataattacataagacac

SEQ ID NO: 270215 - DNA, 775 bp, Cannabis indica
tcttctttatctctttctttctcgagcacttaagcaaccagctagggttggaagattttcaactggattctgattattttagcaagattagagagtttccaactcaaggggcctgtaaattgtcaagcagcagttccactcaagttggccagtacacctgaattcagaagtgaggtaggattagtataatgatatgcatatgtgtttacatgtttagcgtacatatttattaagcttgctagattacatcaatagcagtatcagtatacgtagagttatattgggtaccaatagatgtatgtttggctcagatactgatcgatgttatcacatcagtactgctagagtatgattagcgttctgagtataggctgatattattgtcgatagttgatgcgtgtcgtaagccacaacaaatttactatatttttttttttccaatacttccaattattttagtataatcgtaagtaagggtcgatcccacgaggactatgtttatttaattattcacaaattagtaacaagaattaggaaaaggggagttttgatgatcagaatagcaataataaaaattaaaaagaaaacaagtttaaataaagaatacgatatgagaaactagttaaaggttattcgccaccctcaacaatcattcctaattcctattaaagaatgtaattttcagtttccaatcaaactattaatcccgcagataacgctgaagcagtcaattatcccaatctccctattgtatgtaatcaaggcgaagcgctca

SEQ ID NO: 270216 - DNA, 3377 bp, Cannabis indica
gaatataaaactaaatcttgttagttaccaaacacccctatatactattattattattattattattattattattatttccttattcaatgaataatatacgtgtaatgaagccagacttattttggattgagtgatcttgactcttgagtgtgcttttaggactcaagcacctttaagtttaatttatttgaaatttttgcacctaaattctctccattattatatcacttgcacttaacttaattttttaaatttaaattttaagtgtaaaattcttcaaactagtaaattattaataaatataaagtattatctatttttcacaattaactgtagactacactacctttatacacatcacatgtacttatattagtatagtacttaaatattattattattgtagataatattgtactaatatccccttcatcatcatttgtcttcactatcgattaaatgagaatattgtgcgcactatataagcataatattaattttgatatgatggttaattaaattatctaatacatattataacaaaaatatttttatttttaatatttaattcactttttctcacctaaaaaaaaggctctcttcactttagttggtcaccttaattaagttgcctaataacaatgtttatgtatataaatataaattgaaagaagaaaagaaagcatttattatctccaaacttatataattaaagacaatcttaataaggtgctacgtacattactatatagctaataattatcagcaaactatggcgctagagatgatcacgtatacctatattaagcacgaaaaacatcatcatcagcacttataaaactaatatacgtagctactctggatggatcgtgtcaggtgtcacaatacttacttagaagctcttccaagtattctggtcccaaatcttcaagcaccaccaaatgattttctgttgatatcttattattcttattactatcattattctcattcatggaagtagtattaatgttgttgttggtgtcttttatttgcaccttcttttgggacctttcagcagcagggccattattatgtctgggcatggagtactttcttttgagagctaagaccggagaccaacctctggtatcaaatccgtactcaatatcctttagcgactgcccaaccttgtccgctggaaaattaaggactgccagcgacccacgcgttgtgaatgcagcttgatcataagccaaagcagcctcagccgctgtgccaaaggtcccaagccacactcttgcgccatttctcgtcgagtctcttatctccgcagcgaattttccccaaggccgctttcggactcctctataggacacctcatcatgatcacgatctttatatctttattatcttctttgggcttggaaataatcacgtacgactctctgtcctcttttttattataattagtactacttttcttctcgctcaatggttggttgaacaagctatcatgatgttgatgccccgacagagattcgatggagtacttgaatgaagagtacttttgatcatgaggatcagaagacatattattattattatcagctatgtactatagactatatataagggtggtatataggaggtttagttatttttatttatcaactaacattcatatataatatattgcttattaaaaattaactgtacatgtattatgttattatccaataccgagagtgagagtcacaatagttaagattttaatattttagagaaaaagtatatgtataatatatatcctttgtgtttatccaaaattattaattacacgagaactcttgcatggccaaaaaacaaactcacaactcacatgcaactcactgactaaatcagtcggtcgacttttttcttttacagacttactgaaaacagtttccctgatcagagtcgtccattaagttctccaataattagaaggagaagaaaaataaaatatggggtcgctttttctacttattattgattggccaataatacgagaactgcttgagatcatagaagctttaattacatttacaatatatactagctagctagctagatctgtgaatcttgatttgagtaataatattatctaatgttatgtccacagatcattcagacggagacatgcacattataattgctatatatatcacacacttttcagttttcactattgatattaccaataattcaataaaatgactgttctgagctcaaaactccacgtgaatagggaaggtacttttaatcattttgaaaggcgcccgatctaaattaaatgaagctgtacatatatgattgtagtatcaaataattacagcgcagagtgttctattatgggacatattgcacgaattgctcttaattattttaagatgtacaatatcacaagggttgcatctctaataatttatatatcatatactatcgtgtgttgtgtcttgtttttatgttatttattaaagagaaatattttctagcacccttttacatgtcattatcattattggtgcaattaagtattgagtctcatataatttaatacaatgtatcgctatccaatctcaagacaatatgtctaaaggtgcttgacatcacggatgcccaataataatattatttgttaaaccaaaatgtgtaaaacccaatatctcttatagtacttgtcaccccatctctagtcgtaacattatttaaatgggtcgactactacacagcatagttacttttatttttttactagcatgcaagtataatcttagctagatttataaaaattagaacatatagttgtcatatatataaccattgagaaaatttatatgtaaaattgatatattttaaatttgattagatatataattatatctatatcttgactaccaatgtaggagaaaatttaaaaaatgttttttttttcttctgaaatcagttattgcagtagttcttaacaaacaaccgtcattaacctatctcgtgggttcttaatcgccgagatagggtatcctaaccgccgtcattaacatatctcacgagttctcaattgccgagatagggtactctatctcggctaagatagatcaacaattctatgtcgacggtcagatcctcgacaattgttaaccgccgagataggtctatgtcgtgagtttttaaccgccgacatagggtaattttcttgtagtgaaaattataaaaaatctacatcatctaaaaatctacttatttacttgatgagcatattgttttgtaaatttcccattttattttgcattaatggaccctgggccaatggaagaaataaggcccaaagcttatatcctttttatattatcctc

SEQ ID NO: 270217 - DNA, 684 bp, Cannabis indica
ctatctaccaaaggaaacaaagtatttttttttcaaagaatcaaaagtatatcattactccaaaatataatctgtacaaactaataattcctataataataaagaggacctacatacttatacaaacttaaatatattatttgtgttgagacatttcgagtcatctgttaccattgtcgaactgcaaaaaattttaaccacttaattaaatggtgccgttttcactaaaataaaaaaacaactttatgatttggacttgatccgtacactacttattttttttaataatatgtttattattaaaaaaaaaatataattgatatataaacattttgctgtttaattatgtattattaagtgggttgttatatatagagcaatgatatctatatactaatcttattattatgaaagtaaggtgttagggtgattattttttttaaaaaaatttatccttttttgttgttgttgttgttagttgttggtattatcggttttggtgcttcttttatgtggaaaattggtcattatttttctgaatcttgcaagacttatctattcagactcttattgcatttgaagacttgctagttgtaacagtcaatctaagtccaagactcaagagtacttagctcaacgttttgtaatagaaatttgttaattctgttacaaattaccattagc

SEQ ID NO: 270218 - DNA, 504 bp, Cannabis indica
gcaaatttctagtgagaaaaagtgaagagtaaaaaatgagaagttaaaaaaggttttccctccaaaaagcacttaaataatgcatgtggggccctttcttcacttccactacacaacaaaaagataactaaagtggttatttttctatagcaatgagatcaattagtcaagacaaagtgttttaaaaggctaaaaatgcatcaaattttattcaccaaaggctacaatagtcgcgaccacatcaacatagcaggtaaagtccctatccgtacagacatccgtataggaacttggggggcaaatgctatcacaatttttttcctcctgacatggcaatcttacataaaaaaaaatcaatgtcatgtggcagtatcgctcactgatgagaaagttgagtcagcacctaagaaaacggagatctcgacactcaaacaggcatcaagtgacagaccagctccctcacaggagctgaccgcccacgcttggttagccctatggccgacc

SEQ ID NO: 270219 - DNA, 943 bp, Cannabis indica
cgttccacgggtactacccccgatccttaaatttcactgtctaaagctaacttagccaggcagtccgcgtgagcgttcttttctcgggggattctttctactttgtagtccgtgaactcgtggagcagttcccggactattgttacatatgcgaccattctttcgccacgcatttgatactctcccgatatctggtttacgaccagttgggagtcgctgtagacttctactcttttggccccaacgacctttgctaatctcagccctgctatcaaggctttgttgtttaaagctgagaagtcgaatcgtagggctgcttggaatcgaagtccggtcggggatatcatcgcaacccccgctccggatccgttttcattggaggctccgtccacaaatactctccatgtggggaccgatggtattggcgcattcgcggttgcctcggcttcattacattcagtgatgaagtctgccaatgcttctccctttattgagatacggggtatgtagtgcaagtcgaattgacttaactccatcgcccatttgaggagccttccggacgcctctggcttttgcaggacttgccagagtgggtgattggttaacaccttgattggctgagcttggaagtatggccttaattttctttaggccattaggaggcagaaaactaatttttcgatgatggggtaccgtgtctccacccctatcatgcgcttgctaatgtagtatacgagatgttgagttttctcttcttcccggactaaggcagtgctgaccgtgtgctcggagacggccagatataggaacaggtcctctccatgaacgggttttgacaggattggaggcttggccatgtgttctgtcaactttttgaatacctcttcgcactcgtcagaccattcaaactttgggcacttcttcaatatgttgaagaagggaa

SEQ ID NO: 270220 - DNA, 840 bp, Cannabis indica
taaatggtaccaagctatgcccacctgagttcattccagtcactggagaagccaaatatgaaggagaaatggaaaccaaccctgagtatgaacactggatcatcaatgatcaactactcatgggttggctttatagttccatgaccgaagggattgccactgaagttatgggatccacttctgctgcaggactttggagagcattggagagtctttatggagcctactccaaatcaaaaatggacgacaccagaaccttaatacagatcgtgcgcaaaggttctactcctatgggagaatatttacgtcaaaagaaaaattggtctgacattcttgctcttgcaggtgacccgtatccagaggggcatcttgtagctaatgttctttcaggtctggatgctgaatatctctcaatcgtggttcaaattgaagccaggactagcacaacctggcaagaactgcaagacattctcttaagtttcgatagcaagattgaaagattgcagaatctcaacttaggcagcaagcctaacaatccaaccaaccctcaagcaaatgttgcagctaaaaataatcctggatctcatacaactggtcgtggtcgaggttcaaataatcacaacaacaacaatcaattccatggcagtggaggtcgtttttcaggcaatcgtggaagtcctgggaggtttcgtggaagaggacgcaccaacacaaatcgaccaacatgccaagtttgtggcaaatatggccactctgctgcagtgtgctacaatcggtttgatgaaagctttatgggaacagatccaaatcaaacaaatggagggaacaaaccaactcaga

SEQ ID NO: 270221 - DNA, 513 bp, Cannabis indica
atcatcaaccgtaagggtgaatatgattctaagactttgggaaaatcaaaggatagcaaaaagaataaaagtgttcgagtgatttgaatggttgatcgagtgttggaaatcacaattcgaaatccctgccacctcaatcattcgttgggtaagaaactcttaagttaatctttttgggtctaaagttcgtaatctcttattttcgttttctgaaatttgtgtcttgttaaaattattatatctctctcaatacttatccgttttcagcaatcttgatatcgttagaaagataattcgatgatctataatttctatgaagaaacctcttacaaattcggaacctttctatgtcaaaaagtagcatttatatacggtttgttgtaaatcgtttttcgcatattctcggtaaatgttgtctcagtaaaacctgaatatctcactgaatattgatccgattctagtgatcttggtacagttgaaaagatattttgattttctaaatgttttatgaag

SEQ ID NO: 270222 - DNA, 636 bp, Cannabis indica
aacacaagttataaaatcacacgatggaccgaaaagttccaagaaacttataaagtcatagcaagagttcgagttgtatacttgcttcattgagtacagagcaaaacctacgtttatttgaagcgtagggatattaaatttctagtgggagactctgtatttcattgagtatcacctacgaaaagggtacgtagattttgaaagaatggaagattaagccttagatacatcgatcctttttagatattggagcagatagtccagatggtttatcaattagttttacaacacgtgttgtccggggtgcataatgtcttccacatttctattttgagaaagtatgtgttcgttccaacatgtattttcagttacgatgatattgaactccagacaacttattttatgaggaagcaacttgggaattagagttgcaaatgtgggagctgtatctcgagttattcaggtaaatttcgaggacaaaatttttataaggaggggatgtctgtaatatcccgatatgcctaatggttaataataagggtttataattataatatgggttaattagataataagtgggattgtgatcctactaattgagttcaacataaattttaaatttgctataactggata

SEQ ID NO: 270223 - DNA, 1098 bp, Cannabis indica
gctttctccactcaatgaaagtatccaaggcatgattcttatttttcagcaagtaaacccatacttttctaatgaaatcatctataatcgctcgatgaaaatagtgtcgctcctcccatggttggaattcttgatggtccccaaaggtctgagtgtacataggctagtttttctgttgttgagtgttctcctttgctgaactttaccctgcaggcactcccaagtacacattcatcacaaaattcgaacctttcttgtagtttctccttgaacaacccttatttgtttaactcttcaagtcctctttggctcacatgtccaagtctcaaatgccaaagtctgatttggcttgttgcaggattgtgtacagcaggtgctgcacttccagtaatggttttactatataaaaaattaagaccattattcagtttacctgtaatgagatcctgtgatccatggccaattttcatcacccctccttcaatcttgacagagtagccagacttgtcaaacatcctaatagatagcaggtttcttttgagttcagaaacaaacctgacttgttgtagagtctgcaattttccagcatggttttctattctgacagtgccaattccttgaattgcacatgcctttttattgcctaggagtactgtaccactgtgttcttctgagaaagagttgagcaatttcttgtttggtgtcatgtggaatgaacaacctgagtcaagcacccattctccacctgaatgagaacttgatgcaaccagaacatcaattgtctcacatccatgtgcaagatctgcttcaccatgatttctggttcttgattgttgactgtccctttttagttaggtttcaaggctaggcattcatctttaaaatgtcattctttcttgcaatagaagcactgttttccagtgtttcccctcgaatttgatccccctgcagagccctttgtaccagttttgaactggtttggcttgtgatggctctgatttcccttgtgattcttgggaaattttcctttgacaatcaacagcccctccccattgctatctcctccttcatcacctttcttttgagtttagtgctgcc

SEQ ID NO: 270224 - DNA, 500 bp, Cannabis indica
aaattatgtattttatttgatgaaaactaagtaataaaattgcattaaattataatattattaattttttatataaatttatttgaaaaatataagaaattagatgtaaaatcaagccaacctgatccaacgatttagaatctgggccttatatatgtataatgtttaaaacaataacagagtctaatcgcctcatactttagctttatatatacatatatagatagatatcttatttttagctaatagtgttattaagagaaattttaaaatatcatatcatcgtcttatatctcttctttatatatatatttaagttcagagtagtatctgagtaccaaatgtacacacataaaattaattatatatcatccactataagtaaaagtaaaatttctattatttttttttaattattttattatagatagacattagtttattgtaaagcccgcttagttaatttagaaattaccagttgtttatgattaattatgaaa

SEQ ID NO: 270225 - DNA, 673 bp, Cannabis indica
attatatttaaataattattaaaaaaaattatatttcaacatggatataagtgtggtataagttcgcttgttaaaggtaaaattactagtcgtcctatctatatgtaagcttatctaatttgttattttaaaaaagcagatagagtaaaaaaaaaaagagatttttaagagaaaggaaaaaaaaaattgagagattaaaaaaagagacaagaaaagacaaatattaataataagtaaaaataaaaacaaaacacataattctaaatatgctaaataaacaaaattaaattactaagataatctcattaagtttgagaaaatataaaaaagcgcaaggactatagaaaaataaatataaaatttaaagttatcataatttaaataacaaaatgtttttatgtatcaatacttattttattttaatgataaaattatacttcttcttaaatttttaaaatatttacaagtaatacatatatatatatatgtgttaaaaagtaatatacatatatacataaaaatttcgtttatctttttttttttttttcaacaatttacatagaaaatataaaaaaataaacataaaatatttaaaaaaaaaatattattatactcagctattgttatataggcccccaaataaatttgattacataaaattacttataatttt

SEQ ID NO: 270226 - DNA, 535 bp, Cannabis indica
tcaaagtgctttcatccctggttaatttctgataatgttttggtttccttcgaagtattgcactatctaaaaaggaaacgcaaaggcaaggaggggtatatggcgctcaagcttgacatgagtaaggcatatgatggaattgagtggtcctttcttgaagcaatgctaaggaagttgggtttcactgagatctgggttcggttgattttgacttgtgtaacatcggctcgatatacggttgttcatgggaatcatgaagtcgggcctattactccttctaggggcattcggcaaggggatcctctctccccttatctctttatcctttgtgcggagggtttatcagctttacttagacgttatgaacaacgaggatggcttcacggttgtaaagtagctaatggggcgccaagaatttctcacatgcttttcgccgatgacagttacttatactgtaaggccactgaaactgaggcttttcgggttaaagaagctttgcacaagtttgaattggcttcaggtcagaaggttaatt

SEQ ID NO: 270227 - DNA, 539 bp, Cannabis indica
tagataaaagtccttaaatctaacaaactcaatagttcagatagaatttttaacgaccaaaaaaattcagaagacataatttggtatatgtcaaaatttgagaggaaaaattactaattaggttatataatataaaagtaaaaggctcaaattcagaatataatttgaaaaaacattgcctcaccatcactttaaatagtgaattatatataggtaacataaacaacactgattaatttgacctattttttggaggtgcatatatacatatttatatttatattaatatttatgtccatatcataagaagacacttatgtgatgtttgatatatttattaattaaggaagaatgaatatatagaggcggctgaggaagctgcgaaaacagacattataataaattaaattattctaaaattaagagacacagtagagaagagacatcatatgttatatctttatatattaaaagtgcttatctaacggcattttttggtttaacagaatataccttaaaaataaaagaatattctgtta

SEQ ID NO: 270228 - DNA, 504 bp, Cannabis indica
attaatgatataaaaaattggttactcttaacaaataaataagattagattacaaataaaaaaatactatacatataaatataatcaactgtttttttatttggaaacagttgtatacatgttgttttcgatgattataatggttgtttgtttacaaatgaacaactaatgttgaattaaatatcatttactgttgattgtcaaaaaacagttgttttgatacattaaaatagttgtttagaactatgaacacaatctaaaaaaacataagaattagttttttaaaaaaatacaaatacagttgaattagatgttatttaatgtttattgaaaaagttagtcgtttataagtttttttattagattaaaatagttatttacaactattaataccaaaaattataacgaatacacaaatttcaggacatggaaactctgcaaattttaatacagggcaatggccattgggataacaacaaatactatgttgattacgaatcaagt

SEQ ID NO: 270229 - DNA, 688 bp, Cannabis indica
ttttttataatcacttccattagtgtaacacaccaagattttttgtttaggtttttttttttgttattgtaaatttatatttttattttgtcaaatttgttttctttcagattttttttttcagttttctatattagatagcaataacattagttctttaaaaaattgacattaattattctgagttaacaaagtaaaaactaatcttacattaattattctaaaaaataaaagtagtaggaaaattcattaatagacacccataaaagagactcattaatagttctactatcgtgtagtataattggtccacataagaaaattttagaaagttattgtagattgtagtgtattgaattaaaattagatttaaattagtcaaagttggatatactgatagacactttattattattattattatttagttgatttggccaatatcgaagcattcatatatacccttaattattatttcattggttcatctggctaaacatacagtattaaaaaggataattataaatgattaaaaatggaaaaattaagtttagggtaaaaaaaaacgagaagtcattctcttcaattccgcccagaccgtcttctccggtgaaggttagtgcatttttttttgttaatttcattttgtattcattcttatttctaatttaattctaaaattacttac

SEQ ID NO: 270230 - DNA, 534 bp, Cannabis indica
acttggtttatgctaggtgaaagtttggtatgattgtgggtcgatatagcatgaaaattcgtatttttggaagcattttcgtggccagaaaatgggtttcctgggtttctaaacccagtagccgtggccattttacggtagcatagtgtgctttttttgggtttttgctttggtcataaattttgactcgggactccgcttgggacgttctttatatcgttggaaagctctttccgagctctatgtgaatatctggaatttaaatgcccagtttataatttgtggaaataaatttagggattaaccctatacttgttgtgtatcccaaaattgtgactaggattaccggcacttggtcaggagcacccggggatttggaatctccatatttgcgagacatcaggtaagacagtagttagcacgtagagacatgcacaatgacgcttatctagaatatgatatatatgaaagactagaaactgggattagagttattactctaaagtgagcggtttattggcttagggttattac

SEQ ID NO: 270231 - DNA, 516 bp, Cannabis indica
tcatggctagctagtagcttagttttcatttgagaaatgttaaagggtactaacggtgactagtactctcttatgtgttaatatagctattggtccaactaagtatagggtcctatataatttaatataatagtttttagggagtatcgctagccaatcgcaacgcgacatatcgagaaggtgctaaacagcactgatgcctaataacaatgctctattatcatttcataacatttatatgggaactaattaatttttatatatgttttatctgacgactgatatctgttatacatatattatttgatctgtagagctagctatctgggtagctaaataggaggtgagcaacttctttggcttcttgaacagtttccttatatatctggttattaatcaatgagccaatatgcaagtgcattaaagttacaccaatgatgtgggaattaagtaaacaccacaaaatattcagtcatgtccatggaaaactggagttagatttcaattatatctctt

SEQ ID NO: 270232 - DNA, 518 bp, Cannabis indica
aggttggcccgctactactaaaaatgttaaatgtgattctaatagccaaacactgcgttctaatgttacggggcacaaaacatgcaaaaatataaaattccatatatgatataaataatacatcctgaatttaaataaatttccataaaaggatgaatcaaaattaatcttctagtttcataattaaaccctaattatcatctaattcaaaattaaaattttattatataaaggaaagcaacagaggaagcctaatgtacatgttttctttcctctagaatttgttttgttttgctttttttgtttttaggaaaaaaagaaaaagaaaaaagcatgatcaatcctataacatggtttagttacagaagaatgtttgtctgtgttttattatcaaagtaattagtagcatgatctatctattttagaattttgtattttgtaattggtatcgtttagctgagtcttacatctattcttgtgttaaaatgcagaaacatactatgtggaatgaaattcgt

SEQ ID NO: 270233 - DNA, 691 bp, Cannabis indica
acacatatataaatatttatataaatgagctctaagtccacttccacgcactttttatggagcgtgaagaacaaaaactatgcaataccctgctactttaattagttttacttttacattagcataattaagatttttgctcctgaactttgatatgtactaaatcatacccctaaacttttaagatcattaaaaatatcccataaactattgagattgttagatttaagcatttttgtctaatttcattcaattttttaatttcagtgattgtttatgtactaaactatatatactcctcagactttgatatctactaaatcatgcccctcgaactttgacatgtactaaattatggcctctgaactttcatccatgttagacttggaaaaaaatacttaaatccaacaatctcaatagttcgtgagacatatttaacgactttaaaagttcaggatgcatgatctagtacatgtcaaaattcagggacaaaaatcctaattagccttaacattatataataataaaaaaagggaattactccatatactattttttaacttttttttcaaatatacagtttgggtttctaaagtggttgcagagctagttgcaataggggtttctatacaattttttgttgcaatttaggttacaacgctaataggagtttctatgtagaattctgtaa

SEQ ID NO: 270234 - DNA, 765 bp, Cannabis indica
cctaaaatgttaaacgagacaaggatggagatcatacttcctgccccgggacctatttaatattttgttttatatttctagtaattattttataatttataatgtatgtttgctatttttaattatattagtattcttttatgaattttaaattgtattttagataataattaatttattgaataataattaatgtgtaatattttaatttttatatagtttaatattttttataaatttaaaaatttaaaattttattataaactttattttttttatgaggggatttctcgtcccgtccttgctctattaactattaagggattctccattccaccccatccccaatggagaataagcggggttgagaaataaaatctttaacaggaataagaacggaaggagcatttttgccaattttccatcatgtatgcatccccattttagacataaaaaatctaactttaaaaaatagtcattataggatcttaaggatcttatttgcttactagttccaatacaactttagttgaaaaaatccaacgctagtagaagtagaacacacatctacacttattattattatttttaaaaagttaaatatcattttagatatcgtgttttgtaaaaattactgattgaaccatctattttgttaaatgataaaataaatcttgtattttttaaaatagtacaaataagaccctgatatcaatttttgataatttttttttttcatataatcaacttaaagatagttcttag

SEQ ID NO: 270235 - DNA, 719 bp, Cannabis indica
agtaacaacactgtaacaacttaaaaaaatgaaatttaaaaactatttgtcaatccagcaattatgataaacaaccaacaaaaactaaaaatagacagataaacaaccgttgataaaaatgctgtaaatccctgtaaaaccaaatacgcgttgaactgtgtaatataaaaacagctcaataacagcacaaaaataacatcaacaaaaatacataaaagaaatacaaaaagaatgacacaaaacataaaaccgtcatgataaacgaataaatcattgacaaaaaaaaaacaaataattgctgtaaaaataaactaaataaaatgatacaaataaagttaataataccttggatttaactttaggcttttctcccccatcatggacttcatcctcaaaattagaatctaatataacctagaacaagaagggggaaaaaattaaaacataaaatgtaatatgaaaaatacaacaaccagaaaaaaactaaacaaaaattgaaaaacaacaaaactaaacttacatcctttgcagacttcgaaagttttgctctcttagccttacgagactcgaccttatctggaatgggtcttttcttagtaccagatggctctggaacatcacccattgctttcttagcaatacgcttcaaacccatcttaggatcaacttaagatgaatttgtaggaggtttcttagaatttttagaaatttttttagct

SEQ ID NO: 270236 - DNA, 541 bp, Cannabis indica
tattgaaatgagttttattaagggcataaaacccaacaaaaagtccaatgtctcaaagtgatccatgtgtcaaaagttcctgaagtcatccgaagaaagactgcaagcttctgccactctcaagttttagaagtttggggggtaaatgtcatctatgtttctggatgggcgagacgtggtatgatcaaagtgtagttggtctgcataagataaggcccaagccttccaacatacaaaagcccagtctaaattggagacaggcctgagcccatctaaaccccaagaacctcgtcttcagagacgagacccttttgcttttggaagcccattctgccttccaagagacgaagcaaagaaagacctctagacaatttatgaggtttatctggagaagaagtccaagaggtgcctctgaaaggcccttgtagggtgacgtggagaccatctaacgcctagtcccaccaaatcagatcttctcccctatgtcagaacatgatagtacgtgcactaccaaagggagtacgtcctctttttcaatcga

SEQ ID NO: 270237 - DNA, 543 bp, Cannabis indica
aagacctcgttggtgagccagtggcatttttgtaatttttacccgagaagggtaaaattataaatttaatttattgcgtgcttatggactatataattatatagtatacttgttgtgtccttttttaggtattttttaacaagtcggcgcggtatagtgataatcgggtatttcaggtcgaaacgagtttggggcctaaatacaattttgagattttatattggcattttattgatatatgagtattctaaaaattatttgaataatgtgatatgtgttaatgatatttttgcccttgtaatgcatgtatacgtggaatgtggccctaggggcatttttgtcattttgcctaattgagctatttttcaacaaaaggaaattgtgagtaaatgaaatgaattttctggactgtttctcagcccctttgggccgaccctctctctctctattttcacatatcaatttgttgaaatctttgaggaattgatgttgtttcaagcttggatttgtggaatttttgtgcttggactttggaggagctaa

SEQ ID NO: 270238 - DNA, 622 bp, Cannabis indica
cccagttcctcatttaatcacaaacataatagcaaacatgagtgccacagtgctttaactctacattctaactactctcttacctggtaccccaattatgtggagatttcaaacctctggatattcttgagtaagcgccggtaatcctagtcataattcttgcgatttcaaaaatagggttaatcccaaaatcactttttcacatattcacataattgcatttcaattacagataggcatatatatagagcttggaacaagctttctaacgatataaagaacgtcgcaaacaaaatcccgagtcaaaagttatgacaaaaacaaaaatttgaaaaatcctcaaggaagacaggacctcgccgcgacgaggggccctataaccacaaaattcaccacctttcaaaattgggaatttcaaccaattaaaacccaaatctcaatccaaatcatacataaactcataatcacaactaaaatcattctaaccattatcaataacaattataaaccataaaaatcaagcttaaaatcaaaatcacaacacctaaagcatgccataaaatcatacatgcattccgtttacacaaactttgaaattcaaagcattcaaagtaaaactcaa

SEQ ID NO: 270239 - DNA, 937 bp, Cannabis indica
tcgccgttccaccgaccaccgactagtctatctcttcagtcgacggtagactccactcgctgccctcgccgacctgagacaaagggttatcatttgaaagcagggcttgttattgaaggtattaacaaagtgctgtttatttctttttctgatattcattcttccattgttttttaattgtaatgtttcaaaatgttgtttgtttgattgcttgatcattcaaatattttagtactaagatatatggatgatggataaagagacgttaaattaattaattggaacagatattcctcttaatttcttcccgaaaagagcttataaaatcctgggtttcagtcaaggttctctactcaagattggtagcccaaaagatgtttcagggtgtggttacgggatttagttcaaagtcgtcaatttcaatcttgggtttactcttgattttataataaattagttgtttcttttatggcgcaagtagtagacaaatgttttggagtttagttgtttaaagtcatagcagaagttgaattttacattgcagtttcatagtagcaagtttgatttttgttgagtgatcttaatctatgtgcattagagatgtgggttttttattacttattaatggtacattgactatattccccattcaatgcttatctaactttaatctcccttctcaacccgtagcttgtttgttctggaaactagattgtacaagttttgtgtcaactttgttgttatgtgtgtcaaataagttaatataggcaacaagggcgtgtaatcctaatttgtttatatgcgagaaaatctatgaagcattggatttgaaacatcaggtattggatttggatttggatttttctttttgaaatggatttggaacatgtattttttttggggggtataataataacatgtttttagttagttctta

SEQ ID NO: 270240 - DNA, 568 bp, Cannabis indica
atatatatttataggatttttcttagatgagacaccacttttgctctcactcatacccataagaacattttcttttgcttttgattggttaaataataaaggtgaatgaaattaaaatgagtttagtttacatacaataagtagtattaattatgctaatattattttatttttttaaaaaattgactttattaaaaagttagtgatattttccaaaaaccaaaataaactatgcttagttgtattttatgacctgtttaggtttttttttttttttttatcatctccaaaacctctcgatagacaccattttcaacatcatgatcatcaaaaaaagtttgatacttaaattgagtgaaaaagaacaatatattcttataaatagtataagatatgtccatgttaataatataactttaataataacattattaatctcataaatttgtataatttatataattttcaatgtgtcttaataattatataagaacgaaattgtacaagatttttgtatgtatttaggaattttttttctgttgagattggcaggttaagtgtctagaat

SEQ ID NO: 270241 - DNA, 694 bp, Cannabis indica
aatatcaaccattagatatttgatccaatggtcaagaataaaatacccatacatgggtaatacccattaagagtatactcatatatataacgttttttaaagagatactagcagaattttacgtgcgatgcacgtatgctaatttttatattagactgtatattatcagtggtaaaggaattagggaaatggtattaatttgtagattgttaataggaatatatatttaaattaaaatggtgtcttcactactttgatctataaattaaatgactattgttaggattgcaagtaataataataatgttatgatattgaaaaataatgtataaagttttgatgattgttcaaaaaatatagcatgtgctcaagcatgttatatttacactaaaagagttacaagaaagtaattgtactaatagcctgatagcaaatgcacaattattcgccagattgaaatttttaaatataaagcagatctctaaatcagacgaagcagccactctaccttctccattgatatccgagtttgtataagttttacaagagcatgtgctcaagaatttagccttgcattcctcaagattcataatcttaccaaagtatattgagtattaaggcaatttcaagctacaaaatttaatgaacccatctttcttctctgcatcatctcaacatctcaaagaggaatacc

SEQ ID NO: 270242 - DNA, 530 bp, Cannabis indica
tctcatgtcaacacattggacattaaacaggcaacgacacaagcttagacaccaactaaacccgagtagccaagctaccaaataaagataccaaagaaaaagttttaccttcggaggcaccttcaaactccaagctatcttccaaaagatcatatcctcattactcaccaccaaagaattcaaattatgcagaaacttataggcttctttaatggtataaagccctttgatatcatgagaccaataccacaaatctgaggcaaccggttgactaatttgagtgttcaaaattaactccctatcccaaagattgaacatatcttctacaatttccctatcccaaactctcctaccaacctccataaggttgtcaacaaagacatttgcaccaatcaaattagaagtaacaaatgaattgttattatcaagacccacatatctcgcaaaatatttattgacgagccaggaccaactagccatctagcccctgctttgattaaatcttacatttcaaaaattctcttccaaat

SEQ ID NO: 270243 - DNA, 692 bp, Cannabis indica
tggtcggtagcttgatagccaccaggccggcgatggccatggtggccgcaggaaggggcagtgcttgagaggagcagccaagctaggcttggggaaggcgggtcaaacccaaccaggacccacacaaatcgttcatccaagagggcgagaacggggaagagggaccaagttcttgtggtgctcaatggtggtccaaccaccttagaaccctcgaggatttatgctcccttcttcctattattttcttatttttttaatctatataattaaattatgaaccctagttgaaatactataaaaggaacatgatgctctcattctcatccaacctttcaacctatctaaacctagctttctaactttgtcagacaactagtagatgagagactcatttctatagtgatttcgcacctcttgatgttcttcaccaattctagactttagtgatagagtaacatgcctacacatagcaagtcaagtactcaatcataatgcgaaagacagtggttaaccaaaccgaaggacagaaacagatccaggcttaaatcttgtttttactctgcgacagaaaggaacaaggattagagatttgagcgaaaggagtcatattattctactaccatcaatgtaaggttttctaaattctaatgtgtttatcgtattagaaaatttatatttagggtgttaatcaa

SEQ ID NO: 270244 - DNA, 708 bp, Cannabis indica
tattaatttattaggacaattaagagataataatttaatagttgattagttataataacatttttttatatctcagtctcaagcctcaaatatcattatagattggagctcaagtaatattttaaaataatattaggacacatatatacttttatactcaaaatatacatgctgatgttgatgttgcaaacttttgaacatttggagaaaagtagttagcatttcctagtgtgttacaagaaacttcatcttgttattgtattgaaaatttgttttactttgattattatcattagaatgaattgtttatttgtataaattgttggtatcacaaacaatgacgcctttgttttttttttttgaaacagaatgacgcctttgttaaagacgagagagtaagtcaataactataaaataataatgattaattgatcatttttaatgagaattattaaaataatatatgtcagaagatcccaaaaggtacttacgtttagtttatagatcaaacccaaattcccaatcaaagattggataagatatatattatttgagttctgctaataattttttaattaattttttatttttttattaataaagtaaaattatttttcaaaaaatattttataaaactattttatttttaattttttttaaatttgtacaattcaaacttttaaaaaagtttaaaaaaaaaaaactaaa

SEQ ID NO: 270245 - DNA, 818 bp, Cannabis indica
atctcaaataagtgtttattgatcgtaggttactaaatttttttttttatttgttttttaaatgataccacatagttttactcaataataactttttatatgtaattataatttattaaatatagttaaagttaatatgaaaagttattaagaaagtaacataaatatatcttaaatgagtagttgctgatcatgggttaccaaaaagtttttgctttttttttatttttaaatgttaccacatagtattttaaattagttatgttttttgcagagcaattttgatagatttttaaataaaaaaaatataagaaataaatcttatatcgaacatcataacatgagttacatttagaaaaaaaaaaataacaatactaattttattaataatctattttttaatctttgatatttattataattcattatataatcgaaataagttacaaaaaaaatgagttggtacataaattttgttcaatttaaagtttagatatttactttttaataaaatataaaagaaactaaaaagttatttttttttttggagatagtaaaagaaaaaaatatatttttatatatccactttaaaaataagtcataatgatacagttcttaaataaaaataattaatatgatctaaaaagtttttgagagatagaaaaggaaaaattaataaaataatatgtatatattgttttgttagtttagatagcattatcaacaaaaagaaaagataaaaatagaatgataacttagcaaagataagaatagattaagacaaataattatttcattactttcggtagaagaatacg

SEQ ID NO: 270246 - DNA, 1416 bp, Cannabis indica
catgcaacataaaatattatttctgatctttattaacaagtaaatctgattatatggaaatgagttttatttagggcacaaaatccaatagtacggacatgtacaaagtgtgtggtataacacttaggggtactcgaagtacaaggcaaaccctaccaacactcgtacaatagcggtacatattgcatgtggtacagtggtcgtaccttagtaaagaacatttttatttatctgataagccttgtggataggtgtaatatattgtatgttatgtgtttttcttactgaatctgtcgactcacggatattatttctgtgtgtagataaaggaaaggcgaaggctgaacatgagtgatttctgagctcaagagatgattgcacatgtcgagatggtgcgacctggagtgttcggtcttgggacgtcttaagctgtattttgttgtcgccatgtgacatgtctgtaaaagtattttgataattattgtaaaagttaaaaaacgggatcttgatttatgtaaatatatatatatatatattcataaagtttaatagtttaaataaaaaaaaatttatatggcacgatttttgagaaaaatcctttgattagtaaatgtagcatgttaattagaaaattacggtaatgcgcttaagtatcagggcattacaagggtacgggaggactgatgaaataagtcacgttgctcgaggatcaaaaaactgtctatgcatttaatgcggcataggaaaaagcatctaacaccttacactgacagacgtaagttaaactaattgaacaaagttgtgcataattgaacaaaaagttaaattaattaaaatgaataaagatatatacatattaataaagaaatactaagggatgtgctaaacaccataaatagtgacatattgttattaaaaaaagaacattgctattaggcaccagtggtgtctagtaccttctcgacatatcgcgttgtgattggctagcgatactccctaaaaactattatattaaattatatgggactcgatacttagttagaccaatacgatattgacacataggagggtactaggcaccactggtgccctttagcatttctcttaaaaaaatcattcattaaaaaaacaaaaagaaaaaaatgagatcataaaaaaacacaaaatgacaaattatcaaatccatttatatataataaatttgacacaatatttattatgatacaaaatttacattaacataaatatacaattttattatttacttttatactatttttattattttattagtatatttagctttaatgttaagactaattagtaatttttctccctgaactttgacatgtactaaatcatgccccctaaaattttttggccgttaaaaattcccccggaactattgagattgtt

SEQ ID NO: 270247 - DNA, 745 bp, Cannabis indica
cagaactcaagaagtcaaaaattttgtcaagttagggcaaaaaagttcatgaagcttagaataagcaagatgaaagatagacgttacgcagtttataaacaagtgttatgactgtaaaatcgcacgaatacatgataaagaaggatcatagagatttttgggcctagggtttcctaaacatttttctacagcaaagtagaggatgtatttgacatataaacatgcaaggataagcataaagaaaaccatagacttactcgagggtcagatgtctgggtgcgagcaacgtcaatccaacaagaagtttgtatgaaggcgcttcgacaactttgaagtcaataacttctcttttctctctaaagcttacttagtaaagaaaggtgatgaaaatgagtttatgtgccaatgctgtttggtatttataggcaagtcacgaaaaaaggtaatcgtctcaaaggaacctcagatgcctcagtttccctccttaaaagcgaatatgggaaatcaaaaataatcaagtgcagccgtcagccgtggagagagaaaatcggatttcgaaatattaagtgtcagagaatttattagccgaaaaccgaagggacgcccagtcagcctcccatcgagtctcggacggtcccatccaaaagcagaagcggctctaataaagtctacacacaacttcggaagtcccgtacagacttggggggcaaatgttatcccaatttttgcactctgacgtggcatc

SEQ ID NO: 270248 - DNA, 622 bp, Cannabis indica
aatcactttccaaccccgaacagaaattaaaggccaaaccttagcagactttgtggtagaatgcacaggcaagagagaaagcataccagaaagcaaccccgagccggtacaaacaccccagccaagtaataatgaagataagccgacctggaaactacatgtagatgggtcagctacagatcagctatctggtgtaggaattgcccttgtcacacctaggggcaacacctgcacgctgcagttaacttcggattcaaagcatataacaacgaagccaaatatgaagctctaattactaggctaaagctagcccaggaaatgaaggtcgaacacattgaaatctgtagcgattcacagctggtggtaaaacatgtattcagagaatatgaggctcggggtgaaaaaatgatagcatatgtgagcaaaatacaagatctactcgcacaattcaaaagctacggtctcagacaaattccaagagaagaaaatatcactgcaggcacgttagctcgattggcaagcagcaatgtaagtgacaaggcgaacttggttcctatccagttcctcgaagagcctagcatcactggcacggaaaagatcgaaatgattgatacatccccaa

SEQ ID NO: 270249 - DNA, 614 bp, Cannabis indica
aataaataaataaataaattggttcagccatgcattaatatccatgaaagatatgaaacgagtaggtgtaaatgggtagttgggtttacttgagttcagggttcggttcaaccacattttcagattaattataaaaacaaatcatcatgtttttctcataaacatatttatttatttaattattaaaattattaaaaatatatgcatacgtgagagatcaaaatatataaaaaaaaaaataataagtacacatgagattttacaagaaaaatattaaaggacagcttaaaatatcaaatatcaatgattatagcaaactataattattagtgaaatttaatattaatttctttattttttaattcaataaataatataaaaaactgcaaacattcacaatttgttatagtgtttaaggtgtgtaatattactgtttttgagtgtatatgcttaataaccaaatttgaatcttttatagagtgacatgtgtggtcttatttataggcaataattatgttgatgggtcggaaaattgaatgtacatgtctagttgtcagagtagtgagttcatagatctcatacttatttgaaataattatataaggtataatttt

SEQ ID NO: 270250 - DNA, 562 bp, Cannabis indica
aacataacaacatgcaacaccaaaaaattaaatcagagaacaaatctgtaaagaaatgaagattgaatcggagaaaaatacctgagaaaatcctagaaattgttatgtgcagcagctgaagaagcagagtaatgggtagggtttgggagagcaagtgtttcctctatttataaggtagtcctctagggttcttcactcaaatatttaatttactctttggtccctcacttttaatgtaatgaccattttatccttcttgcttgctcttcaagcattgttaatttaggtggacctgattggtttagatttggacccataactatttttggaatgcaatcctatccatttcggtatacattgaaaaaaatggtatttttgacaaagtttgtaaaaagagttctaataatactcacattttattttaaatataacacacacttaacaaatttttttagcttagggttggccttatgcgtgcaataatagacagtttgaactttatttttggcgtgttaaattttttaaaatttctcaaaattttacagaatattttaaataatta

SEQ ID NO: 270251 - DNA, 642 bp, Cannabis indica
tcctacaggaaaatctaatgcatggaacaatacaaaaaaatttggtttctaagcttaagaaactattgagtgaaggttctttgttggaggtcgttattaaaaaaagaagacatcaaagttataatagattagtaagttttgtaattttttatatacaatttactttatttatttttatttttagttattattaatttttatttatagttcgatcacattaaagctttatgggaaaaattggatgagatgttcaatccaaatttatataagaaagatggtggtccatttattgaaatagtaacttctactaccgttaaaaaattttgaggtaattatttatttagattctaccattcaatatttgaatacaataatatatgtttgtgtatataaatttatattttttctaaatagatgaaattaacttctcttctacaagtgcaatcaaattctatattaatcttcaaatagattatgtagcatcattaatctaaaaaaattcaccaactcgaagagtatgaaagttagtgagagttataatgttaataagacaactcttgaagaagacatgtttctcaataggatgtctattcaaaaattattagaggctaattggagtgatattcaagtgaaagtttttat

SEQ ID NO: 270252 - DNA, 584 bp, Cannabis indica
taactaactaaagaaggaaagaaggaaacatgaaaaaagtaggaattaaaattagaaatttctcttaaaatgtatgtaaaatcatagtaaagaaaaaataataatgaaatcattttatattgatatgattatttatttttaaagaatgcacactaaataatttttaatatttgcttaaaatttactaatcaatagcaaattatatataaagatttaggtttttaaaaaataaactagctatacaaagtgaagatttagtttattgtcattaatcgtagtgtaatagataacatattattatatttaaaaaagaattaattgtggtaaaaataccaaatatttaaatgtagttgatcattaatatttaggataaataatgacgtaagtatctaaaattttaagtttgtaagtggcataaacctaatatttatttttagcggtataagtacccaatgtttataaaactgtaatttttctctaattttatttgtacaaattctgttattgtctaaatagggcatatataaggcctagattcttaatcatagggtctaaatagaaatatgtagtatctaatttcaaaa

SEQ ID NO: 270253 - DNA, 670 bp, Cannabis indica
gacaaggctttgaaatagtattatataatcttgttgagaggacatgcaaggtcttagttgagagataaatggagctaaaagtatcaaagttgttgatcaagactatcacatggtcttggtaattattcttcttgatcgttagttccttcttttatgtatgaggggttgagaaatatgtatgtgtgtataacatatatatatgtatatataattactatgtgcagacccaggtaactaaaagtctagaatgtcagctgtggcgagtggaactttggatgcgtgtgtgtgtgaactcgctgagggccagataactgcgggcggtctagggcgctctgtttatttatttacgatattaaattttttcgtaattatttttagttattatttattatgtctttgtacgaaaactggctagttgtgaacattttcaagtattaaataaaaatatgacattatgatttttcgcgtttaacgcttgtaaataaaatttaatatttttataaaagtacgggcgttacaattatggtgtcttgaattaatttgagactatgttgagatattttacaatttttggttaattatttattagaattttattcatttttaacatataaatttatacataatcatggttagtattccacacatatttctaagcagattggatatg

SEQ ID NO: 270254 - DNA, 493 bp, Cannabis indica
aaaacaacagtttgttgcaatcaccaaagcaatcaagacaagtgatcaagaaatactcctcgacactgaatcgtatacaatggccaaaaaccttagcccaaaattcttttgggttgggtaggtatacttccctcaaaagtaggcactgtacaacttgggggtaaaaaacaaagtcaggtatatccgaaaaatgaccaaactgggtgtcacggaacatagttaacaaattgacagacaaactattgttgatgttattaataatagagaaattactcgtacatacacacttcgatttgtagaaatcattgggactgtatttgttaacccagtccggcatttcacaaagaaaacaaatataaagaaataacataagtaagtagcaaaactataataaaactaaaaaacaactgtaaacaaacaaaactacaggaaaaactctttgaacatcaacatccattataaatctaattgttacccattgatgatataaaaa

SEQ ID NO: 270255 - DNA, 744 bp, Cannabis indica
cttttgtaacttgtttgggtgagaacgtaacattataaaagaaatatttttgcaaaaagtacaaacatttatcgaaaaataaacaactgattgtctaaaaaagaattttaaatgtcgtgcttttgaaatgacacttaacaagtgaaaaactaataacattgttcaatcttgagaaaagtaaataaaagctaaaaagagtgggctccacatggcttctactagccacttttattatcttggcaagtgtgttcaaaagttgtggcttggaaaagttgagccccaagttgggattgacctttcattgccacactgttgcatactcttgctgccaactgatccccacgtactatgccattcccatgatttgttggtaaacttcatagtcaaatttctcattgatgttgctgcccccagtgtgataagcattggtcttcccattattacattataaaccgatggaatgtccaccgcgacaaattttgtcatttttgttacagtttgcggggcctctcctattgtgagggggagagtgatttttccaatacttgatatgccttcgctgataaatctatataaatatgtggggcatggttgcaagtcgcgagtctcaagtcccatcttgtcaagggtggacttgtatagtaagttgatcccacttccattatcaacaagtattctataatggtgtttttaaggttaactataatgatgcaatatttttatctaattttattttaatttttt

SEQ ID NO: 270256 - DNA, 870 bp, Cannabis indica
taattttccagtacttttcgaaagcaacaaagttgtttagcctggtggaactaaattattatagatgagtttttacactcttctagaataattcctcaacctctagagtaaccaccatctctaacataaatacttagttggtatagataacaaattctaatatacaaccctatcatctaacaagattctaattattgcatgcaccattaaagatctccaacctgaccactctttaatcacatcaaggcaccttctaccatagcaacaattaaagaaaagatgcccaacataacatcttcattgtgcaggccacaccaaacaggtgatcatgaagttgttcatcccaatatctaatatcaagcctatgaaattgaattcaagtaggaactgaacacacatcctccttttgaaagtccgtatagcgatcctaaggtttcataacaactggttttctatccaaaaacaaaaaagcaccatccaaaatggtatcccgagcttaaatcttggaattggactatgaacactctcggattgatagcaccccaattatgtcaatccactacaaaaaatagttacttttaatgataattttttaggtacaatttaattttttttgtgattaaatatgacttttagtaacatcaaaaagttacatgtgactaacatagtatttagatataatatatcactaattatttagttttagtcacaacaagtattgtggctaaaaatacatttagtcacaataaattgtaatttttgtgcatgactaagactttagttacaaattttttagtcacaatatagaaataataatttataagtaattaaaactattttattttaacttgtgactaaaagttaaaaaat

SEQ ID NO: 270257 - DNA, 314 bp, Cannabis indica
attataatcacaaatatatataaaaacatatggtatataaacttttattttttatatattatatattaattatttttttaaaagtataaatttatttgcattagataaaaataattataatattttaaaattatattttcatcatataaattatttttaaatgggaaatttgaatttttatgcatacattaaggggtaatttttccctaaacctaaaatagagggcattggtaaaatgggacaacatttacttaattctcacattactcccatttgaaatctgccttctctctctctttcgcctctctttctct

SEQ ID NO: 270258 - DNA, 929 bp, Cannabis indica
gtaaaataagttccaacaaaactgtcaaagcttgaccgatatctggacgatattgactcaactctacgctaccaaatacaaagcaagaattctccaaattcgtggtcttctgcaatccacgaagagaggatcaatttcgatcaacgattacttcttaaagatgaaacattatgcagatgctttagcagtagcaatagatacatcttggcaagataccatgaaaactgatgtttctgaacatgataatttgattttcctttcttttaatagggagaataaagaaacctatcaaaaagtaatggaacaatgtataattattttatcttaagccttaaaatttatagggttagcttgtttggctttcttgctcattatattatcgtgtttcttttgtaaattatatatttggatatcttctaagtataagggttataatcaatttgaattagaatctaattaaccattgaacgtaggattagtctagaattgtattatgtgcagtgtcgtatatattatcttttataagtttctctttaagttaatgaaatattagtctaaagtataattttaaaactaataacaataatatatttatcaatcataaaaaaaataattaaaattaatatatattatcttagtttaaactgatgaacgtttataaataaatataactccaaaaatttgtaaatttttcatattccaattgttttaactatatattctgaaattcttagtggtgaaaagccatttaagtattttagaatgtggtcatgacacacacagttctcagggattgtctctaagatctggcagcagcaaattaaaggtactcttgtgtactagctggtgacccgactgaagatgcttaaatagagctaaagaagctaaataaaaaatcattctcagacattaaggcaaaggaaataaaa

SEQ ID NO: 270259 - DNA, 713 bp, Cannabis indica
ataagacatggatagtggttaagcaacctaaaggaaagaaattggtagggtgcaaatggatttttaaggagaaagaaggtattcctggtgttgaacctgtcaagttcaaagcaagactagttgcaaaagggttcactcagcaagaaggagtggatttcaatgaaattttttctcctgttgttaagcaaacctcaataagggtcatgatggcaaaggctactagagaagaactgcacattgagcaaatggatgtaagaactgccttcttacatgggagtcttgatgaagaaatatacatgcagctccaaaatagtttcaactcctctagctcagcattttaagctgtctaacacacagtcaccagttacagatgcagagaaagaaagaatgattaaaattccatatgctagttgtgtatggagtttgatgtactcaatggtgtggacaaggcctgatttagctcatgcaatgagcatgacaagcaggtttgttgctaatccaggaaatgctcattggactgctttgaagtgggtaatgaggtatataaaaggaacactgaacacagggttaacctatgatggcactagcaaattcaaggaattggtaactggctgtgttgactcggattatgcagggtgtttagacactagaaagtcattaacagggtttgttttcactgtccatgggggctgtgtcatttggaaatccaacct

SEQ ID NO: 270260 - DNA, 494 bp, Cannabis indica
caatcttttttccacgaattatgggcgcagcaacagcaatagaagcatgggacacactgctggaggagttccaaggaacagtcaaggtatgcacagttagactacaaaagattagaagagattttgagaatcttaaaatgaaggataatgagaatacaaaatattactattctagaattgaagaaatagtaaatcaaatgggagcctatggagaaataatttctcacaagaatatagtacaaagaatactaatttcttatacagaaaaatatgattcaatagtttctgtgatagaggaaactaaagatttagaaactctatcaccaaaagaactaatgggctctcttgaagcatataaaagtagatgagaaaggcataacgaaagtgaagatgaacatgccttttagtctaaaatcaatctgaggtcttgaaaacaaaagctgatgggaaaaagacacaagaaaaacaaaagaaaataatgacaagtatcctcc

SEQ ID NO: 270261 - DNA, 642 bp, Cannabis indica
ttcaactagagtttaggatttaaattatatggaataaaaaagataaaataatggctaaaaatagcttaagtggtcggccatacatagtggaccccactagttacaattttactattttatttaacaatttatcttttctttcactaatgtcatattttctaatttcaatcctataaatgtcaaaactatttacttaataattataaataattattaaataaaattcacattttaacttatttattaattagaccttacaaagtctctcaattaacaaataaaccctaaaacttcttttgttcacaattatgccagtgaaaattcataaataagacatagtctaatttagaattataattgattaattaaaatcaattaactgggtctacaatagtattatctcaactagtgtggggaccatgagcctatataatcaagcttccaataagcagttctagaatttactaagtaaattctctaacttattaattcctcataactccactatagattcagcattgcactcttaattttatagaacactttatatgctccaagatatagatacgttattaattatccattattataatccaaataatcaaagatcctctatagattatctacatcgagtagaaaaaa

SEQ ID NO: 270262 - DNA, 457 bp, Cannabis indica
tgatgattgattgatgcttgtaaaattttatgaaaaataattgaattttcgttttccgatctatttttttttggatagtttggacaaaatataagcaattcacttttttacagaacttaatttcgattttatttgaattagttatgactttttgaagttttgaaaaaaatcgggggtggtgacacacccttgtgcgcgcgggttgctgctgacagcaccctttgtgcgcccaagtagccctttgcgcccaagaatgtgcacctggatggtgtgctttgcatgccatccatacagctcacaattttttcaatttttcatgctatttaaagaaattaacttttgatttttttgtatagttttgtattttgatttttacttttcatatttcaaatctaattatcagaattaaattaattgaattttctaaaattaatttaagatattattgtaatttgaa

SEQ ID NO: 270263 - DNA, 1371 bp, Cannabis indica
gggggcttatttataattaaaaaatatttatacatacattataatcactcttactagatttatttaattttatgggggcttttctattattttagtctataattatcaaattaaaaaaattacatttaatttttagaaggcaatattttgttagtgggggctatagcccccacattttacttgtgggtccgtccctgatcttaatatgcacatccttaatcactttaattataattttaacttttttttctaattatacataattttttaagcttttctttacttgttctgtacttggttttcttatagtccttaatcttttgtattttctcaaactaaattaaattatcatagtaatttgtatttttttatcatgtttgtagttgtgcattttgttttatttgtaccaattataaatatttttgtcattttctattttttgaaacctcaaattttttttcttttcctcaaaattttttactctatttttgcttttaaaatattttttaatcatcttttttcttttctctcttattctatttttatatttgtttttttcttttttttttatttgtttattagtaaatatataaaagtgtagaagactatacgagaatggatatgatattaatttttttttttgtgttgttattcttcttttttttcataaatttttgttaattattattttatttttcttttaaatgttgcttattagtagataatagtagaacaaattatttggactaacatttagacaggacgactaataattttagttttaataagtgaatctataccacactatgttcttgtttaaacatattttttttaacaattattttaacataattgataaaagtaaaatatataattattacccacaagttttaacggggttacgtgcctatggcacgtcctccacacctagatatatataaaacaaaactgataagttttgttcgtttgattttatatatatattaagttttacatataacagtaaaagtacgaacgaatgaaccctcgttctctctccttcgacaaaaccttcactctctatattcattttcttcgattttcaacccaaaacttattgatctaagctccggtagtagcaggataccaaatccttgaagagggaaagcttaaggtatgatttaatttcgttttaagtttaaaaaaaattagttttatataaaggtttcgtgaattagaatagttatagagattccgacttcgtagaattattctttggtacctatgggactagtatcgatgtttacttgttgaattgtaggtgatttaaagttagaaatcgagttttgaactttttaaaccttagccagaacgttaatgacatttttcatt

SEQ ID NO: 270264 - DNA, 662 bp, Cannabis indica
ctcaagtaatcgacattcatatattcgatttaattagggatttagagattttatcccaatatttattttggaatttttcttccacttttattttaggtctatagatccatgttttctttgtatttttaaacctcttcccacaatggacttttaagaatagaatcacaaaaaatatctatttaatctattgtggatctctaaattacagaagaagaaaaagagagaaaaaatgagaatttgattatagggtaagttcattgaaggaggtagtgtttgggttcatcaatggaggtggaagttggatttgtcgatggtttgtgaaatgaaaagggctcataaaattttagagagagaaaggaagaatttagagagagtgaaactaacaaaacaaaacaaaaaatagaaataaatataaaaataaagatgctcaataatattagtctgatgtttcttgctcaaataaaacacaatttcattaaaggatgtgacacgttctaattgtctttgagatactcagtgacggatttagaatttttacttgtggaagcttattatcataaaaaaaaatatttataagctacattataatcactcttactaatttaatctaattttgtggggctttttctactattttggcctataattattaaattaaaaaa

SEQ ID NO: 270265 - DNA, 609 bp, Cannabis indica
aattgaacaaagagtaaaacatcgaaaaatttcaataaattgttttctttttttttcttagaataattagcaattttgttctttgaacttttgataatattgattttgatctttaaaatatacgacttgttaagaacatcccttaaagttttacatatacagaaatttagtctccttgttcgatttcgtcttattattctgtttaaatgctgacgtgtctaagtaaattaacaattttgctctttaaattttgacaactatgagatcggactctcttagaataaaaataaaaaatattcaacatttttttttaataaatctcaaaaaattaatatagatcttaggaaaaagtattttgaatgattaaaaaaattaaaaaataaattaaaattttaaaattaattaagcgatttaaaaaaattatttatttttattaaaaaatacatttagatatttaaaaaatattaaaatttaatttttataaaaactaaattttacgagaataaacttgagtatattttatttttctcaaagaatctaaatttatttaagtaaacataatatttttttagtttaatttataacgtttttcaaaatatttttatattt

SEQ ID NO: 270266 - DNA, 567 bp, Cannabis indica
gtggtgatgagacggagactccagagcatgcattagttttctcctctttggcggagttgcttatttacctctttgaggtgctcgacacgaatcagttttctctgttagctatgttatggtggtgggtgtggtatgatcagaattcggttctgtttgggaaaaaacaatctcggttggacgtgattgatatgttggctaaggaagctctggaggagtttcaaggtgttagggctagttgtgatggtcgggtgttgggtgcggcggtcactggggaggttaggttgggtgtggggggtggtggtgttggtcaggggcggttggggaggggaggggcaagggtgggtggggggcggtggtgttcacctggggtgggtgaatttgtgttgtctgtggatgcggctgtcactccgggtaggggctttgcgggttttgggggagttatccgtggtggtggggggtggtttgggcgtcttgggcggtgggcgccgtgggggatttccaggtggcggtggccgaactgctcgctctccgtgtgggtctttcatgggctaatagactgggattttc

SEQ ID NO: 270267 - DNA, 774 bp, Cannabis indica
cattatatttgataatatggaatctgaaatttatttggaaataattgagtattaaatgactaaattacccttgtgagggtgtatgtgtgagttttggcccttagggcattttggtcatttgacctctaattgttatgtttggaaaattaatttttgagggaattcatagttctttttctggttgcttctccctctcacctgaaccctctttctctccctaaccctctcaatattttcaaagctaaatggtgtgaattgcttgacttttaagcttggaattggaacccagatgccgcagcatgctctgaagcatgacgcggcccgccccttgttggtggaacctgggttttgtcccaggttccgcggcatggcttgggcatgccgcggcctgccctcttgtttttgggcaatttcgagttgaattttgaaaattcacaacttttgattctaaactttgatttcggagttctttatatcgttggaaagctcgttccaagctctgtatgattatctgaatttcaaatgccatgattgaattttatgagtatggaatcaggggttaaccttaagtatgaaatatcccagatttgtgtgactaggattaccgacacctggttaggagcacccggggattcggaatctctatctattgctggacaataggtaagacagtgattagcatgtagagtatgcgcagtggcgcttatattgagaatgttatgtatgaatgtttggtaaccgagattagggttattaccctaataggaacggtct

SEQ ID NO: 270268 - DNA, 789 bp, Cannabis indica
aaaaataaagtggcaaattccttccctagtggccaaccatggattgtgggcccccactttgcaattttgccattttctcatttttcatcttattttctaaaaaaattcatttttccaatttaaccacttacatgccaattctaattattgaataactaaaaattaattattaaatattattgttatttaatatatttattaattagacttaataaagtctctcaattaacaaataaattctagaatctcttttcttcacaataaagctcttggtaagtgaaaattcataaactagacatagtctaattttagaattataattaattaattaaaatcaatttaatgagttttacaagtagtattgtctcaactagtatggggaccatgggcctatatatcagagcttccaataagcaaatctaaaatttaccaagtaaattcactaacttattaattcctcgttgcatccaccaaagaacttggaattacactctcagttatatagaatgctctatatgttccacgatatagatacactattacttatccatttttataatcccaataatcaatgatcctctatagatgatctacattgtatagggattaaattaccgttacacccttcaatgtattttatccttaaaacacttactcacgtataaatgatatttcagtgaactaagataatcactgaaaggagtgcacaaccatttatctctgtttagccaagctcaaaggaaatcatcattttacttctatgtcatgataaaagctatagattccata

SEQ ID NO: 270269 - DNA, 1178 bp, Cannabis indica
tgtaatctcataaatatttgcctgagaatacatagactcatggactaaggatctataacgtctgaaccacgtaaaaatatgtttgatcattgtttattatcttttatcttctttaagctctaaatatacttagtttccaaaaaactcggtaaacattaattaactgctgacatggattgcctacgtataccatcatgtacacgtgacacatttgtattggccaaaaattataaaaaaaaatctttattttaaaataaaaaaaaattctcaattttgaaaaaaatcaaataatggaaaattaattttgttaatttatttcttgtttaaatagaaatttgaggtcaaaatctaaaaaattcatcaccatttttgattgtatttacttatcaaccaaatatatggagaatattaaaggtctcaaatgttatatctaaaagtcaaaatattattagggggctttcttttctcaataaataaacaacaaatataaaattcaaaagaagaacaaattttagtaccatcatcaaatcgaacaaatcataagttcttactgctattttttcaagattggggataggatgagctcgtggagaagaggacggttggggatgggccagaggaggagcggacgattagggcactctagttggtgttctcgtgcaactgttgttgctggtcgtgtgcagctggagacgaggatgaacggaagagaaaaagatggttggtctcgctcgtgcagttggggatgaggatgaacgaagaagaagaagaagaagaagtgtgattagtgttggttgttcgtgcgactagtctttgctaaggacaaatgaagaagaagatgaagttgctaggattcactacaacaattatggttattagaggcggaccactccgctggtaataatcctattttccgccgctaaagagtaataccggcggggtccgccggtaataatccgctggtaatacctggtcgctaataactattattagtggcggactgacacacccgccgctaataatagtgtcaaatcattaaactcacactattattagcagcggatctattcgccagtaatacttttaaatataaatatttataatttttttctttaaaataataaatataaaattaatattaaatatatttaacttttttaccattttacttatcaaga

SEQ ID NO: 270270 - DNA, 562 bp, Cannabis indica
tattatagaaaaaaatctctataaatatagagcaaatactaaaaaaattgagctatatataaaaacatagactattttattcattaccaattgattttgagagaactcatgattcttgtcatggtatccagcagggccctatataaatattttaattattatcaaaataataattttagtattttggtgtagtgataaaaaatttaaaactcatctccaaagttcaatcctcattgttatccgcgtttttggtacaggacacatagaatctaggatccacggcccactagcgggtcccctagagaagataaagtgggcaaggcccattttatcaagaccttccaggaacgtacttcagatccatgatcagataaccttccaccattgacagctcatgtatgaaagtatgtcagtaacttgaggccagaagggtaaaacaatgttgtaacaccctaactaggataggcgtgttagcttgattgaaatgtactgtgcagctcgttggtaatcaacgagattaatgaaaaacgtgaataatcaaaatttgcatacttaattaaaa

SEQ ID NO: 270271 - DNA, 535 bp, Cannabis indica
tagggcataaaacccaataagtttttcttagaagaagaaaaaagcttagagagaacctgaaagtttttttgtccatcccccttacaagaaaagtgtaatgaccgtgtacttagaatatggattagagaggaaattagcattaattaattatagtttatgattatatgtgattattatatgttgtgtagttttttttttcaagaaatgcattagattttgatctgatatgatggcgaataataaaagggaaatttgaatttctatgcttaaattagctacttaattaaagaaaatattaaaaaatttctctttttacactatatcaaaaataagtttatatgaaaaatatttaagtcaaactcaatattttataatcattttttatcgtatttttttttttattattttcttttcagccgatggagcaaccccaatctatataatgtaaaaatacgagatttttctaattaaataaaaaaaattaagcataaaatttaaaatttctaaaatattaaccattcatgggtaataccca

SEQ ID NO: 270272 - DNA, 845 bp, Cannabis indica
ttatttttgactatgaggaggtggatttctttattgggaaacatatagcgtgacaaattattgttcatatattgaataattatttttgattaatgggattcatatatataactgtgtatattgaattctttattcaaataattatttttgatttttacgtgattatttattgttcatatatctagaaccctatttgattaaagttaagattataagattaattaatttgtgatttcttcctatacacataataataatctcacctaataactaataatattttttctttaatttttaattgtatcactttcaaataacatagaaaaaaactagcataaaatttagtatacgtgcctcgcacgtagctttttgctagtatatatatataaaggagaagtatgaggtggtgacgtagcggtctaaaatctttgtgaacctatttttcttttttctccttaattctctcaattctttaatattttattacagcataaatttacaaattaatatttactattattttaataaattttctataaaaatatctatcttaaattaattattttttttttaaaaaaatacataatgataaatataaattaaattaataatattaaattaaataattattcaatctatctatctatgtatctatatatataaagtagaaaaataagacggtgatatgtccctctataatcatctcaaatacttttatctattctctcattattttaattttttattacgtttataaatatcgtttgattaattcttttattttttgaattttttttattaagtttatgatattattttattaattaattaaaaaataaaaatta

SEQ ID NO: 270273 - DNA, 857 bp, Cannabis indica
aaattttaattataatgttattatttaatacataataaatgctctatattagcttgtattataatatttacaaaacattcggggtcaacactaatctccaactcgaactcaaacctggctcccggacccaaacccaaacccaaacccggacccggacccatacccatagactcagacccggaccccagaacccggacccgggacccagacccggacccggacacaaacccggactcgagacccgagacctagactcggacccgaacccaaacctagacccggacctagacccgagacccaaatccaaacctggacccggatccagactcggactcgtaacccagacctaggaccggaaccatggacctagacccgaaccggacttggatcgggattgggacccgatctcggacccgagacccagacccgacccgtaattggtgttggatcaagtgtattgaaaatagattataattttacacaatatattaattcaagtcaataccaaatatagtattgtattaaataatactaatacaatccaacacaatactatacaatacaatctaacccaatactaggggtgttcattggatcacatccaatgtttttaggcctatccagatccgatccaatcatatattggatgttagattttaccatccgatccgatccaattaatttcgtcatccaatcgatccaacatccattggatgttggattggatcggttctatctattggatgtatttcatatatatttatttgtttaatttgggtttatctaatattttagacctagtattttttggatcggatcggatccatccaatatttttagatccagtatgtattgga

SEQ ID NO: 270274 - DNA, 751 bp, Cannabis indica
atctgtataggtgatcggatatgatcacttgcccgcaagggatatggctctgataccatgttaagaatcatggggttccaactcaaaaccaattggcaatgagtggagtagcccatgttcttatatatggctcaattctctatcatttattccatgtgggacattgtccacaataatctgtaatcgtttaaggagatgaggtggtcctttgtttgaggagaggattgttgggtgtacaatcaaagtcttgcattgtttagaaatgaaaaaaatcttgggtatacaagaatggacactatctctattgaaatgaagttttttagaaatgtgctttgttttcttaattaaacctaaaacgaataatgaggaaatagatggtatcagtcctaacaaggtttataattaaatgttcttattattgagttattcttattattgtactttcttgaagatgtgtcatatattgaagaatagattttgtatctatcgtttgggtgtatatgggttttaatagttgagttgatagaagggttaattatatttatcattagaagttaaatgtcagaataaattacatattaaattttaataaaaataaactaaaacaatactcttatagtacatgaaggtatacaattactatttttttttctacaaaactccttaaataatatatatatatatatataggaaaggtgtgtatttcactacaaaaatttttattttttagtcacaacaaaatttatgacta

SEQ ID NO: 270275 - DNA, 835 bp, Cannabis indica
catgtagccttctttccctcttctttttcgcttcaggtaatgcattatctcaaatgaaaccatgatattgtctgaaatcaaccgcccagggagaaacgcactctgtgtatcagaaattaccaaaggcaaaatcccttttattctattcgccaacaccttagaaattattttatacaggacattacacaaagatattggccgaacatcagtcatcacctcaggttgcttcttcttagggataagaacaatattagtatgatttacctcgttagggaaagatccttcaagaaagaaatctttcacaaacttaataacatcaccaccaacagtattccagcatttttgatagaacccaggagtcatcccatcaggtggacttatcgggatgcatttgaaagagggcgcgacgaacttcatcatccaaaaccggttcaactaacatatcattctgagcaatagtgaccgtggcaggtgtacaatgcaaaatctcagcaaaatcaacagcagtaggtgtaaagagatgtgaaaaataatcacttacaagagtatcaaggccattctgccaatcaagccaacaaccagccgagttcttcattttttggattgaatttctacgcctcctagaagtagcagtagcgtggaaatattttgagttactatcaccctcccggagccaaagttgtttgctccttgtttccaaaaatttcctttgagagaacatgttgagttgagacactgcttgtttatactgctccaccgaagccatatctctacctttcttccatcttctaatatctgcttgcattccttgatacggtgtgaaaaaacttgacgg

SEQ ID NO: 270276 - DNA, 1804 bp, Cannabis indica
cttggggtgtgttttgacttgttttttgatggttagttatattttgcgggtctcgggaccccaaaacctcatttcgacatttgaaaccctaacgggagaccactaccaccagtcgggaccgaaaagtggcagtggtcggccatggcttatgggaacccttggatagtgtttcttacttatttcagtcatatggatgctagaaaactactgtggtcacattgattcttggccaattggttaagagagcactgccaccatttttgccaaaaaagtggcagtggttgcataaagggttatggacccttgggtgatttttctcacttgtatttgataaatggatgttggaaatacaatttatttgagtggtttctataccacttggtggcttttcttacttaattttgatatgttttgatggaaaagtacttttggcaaaaaattccatccccttccttgtggccgaccacgtgccacaagttgtgccacaaagatggtagtggtcgactaggcttgttcattggtgagaaatagtttctttcacttgtgttgcattccttggtgttgaggtaacacattttgacaagttcccattggtacttagtgattggcgagcattgtcatctccttgtggtagtgttctccaaaaactagagagcactaccatcttcatgtggcagtggtcacacatgccctattgcatgaggttcttgtgcaattttgaccttatgttcaagtctaggccttttatggacaaatgagttatgtccttgttggtttccttgttggattgaagtctttagggtgaaaatactcacgcgggcccataaaccctagtttgggcacacttgggtgtgtgagtcccagctcaaatggttggttaatatttttgagtccccaagaggtgtcatgagacctttagaatgatgtcttatcttatttgacatttataagtcttggttaaagtcgcaaggttgacttttttatttttcaaaaatcacgtataacaaagttagtattttgttatttgctttatgtttttcttaccgagtatgtcgacttgcagatatgtttacatgtgtaggtaaaggaaaggcaaagactgagcaacaatgagtccatagcttgaggatggttgtacatatgatcaggatggttaggcttggagtgttcggtctcaggacgacatgagctttattttgtagtcgttgagcgaaacttttgaaaaaaatgtattttgggtacaactgtaaacttctaagcggaatccctgaaattatgtgtttattaaagttactgtttaatttcaaaattttaatatatgattgctttggttcttttgacaccataaaaaaatatatgtttcccatatattaaatagttgccttaaaacggttgcacaagctcttccaagctatgccatgagtgtgtttttgatcccgcaagaggtcacgcgagatatggaaagcttgatgtccaaattctggtggcaatcatccaataattcttcatcaggtattcattggatgtcatggaaaaagctttgcaaacataaaactaaaggagacatgggatttcggaatttgagaagttttaacttggctcttttgggaaagcaagggtggcgtttgcttactaaaccagaaactcttgtttcaaggatttttaaagcaagatactaccctcggggtacttttttcactgctgaaattggaaataacctaagttatgtttggcgtagtgttcttgaagcccgtcaacttttgactcatggcgtttgttggtcaatcggtaacggcacttccat

SEQ ID NO: 270277 - DNA, 538 bp, Cannabis indica
ggcagcaaggacccacgtccaaggcctcccatccatcccaaaaaaactctttaacaaaaatgctaaaatttaatttttaaatatatattttatattttaactattattttatcaaaaaaatataactaatttttgaaaaaatatctcatttatttttaagatactacaattaatattttattaagataaaatactaaattaaattttcaaaatgctatatattttataccaaaaataaaataaaaatataaaacgagagaaactttttgctctctccctcagaagagcctttccctgtaggaatgcatccaatgcctgatctagccatggaagatctccttgattgaactgggaagctgcgagtaaaggatgaagacggatgggaaatcgatgaagaaaaggagtctgaggtgggaaaatcatgtcttttgggaaggttctgttcgaacaagaacatgaacaggaacctaattagaacgattctgggaagaatttggggtttagatgaggtcgattggggagtgaagataaagaaagc

SEQ ID NO: 270278 - DNA, 648 bp, Cannabis indica
tagttagggtgttacacaaagagtcctccaaaaaccagtattatcattcagactccaagcacctttagcttcttgtagaaatttataggcacttctgaccgaatactgcccaaaagtctcaaacttccaaggccaactatcactaacagtcgattcactaagctgaatggataaaattagatcctgatcacgagtataaaaaaagatctctcacaacatcttcatcccaagcacgagtttccacttgaaaaagacaactaacaacttgtttgcaacaacaggatgccttgagacaacaaagctattagttttgtgtgtaagccaaggatcttcaagaattgaaatattatcaaagattttgtgattaaggaaatgtaatggtggaggaaaagttgtattgtatacaacttgtcagatcctattacggaaagaatactacatactacacttgatttggatatcaaggtgttgagattatttgaaatgaactttttattttatattagtgcaaaggggagtttgttgggttttgtgccctaagtaaaacccatttcaatataatcagatttactaattaataaagatcaaaaattgcattttatgttgcatggttcacatgatttatttcatgattatgtttaatgtata

SEQ ID NO: 270279 - DNA, 498 bp, Cannabis indica
ttacactttttacatttatttatttttataactttgcggtattttaaaaaaacacatgaaagcaacataaaaataattaataaaataacaacaagagtacaatataaaaatacatcaaaagaccgtattttatataaataaaatctttaaaaccgtaaaaactgtttaaaagtaatgtataggcgtatttatatatactagtagaattctacgtgcgaggcacgtatattaagttttatgctaggcgtgtctttctttatttaaaaataatacaataaataattaaagaaaaaatattattaattattgtttgagattattaatatgtatattcaattaatgtaactaatattgttaataattaaaagtaaatactgaatacaatatatgaatgtttaagaaatcttgataatctaattgcaatttgtaccaaaattaatgttcaaaaataaagcacacactaatttaaatttgagttaagtaaaaagatattaaaat

SEQ ID NO: 270280 - DNA, 1085 bp, Cannabis indica
ttccttgatcaagaatttactccggaagaggttaggagagctgtttttcaaatctctggtgataaagctgtaggtcttgatggcctcaatgcctatttctaccagaaaaactggtcagttttggggtctgattttactaaggctatcttggattgtcttaatcatggtgcggacttttcctcgatcaattcttctctcattgtccttattcgtaaaaagcaacgtgctcattctcttaaggacttcagacctattagtctttgtaccaccttttacaaagttatctcgaaaattcttgcaaatcgactgaaggttgttttggacaaaataatttccccgaaccaaagcgcttttatctcgggtcgtatcatctttgataatatcctccttgctaatgaggtagttcatgccattaacaataggaagaatgggaaagttggttgggcggcccttaagcttgatatgtcaaaagcttttgatagggttgaatgggactttcttcaaagtctgatgtatcactttaacttccctgttaagtttgtttctaatatcatgaaatgcctaaccactgctactatttctttctctgttaatggggaggtttgtggtaaagtctttcctaccagaggtttaaggcaaggagatcctctttctccttacctttttatactctgttctgaaggactctctgcactccttcatcattctcagcgtcaaggggtccttaagggtgttgctatctctcgcactgctccttctctcactcatctgttgtttgcagatgatagcattcttttttgcatggctacgccgtcttcttgtgaagctttgaattcagccattcatacttattctcaagcttcgggccaattgattaattttgataaatcatccattttgttttcccccaatactcaggctaatgttcgagacatgtttatgcatacttttcaattagttgataagccttttatctctaaatacctcggacttcctcaatgtttttctcgtgctaaatatcaatcttttgcttttcttaaggataaggttttgtctgttatccaatcctggcatcataaatggtt

SEQ ID NO: 270281 - DNA, 670 bp, Cannabis indica
ttcctagatttattagacacagggttttactaatatgataatctacaacagtgattatcagatgcatccaatgctatggtaaaacctgaatatagtttgaatactgaagatgaaaaattgtctagttataacaataaagctttacatgctatttttaattatgttggtaaaggctttattaaattaatatcatcttgtgaatctgtaaaggatgtgtgggaaatccttcaaactcggtttgaaggtacggctgaagtatagagatcatgttttaccatgttgcaaacaagatttgaggaataaagaatgttagaaacattaactttatcttaattttatgaaatattgtgtgacatttctaatgagttttttgccattggaaaaaacttagatgaatctgttttggttcgaaaaattatctgtgtgcttccctacagtttgacacaaaattgctagtaacagaagaggcgaaagattttggcaaaataaagcttgaagagctcatgggttaattaaggatatttgagttaaatcaacaaatcaataaaaaggttaagccaaactctccgttgagaaagaaaaggtaattgcctttaaagtttttgtaaaaatatgatgcagcaaatgagagtgatgatgaaatgacttgttaacataaatttttcaaaag

SEQ ID NO: 270282 - DNA, 554 bp, Cannabis indica
gattttatttgaattagttatggttttttgaggatttgaaaaaagataggtggatcactcaaccccacgcgcgcggaaccgagtgtccctcggccaggtgcgtgttcggacatgtcattgtccgagtgacatgccgacggttgtcttaaacccctctccgcgcgcggaaatcatgccaagaaaggcatgcgccgagatctctcggcagatcaccatccatgcgcgcgcggacagtatgcatactgtccgtaccacttgtaaatttttttcgtttttttcgatttttcatgctatttcgtggaattaacttccgattttttgtgtacttttgtattttaaattttattttttatatttcaaatctaattatcagaaataaattaatttgaatttgtaaaattaatttaagatattagtgtaatttgaatttgaaaataggtaaaaatctatccttttgcttaaggttagatattaatttgaatttgaatttgaatttgactttaaatttgattattttatcttatttttaaatttaaggttagatattaattttt

SEQ ID NO: 270283 - DNA, 1333 bp, Cannabis indica
attgttttttctgattcaactgaggaaaaatttctcatttgttcttagtaaatctcaacaatcaaatccacaacaataacaaacaattattggtactcttaggtaaaattttcaaattttgtttttctgattcaacaagaaaattttcaaatttattcttaatttctaattaaataaacagaaaaccaattaatttatatctatttcaactaaagatatggaattcaacaaatacaatccaaacaaaatattaccagcatttcagaaacagtatcagttgaatcgccatcgatgcgaaccatagagcttgattcagagtaaaactgataaactagatcgggttgctgttgaagaacttgatagtactgtcccacaaagtaggagcctacctgaataatccaatccaaaaccaaatataaatatacataaatccatcaacacgctccaaatgtaaattcacacgtaaagattggatttttttcaaacatttaaaaagaaaaatcgaacctgaacagcactgacaggacccggatacgcattcgacatggttaagggcagagatttattcaaaatctagaaagaatgaagcatgaacagacgaaatcctctaaaacccaagggtttgcagaacatgcgaaactgtggtgagttcgtagtgagagagagagaggtatataaaaggtaaaacaaatctatctataaatatataataataataataataattaagttataaataatgattttatgagtttgttttgattgatttatgttataccctaattacattattttatttttcaatataatttattttattttatttttgaaaattcaatataatttattatttatatgtaattagttattcttttatttataataattatttattaattaaaattcataatttaaatattaagtttttttttgtaataatttgtaatagttattgttattcgaatttcgagggataattgatgaatatttttttttgtatctattaattaaaaatattcttatattgtattttattaaaaagtatctatttttgtaagtgagttgtctaatatactttcatttttcacctaagtttagcataatttaaattaacttaagggatataatgtgaaaatcatttataaaagtaggtatatcttaaaaattataaaaataaaggtaaaaataaaacgaagtctgaatatggtgtaacttctcttaagcctggaagtttaagacaaagaagatatataaaactaaagagatacgaaaaactaataaggatactctcatgagatatccgggaaaagaattcaaagggttgtttaggatt

SEQ ID NO: 270284 - DNA, 827 bp, Cannabis indica
tagacctctcggtttacacaaaatgttctccggtaaagagtcgatcggaatagctccgtacatcttgttgttaaaagcccaataagccacattatgggccataaaattacacgacctactaatattagagaaattacaaccaatgaaaaaaggagaagacttagtgcaaaaagagacatagttctctagagcccaatgggacgccttcccattaagagcgttgatcactatcctcgagtcactctccactattataaacttctgttggagctctatcgcaacggacatcgccaagcagcaggccgcagcttctccacagagagcatcactaaaccccaaccaagacgtgtgaacactcatcacccttcccagatgattccttgcaacaacagctaaacacatactctctaaacccacacgaacatcacaattaaatttgatccactccagaggtggtgggatccagctatccctcaccaacggcaaaggactcggcaaaatggtagtatgaatctctgcaaaagaagaacaaataatgtcaatgcatttcagaatatccggagggatgttgttgtgaaccgcatcattacgcatcctccagatattgtcaacaacaatagacgcatagagaaagacatcctcagccctaacacctctattactaaggctccagatgaacttcacccaatcccagactcggatacccgaattacacacaggaaaaataccccaaggagacgaacgccacaagtgcatcgccacatcacaagttagaaagagatgctccatggtttcctcccccctccacagagaggacactttgaatc

SEQ ID NO: 270285 - DNA, 1294 bp, Cannabis indica
tcctttatgttgatgacattttgatcattggtaataatatcaagaaaaatgactagcattaaggaattacttgacactcaatttgaaatgaaagatttgggtgaagctgcttatgttcttgtattcaaatcatcagaaatcagaagagtagatcccttgctctctctcaaacaacttacattgataaggtgctagagagattctcaatgactaacaccaaaggggcagttttgccttctagacctggtatccatctatctaaggagcagtgtcccactgatcctcaagagatagaggacatgagaaaggttccttatgcttcagcagttgtaagtctaatgtatgcaatgttatgcactagaccagacatttcctatgcagttggaatggtgagcggtatcagacaaacccaaaagaggaacattggactgtagtaaagcacattctaaaatatttgaaatatacaaggcattatgtgttagtctaccagggtggtgctttaaattccgtaggctataccgacttagatttccaggcttgtcttgatgacagaaagtctacatctggagtagtatttactcttgggggtggagcagttgtatggagaagtgctaagaaaaccgcaaaatcagactctaccatggaggttgaatacatagttgccgctgaagctgctaaggaactagtctggctaagaaagttcttctcaggacttggtgttgttcctagaatggaaaaaccactagttttactttgggacaacactggtgctatagccaacagtaaagagcctcgaagccacaagagaagtaaacacatagagaggaaataccacatcatcaggaaatatgtggcaagaggggatgtactaggggagaaagtggatattgaagataacttagctgatccattcacaaaaattttgactgtaactacatttgaaaagcatagactgaatctaggattaattgaaatgtactgattattttatgttagtgcaagtgggagtttgttgggctttgtgcccaaaataaaactctattttaatgtaatcttttatatttaattatcagtaaagaaacagatttattttcattactcatttaatgtgttatttggttcatatgatcatttatttatttgatttataaattcatccaaatctttatcacattgatattcttgtttattgtgttgtcaacacagtggaaagtaatcaagattgtgtgattaaatgtattcctatgatttatcagtacacagggtttaactgataggataatctacaatgtag

SEQ ID NO: 270286 - DNA, 638 bp, Cannabis indica
gacaacgtcttagccttccatccctagagctttgacgacaagttttcaataatgaaattgaaatcggcgtccttttgtctggagcgaaaaagaggcaaacctaaatgtttgatgttaccttcaggggacccaattcccagctccgactttataccatttctcataccaatgggagtattgctactaaagaagattgagcttttttgtttattgacttgttggcctgaccaagcacaaaacttctcaatgcattgccaataacccttcacttcttccaagttcgcctttccaaccaggattaaatcattcgcaaagaaaatatgagtaattatgggaccacctctactgagctttctgcccttcatatcgcccttaccccgggcgtcattcaaaagtctggacagaatttttgccgcccaaatgaacaaataaggagacagaggatcaccctgacgaagaccacaggatggagaaatctttccaacttgccccccatcaaggcataagctaagagaagtagtagtaatacactgggaaactcaaccacggaatctttgtggagcccaacccatcaagcacttgatctataaaattccagctcagcttgtcataggctttcataagatcaatcttcaagg

SEQ ID NO: 270287 - DNA, 583 bp, Cannabis indica
tacccaaaatacccttattattttttcaaaacctaaaaaaaaaataccatttttattaacatcccccaccacccaccccatcaactaactcctctttctcatctccattaatggttttcttcctttttatttttaaaaataaagccctcctcctttctctctagatccgccgcctacaaccgttgaagacgtccggccagcaactcgaaccagcccaaccaccgtgaaggacgtcggcgatccttcacgcctcattccaaccaccgtgccgcccctcctcgacctctctttcattgtggattaatgggtaagagtttttttttaaaaaaacatttgttaaataattgtaaaagtatagcatatttcggtagatctatggtgttgttcgtagaattttcgtcaaaatcgcgagatttattatttcagagtagtctgggttttgtatttttctcgactgattatcgattagttctcgaaaacttctcgacgcagatgttccaaggtcagggatgacctttctcgaatacttttcaatagattttcgataggttctcgaagccaatatttatcgatatgagtcttt

SEQ ID NO: 270288 - DNA, 866 bp, Cannabis indica
acaaatgacaaaacataacagaaaaaaaactggttaaaaaacagtcaaaaacttaaaaaccagttaaaaacataaacaaagcaaacaatcattaaattaaaaagaaaccagttaaaaaaaaaatacattaagcttttaataataattttcttttgaaaatgcaaaaaagtaatcaaagacataaataacaaaaaaaatcagtaaaaaaaccagtaaaaaactcaaaaaccagttaaaaacttaaaaccaaaacaataacacatataattttttttaaaaaaaaatcagttccaataaaaaattaaattaagattctaatattaatttttttctaaaattgcaggtatgaaacaaatcatgcgtgtcatcaaatatgggggtcaatggagaaaaaatacaaattatgatgactacataatgactagaattttaattctaaccaattcatcactagcaaacttgatggagctgataaaaacagagataaattgcaaaagaagcagcatagacatatcctaccagatatcaccgggaacaacaccaatgaagctactgactgacaattccctcaaattctagattgagctaagaaaaacacagactagagtaactgattctgcactatgcatcacaactacagaagaaatagctatacaaacagtggaaaattaatcttctaaacaaccaatacaagagcaaacaaagacagtggagaaactggtcctacaaatacacaatgaaccattcaaccagcaatatgatattgaggacaagattcaaatcatgataatagtcagataaaaattcccccaaacatgtttgcgatggctgaagaagttgcaaattttataatagagcaatcaaat

SEQ ID NO: 270289 - DNA, 716 bp, Cannabis indica
ccatagaagagagcctgaccattcaaaaggaatgccctgcaaattgcttcaatgatctcaatatttttttaggcagtatcatcatctgactccaataggctttcataacaactagaatagagttaataagtgtgattctcacagcaaaagagaggtttctggagctccaactcttgattctagccgtcattcattctgctaaaagttcacattctttgccagatatcttcttcttgggttttatgccctaaattaaactccatttcaatgtaatctctattaatcaatatcaataaagaaacagaagtatttttcactcatttggttcatgttatcatttacttgtttatttgatttataaattcatccaaaccattatcacatttatgttcttgtttattgtgtcgtcagcatagtggaaagtaatcaagattatgtgattaaagatatgttcctagatttatcagtacacacaggctttaactgatatgacaatctacaacatagtttacttgcaacttggataagtgctatgctctttccagagcattggttaaagtaaagcttgggttggatgcatggagtatgcatcggaagggacgaacattgaactttgatttagatagattaaacttaccgcaatatctataaaattcaatatcacctagttgatcctagatcaaatgatcttcatcctgatatggttaggttcaatc

SEQ ID NO: 270290 - DNA, 906 bp, Cannabis indica
aataacaaaatttaaaagttagcataatatcctatttctattgaaaatatcatgattaaactaatcttattttaaatttaaataaggtcaatttattataaaaaaaaatagaataatttaaaaaatattaatatctcaccttaaatttaaaaataagataaaataattaaattttaaaaataagataattaattaagccaaaaaaaaaaatagatttttacctattttcaagcttcaaatttcactaatatcctaaattaaattttttaaaaaatactaattaatttaattgtgataattagatttgaaatatgaaaaataaaaatctaaataccaaactacacaaaaaatccgaaattaattccatgaaaaatcatgaaaaattgaagaaaatttaaaaaattgcaagttgtacggagctaagaaaatttgaaaaataaggtcaattttttaaaaattgcgttgcataccatccgcgcgctgagctagggatgcacgaccgagaaatctcagtaagagccgcgcccttaccctggcgttcagaaaaaaatggagacacccgactgagaaaactcggacatctccttgtctaaagtgcgcgtgaccgagtgatcactcggatccgcgcgcgtatggggtgtttccacccctatctttattcaaaacttcaaaaaatcataactaattcaaataaaatcaaaattaagttctgtaaaatagtaaattgcttaatttttcccaaactatccaacaaaataatttcagaatgattcaattatttttcatcaaaaattttaataacatcaatcaatcatcaaataacacacagatcaacatgaaaccatccaaatcacacacaaatcgtttgaagtccaaatttcttgaaagtaaatcaattaccatggc

SEQ ID NO: 270291 - DNA, 527 bp, Cannabis indica
gcatgtttacatttcgaatgcaatttttcactgtgctgtagaaaaatgcataggaaaccctagggttagaaactcctgcgattcttctttatcatgtcttcatgtgggtttacagccataaagcttgtctctgaactgcattgcgtctgtctttcatcttgcttattctaagcttcatgaacttttttgccctaactcaagaaaattttatgacttcttgagttctgacttttctttagacatagcggttctttaatctgtttagtacttctggtcggcatatttgcttgtttatcgtttgatattccaaccaacactcatctcgtgtgttgtcttttatagatgaactcaggtgagtctttgcaactcggacatcaacccggatttgcttcaacttctgcacgaggatcaccctcgtcttcgttctagtcctccttttagtgaaggacattcttctaatcttgtacccagccataggatgatggctcgtacaaagaaaactacgcgtctggctgacgctactgatc

SEQ ID NO: 270292 - DNA, 1058 bp, Cannabis indica
gcatgacttttcgaagaaccaaatcccttacttgcagaattctctccttgacctcagagttgaaataccacgcagttcgctgctgataagctgcagttttcaggtgagcctaatcgcatttttcttctaaaagatcgaggtgcagaaattgattttcttcgttttgtacaatgttgaaaacatctcttcgtagggaacctaccccaacctcgactggtatcatggcctcgcatccataggagagcgagaaaggagtttcacaagtcgtggatcggggggttgtgttgtatgaccataaaacttacgaaagttcttctcgccatacccccttatgctcttcaagttttcctttgatggtatgtttgattatcttgttgacggcttctgtctgtccattgctctgcgggtaggcgactgttgaaaatgcctttctaatcactaactcatcgaacaattgtcgcatttccttacaatcaaattactttctgttgtccaagatgagcttgtaagggatgccaaatcgacagattatggagttatagacaaactcacacagtttagctgctgtaatagttgctagtgcctttgcctcgacccatttggtgaagtagtcaaccgcgaatacagcttatttgactttgccttttccttttgttaattcccctatcaggtcgatgccctagatcgcaaagggccaagggctcgtgatagagtgcaagtgactcagaggttggttaacatacgtggctattcgctgacactgtcgcatttctttgagaagttgaaggcgtcttgtcacagtgtcggccagtaatacccttgccgcatgatatttaagacaagagaattacagccagtatgatttcagcagataccactatgtacttcgcggaggatataatcgcattcctccccgtcattgcatttgagtagcggttggctgaagcttctgcgatatagtcttccatcgtagatgacatatcaggcaactcgatgtcgcaattttcttgcttctattttatcattgggcaagacctccttttccaagtaattcacta

SEQ ID NO: 270293 - DNA, 773 bp, Cannabis indica
ttgaatcaaaagatatgaagaaataaaaattggtgcacaagggtatgcaatgcatacccctacgtgcgcggaagcaaggagatggccgagcatcaaggctgcatgcaacctacttgaccaaggaatctcggcgtgacacggcttcagccagcccgtgtccgagttttctcggtcaagctgtctgaaaccgcgttgaaatgccgagaaatcccctcgtgcgcgcgcgtgtgtgcaacccgatttcagatatttgcattcaaattcctaaaatcataataattcataaaaaatacaaattaggttctgtaaaaatcaaaatttattaattttttatctattttccagtaaaaataattccagatcgaaataaggaatatttctataacatacattgcgatttctaaactatcatcacataagcacataaacaatcatgaaaccatccaaaacaacacaaaatatcgttttaattcatatttcatgaaagtaaatcattaccatggctctaaggccagttcttggaatatgtgttaccaggatctagatttactcccatgtatgttgtttaacatcctaaatatgaatttctaaaacaataaaaataaacacatataaagtttcaggaaatttacattgggtgcagcggaatattaatgtctccttcctctcagatctctaactcttgtatcctatctgtcgcagagtatcactaagatctgagcccgaatgttcttctcttgattttggattcttcacagtcttccacactatga

SEQ ID NO: 270294 - DNA, 898 bp, Cannabis indica
tggcaatccgaggattcattcacgtggatagttttgggatctggctctgataccacttgttaggaccgtcggacaccatctatctctacattggtatgatattgtatgctttgagcctaagccgtgatggatttgtttttaggcaccttcccaaaaggcctcattccaatggagatactgttcatccttatataccaaagatatcctactcatttctagccaatgtgggactttggttggacaaccaacagatctgacacttggaagcggccccagttgacaaattgtcaacctgggcactgggtgcctgggctttagttgctcaaaatgaaggttctttaaatatgattcagatgcctcaaatatgttcgtggtatgtgtagttcatgtctcagcacaaaatttgacccatttgcactgagagggtcctgaaaactgaaaccctaattaggttgttaacgtaggtgcagggtgaaaccctaggtgcccgagttaatttttgaggtgttgtttcgtgtgtattcagctctcgaggcctagacttggctgcttcatgacttcatggtacataatatacttaaagatagtgaattggaaacagttttgcaagatccaaacactcattccggagtttattaaagtcaatatgggtgcagggctagggaccccttccaggtcgacttgctatgatttggcactactcaactccgaaatattttgtttcttgcaacctgtcaaacattgatgtccacatcatcaggactatgtttggtgtaaatatttagcttttacatatttttcttcatatgtttaagttaaaattaaaaatttagtgtataatatatcaaattaaaaaactaatccaatataattaataattggattggattggattttg

SEQ ID NO: 270295 - DNA, 1231 bp, Cannabis indica
atatagctaaatgaaatagaatattaaggataataaaaaatatataattaaagataatgtctttttatccatatatatatgacataatcaatatacatacatatattgtatattaaatataaagttgatgataagaggtcatgggtttggaatcaattaaattaaagatttggtcactaaaacaaagattatgattctgatgaaaagtgaaataaagttggcatttttcttaatttatttgtttatttttatgaagaaaggaatatttgaacagatcattccaagagagacaactagatataataatggggctttaaaattctatattcatttttcctttaactaacacatgcaatgcagttgctaatcaaaccaataattgagtgttactaattaaaatttatttattgaaaaagtaactaatttgcagagctaaaaagtaggaacatcctaaacaattgacattattacaatgtttataataataatatttatcttgaaaaaaaaaaatcaaaattgtaaattagtaaaagtggtgaacttttcttattgctgtttaaatcatattgtctatatatatagtgatatttctccataaataaggttgttcatacaatgtgaaatttataatttagaactctaattaatttagaccaaattatttaaaatcagatcaaataaatttagtgtcaataatttgatcaattcggaccatttataattttttggttcagtgatagttataaattttttgtgggtgattcaaaccaaatcaaactacttaattatttatatatacttaaaatgattttttttttattaaaaattgatatttaggaacaatcttaagcataacattgatagttattttaatatatattgttctaaaattatctattttcattattatttatgtattataaattttacaacatttatgaaatacaaattatgatttcgaactatactaatccatccttaagtagattgatttagtttgatttgagcatttagtttgtttggtttggttttaaatttaaaaaaatcatcattattggcagggccggccctgggcataggcggactaggcctgtgcctagggcccaaaaaaaaatttactccttttaaaattatacaatttttttgctaattttaagaaataccatttttttttctacataggggcccaaaaataaatttttactctgtagcccactaaatttcaggaccg

SEQ ID NO: 270296 - DNA, 830 bp, Cannabis indica
taggtcgaggtaatgtcagacccgtcaatctattccctgaaattgttggcccacaagtcagagagacatccacgccagcagcaacaatggggcactttccacccatcactccggctgcagtgtccgagggttttgtctagctaaccactggccagtataccgcaatccaggaccagctacgtgccctgcagggcgaggtggatggacataacagggcccgacgccctcctcgagcccccactactcgcacaaaaaaccctcaggtaacccactctaaatgtcataataaccgtgttcgcagggaacgaagggccaaccccaaaggactccacctgaatcaaccaacctcgagggaccaatctgcgaggtatcccaaccaggagacacagattgacgaagaccccgaacgacgtaaccctcgcaatagacctttgcgagacaatgacgtagaatccgcctcctcgtcctcgcatggtcgcacacctagcaggtacacgaggtccggttctgtggagacgcagcagggaggatgatatcaggttcataggggtgatctgcgtgatcacctcaacgctgtttttagagaacgctcccacgcccctcgtgacgaggaagggccccgtgatccccaaatgggcgatcaaggcataaacactcgcacaaatctgcctaatgcactagcagcgactacctgggttaatgtcccagcaaacctcaccgccgtagccgcagcagtcccgactcccttagccggaggtattgatcaaagcatgctcctacaggctttgaaaatgctcgagcagcagagaaagcccatatacaagctacat

SEQ ID NO: 270297 - DNA, 588 bp, Cannabis indica
attaaataaggaaaaaaatcatagaaaaactctttttttattattattattattattattattattattatttagcatgacacattgatggaaggttgggttaaaaaaaatacgaaaaatcatattgggccttttcaaaatttgggccctgtgcattagcactgtttgcacacctaaatagccggccatgattattatattaacgaaatataataatacattggattggatataataaatagtaagagattgctaattttgaagtaatattgtagtataaaattagtgttctttgcaaatacatatttattttttattttttaactaatatatttatattggggttatccgctaagaattacggttgagcagtttatgaatgtctttgcggtggacttgattttaccaaagataatgagaacctaaattcccaaccgttggagagaccgtttcttattttgtgcagaagtaatttataaatcacaggctgaaacaggggaaatcaaaggacattacttgaatgctactgtgtggtaatggtatctatactgactataccaattttacccctaataaaattataaaatt

SEQ ID NO: 270298 - DNA, 588 bp, Cannabis indica
gtcgacgccgtgggtgagggtggttcgggttggggttgatcgtgggtgagggtggttcgggttggggttgatggtgggtgagagtcggctgagcatttacaaatgggaggggtagttttggaaaattggtaaaatagtcatacattacaaattttaataagtatgcatttaagaaaaaaattataaagttatgtaggtatggaaattcaaatttcccttttattaacctaaataatgaagaaagggtataataggaatattacctagaaatgtgggtataaatgaaagaataagaaacagaaggtagaaattaaaatgcttaagctaaaacgggtataatgtgtaatttctactatttattatgtaaactatacattataaaattatatatattatattatatatatataaagagatgataaaaaaaattaatataaaaggttttgtgcaatatctgaagctaccatatgcttgagccgaccctgcaagaagggtagcatgaaattagcatcctcctttttcattccaataaaaaaagtttaaaaaatacacaaaatgtgggaggatttttttaatctaattttttat

SEQ ID NO: 270299 - DNA, 761 bp, Cannabis indica
agacatacctcacaaagtcggtctatttcctacttattttccatgtaactgtatccaagatgatacaagatgagtgttgaaaatttctacactccatcttgagagggaccaattaaattattaagattagttcactactataaattagtctttttccatcgatttataaatgtcatttatactatttcccacgttatatttagtttgttcatctagagtcagttagttgattaattgaattcattgcttcacacttattttgtccatatatatatatcattcaatcagatcaatataccatttcttttaatgtttttcaatcacaaaacttaacaaaagaagaattaatagaaggatgcgaaaaaaaaaaatccacaagaacaacaacagaaaggtttctaaggactttttttttagtgtatatatatgtattacaacacaattgtaaatatatatatatatatattgtgtgtcaaataaagattttcatttcttattttttttgtacgtttttaattttaacactatatatttaaattttacattaaagatgatcttattattatgtatattagtaattaataatttatattatttattaaaataaaaatacgtaacgatataagagagaagtaaattaaattatacatacacaatattcaatctatatataatttcaaaataaaatgaaagagtgcaagttgtgttgtatacaaattgtaataagttggatctgacaaagctttttcttctcacgtaag

SEQ ID NO: 270300 - DNA, 551 bp, Cannabis indica
ggtaaaaacaaacataaagaaatcaagtgaaaaaataaagtttcattatctgagaatttattatgctatactttggtagatctttcctcatagtttcatggaatgattaataatagtatcttgtctttagaataatgaaatttattttgttcatcaaggcattaatcttcagacgtttatttttttttaaaaaatttcaaaaccatagttgacttatcaactacgtaagaaattaaaaccgttgaaactaactatgatggttaacactaccatgggaggtatgacaaatcaagtgagtaacgtctaagattattttgcacaaatactaaagaaatgtaatttcatcttccaatacaaaatgttaggcaaacctaacatgaagggtatttaagagatataattaacatttatataaggacatgactagaagtatgattattcattcttcttcatgaaactcattttggggagaaacacttaagaatgcaacataaattctgaactgtgtatcaagtaaagtataagttaaaactctttataaactaaggttg

SEQ ID NO: 270301 - DNA, 525 bp, Cannabis indica
ttgtttaataaaagttcaggtttttacaaaaaaaaaaaacctgaataataataaagataaaattatatataatcttttcttaaaaaaaaaactctgtgtatccattcatataattaggggtgtttattggatcacatccaatatttttaggtctattcagatccgatcgaattatatattggatgttagattttaccatccgatccgatccaattaatttcgtcatccaatcgatccaacatccattagatattagatattcattagatgtatttcatatatatttatttatttaatttgggtttatctaatattttagacctagtattttttggatcggattggatccatccaatattttagatctaatatgtattagattagacttgatccatccaatccaagaaaaaaaaatactttaatgttaattttcatatatacaaatagatttgacgtatcacaatataaaatctaattactcatccaaactaaatgaaaatactaatttgttcgattggatgttgg

SEQ ID NO: 270302 - DNA, 513 bp, Cannabis indica
ctgacataaataaatcaaaaatggttgctaaaagaataaaatcaagaagttttccacttttttttaaacaatttttttcaaaaatattgtgaagtggtaatactctaactagcaaataaaccaaataaatatttttaaagaatataaataaatactttaaaacaaaaaggacacttattattctttttataaaggaaaataataatttatatgattttgttagtattactgtagacaaaatacattttattttcttcaaattttactttgacttttttaaaagagtcaccatataataattattaaaaaagttcaattacaatgtactaaattttaagacttagaattatatatacataattacatatatgctaggggtcaattacaatatactaaagtttaagacttagaataacatatacataattatatacatgctaggagggccatgaccactataaacaaccatgtacctccgccctggtgtccacaaagtattcatatgccttttac

SEQ ID NO: 270303 - DNA, 560 bp, Cannabis indica
tgagccaaggcccaacaagatagtaaaacaacaatatgaatatcaattttaaaatcacttagcattgatgccactacatctattgtctatttgatatagacctacgtgttacgctcacacatctatttacaataaggtcttagaataatttatctcggttctgattaccgattctaacctaattatgccttatgcgcataactctttatatcaacatattcaacacattattacattcataatcactttaaattcttgggtaataaccttagatcacataaccgctaaatttaggttaataactctaacctcagtttctcaaataacatatacataataacatacatgagtacaaactctatgtgctagtttactatcttacctattaatccaagtatgtggagattccaaatccccaggtgttcctgagcaagcactatcctagtcacacattcttaagatttcataaatagggttaatctcaaatttattttcacatatacacataacactactacaaaattgggctttagaggcggtttttgttgggttttatgccc

SEQ ID NO: 270304 - DNA, 780 bp, Cannabis indica
ttcagatattttatttatcagaataaattatcttctccattttttttctaaatttttttattcagttaaatgaaaattaattgattatttattgttaactcagaaagtttctctaataacgtggatattaaatgtttgacatgtatcatgaaggatgacgtcacagaattgaatagacttgagacatagcagtcaatttagaagaggaccctaatcttgcgcccaagttgactccgggatctcctagatggaagttagaacttcaataacttaaatccaacacactatcttccagtattttgtactatgaagacatagagcaacctaatccaagctttgggagttaaaattacatgaacctgcaacttgaagctaacctaggtaccgagggttcaacccagcgccgaaattgacattctcaactaggatttcagtttttgggatcgtcttagtgcaaagtggccaaaacttgcattgggacatcaattagacatatcacagatatgtttgaggcattagaataagattcagagcaaattgatttttgagcacctagggctccgagcacccaacgtccaggttgacaatttgtcaatttgggagccttccaagtgttcaatcgaagatccaacttttgcattgaattcgtcttcatcaaaaatggggaaataggtctttttagaggaaaaaaaaattattcatgggcacaaataataaggctcggcacccaagttgacacttagggttggcttagcgtcacaaaaaataagagttttttta

SEQ ID NO: 270305 - DNA, 653 bp, Cannabis indica
agagattgagtttgagcctcactgattttttctctggtgagactactcccgaggctgtgaaattcaaaattaaaggtggttccaagcctgctggtcaacctggcttgatgggttcttcttcatcaactgctcatgagaatgtctcccgagttgagtttgaggaatttaaaaagtgtttatctgttgttgtcagccagcaagggattcttatgaaatctgttgctgagatgaacaagaagctggacattcttattgaggttttttttttttaattgtcattactttttctgttatttttttagtagtgtttttatgttgttttatacagttactttaattttttatttttttttcttcagttctgccattcattttaggttaataagtcttatcgtgtaagattccatgtgagttataaaattcaacaaaagcagtggaatcatgttcagtgcctctatcgctacgaaacttcttgatctttttactaagttgattttcaatttcagctaccaatatgtcaaacatatcaagatcttcacttttattttttattaaatacacataggtaaagttagaataatcatcaataaaagtgataaagtagcgtttactatttttagtcaaagttcaatcaagttcacaaatatcagaat

SEQ ID NO: 270306 - DNA, 1013 bp, Cannabis indica
ggatagcgttgctcataatctttcagttgacaagaagcataagctatgactctattaacttgcatcagaacacatcccagaccttgattggatgcatcacaataaaccacaaattcctctggatctgatgataaagctaatactggagctattatcaaacgttacttcaactccaggaaacttgtttcacacttatctgaccacacaaatctctaatttttcttggtcaatttggttaggggcataacaattttagagaatccttcgacaaatcgtcgatattatcctgctaaaccgagaaaacttcgaacttcagtcacagacttggcctcggccaattcttcaccttgtttggatcaaccctaattccattcttcccaacaatatgactcagaaaagatacctcagacaaccagaattcgcacttttaaactatgcatacaacttgtggtccctaagtcgctgtaataccacccgaagatgatgctcgtgcttcctttctgattggaagtatacaagaatatcatcgataaacactataacgtagttatcgaggaaatccttgaatactctattcaaaagatccataaaggccgcaggagcattaatcaatccgaatgatattaccagaaactcaaaatgcccatatctggttctcaaagcagtcttcggtatgtcttcttctcgaactctgagttgatgataatcagatcgcaaatcaatccttgagaatattgtctttccctgaagctaatcgaacagaccatcgattctgggcaacgggtacttgttcttagtcgtcagcttgtttagttcccgataatcaatacacattctgagggaaccatctttcattttcacaaacagaatcggaactccccagggcgatacactgagtcaaataaacccaatgtttagcatcccctgaagttgcaacttaaactccttgagcctcgctggaaccattctatatggagctttagaaatatattcgactccaggtgccatatcaa

SEQ ID NO: 270307 - DNA, 804 bp, Cannabis indica
gaaattgaattcctgataaggaaaaataactcgcacgtgcagaagtatgtcaaggctgactagaatcaacgggtggcccaagcagacaacaaccaagacctattaatgcctccaccagtcgacgtgcatttacaagtcatcatcgggggcccacatattgctggagattcgggtaaagctcgagagaggtatgctcgaaccttataacacgaacaaaaggaagtagttttggccgtagaggaaaggaagccaaaaattccacgggtaggggagcctagtataaccttcactgaagaagacgctatccatgtttgcttctcgcacaatgatccattagtcgtggaagtacagatagcaaatcaaacagtggcccggactatgatagacaatggagcctcggaaaacattctgttgaaaacaccatatgaaaagatgggactccaactcaaaaatccgattccctgtacccaaccggtgtatggtttctccggccagagtgttgcatctttagggaaaattcgtctacccctcactgttggacaagctccaaagagcataactgtgatggcacaatttctaataattaatgttcaatcagtttttaatgttatattaggcggaccagccttatatgacctaaaagttgttacatcaattttccattcgtgcatcaagttccccacaaagaatggggaaaggtgcctaaaaggaaatcaacaagttgcaagggaatgttataaccttgccctaaccaaggccaaaaggaagaatcctctggccagagttcggacagggggaaaagca

SEQ ID NO: 270308 - DNA, 441 bp, Cannabis indica
atatatgtatacataaaattaacattaaaattttactctttttttcttggattggatggatccagtatgatccaatacttattggacctaaaatgttagatagatccgatccgatccaaaaatactagtctaaaatattgaataattttaaattaaaccaataagtatatatgaaatacatccaacagatagaaccgatcctatccaacatccattgatgactgaaatcagttggatcggatcagatggtaaaatttaacatccaatatataattagatcggatctggataggcctaaaaatattagatgtgatccaaaaaacacccctgatgaaactggaagaaaattacagttttataaacactggatacttatgccccactaaaaaaaatcactaagtttatgccgcttacaaatctaaaattttggatacttatgcc

SEQ ID NO: 270309 - DNA, 936 bp, Cannabis indica
tttatagtccgtgaactcgtggagcagttcccggactatcgctacgtacgcggccattctttctccgcgcgtctgatactctcccgacacctggttcactaccagttgggagtcgttgtacacttctactcttttagcctccactatcaaggcttcgtatccggcctcattgtttgaagctgagaagtcgaaccgtaggggtgcttggagtcgaagtccacttggagatatcattgcaatccccactctggagccattctcattggaggcttcgtctacaaatactttccatgcagggaccgatggtgtcggtatgttcgtggttgcttcggcttcattacactcggtgaagaagtttgttagcgcttgtccctttatggagaagcggggaatgtagtgcaggtcaaattggcttaactctattgcccatttgaggagccttccggattcctttggcttttgcagaactctccggagggggtggttggttaacaccttgattgggtgagcttggaagtagggtctcaactttctcgaggccattaggagacaaaaaactagtttttcaatgactgggtatcgcgtctccgcccctgtcatgcgcttggtgacatagtacacgggatgctgagttttctccccttcccggactaaggctgtgctgaccgcgtgctcggagacggccaagtacagaaacaagtcctctccgagaacgggctttgacaggattggaggcttggccatgtgctcttttagttttttgaatgcctcctcgcactcttcagaccattcaaatttttgacacttcttcaagatgttgaatttcaggcacaagtgtcgtattgacgtgattgcaccaaagtccaccaaggtcagtcgaccaaggattgcgttataggctattaggcagtccaccaccacaaacgtgcagtactt

SEQ ID NO: 270310 - DNA, 560 bp, Cannabis indica
ttcaagatagattaaaaacaagagataggctgaagcgaatgggaattgtaaatgaagatatgtgtactctttgcggtcaaggtgctgaaacttgtgcacacttattttttgactgcacagttgcgaattcctgcttgcaagcactgaaaaactggctgcaatggcatgctgctgctgtagctttcctccgattacttaggtggattgggagggccaaaataggtgaattcaggaagcaagtgtttgctgcatctgttgctggtttagtgtactctctttggagggcacggaacattaaaatatgggaaggaaaacaggtggatgttgatctcctgctgcaacaaaccaaagcaaatgtcaaacaaaggatttcactatgctggccgaagaaggtgacacacactgatctgcaatggtataatcaattagtaaaaaaaaaaaaaaaaagagaaagggagaaagaaggagggagtgtacagcagagtataaggtataaagtttttggtctcttgtgtaatacattgctgatgtatagaagattatggaccttgattggtgcc

SEQ ID NO: 270311 - DNA, 626 bp, Cannabis indica
ataaatgtacaaaactatttatttaataattataattaattgtcaaataaaattaacatttattttatttattaattagaccatacaaagtctcttagttaacaaataaaccaaaacctcttttcttcacaattaagcccttgcttagtgaaaattcataaataagacataatctaattttagaattgtaattgattaatcaaaactaataaacggagtctacaagcagtattatctcaactagtgtggggatcacagacctatataatcaagcttccaataagtagaactagaatttataaagtaaattttctaacttattaactcctccttgtgtcactatagattcagaattacactcttaattatataaaccgcaatatatgtgccaagatatagatacgttacaaattatctattgttacaatctaaatagtcaaagatcctctatagatgatctacattaaatagggacaagtttatcgttctacccttcaatatattttatccttaaaacacttagttacctataaatgatatttcagtaaactaatataattactgaaatgaggcctcaatcatttatctctattaagccaagttcgaaagaaatcatcgtttcactt

SEQ ID NO: 270312 - DNA, 925 bp, Cannabis indica
ataattaaaaaagtaatttggcttgttacacttgcagagaaacggagggaacggttacggaacgcagagatcttttccaaaataaaaaaaaaattaaaattttacaattacatcaatataaaattggagattgaagctacaattggaaaattacaaacagctttgtatattatatattatatatatattttaatctcacttaattatttgtaataatctatttagactagggttaataatttagggataaattctttttcttgttattgtgtttcaatttttttttttcttaatcttcttattttattataattagtttatttgaagaaatagaaatttgaaaagtgagaatttaaaatctagaatctaaattatttgataactgaaatttggggccatcacactatgaaattgtaatttaaaatttgttcattctatattattaattgttaatctgatttaatagtttgtaagaatctattaggttaggataatgatttagggtaattttttttattcattgtgcataagaattatcaacttgatggttcactatttatttatattttattttttcggtggtgataaataaatagtttatgtgaaaatataaaaaagtaaaaaaagtgagcttagaatgaggattacttcttttcttgtctcactaacagattatgtatttttcatattttttaattcaccttaggttacatgtatggcaacaccaacattggaaaaatattttaaaagaaagcttgagtcaccaagttctacgagtaagaatggagacaatacaaattcagtttgtgtggatattgatcttgatgagcttcaaacagatccagggttaagaattcctatttcgaagtataatccaaatattcaagatgaagttcgacggtcatatttgcttaaaggaccttgt

SEQ ID NO: 270313 - DNA, 602 bp, Cannabis indica
aaaataaaggcttagactcataaaatagaaaaaatgaaaatttagtcaatcctacagagaaatttctaataccctaaaattataaaagaagagtgacctttgagcacagtatacatactttttctctattagtttggcaaagtagctatttattgtaatattgaaatttaaaagaaagattgactagaccatcatcatcaactttttttttctcttaaaatttcctataatcgattgtaaagatctcatattctcttcgcatggtactaaagttttatcatattttcattatacagaggagccaaacaaattaataactactcaacagatcttcaaatagagtaatatgaacacacatctatttctaatcaaacaaaagccaccaaagtgatgagtaaataataatttgagattacaaataatcatgaaatcattacagaaaagagattaataaaaaaaacaaagaacaacatatatatatatatacaagattacacaacaaaacgagtactataaatacatattaaaaatgagggtatacctcaaaaatggccgccggtggtgggctgacaaacctttaggcggaggcgggcggtgctggg

SEQ ID NO: 270314 - DNA, 599 bp, Cannabis indica
tctatatatatatatcataaaaatagaaaattatgtgtgaggcttcaatactattattttgtttgtaacacatatatcaaaatgttatattttaaagtatatcacttaataaatataaaaaaatatataaataaaatattagaaaagttggataacaccgcgcgaagcgcgacttagtttcctagtattcaataattcacatattcattttctatggtgtgtaacagagtgaattggattttcgaaaaaggttaacacacatatttgcattggtaagaatatgcttatttatctatcttcttcgtatttttatatatatattaaaagtccctatataacgacaattcttggtttaacgttttgttttctttccggttaaattttaacagaatattctataatttaacagaatatcctaattaaaaaaccaataaattatatctcattaatttcacccatataaatactcacaagatttattgtaactaatttttcaaaaattatggtaaattgcaattttatattatttttcacttccattcctgcgattgaatgcaaaagaggtaaactaaatgcaaaatcattttctgggttgttct

SEQ ID NO: 270315 - DNA, 507 bp, Cannabis indica
taattaggcatttaattatatattaccaaatttatgtaatttattgtctaaattaagaaattgtgagaaatctgccattaattacatatttaggaattcacatttgattaattatcatacaataattgcattaatttgtatttatttagtaaatttattattagtataattaatttagatttgtatgatttaaatgttatacataaatttcatgtacagtgctaactttttctagaaaaatattcaaaaattaagataagttgaatatattatttagcaaattatgtttcataaacttcaaaatattattcataaaatgttcataaaatattcctaaaataaataaaatatgaataaaacgtaagtaattttgtggcttaacataagaaaatatgaaactaggacaaatgctcatatttagaacggtttttaaggatcttccgacaaccacactaggagcactaatctcagtaattgtctattatgtcaataacgaaattattttta

SEQ ID NO: 270316 - DNA, 643 bp, Cannabis indica
gatgataggtacgtcatgttatcatgcctgaaagtattcaatttaccgagttgctcaagattaaattgattaattttaacttgatcattcaagatttggattaaagagtaagcaaaaaagaacacagtgacttacaagcttcgtctgcactgagaataaatttcagccgactagtgcttgagttccccgaattagggtaataacatctacaaaattcaaaagattcgtattacaatctccagttcacaattagaaatttaatacaatcttttcaacaattagtaatgtattaccaacaaccaaaattcctagttgtacacacaagattccctgtacagcagctaagttcttcttcaacacttttcttcaatctgaaatcccttcagatctgatgacgaagatgacactaaactctcttcagtctgaactcagcaccaccaggctctgatctttctgctatgaatatccatcaccaagctatacaatcagacctgaaaacagtaacaaactatacaagataccacacacaatacaacacgatatatctgaactaactaagattatcaattagctagctgacccgtttacagaatgaaacaagctaattatagaaaatagttcaaccgacctaagaacaatttat

SEQ ID NO: 270317 - DNA, 628 bp, Cannabis indica
gtcacaaggcaggaccaagttctcaccaagggttgttacatgtctttttataggatatcctataggcatgaaagcctataagctatttgatttgaacaccaatacagttgtttgctccagtgatgttgtgtttcatgagactgtttttccttttgttaattctgcaaatatcccaccagaatttcaaaactttttccctgtttctgctcctgcttcatctgcagccccttctcctcaatttgagcccccttctagttcaactccctgtgttgaacatcaaaacaccagacccactcaaactatcaccaaaccctcctatctaaatgattataattgctttcttgccactaatgatcttgctattttttctcaagatacaatgtcagtcactgcatgtgctctctcccaagtgcttcattactccaaattatctcctaagttttgagctatggtgttgttcatttctagtcatcctgaaccggtttgttttagtcaagctaaaggaatcccagaatgggataatgtaatggataatgagatagaggctttggaaaagaatcacacttggattgtggttaccctctctgcagatgagcatgtaatcggttgtagatgggttctacaaaat

SEQ ID NO: 270318 - DNA, 654 bp, Cannabis indica
gacagcaaatgagatgtcaggtcttgttatggtcaagtatattagtttgccactgaggcttctaaaaacagtgggatcgggtaggagattcccttttgaattgcttaacttgaggttaatctccatgggagtggaggtaggtttggctccaatgtaacccgtgtctttgagaagttgtattgtaaagggtctttgagagaccgaaataccttgttttgttcgaccaacttcaagaccaaggaagaaccgaatggttccaaggtctttgagttttaatttatcatgaagatatgtcttaaaatgagatatggcaacatcattgttacttgcaacaataatgtcatccacatacatgaggatggctaagaaaatgtttgtggttctcttgatgaatagagaattgtcaaaaagagattgagtgaaaccatctgaaatgagggtttgactgagtttactaaaccattgcctagaggcttgtttgaggccataaatgcttttgtttagtttgcacacagtgttggggggtgctttgtaacttggaggaattttcatatagacttcttcatggagatctccatgaagaaatgcattatttatgtccaattggtggacattccagttgtacatagctgcaagggccaaaaaaatctttag

SEQ ID NO: 270319 - DNA, 529 bp, Cannabis indica
tagattctcatgatttgtgtgcttaactcatgtttaattactgctcaagtttgtttttttttatacttttgcacatcagttgagtaatcatatttgctaatatttggaaagataagtgcatatttgacttttgattaaaagtctcaaccactctagaacttgttcgataatcatttgaggcaaaattgataaattacatatgattttgagatatgatataaattttttttggatcgatatagcctttcaagcctaccctatttgttaattccctagttttacccaattagagcgtaaatattgacatcttgtttttcttttggccctatacaataatattttgagcctaagaaaaataaaaagaaaatccttgttcatccttttcacactatagtatatggatgatttatgtatttgtaaaagtgtgagagttttgttgagggaaaaatattgatggttatgtataagtgatgatgaagaaaaaaattattattcccttagaataaatgtttgtaagttgtaagtattt

SEQ ID NO: 270320 - DNA, 1800 bp, Cannabis indica
ttagtagatttaaccaagttttgagttttagaactcaaacttggagctttaatggtgaaacttgtttctgtgcatgtaattgtgttttattgccttgaatatgttctttaggatgtatagaacaggtcttgaaggtttggtttgaattggggttgattggagtgagttatgaattttttagtgaatcctgcactgaaccggaattctggttcagggggacctgtaggaaccagaattccggttggtccccaggaaacccagcagagctggaattccggttgggaaccagtctaccgcttggggcaattttgggaaccctagtttttcccatttttgtgatgtttagggtattgccatgttgtttatcgatagggaaacttttagtttcaagtttaagtccccagaaagtgatttagcgtgtcacttacctttgttgtaatcaatgtgatttaggagcatggaattcgccgagcagttgttccactcaggttggccggcacacctgaattcaaaaacgaggtaagattagtataatgatatgcatatgtatatacatgtttagtgtgcatgttagttaagcctgttagattgcattagatatgtatgttggcttttatactattcgacagtatcacatcagtacgtctagagtatgactagcgtaccgagtctaggatgatattctggtctatagtaccatactacttaataatatcacatcggtacgactagagtatgactagcgtaccgaatatagactgatactatgtcaatagtaccgttgtacgaacattctagactcagcaccgtgtgggtcacggggatagggttatgattgggggatgggcgtccgatcataatccgagttattattatgttattatttatgcttttcttactgagtctgtcgactcacagtgttatttccatgtataggtaaggggcaaagccaaggctgagcagatgaagattgtacatgttagggcggttaggcctggagcgtccgatctttaggacatcagggcttttgttgtctcgtcactaggcgacaaaacttttttataagaatagtgaacttttgtaaatgtattttgtaaacaggatcccagaattctataaatgtattactttatgtttttaattaattaagcaaattttaatttatcacgtttttcgttaatctcattgattagcaacgagttgcacagtacgtttaaaatcacgctaacacgcttaaattagttagggtgttacaatagactttctagcattgaagcaagtctagaaatatgagttagtgtagcctaaaaggtctcaaagcatcacctttatagagtaacatatatgtcctctttctaatcttaagatttatttaattgtcttccaatgttcctaccttggattagtctgatactactcataactcccactcagcagtaggtgtctggtctagtccacattaaagtgtacataagacctcttactgttgatgttcaagaaattcttttcttgtggcttttgtcttttctagaatagttgaaactattccaaagataaataaaatctatgtctagaagttagatgtcctcctttagatttgaccattgaaaagtgttctagcaccttacttatataagttacttgcaagggagtaagtaaattaccaggtataccacaagccataggtttagatgttctcatcaaatccatgatactaggagcaggaagttagcttaagtccattgaatagacctagcatagtttcacttcttgtccttgcattctacaacttttggttaa

SEQ ID NO: 270321 - DNA, 583 bp, Cannabis indica
taaggccattaacgccccgaccacgtaaaaaatcttcatctcactttcttacagctctttattataatcatattttaatagttgccgaaaacctcggtcaacaacacggtaccggtttaggtccacttttgggtttgggattgggttcaagtccggatgtgggttcgtgtccttgtcagggttcgggtctagggctcggtcccaaatctagacacagactacgggtttgtccaagccttgtgtccagatccagatcccaatctcgggtcccagtctggttccatttttggtgccgagtcacgagctgggttctaggttcaagttctcatcttggtcgagtactaggttccggtactagttctgtttcacaattccctatcctgattctaggtctaggttcgggttcgagtcctagtctcggtttgggtttaggtctctgtttgggttttgatctaggtttgggtttgggtttaggtccaggtgctactcctagttcaattctagttccatttgcgattctgagttcgagtttgtgtttgagtttgggtcggacttcgagtcttggtctgagttttggttcggg

SEQ ID NO: 270322 - DNA, 575 bp, Cannabis indica
ataattacatatttgtatattttattaataaaagatattttatagtaaaattttacgtaaaaagtatttgtatgaggtcatgttttacgttgaaaagattcatatgagtacatgcaatgtgtttgtgtgaatcaaaatgataaatgattatgtatggtgtggcatgcaagtaaaattggcttatgttttacgtatttttacataggtttctgtatgagtataaagattcataattgaatgtattttgagtgtattgttgtgttaataaatatttaggatcttattctcaacaagaaaattcattgaggtgcttgaagtagcaaaaaggtgttctcaacaactgaggtaagaagagtggacatctgtgcacagggtgtatgttaaaacatacaactgcattatgggattgtatttacatgttttatgtgaattttcattttatgctaatgttatagtgtgtgatagtgataaggcttttgactgtttgtgtgaaaataacacttataggataggtattctgctgctggtatgagcatagcactataggatatatttttggctgcttgtatgggttt

SEQ ID NO: 270323 - DNA, 919 bp, Cannabis indica
accttgactctaattcggccctagaaaagttccgaatcttaatactggctgcatcatccccgagatagctgtccgagggccggaactagctagaagaaagataggccgaaggatccaaaggaacaggctccggaggtctagaacccatccgggaccggcctagataatctcctaagttggagaaataataatccttggcatgatcctcccaccgggtcgaagacatcctaaacctaaggagacgttcatcgagccctacaggcctaaggctagcatattcgctaacaggagggacataatgtattgctaaaggtgacttaccagagccagaagtgggagcccctgtattcggcacctggacgataggccttgtcctgggagccctcttcttaaccggactcccaatgcgaagggatctcccgacagccgcttggctcctcctctcgatcgggctcccaacgcgaaggggcctccctgaagccgcctgggccctagtataagccttctcttaggccttccggtagaggtaatcctggtacttcttctccgcggccgagaccctcacattcgggcagatgaccttcaaaaggttggagtcctccaccgactggtgcgccaggatcagcttggccttctagcagttctccgtcatgaccaatcccccgacgtcgagattcgccttatcataagtcgcgaagatctgggcccgctgaaggaagatctgagtaggcgcggtccgctcgtacggagggatcctaacccactccgtaaggagctccgggtgctccacagctcggaacccggaggagaagaaaaagcgatggcgatactccttgacatgtttttgctggttataagggaccacgccatcattcgaagggtgggcccggaagccataaaaaccatccttaagtttgtc

SEQ ID NO: 270324 - DNA, 711 bp, Cannabis indica
tttcttcaaaaattcatgttcttgagctaaaaacttcaaagcttgaatccaagcaaccatcatgcatacactaactctaagctacttaaaatagcaagattaaacctttgaaaacaacaacaaaacacagcagcaagtatcacaacaattcacatgcaataatcatcttttaaacattttcttcataaaatacaagaggaagaggttagggaccttaccaaagcttgaagaatacttagattggaagagaaatggcttgaaaatcaaaggaaaaatccagcttcttgcacacacacacccagccgagagagagaggaaaagagagaatggtttttgaaatttttctattttctaagctttgcatgaaaatgagataaattgaatacttaagcaaaaatctatttcagccaacacataattaaaataaacacttaattcaataaaataaagcccactaaaggacaaaatatcattggggcataaagaccattttgcccctccacactcaaataacataaataacactaaaggggtatttttgggaaattataaattcccggccattcccgacattcccaatgtctaataaaccgtcccaaactactaacatactaagttgtgatttttactgagccaaacaccgagttccaaaataccgggcaccggaatgcaaaattatgaaaactactacatgacataaaaatgcatctc

SEQ ID NO: 270325 - DNA, 934 bp, Cannabis indica
acaaggatctcggggagcaaacgagatcctttgggagccaacaaagggccccagcacccacgttgacatgggcattgggccctccgtccaggttgacatgcaacctagttatcatgtttctgcccctcaacacaaatttcgcttcgagcattcttcttattttagttaaaaacggggtaggagacatcgttcataatctcaaatgccttataagtatcaaaacgagctttgggaagtcactcaggaagcaccatcacccaagttgacatgtggcctagtgcactgggttctgcttatcataagctgattccatatcgaccatccaaatattttttttagtaaacgagagctatgatttgtgacaggtcaaattcacactttgatattttaccctttcaacaaggtggaatatgggcaaaatctaggagtttcgagtctacccgatttcaccaaaactcgacatctccgagaaacggtgaacaactttatcaaaactaagaaaatggctaagtgatgtcaacatatggcttcaaaaaaatacaagtttgttgatgttttttcacttacccagggtctaggttgaagctaggatgtcaatttgggcgttagatgtcaacttgggcactaggttatcaacctaggcgctggtttgtcaacctggacgtcgattgacgcgattcaaattgtgtttcgaagctatttcaaagatctatcaatcatatctcacacccatatcgcgattctgaagatttcaagtccaaattttgtgctcaagacaagtgcaattttttccacaaattgcctaaatacaattccacggacgagattcaagcttcgaaaaaattgacaattttcatcaagagtcaattttcaccgttagatcatcatcaatgaccaagatcaatccaaagtgatttttttttcatattttttg

SEQ ID NO: 270326 - DNA, 560 bp, Cannabis indica
ctatcaacgatgttgtaatggccgatttggttgttctattttagtgaggttatctctttttattcaaaaataaataaataaatgattaaaatagattttgtaaggtttagataaaagatatttgcggcgaaaccctcttattttacaaatttgttgcaatcgtactttttgttgttgttaagtgtcaattaaatctgttaagtactagctcaaaaatacgtgataatatatttctttagcttatttaatacataattcaataatatatcgtcacgtgtttttgagttgacacttaatgaccaaaaaagggtatgattgtaacaaaatcgtaagataaggtacttttaccgcgactttttttttattatggttatatgtgtaacaattgtaaatattaaaagagttttgctgtaaatatcttagataattaaaaagttgaattcaattaatttggtttatttttagaagttatgtattattttaattttttaatcttctctataaaaaaatcttaatttttgttggaaaatttattatggaattctaaaaaaaaaaaaaaa

SEQ ID NO: 270327 - DNA, 726 bp, Cannabis indica
acgtcgtaatggatatcatattgagacaatagataaaaataattttgattatctttgcattacatctattgtttcaagaaaaaaagtgtatattagaaaaattacctggtttgtcttcaggtttgtacgttacacgtataagtataatagaaactcatattattgtgaacaagaagtttacaaactagaaaaattcatttattgcttggcatgatcggttagaccatcccagtttaatcatgatgcgtggaataatagagaactcacatggtcatccattgaagaactaaaagattctattatccaatgagttctcatgtgctacttgttctcaaagaaagttaatcattaagccatcaccagtcaaagttggaattgaatcccttggatttcttgaacaattcagggcgaaacatgtgggcctatttgcccaccatgtggaccatttagatactttatggtattgatagatgcattaactagatggtcacatgcttgcttattatttactcataatgtagcatttgcaagattgcttgctcaaataatccaattacgagcacaattcccagaatatgcaatcaagacaatcttgccttgataatgctgttgaatttacatcacaggcttttaatgattattgtatgtcaatagggataaaatgtagaacattatgttgctcatgtacatacacaaaaatggtctagtggaatcattcattaaacg

SEQ ID NO: 270328 - DNA, 1325 bp, Cannabis indica
cggtgcgggtgcggttttggaaattgaaaaaaccgctagcacgagttggtttgaaaaaatagtcaaaaaccgcaccacccgcaccgcgaacacccctaatcagcatgcccccagcatgcgccaccacatgaccaccacttgaccaacttgtgggcatcacttagcttgtaacttgccatcttggcacgcacgttacattctcccccacttcaacatgtcgatgccctcatcgatggaccgcaggaaaattttcctgatctcgactcctaagcttactccaagcttcatccgaatcctaagtctacacttgtctctctacctcggtagaaccaccctctcggtgacgatctccctcgcccactcttggactcgatcaaagagcttgtgccactatcgctattcagaatctcccatagagtagtgcctccgcactagaatacttcccccaacatgaactccttcgagtccatcacaacgtccctccagtcaaccaagtagcccttgcaacactgaccctgaagctaacacatcctctgatagtagctcacccgccaattgtccaatgcatactccttttgacaaggactaagtatgatgcaccccttggggtgaggttcgcaaaccaaccgtacccaacgacacctacaaaacacgcttccactgaagccaagtccctctggacaagtccctccggaaacttcacatgccaactccatggtgcaccatcctcttgatggccattgagcaagacactctgatcgtaggataaaatttggtgtgtcccacctggacgaggctcgcaagccaactgcacccaatgcagcaccaatttcactcttacacaaaatttcttcgcgaagttctcaacattggccctcccgcccaaccacacacccacgacttcatgcaaaaggtccctctgatccactgcatacttgctcctctgagcttctttcacgtggtcaatgatctaacaatcacccaaagccaaaaatttgccctctagctcctgcttatttcggctctcaaaactctgtcacaagtccatctcccaaaatcacccttgcatcctctgatgactcgctaacttttgacaaacttgataacacgaagtcttactcttaagacttgaagtcatcccaatccgcaatctcccatcggcatatgctctctgaaccattcggcttccactgtctcatacaacactagtgtccctataaacacaaaaccaagccccatacatgccgcaaaactatcttagtcttgatctcacgcctacgcccctgcatattgtctatctgcagcttgcagcaatcatgcaagtc

SEQ ID NO: 270329 - DNA, 642 bp, Cannabis indica
attgatatcgtttctaatgtattcagcatcgtctttcttaaggttacgataaattcccataactttttgatgaattggttgcccaacaatgaagtcatcataacataaatcagcattctcctcaccctcttcattctctaagaacctcctctctcgtgtcgataaaacaacagagatgaatggataattattgcttcctctcttacttaaatcaaccaaagtaaaaccaagctcgtcagtttttactccaacattgttgtcaacccaagaacatttaaaaagtagaattcataacgcaaaataattgagctcccatatttcttcaacaaatccataatacgtcatagtacctaaaactgagtttttatcttttgtacttacaaaatgcatagtttatgtgaagatacgtatgccattatttttaacctctcgagcatcatctcttgactttgtatggaaacgtttaccctttacaatgtacgcttcatactttgctactgcaaaagttggtccaagggcaatacgactcaacacatcagatactccatgattcagttcgttcaactttgctataatggtattccttaatcgcccaatgaaagtttgacgatgctagtccgcaacccatttttgtttattttt

SEQ ID NO: 270330 - DNA, 1286 bp, Cannabis indica
acattgtaggcaagatgccaactgctccagggcagagggtattcatgctagccttaactgactacttcaccaaatgggtagaagctgaagccttcgcacaagttagagatcgagaggtaaaaaactttatctggaaaaatataatatgcaggttcggaattccaaaggagatagttacggacaacggttcacagttcataagccaagacttccaaagcttttgtgcagaatgggggatacaattatcattctcaacaccacgataccctcaagcaaacggacaagcagaatcaaccaacaagacaatagtcaacacactcaaaaaacgtctagagaaagccaaagggagatgggcagatgaattaccaggggtactgtggtcttaccggacaacagcaaagacctcgactggagagaccccatttgcattgacatatggaactgaagcggtcatcccagcagaaatcgaaataccaaccatcagatatgaacactccacggatgatctaaatcaacagaccatgaacacagaacttgatttgttagacgaaaagagagaactagcgcttatcaaaatagcaacatattagcaaaaggtggcccaacatttcaataagaacattagagtccgacaattaaaggaagtagaatggatactacgacaagtgttccaaaacacgaaggaagaaggagcaggaaaattaggacccaattgggaggggctttataagattagaaagatagttggccaaggagcatacaaactccgagcagtagatggaagaaaaataggaaatagctggaacgccgtacaccttaagaaatacaatttctaatcacatgtatggcaagacaatgcccccacgtaaatacctgtgtcaattattttaagtgtttgttatattttagagctcaaaaatgtaaagtaaaagcaataacaagcgagccacgctcaacccaactattcacttatgaaataagtggtaggagctacgctcaacccaaatgttcacttataaagtaagtgatatgagttatgctcaacccaactattcacttataaaataagtgatagcagctatgctcaacccaaatattcacttacaaagtaagcagggccgtctcaagcttttgaggggcctagtgcaaaatttcaaaattggacctttttaaaagaatttattaaacataccaaattttcaaaaatttatataattataacattaaacttaattaaaaacaatcaaatgtcatatattctatgtaattataataataattaaaaa

SEQ ID NO: 270331 - DNA, 513 bp, Cannabis indica
aattacgcttgttttctatgttttcaggttctttggaataaaagagatctcggggtcagaaattcaataaaagacgagctgagccaacgaaaacacgatttttgaagtattgtgcacatctggccgcggctagacacagcttggccgcggctagatcacgaaacaaatgacaacgagaaggtgctccagtcgccgcggcgagaggaagtttcgccgcgcccaaaagctccttacagaaccgtgtatttttaacaccaatctggccgcggcgagggtgtatatggccgcggcgagatcccgtacggaccaggagcattttcgtccatcgaaccctaaattttagttataaatagaaaactgcgattggaagtcagggagagccatctggaaccctaaaatacagcagagagcggcaggaagagcacagagattcaagtgacgatccgaaattcatccaccaacagttcttttctttattcctctttaatttctttatgttgaatattgctttag

SEQ ID NO: 270332 - DNA, 751 bp, Cannabis indica
ggttgggtttttggtgtgcatacagttggagtttctttgacagagaaaagaggaagaaagagaaggttgaaaataataagaagggtattttagggtatagggaaaagtgatcctactttttcaatagatataagtattagtttaaaaaattaatttaagtacaaaatatggatataaattcaaatttcccttagattattactgtattgatttcgaagtcttacttttacttatacacagatgtacacagtgatcatctagttggtatttaacagtgatatttaattaatgcaacaaatttgtaaataaaagtaaatttaatatgattttgttaaaaaaataagaaggttaagtgtataaaaattaaaacggcttcaccacttactacacttattcaaaaaatattgaaattaaaagaaaaatatcaataagaaaagtactaaaagtgagtttttaaaattaatcaaggttatttttttaataatgaaatgtttatatgcatgggtatgctcttaatgggtattacctatgtatgagtactttattattgaccattgaatcaaatacctaatggttgatatttatagtcatttattaaatattaaaaaattaatatttcctattttgttattctctatattcctaaaatacataaattaacatactaaaaaaactaacaaactatttttttttaataaaaatcattttaaagattaaaaagaaaaagagtgtatatttatctttttataaa

SEQ ID NO: 270333 - DNA, 814 bp, Cannabis indica
tatttattgtgatgaaatgttactttcaaattatttattaaaaaaagaaaactaacaataaactataaagagtaacttgtcattaagatcaaagtcaattttgttttcaacaagtagtatttatgattaataacgcatgttgtcacaataaattaagacttaacttttttactttgtggaggaattttttagtgatagcgtaagctaataatgtaattttattcacaaattttttgtacaaaagtaagaattttttttggtagggtttgaacttaaaaaacaaaacaaaaatcaacctatcaatttattttaaaaaaaaaacaaccaaagaagaaatttgatataaataatttgtaacccaagcttcaaaactttttttttttttctggaataaaggttttttataaattaaaattcaatagagttagacctcacgattatatatcatatcgtttggtatagaagaaaatactactatacccgaaactattatagtaaaattaaaaactcatttaactacattatgttctgtaaaattacataatcttgagacaaatgaaaaactataacttaacaaataattagagagattcttacattgaatcctatagttagcaatagaaacaggtttttttttttcaaaacttgtatctttactatcttatatcctaagtagcgtataatttgtgagtactagcacatgcatttccagcttattgaaccattaataaaggcttttaccattttaaaaattacaataaataagcaattgacctaccaaaaacttaattaaagcaattgtaggaaaagttaa

SEQ ID NO: 270334 - DNA, 580 bp, Cannabis indica
aggatgttaatgaaacatatttgttagtaaatctagatcctggtaaaatatttccaacatccttttgtttcccttattcttaagggtagtggccaagtaagcacattcagttttatccttttcaacctttcttcctcttgcacacaatgagaaatgagctcgttgagagtccatttctccttttgacattcgtaactaattttgaattggttgaactatggaggaagtgttaacaaaactatgagtacaagcacattatcaaaaagctcaatcttaagtgtccttaatcttgagataatatgatgtatttccataatgtactctcttacatttccttgacccttatacttcatgttcattaaagaaccaagaagtgttgtcatttcaaccttatcatttttagcaaaatgttcatcgatttgttcaaggaaattcttggccatagtaaccccttgggattctgtgttgaaaatattttaccaagatctagatttactaacaagtatgttgaattcacattctaaatatgaattctctaaaacaatgaaataaacacaaaagggtttaagaaaaccttaca

SEQ ID NO: 270335 - DNA, 586 bp, Cannabis indica
ctctctctctctctctctctctctctctctctctctctctctctctctctctcttttgtctcttgtctcttcccttcgtagtccacccatctccactgtctcctctcttacgaagtgcctcccacctccacgaagccttaaataggggcccacggacgccagacacagagaaagagccttgaatcgaagtacctcccaccctctcgtaaatagaaccacatccatgaaatcgacggagcctggttcgaacagagaagaaaaccattgacccacctgtccccactcctgagatggccgagcgacacaggcttttgctaattcttccctacggtcttaggtcatgctattttcttctaagcgaagtcaatctaaggtccttggacctcctgactgacaaggagtttacttgtgattacaagtgtcccaagtattcttcttggcaacaggttcctatccttgacgaggagaaagctcgggatcacgtggctcaggcactgtaccttctaaacactgcccctcgggaagctggtgaaggagcatcccaaggtaatcaatgtggttggtcacccacactgcttagggctga

SEQ ID NO: 270336 - DNA, 746 bp, Cannabis indica
aatatggtagtgtcgaaaaagcgacagtgttcctgcaaacagtgatgtatttttatttaagatgattagacatagtgtgcataatttatttaattaaaaaaatctactttttttgaatgaaaataatctttattagacagaaacatccgctaatacaatagactgaagaacaaggggaatatcactctcagtaaaatgacgacctgactaataacaaacaccacgtgtcatgcagtgcgcgactttgttggtcttgtcagcatccttctttttattcccttgtttgtcagtattaaaatatatagaaaacattatagcctacaaaaaaaacgttgactaaggtattctaggcataatagaggggtgtttttcttgcattaagcataattcaatgaagattaaactccaccatgagtttccataagttaacatcctgtaataataacacaggcatttaaaaaattaacaaaaaagaaaaataatgaatacaaaccatgatagtaacattagagaaattcttgagtaaaatcctacagcgacatgctgatatagatatataaatgtaatgaaaacaatgtaaaaagaatgcaaatcactcgaacatattaggtgcaatcctaactcttttattcttgggaaggacacttgtgcttatttttcctttaactatataaatatatatctttatatattaaaagtgcctatgtaacggcaatttttggtttaacagaatatactttacaaat

SEQ ID NO: 270337 - DNA, 575 bp, Cannabis indica
gacacattcagattacatccatattgagtacaagtccttcttggagatagtcaaggatacaaagtattctatggtaactaccacaaagttttatcgggcaaagaacatagaaaaggcagagctagaaggcacagtcattgagcagtatgcaatcttggaggattacttcaaacaactcttgcagaccaatccaggtagcactgccaaaattaagtgtgagatgcaaggtgataaaagaacattccaaaggtactattctgtctacatgcttgcaaggaagggtttaaaaatggttgtaggccattcataggacttgatgggtgctttttgaaggggttttgcaaaggagtactgttggctgctgttggaattgatgcagcaaattctatatttccaatagcttatgctatcactgagaaagagacaaccagcagctggagttggtttttggagttaagagatgacttgagtcccattgagccaaactcattcactttaatgagtgacagacagaaggggcttcaaaatgcagttgaaaattttcaacaacccagatagcaggttctgtgtgagac

SEQ ID NO: 270338 - DNA, 1203 bp, Cannabis indica
aactcgctaggataacaatccaagtttaagcagctagagctgaaataagaagaaaactaacatggttagtagatctagaattaataacccaagtggataataattctctaaaacacatgagtttatagcatagatagaaataccttgtttctttgctagaaacttaggacactggggtttctagtggcccttttcgttgcaatagaaggagtttcctttttggtttgcatcgggatttgcattctttttcttgttaactgttttagcagctttaagaggcttcttgctattcttccagttcttctttttgttgggtttcgaagcagaggcaatgtttgccttacccttggttgaaccattagcagggccagaactaggaactttagttcctcctttctgtggtcctccaatcaaattttcaaatgtgtgaaggttgttgatcaactcgtgaaaatcaagctcaaacttgttcattacataatttgatgtaaagggcagaaaagctggagtcaaactattcaagatcaaactcacttgagttgtctgatctataacaactccattattgacaacctcttggaagtaactagtcatctggagtaggtgatcacgcacgttttgatgaggtttcatccgtgcattgatgaaattcttggtagcatcaaagcaagcttgaattgatgccatcccaaacagttcagttaactggttcatgatttttgcagccgtgagagtattggcaaaccttgttttcaaggtgtcgaccatgctagacagcataaagtatcgagctttgtttttagcattctgccaacgctcaaacttttccttgactgccttcgtcgcattctcacctggctgctcaggagcctcttcagtcaacacaatcagggaattttaagcgatgagtgcaatattaatgttctctctccatttgataaagttagcttcagagagcttgttgtcaattaacggtgacaccatgggatcgttcatagtcatattggacactacaaatatcaataaatagaagtcaagtaaggtttaacacaaaatcatattcagaaattattagcacttagcaagtaggaatgacaagtgaaaaatactaaaaacatataaatcctaaataacttccaaggtttccaacaaattgaatactagtatctcgtttagcgagagtcaaagataccatccattgaa

SEQ ID NO: 270339 - DNA, 567 bp, Cannabis indica
tttaataaaaaatatctaatattgatgaaagttcagtggcatgatttagtatatttcaaaatttgagaggcataattaaatcttaaatgattagagtgaccgcaattttgattgcaaatgtgaagaaaggaagtattgttatttgttaaccacgattaaatcattaataacaattcacattgttaatgcataaaatttctaacaataaatttcatcaaatttccctctctacttattactttaactcaattcttgccattgtcggtatttgtaaagccaatatgactaattataattttataaggttggtttaataaaaacacattatatgcatgagtacaaataaatcttaatctttatattaaagaattatgtgtgataatatttatataaattttctatattttatcaaatatttgatattaatcattttttttattttgtaggtgtcctactactgagatgacaatcacaactctcatttaagattttctttttaattattaaggtttattatctagttctttggtacgatatctctacattcctctatgatagataataagc

SEQ ID NO: 270340 - DNA, 650 bp, Cannabis indica
aaacttacatactttgtcatcatgtcacagggttctcttttgttccaatcttcttcacactaatctccttttcaacaatgatatcccttatgaaatgtagtttaatatctatgtgctttgatctctcatggaacataggattcttcatcaaatgtagtgcactttgattaacacagtgcactgttatggtttctgatttgaaccccagttcatttgtgaatcccttgagccagattgcttccttaatggcctcagtagcagccatgtactctgcttcagttgatgacaaagctactaccttttgtagattggatttccaactgatgcatccacctaggactgtgaatgcataaccagttatagatcttcttgtgtctatacttcctgcataatcagagtcaacatatccattcacttcaattccttctttaaacttgttatcatagacaagtccaatgttcatagatcccttcaaatatctgagtatccatttcacagcagaccaatgttccttaccagggtctgcaatgaatcggctaaccatgctgagtgcataggctaagtcaggcctagtgcacaccatgcaatacatgagacttccaacacaagaggcatagggcatagaatccatatacatcttttcttcctct

SEQ ID NO: 270341 - DNA, 961 bp, Cannabis indica
cttttctctcttttttctctttttttttttccaattctctctctataactttttttatctttatagatatttaattaatgtatattacatttttgtatcttttttttaatacttttcattctcttataaaattttattttattatttttttaataaaaatacaaacacttataatatttattttttctcttttttatattttttttactattgacacacaaactatttcatattatttttctttaattaatcacatttataaaaaaaatcttaattagtttcttttaacttttactaaaatatgattcttttacttacacactttctctcatatatttttttaacactctttctctctcctacaaaaaattaagagtacagtcctcctatatctttctctctttgacatgattaataaaagtaatatttttttttgaatattttgtagtttattcggagttgatttatgaatgatttacatatttcaacaagataatgtcttgttattttttttgttgatttatataactatctttttgttattttatagttatttctatattgttgtttaggtattctatagttgtttttatgtattttttgcacagtgtttgtttagtttatgtgtattttttatgaatatatttttagtttacttcagataattttttttgttgtgtatatgtgtatttgttttgttagtttgatgttgtgttttagttgtttttaagtgggttttagatttttttttcttgaatatttttttttttatacatgtgtgtatttttagtttattcttgataattttttttttttgtatgttatatttagtttttttgggacacatttttcttaaatacaatgatattttttttttgtttttttaatttgagccaaatgtgtcagtagtagatattgacatattaattatatgttatctattatattatatacctcattt

SEQ ID NO: 270342 - DNA, 690 bp, Cannabis indica
agatgcccatctactggtggaggtagcaattcttggttgttatcacccctctgattctaatcggccttgacatacttctgtacgtgcgggttatttttccttatgaggaattcaatttcccgctttagattgttgcattcattggtgtcgtggccgtagtctccgtgaaattgacaaaacttggtcatgtatctcttgctaacatcttttttcatgggtgcgggcttcttgtacggggctagtcattgagtggccatgtaaacactttctatgtcctccgtcaggatggtaaagtagtatacttcgtaggattctcccgggaagcctgttcggtctagccggtgaactttccctttttcccattcccttgcctattattgttgcttgaacatttaccatttgagtttgaattgcttgggtaatggggaagctggatggatgtcctagtggaaggagcttttgacttgccaggtttttgctcaccttctgctcgctgaatatcctcttcaagcttgataaagctttctgcacggtgaaaaaaatcactcatcaagtttattggacagttcttccttatgtccttctgaagctcaccaaggacttcaatggcccccagtatcgcggacaactttccatcttcggttactcgtgaaacttggtcgccttagtcatgaatctactgatgtaggc

SEQ ID NO: 270343 - DNA, 735 bp, Cannabis indica
ccagtatagtgaacactctagaagtcttgctccaaattccataaaagcggccccacttccacattcatataggtgagtgtatcaagagtactcctatagctcgatactccactcaacatagagtatagatctcattaagagtttcaattaactcatcctcttatcgcttgaagacttcatgcttctcatataacaatagcatgatcaacacatatcacctcataacgtgttattgcctgtttaacctaattcttggaatctccagtcattaggttgggttaccattatgagtgactcatctttctaaggaaaatagtcccattcctttcaaagttttatggaatttctctccagctagtcctttcgtcaaacgatctgctaaattgtcatcagtgcgtacatgatccactataacagctcctgctcactggaactctctaccagtgatgtgcttacgaaaaatttgtcatttcttacaattgtaataatggtacaggacttttgcaatagctgtggtactatcgcaatggatcaacacagctggtaaatttttttcccataaagggatctcaactatcaggcttcttagccaacctacttcttcactagcagaggatagtgctatattttcataatccatggtggattgtgctaaattattctgtttcttttacttccaagaaacaacaccactagctatgctaaaaatatagccacttgttgctttagagtcat

SEQ ID NO: 270344 - DNA, 698 bp, Cannabis indica
agaaggaaagtagttaaaaagaaaataaccgcaacagaccaaaaattggcacattttgctatgcaatgcatacttcaaatattttattaatattaaaagaaaaataacaaaacaaaattttcttctaaacctaaaaaatgatttctatttttttttacacaatccaatgccacaaatcatttctcctctcatcttcaatctcacagaaatatttagcgttctacaattgccctcgtcaaccacattttatttttttaattgagtttgcaaatttctgtttagcctacatatatataaatatatatataaagtttagagtaggatactttagccttacattgtatatgagagttttatatttaggttgtatttatttatatattgtatacttaatttatatatatatgatctgagataaaaatatcataaaaatataactacctcaacataaatgcccaaaaaataatatcagtttttttcaatgaattaatgttattttttaaaaatattagtaatttaacataaaaaaaaaaaaaaaacgatcaaaaataaccttaattgatttgaactgttatgtggattggatcggatccaaaatatgaaatccacacttagtgcggatcagatgttgtttgaccaaaataatacggattggatcggatgaacaaccctagttgcatgcattatattttcttttt

SEQ ID NO: 270345 - DNA, 801 bp, Cannabis indica
cattttttgtgacagtacaagtgccataaatatctctaaaaaccctgtgcagcactcccgaactaaacacatcgacatcaggtaccactttattcgtgatctatttgattcaaatatgctatcaatatctcatgtgcccacaactaatcaattagcagatcttttcactaaagctttagatactcaaacttttactcattaaaaaacatgtattggtctctgtactatctaaactgttctcagtgtcatctgatccattttttttggcctatgagtattcttgtatttcaaaagtgccttgagcattgtgttgtcatttctatctccatctcctataagctacttcgcatgatactaagcttgaatcttctccagataaaaaggctacctcttccagatggaatgggaagagctctcttcaacctttttactaataagtagtatgctccttctatattagttcttggggaccaaagaggacggctacatctctagaagagtgtgaaagccatgtctgggtaatagagaaaaagccagagtgttttacaaaaagaaaaaaggcattatatgaaaaaaaaacatccatagatattcacataacagtttgtgtttcattgagagagtggtccagaagatctcctctcttcgtggactacatgagatcactgctcacacacgtatggagattcaagtcttagtgttcccatgagtatcattgaggatgtgtgtatctattgctccggttatgttttttttaaatactcagaggctttattcatgttcattgatcagttgttacct

SEQ ID NO: 270346 - DNA, 547 bp, Cannabis indica
ttctttgtatgaaatctttcatgtgtattgcataattcaccacacactgattgccaatgaaatcctaattatctaaagtagagagatttatggtttaggattccttagatgcagactctgcctattgaaaattggcttcataatttgacaatgtctttgagaatgaaagttagatcaataatattattccctgtagagaataattaatatgaagaaataggtggttgactcggtatcgttggtttagctatagaatacttatcatttttttttattttcaaaaatattggctggaattagtgatatcagaattgagtgacattgtcacttcggagtttggactgatgaagtattttatgatattcataatttgtgcactcttatttatgtaatatgtattattataacgatgttagacttatgttacaatttaagatggatttatgttgggtttatgttacaatttaggttagatttatggtggacctatgttccaatttaggttggattagtatgcgggttgtaatattttgaactaatatattag

SEQ ID NO: 270347 - DNA, 721 bp, Cannabis indica
tagaatagttatgaaggttctgaccttataagattgttctcgagtactcatgggactaaatctgatgttttcttgctaaaattaaggtgattttgggttaaaaattgagtttagaactttttataacttaagtccgaacactagtggcatttgccaattacgggctcgattttaaattctattacgtaagtatggtagtatatatggtatatatgtgccctgtgaaatttggggtggtttggacaggttccggtagcattttagtgactgcgtaaacttgaaaatcataattttgtcgttgataaactggtaaatcgatttgtaaaccggtcaaccgatttaccattttaggcaacctcgggaactcgagaatcgtatttttgccataactttatacttgggtgtccgttttggacattgtatataccgttttgaagcttgcgacgagctctaccatatggtgtatgttttacagcaaaaatataagttttattttagtgtatttgaactacaagtttcggtaagaaaccctaggttgtcctttgcaactattaagcagtgttttgtgataaacacttattagtctattattgttatgacttagggcccgagatcatcgatcgttcttcaagtaggtcggttaacatacctgaaccaaaacttgaggtaagaaaagtatattatatcgcatagtgcattgtatgtaatataattagtattg

SEQ ID NO: 270348 - DNA, 984 bp, Cannabis indica
tatattacttctgtctctctatttcaacaagcatcttattttaatttttgattttgcaaaatcttactcgatctaactttattatctagtaaaatcaaaaatattatataaatgtgatattttttgtaaatatttattattaaaaatttcacaagaaatagtgaaatcatattagttaaaaccccacctactaagtaattttttcttattttttccatatttttttgaagaaaatcttctttatttaaaatttagtgtagaagaaaatttacattgactaaagggtcagcatattcccaaaaagatttgacacgtttacttggtacaaatatggcgcttggcttagtaataatcttcaaagaaagggacataattttaacatttcattaggttatttgattattcatcattggcatatttactattcaaaccaaaatttactcattttatgaatacaacacaaaaaatttatacatttttattataaataataatattattaagagtaatttgtgttataaatactaaattttaattctcgtaagttatttttaaaaattctgtaagtacaaaactattaagtgtaaattaatatccacttgtatcggtatagaaacaatgtagcttataaaatcatctcaaaggtttgatcctctaattcttttgattattttttaattgtggcctagcatatggaatattcgaacaagcatagatcttggtgaaacttacccaagagtgaggaaaatggttgaatggtgtggcaagtttttacagaattaatatagagatgccaataatggtaaatgactcaacaatgaagaaagtggcaaagctaaatgggtcaggtcagataggggcgaccaggaaagttaatgtgggcgaggaggaggagcgatggggaggtgttgtatgcagcaaccacaccgttataaaacaaggcttacagccgcaagaggctgagctctgtgccattcatgtcgg

SEQ ID NO: 270349 - DNA, 467 bp, Cannabis indica
cgtacaacgtccatccttctcctttcggtatagcagtgttgatttcttcgtttatgagtgccacttcagtacttgggaactcgagaatcaaatctgccaaggcttgccgcttgatcgcagttctcggtttgtacttgatgtcgaactggcttaactctaccgaccatttcaacaatcttcccaatgtctctggtttcgccaagacttacctcaaagggtagttcgttaaaacttcgatgctgtgggcctggaaataagttcgcaactttctcgatgacattaccagggctaacgctaatttttccatttgagggtagcgggtctcatcatctaataggtgtttactgacatagtacaccaggtattgtcatccttgatcttcgcggattagtacagaactaatcgcatattttgacaccgctagataaattgataagacttcgttggttatgggttttgatagaatt

SEQ ID NO: 270350 - DNA, 636 bp, Cannabis indica
gagtctagaacgttcgtacgacagtactattgaccataatatcagcctatactcgatacgttagtcatactctagccatactgatgtgatactgtcaagtagtacggtattatcgaccataatatcggcctatagccagtacgctagtcatactctagccgtaccgatgtgaactgtcggatagtacaaaagccaacatacatatctaatgtaatctaacaggcttaactaacatgcacactaaacatgtatatacatatgcatattgctatacttatcttacctcgtttccaaattcaggtgtgccagccaacctgagtggaaaaacttctcggcgaattacatgctcctaaatcacatcaatcataacaaaggtaattgacacactaaacactttttggggacttaaacctgaaactaaaagtttccctattaataaacaatgtggcaataccctaaacatcacaaaaaagggaaaaactagggttctcaaaattaccccaaccggtagaccagttcccaaccagaattccagttctatggggtttcctgggaaccaattggaatttcggttcctacatgtgacagtcagtagtcccgtgatccgtaaggggaaataccgggtaagctgtgcaa

SEQ ID NO: 270351 - DNA, 543 bp, Cannabis indica
ttgagatttcataatgcattgcattgcctttactctccctactagattagttgaacaagatttaaaggtattgttaccatatttagaataagagtaatttgtggtataaatgctttattttaattcccagttatagataaatacataagtttaatttttggcggtaatagtacttaaattataattttggaacttttgtagttacctagctgttaagtgttaagtaaattgtcatgtgataatagtttaaacttattatttttgccgcaaattactcttataataattgaaatgttctgtcacgtgatgatttttacttagcttgaatccattaactaagtagagatttaatcaggaattattagcaactaagttaatttggtatctggtgtggagtcttctgtagtttgctttcttatattggtgatattttaagcattttttttatgttgatgcagagccattcgacgatcgagctgttaccacgaaggaggggaacaagcaacatgttcagacggacttagtttgtacatcttgctattc

SEQ ID NO: 270352 - DNA, 779 bp, Cannabis indica
gcacatctcaaagccgtctggcaaaaatagagatatatatgagtaataataagtaaagcaataactaaaatggaatgagatacatgcaagggataaatcacatttattcctgacatggctgtgtccttcaaaatagaatcacgcccgtgggagatgtagaaatcatcgtcaggttttctgacggcatccagaagagttttgaagtaattttcagccgactcctcgaacggaacatcctttttaatccggaaggcagggatcttgtcccatcaatactacaaaatagacttttcccaacagttaataagggggtcaattataaaaaccgttggaaaaggtaagcggcgattcttaccaacagtttataactgaagcaaaaaaactgttgggaaagaccaatgccaacggtggagaaccgttggcaatactaaatggaatttggtaaacaaaaacaataaatgccaacagtttataactgttgggaataataagtatacccaacagtttataactgttgggaatactaagtatacccaacgtttctaaaccgttaggtatacatagtattcccaatagttattaaatgttgggaaatgatctataaaaaaaagtttcatatttaaaaaaaaaaattgcttaataaaaaaatttgtaatttacttaaagaatatactaaaaaaaagtttcaagatttttttttttaaaaaaagaaatttgtaatctttttttttttttgccttaaaaaaaaaatttatatttaataaaataaaataataaaa

SEQ ID NO: 270353 - DNA, 790 bp, Cannabis indica
aaaatgagtttgaaatgagcatggttggtgaacttactttctttttaggtcctcaagttagacacatggaaggaggtacatttgtgtcacaaagtaagtgtgccaagaacctagtcaaaaagtttggccttgagtcggctaaacaggtaagtactcctatgagcaccacttcgaaattaacaaatgatgagaatggaaagaaggttgacactactccttattgtagtatgattgatagtttattgtatttgactactagtagtcttgatattagttatagtgtgggagtttgtgctagatatcaaagtaatcctatggaatctcgtgtatctgctgtaaaaaggattattcaatatattaatagtaccctcgactttggaatctggtattctaaagacactaattctaatttgacttgttttagtgatgcagattgggcaggcaatgctaatgatcgaaagagtacaagtggaggatgtttctttcttggaaacaatttggtttcttggcacaataagaaacaaaattctatttccctgtccactgctgaagctaagtacattgttgctggtagttgccgtacgcaattgctatggttgaaacaaatattgattgactatggatttgaattggctgttttaactattttttgtgataacattagtgccataaatatttccaaaaatcttgttcaacgttctagtacaaaacacattgatataaggcatcactttatcagggaacttgttgaaaataaaattttgcagttagaatatgttgatactgagaa

SEQ ID NO: 270354 - DNA, 645 bp, Cannabis indica
ttgcagtctaaggccaacctggctgtggagctgagggacttcagagaccaggccttgaagaaggctaaaagagatgagcttctgacccccgtctcctcgcaagacattgtcgccaacgtgctttgtatgacgacgtctacatgacctggcagtcaaataggccaaagtattaagcttgacttctatcccaacgcctgaaaggctcttactaaattccgggagaagaagaaaaggcttgatgctttgcttgaagcgcgtcggggccctcatcttcctcctcgcatcgactaggccacggagtccaacccattcagcattataatcatatctctcttttttttatatacagccatttttctttccttcaagacaattttaatttagctgtttattttctaaggggagacagttattacagcccgtccccagaccctttatatattttttctttttggacctgccctttgggtcaggatattataaatatatatgtatgttcactttgatacatattctttttgactttgctttttactttttagtcctgatttattgtttgtccgtgcggtatgtcttagtacccccctgagtggcatgaaaattttgttttaaggcactcagattttatttgaaacttagaggtta

SEQ ID NO: 270355 - DNA, 745 bp, Cannabis indica
caatcaacatgtcaaaattcggccatagcaagaaaaccaagaaaaagtttcaaaaataccaccaaaaacatgatttcaatgtaaaaaatgactatggaggtgttagaaatttacccatagtgaagaaatgttccaccaagtgtccaagaatcacttcaaagcttcaaaatctcctccaatggtggtaagatgtccaacccaaaaatgaagagcaaagtggagaagatgaattttttgaaatgtgagggttttgtcttctttcctttcttacatatagaattttatttttgcaaaaagagggccttttaacccaaaattgctattataaccctccactaccattgagggctaaagagcaatttccatatttttgttggtcattttctttgtaaataattttatttctttgaaatttattattttcttgtaatttatttttcttgggaaattattattgggctatattgtaaaatgtgaaaaaagtagtgagtgggaaatatttgtttgaatttttttaaaaaaaattgtaattttagtataggcatagtatttttggtgccgctgtgccaagccgtcaacaacagaagcaagacccgaacaacacaagaaagttcctaccgtatggtcataccgctagaaacttggggggcaaatgtttatcaaaaaatttttagacgatgacgtgtcaagagtagcaccacgtggcacaaaaataccgggactaaattaatgaagaaggtgtaaa

SEQ ID NO: 270356 - DNA, 615 bp, Cannabis indica
tagtaactagatataatagttactaaataccgaaaagaaattgttaggatttttgttatggataaatcatgaatgcgtgaggagagagatacattacgatttcaagtaggatttgatgcatttacatagtttggcctaaagaattctagaaattatgaacatattcattgttcatttgtagattgttgtaatagatccaaaggaaatattataatgattaaggatcatgtatatttattaggtttcaataaaagttatagtacttggtattggcgtggcgaacattagatgcttgtttcactttgtccaaaatggaaaaataaatagtttgcgaatcatttgaaagtacttgatgaatactcgtctaacatcaaaaactcagtaaataaaaatgaattgaaactaatgggtatgaaatcacatgattgtcatgcgttaatgcaacatctgcttccaatcaccattagatcagtcttgccgaaaaatgttcaagagtgttcgacacatgtttgcattttctttaataagttatgcaggaaggagttagaaatggataaattagatgcattacatgaacatgtagtcaaaacattgtgcaatcttgaaaagtttttt

SEQ ID NO: 270357 - DNA, 655 bp, Cannabis indica
ctttatatggtttgaagcaagcatgaaggcaatggttccaaaaaatttccaatgccttgattgtagaatccaataccttgattgcagaaggcttccatcactttgccactgaccattcattgtttatgagacaaaccaaagaagctttcatcattctcttgatctgtaataccatagaattaaggaatagattagcaaaaccttaattagataattatgaataattgagaaattatattattatataatttagtatatgtgaattaatatgatttatttgattaattatatattaagaccccgttggtgagccaggggcatttttgtaattatgacaagagaagggtaaaatgatgaaattaattttattacgtgcttaatagaactgtattattatatagtatgcctgtgttgtcttttcaggtgtgttctgacaggttagcgcgatatagtcacaaccgggtatttcgggccgaacgaggttcgggcccgaaatgtaatttgggattaaatgttggcattttatttatataggggaaatctaaaaattatttaaataggtgttttgtgttggatatgacttaaatgcccttgaatgttattttgcatgttatatggccctaggggcattgtggtcattttgacccttgattta

SEQ ID NO: 270358 - DNA, 1151 bp, Cannabis indica
cctcatatccaaacacacgttttttttgagagaaagggggccagctaaaaggaaaggaagtccactagattgcaggggtcatcacctatccaaatcgctacttcgtctaaacctgaagcccaatgttccaatttatcagccaaagagttggcgttgcgattaatgtgaaatatccgggctgcaaggaaaagagacaaagtttccctgatttgcagaatgaggtctccgaacaccgaaagatcttccttgtgatggcgaatggcgtcagtgacagctttgcaatccgattctactacctgaaccataaaatgctcgtcaatacaccagcgaagcaaagagaggagagccttggcttctaaggtggcaacagaactgcctccaaagtagggctgagcaagagctgcgactaccaaaccttcactgttcctgattactccaccaaaacccgctcttccaccattcttaggaactgctgcatctacattgagtttgagggtaccgtgggctggaggaacccatgttgtgggagcagttgccaaactgggtcggcctaggagaattgtagctgaggaagatgagttgtaatctgccaagaaactttgagccaaactgacaattacgtgagcttgatcggatggttgacctttgagagctttgttcctgttaaaccaaataaaccaagcaatacacagaaaaagatctacatctttcttggaaaaagatgtgtaaatctcgtgagctaaatcatgaaacaaaatttcagaagagcaggaaaaaatataagggtgaaattgcgtacctttccagactcttcagaaactctgacagtagaacagcgcatgtgacaccgattcttcatggtttccacaacggctacaacacggggatttaatgattttcctaagggctaggttttgggcagtggggagggtttggtttgtggctcggaaagcaaagtgcttcaccttggtaggtatcgaaaggtgccaaaggattttccaccaaggcgagggagaggaggaagagggaatgtcaggtggaccagtagtggaaaaactaaggtgatagcctgatctgaccgtgtaaatcccagatgatgagagttcccagatcagatcatcctgggatggggtaagagggaggggaataga

SEQ ID NO: 270359 - DNA, 820 bp, Cannabis indica
ggcttggtaagagtagttttggtgagggtttgagaaaggaaaatcatgggattcatctaaaggcttgggataaactttgtattcctaaatctttgggtggtcttggtttccagaaaacaaaagagatgaatcaggcctttctagctaaatggggatggaatatcctcaatggaagccaatctctgtgctgtagagttataatagccaaatatctcaaagggaaggactttcttagttgcaggttcaaagattctgattcttggttttggaaaagtgtcgtcaaagcaaattccatcttgaaataaggggcttgcaagttggtagccaatggtacgaatactaagatttgggaggatccctggattccacatcgtaaaggcttccgtccgaaaccgagggaggatgcctcttccaactttaactgtgtggctgaccttatgttaagtaacggacaatgggacatccaaaaactccgagatacctttgatcgagaaacggtctcggatattctaaaaggtggccatccttctgggattggttccgatagatggatttggacgttagaaagcaagggttgcttctcgtctaaatcggcttatctggttcaagcaatggaaagagctcctcactatgaggttgctccgaagctctggaataagttatggaatagtaaaattttggagcgacacaaggttctgtggtggtgtatcctttccagtgctcttcctgttagagcggtgattggcaagagattccatattgaggacactagttgccccttatgtggcgtgggggaggaatcctttgaacatcttttcct

SEQ ID NO: 270360 - DNA, 437 bp, Cannabis indica
taaaataatttccaacagcttcttcaaaagcattgacaaatagaaacttagacgattatcattacttctaatttcaagttatattgtactttgtcaaccaccagccttgtacacaaatccagaaacaaaaaaaaaacacaaaattttagaagaacaacgattcacataaaaaaatcagaaaaaaataccagcaacccatagatcaaacatctaaacaatattctaaaaaaaaaaaataacaaccaataataaaaaaaaatataaaaaaatacatttacccattactcaaaacaatgatccgtgttgctgaaaaaacttaatacctacctcctaactccggtccacctccgactactgtagcttaggattaaagtcttctactttcagtagatgtacatagtgatttggttaagtaggaaacaagagaaaagtagagt

SEQ ID NO: 270361 - DNA, 855 bp, Cannabis indica
aataaaacatacttggtagtaaatctagatcctggtaaaatatttccaacattatcacccaagaacatccatcaagggccaagctttggtagatttcctgatagaaaggataattccatatgaaaatccacttatcttgcgagacgcagacacttgaaaattgtacgtggatggagcatctaatgaaaatggatcgagtgcaggggtgatactgatcttgccagaaaactttaagtttcactatgccctaagattctaatttgacacttcaaacaacgaggctgaatatgaagccttgatagctggtttgagaatagctgaagtgttaaaagtgaagaatcttatgttctacagtgcgcagttaatagtaaatgaaattctaggtgaataccaagcgaagggtataaaaatggcaaaatacttggataaggttcgaaagaacttggaaaaatttgattattttaaaattgaacaaattccaagagaacaaaactctaatgccgatgccttggaaaaactggtctcgtagaacgaacttgatgaattgaatttggtaccggtggaagtgttaaacgaaccgaatatatgtgaaaaggaagaagttgagatgattaatagctcgcctacttggatgacacccatagtcaactatcttctcaaccggcaacttccagcagacaaaaatgaggcatgaaaactcttgtattcagtgcctcaatacacgatagtagaaggcaaattatatcagaggggttattcaatgcctctcctacgacgtgttctccccacagaagcaagtaagataatcaaagagatccacgagggctttttgtggagaccatgcaggttggcaaa

SEQ ID NO: 270362 - DNA, 556 bp, Cannabis indica
atatgctctctgaatcattcgacttacagtgtcacatacaacaccaatgtcccacataaacacaaaacatgcccataacatgtcacaaactagctcagtcttgatcccagcctacgccgcaacatattttctatctacagcttgcagcaaccatgcaagtcttcgcactgaacaacccatctgttgtagtgtttcccccgggattcacacatcaaaactaaacaagtaccctgattcttcaaacatatgaattagtgggctcccccacttcaacttgggaagaacttctctcttagaggactacccctcaagatatagctcgcaagctaaacgcatacttgtatatggtccatccattccaaatgtcactttgatgaagatgctaaactaatgcctcaatcattttgactcttcgcccctcgacatttctatgttgccttagtaccttaatcttgctgactttcaccttaggcaaacattgccatggtgttatcttagtacctgagtcttgcagactttcaccctagataaccggcagtgcctgtgtcccgagtct

SEQ ID NO: 270363 - DNA, 522 bp, Cannabis indica
tcatttactagcttatttttgcatgggtctcaagtgactctttgcactatgcagatcttgtgcaatgtatttttctttcttttctatttagatagatgttgatcaaatactcacaagaaattttatttgttgatgagtaaagtagcttatattttttagatgacatatgtgggaaaattaagactaaatgtgcagaatcaaaataacaaaactttaaacaatcaaacagttagcaatgacaagattaacaatcaagaacaacaatcagataagaaacaggggcaaacagagtatgtaaaaccaaaaaataataactacagaaaataaagaaatcaacaccaagatatatactggtttaagtctaatagatcaatgtaatctatggctctactccagttcgggaacaccaccataatccttctttatttattgagcaagaataattacaatacaatcgatacgagattctctgttgagttctcacaaagtgttttaactgtcacactttacaccaagaatctt

SEQ ID NO: 270364 - DNA, 843 bp, Cannabis indica
ttatatttatattatgagttaacaaggtaatgagtgagattatgatcctactaatctagttcaacataaaattttaaatttgctataagtggataaataagcgtaattttttaattacggagattcatatagtatgtgtgaatgtaatgtgaactatttgtgcaacaaaaatattttcaggtttgacaaccttggacactcgatcagggtccaaaaatgtcataataggcttaattgatagaattaatgggaatattttgataagttgataatacaagtactggagtaattaggagtatgtagaatttaatgtagcgccctagaagtaaaagtttcttagtaactaagaaatgataagaaaattattaataacaaaatttttattaatattatattattaaatatattattattattatattattataataatattaacgtaaaaaaaaaagtaaaatacattatatatatattttagtcagaatataataaaaaccttcaaacagagaacgaacccttgttcctacccttcaatagtgttttcccccctatatctattttctttgattttcaatcgaaaacttagcgatctaagctctggtagtagcaggataccgaattctcaaagcagagaagcttaaggtaaggtttaatttattttaagattaataacaattggtttcgtatgggggttttgtgaattagaatagttatgaaggttctgaccttataggattgttctcgggtagtcatgggaccagttccgatgttttcttgctgaaattgaggtgattttgggttagaaattgagtttgcaactttttaaagcttagtccgagcgtt

SEQ ID NO: 270365 - DNA, 1515 bp, Cannabis indica
atatgaccactcatcaatatacatatatatgtagaataattatatttctacaattatgtagtcaccaaatgattagatttaataataagaaaaataccaaaataatgctaagcatccatcatattcctcatccataattgttaaacaactatttgaatgatgcagaccacccattaataattaggtacatactcaatcattaaaagaatagttaattcatatctaagataagactaagctaatcacactattctccatcaatgattccctctcacccacaagtacaaatctgagttcttggaagaggaaatatagggggtgagcttataaagcccagtaggaaaacaactaatatcaaatgacttgctatataattaaaaaaatccctccatggttagctttttaaacaaaaatgttcatcatcatcatcatcattatgtatatacaaaacagagagaccacaaataatcacaagagacaagctacccgtgcatatcacaccgtccactaaatccctagctctcaataccaatcatgaaaaacgacatccaaaacaaggtagtcgcccagatttaattcacatcctgtaataattataggtctttcacctacaggtgagtgcacacctaatctatctatgatgacacatagagactaggtcgtgaaacaacaatatgcacaaattatgatcacatggttctcattagtacaaccaaaagcaggcaaataagaataataaaagaacacatcccttttttttaagaaaatccagcagcataacgactgtattttgaataaacccaaaatcataacttgcataaatatttgtacaaaaatatatttggcacttagtgccacagaacagttcagaaaaatatacagattaagttttaatttttcaaatattttataattcataaaaaattgggatatgcctaatgttattcaacacataaaatcaagtccaataatcaagttgagttcctacctccttaggatcgtcaaactttctccaaaagagacgctcctaagcccccgattcttaagttctaaataacttagtcactcaaaagttactttgtcctacactcttcaattaaataaataattatcatcattgtcacgtactcttcaaatcgagtctaacgacatatagcatagttatatttgaagtttaaagtttcgaaacctcacctaagtggtgcataatgacgattagtagcggtagaaattagtgtaccagaattgtcgctgaaaataaatgtagtatatatgaaaatgacctctttgacaagtagatcatggatgtacaactcattagcccaaacaaacaccggaattgccagaaaatgcttccaaagaggcgaggacatccaaatctcatcggaaaaagtaatgagttgggcaaaatggcttagtgaagattgttctccttgggacgctgattccaactgtaccgaccattcctcaaatggtcaccgaagttggctttaatgttgattcgaagttttgacg

SEQ ID NO: 270366 - DNA, 562 bp, Cannabis indica
tcgaaagaaaaaattgaaagagaaaaggaagagagcaaactcaaaagaatagatacccaaacacaaagaaggcaaaagtatcaaaccacgaaatgccaagaaccgccagagaccgatgcaaggaggagagggaaggggcaggagtgtgacgggcgtcgaccgtcaccggagacgatgctgaatgcaccctcacgtgtcggcgcatgggatgttggatagcaggaaacggcggcgcgtggggcccatgcgcggtgaatctagatgccaaaattttgggttttgcagtgcggcggctaggcaatccttctatgtgggcggtaaaaaaaaattttcactccaaatagggtttttgaaaaacaaccctaaactcaaaccctatcttttttaaccctaatttcgaatttcgaattataattctaaccctaatgctctgataccatgtagagaatggtgaatagaattatgtgttgtattcaataaaatagtatatatttatatacgaagctaggagactaaatgggaaactactaattacaaaataggaaactactaaatacaagtt

SEQ ID NO: 270367 - DNA, 634 bp, Cannabis indica
tgtaaaggtatgttacttgttgctattggtattgatgctgataactctatgttcccaattgcatatgctatttgcgagaaagagaatactgatacttggacatggtttttaaacttattgaaagaagatttagaagttaccaatcctacaaatatcactatgattagtgatagacaaaaaggtttagagaatgctcaaggctctacatttgagggtgcagagataagattttgtgtgcgtcatttacatgccaatttcaaaaaagattttccaggtcttttgttgaaacaaaagttgtgggcatgtgcaagagctacaacactagaggagttcaaaagaaaaatggctgaactaaaggaggccaatgaaaaggcctatgactggttgatgaagaaaaacccaagtgaatggagtaagagtcatttcaaatttaatgttaaatgtgacatgttattgaataacctttgtaaatgttttaatgctgcaatattagaagcaagagagaagcctatcattacaatgctagagaaaattcgattctagttatttagtagattttgtatgaaaagagaaagtgtttcaaaatggtcgtatctagttggaaagagggtttggaaagttatagagaagaaca

SEQ ID NO: 270368 - DNA, 827 bp, Cannabis indica
tttaatttagttgatataatgttgggtaaataaactcaatgctacttttttttttttttgcctttgatgttgtgagagaatgatttaaaccggccagaacctctgatatgtaaataagagtagtgtgatatcacatactgtttaaccaaaacatatttcttatttattgcgaaaagtaaattgaaccttttccaaacatattcgagggaaagcatgtttctttgttggatgtgagttttttaaatatttcattgtagaaattatgatcgatcatctatttagtaataatttacatgttttaaatattttttcatgcttaaatatataatttcaattaaaaaacttaatatagcacattatatatatttaggaagtgaaatagttttttatccactttaatttgtaccgagtgtggtacaatcaatttctgaatatatacataatatatataatttttcttttttaaaaaacatatttataaaatcttattttaacatattccattaatgttatactgatatttatagatcaataaataaatatgtctagatactatacaactgtatatgaattcgaagcctccaacctatttggtgcataggctaattcatatataaaattatttgaaaatatactaccaagagtacgtatatgcatggaaaaataggcatacaaaaaacatacataaaaagcagacattagataaatagactattatagtatacaaaaataatagtatatataatatataagaatttaagagtttttgtgatcgatctactaattaatgattacagtatcaatgctttcaaacataaaggatagaa

SEQ ID NO: 270369 - DNA, 882 bp, Cannabis indica
ggagggatatgcaacatcaatatcagtactactggatggaaatacagtcaccaattcatcacaatcacaaatatcgatcacatccaaagatggaaaattacccataggtaatgccacatttagactactacaggaaagtaaaataaatatcttcaaacaggggaaaatgtcaccattttgataatttgtattgatagatgaccaatctaatgcagttatcgatgtgagacgcatctcttctaaaactggaaatgaattatgcgaagaattattacaaaattcattaggtatatcgattgcgccctcaatatgaagctctttcaatgaactcaggtgctgaaatgatagtaaagacaaacaacaattttgaccttgtagagaaactacttccaaattagagtacactggatctactacccactccggcaatttcgtaccttcataaccgactatctcgaggctcttcaaatttggatgtggttggagtgcagtaagtatttctctgtccctaatagaatcatttgttttaccatcccattccaatgtaagctctgtgagatactctttgttctttaagttgacttccaaaacatcactcacttctctaacatgctcaagccctgaaatacgcaagcgtccatggagattatccaacttacccaactctttgatcctgtacccatcattttcacacaaaacaaaatcacttaacttttgaagatttttcatgttgcaaatcctcggcggcatctcttttactgacgaaaatgagatattaagatggcgaaggttgattagctcacatattttggtaaggcaaaaaagtgagttgttcgcaagattccaacaagagtgtttccagattatacagcagacacacag

SEQ ID NO: 270370 - DNA, 826 bp, Cannabis indica
tgttctccaatatcccccctcaagatggtggctatttttgctcaccaatcttgaatcaccttatcacaggccctgccattttgctcgcttattttttgttcggatctcaagcatctttgcaccatctggatctcgtgcggctggctaaccatctggataggtgtggatcgaaagcccgctagggatatggctctgataccatgttgagaatcatggggttccatcttaaaaccaattggcaatgagtggagtagcccatgttctttatatatggctcaatacttttacatttactccatgtgggacaatgttctccaatatacagtagaagctagaacagtactcaagtgatcactcaccaccataccaaggccactacaagtacaattttttatcaatagcaacatcactattaaccttgatagaactagccaaaggacgagaccatttcgaactaatctcattagaaggtaaagagtttgtttgtccctgaaagagaggaggcccagccggagcctgactatgttggaagttccacagaaattcttgagcccaatgcaccaccacgtcaggagggagtttaatgttattatgcaccattttatttcttttgtaaccagatatgccacaaaataaccataacttatcaattttatccttaggcaaagaataagaatcaatgacattgtgaataaagttaagaaaatactgcatgagtggaaagagggttacccgaaatcaaaattacaaagctccagagtcaaaaagctcttaccccataaataattttccgccttcttgtttggatcgatctatatcactaaag

SEQ ID NO: 270371 - DNA, 648 bp, Cannabis indica
atgtggccgattactcaactgtgatagaggagattacttcttcaattaccgtggatcagaatttggctttacttaggccagttttggaggaagaagttagaagagctctgtttagtatgcatcctgataaatctcctagtcccgatggtatgacctcagactttttccaaaaatactcggaaatagtgaagagcgatgttatgaatcaagtttgccaattttttacggatggcagtattcctgatggtctaaatgacacgaatattgtttttatctcgaagaaaaaacaacctacttcgatgggtgaccttcgacccatatccttgtgcaatgtcttgtataagatagtgtctaaggtgcttacgaaccgtttaaaagaagtgttgcctcaggtcatatcccgaaaccaatctgctctcatcctgggatgccttattactgataatattatgatagcgtttgaggttatgcactatctcaaaagaaagcgtaaaggcaaagaaggctatatggcgctcaagctggatcttagtaaagcttatgatcgtgtggagtgagactttctttgagctatgatgagtaaaatgggatttgacttgcatttcgttgatcttgttattgctacggttagctctgtgcggtataaaa

SEQ ID NO: 270372 - DNA, 670 bp, Cannabis indica
tctcgctctaaataccattcttttacttttagtgataaagttgcttctgttctcagaagttggtcctccaaatgtttctctagggcaggaaaagaagttctcttaaaggctgttatccaagctatccagacttatgctatggcctgttttaggattcctgttaaaatctgtaagggaatcgaggctgcgatggctagattctggtggggttcttctggggaagctaggaaagttcactggaaatcttggaagtctttgtgtcagtccaaattcaggggtggtttggggtttaggtcccttgtgcattttaaccaagctatgcttgcaaaacaagcttggcgtattttccaaaaccccaactctttactgagtttgattcttaaagcaagatactttcctcaatcttctatacttgaggctgtccctggtcacagtccttcgttttcttggcgaagcattttacggggtagggacctgatggcatctgggctaatttggaaagtgggtaatgggtctgggattaaaacactgggtgatcactggctcccatcaataggtttaagttttttacttcaaataaccctcccccttcttcccacttactctctttttttatctctgactcgggcacctgggatgtgggaaaattacaatcttgctttgatgagtc

SEQ ID NO: 270373 - DNA, 614 bp, Cannabis indica
aaaaatgaaacaatatcgcacaataaccgcataatgtcgcacaagaaaaaaacaatatcgcacaataatcgcacaagcacaaaataatatcgcacaatgtcgcacaaaaaatacaacgagaaaataataaaagaaaaacaaaaatattatcgtataatgatgtaaagatatcgcacacaaatcgcaaaaccattaaaatagcacaaaattgcaaggacatcgtttaatgtcgcaaaaaagaatgaaagtcatccctgatctctgatttctgttggcattgcacaatagtgtacaaaatcgcaaaaattcgaaaaacccagaaaaaaaccagcgtttgggtatgaactctactttcatttcagatcacaaaaatgacataatacaacgaataatgtgtagatccatgaaatataataaaaactaacaatattttgtataaaaaacacttactcgttacctttggagtgagaaaaatgaaaatttttgtgaggaaaataaagcttttggaggtccgactgcgtggttgaggtgcggctgaggtcgtcgtgggtggtggtccggctggttttggtgggtggtggtgacggctaaggaaaaatgagagagagagagag

SEQ ID NO: 270374 - DNA, 1388 bp, Cannabis indica
atggagttaagccaatttgatctacaatacatcccaggcacttccatataagggcaggcgctagcggacttcatcacggagtgccatgaagcaggagctaccgcaagcatacccacaccgcaagtcccagcgtggaaggtatttgtggatggcgcctccagcgagaatgggtccggagcaggggtcgcgatgatgtccccgaacggacttcgactccaggcagccctacggtttgaattcacagcttctaacaatgaggctgaatacgaagccttgatagcaggactcagattggcaaaaatcgtgggggccaaaagagtagaagtctacagcgattcgcaactggtagtaaaccaggtttcgggagagtatcaggcgcgtggagaaaagatggccgcatatgtggcaatagtccgggaactgcaccacgtgttcatggactataaagtagaaagaatacctagggaaaagaacgctcacgtagactgtttggctaagttagcttcagacagtgaaattgagaaactgggggtggtacctgtggaacgcctggcagagccaagcatcaaaatcaaaaataccatagcaacagttgagcaagagcccagctggatggtccccatcatcgaatacataacgaaaggcgagttgccccaagagaaggcactatccagaaggatacaatatcaagcgcaccgttatgtgatgatggacaaaattctctatcgaagaggactcagcatgccttatttaaggtgtgtatcggaccctgaagctaagcaaattatgctagaggtccatgaggggttctgtggagatcatacaggaggcccaagtctctcaaagaaaatattgagacaagggtacttctggccaacaatgaaaaaagattgcatagactacgtccagaaatgtgattcgtgccaaaggttcgcgaacatacctagagctcctcccaatgaaattaccctaatgactagtccctggccctttgcggtctggggaatagatcttattgggtccctgccaacaggaaagggaggagtaaagtatgcaatagtagcagtagactacttcacaaagtggacggaggctgagccaatgaagactataactgctaaaaaagcactagactttgttatcaaaaacatagtatgtcgatatgacctgcctcacaaaatagtcttagataatgggaaacagttcgactaggaagaattcatcgacttctgcaaccaacacggagtcgttaaaagcttctccgcaatggcaaggccacaaacaaacggacaagaagaagtgatcaacaaaatcctaaaggtcaccctaaagaaaaagctgctggcctggaaaaacaattggcccgaagaattcccaagagtgttatg

SEQ ID NO: 270375 - DNA, 685 bp, Cannabis indica
gaagtgaggaggttgttggaggagtttgtggcaattcggtcctgcataaaggggtggggggggggacatctcttcaatttaattctcctaaggttatggagaaacatatgggatatcatgttggtgttgaccatagtgggaatgagatagatgctaatgacactgatattgaggatccgaatgatgatgtcattttattggattcgaaaaaagaggcgcacaagggagagagtgcaatcgggccaacgagttgtgggtcaacattctattgggcagggtaatgattctgctccaaaggataatagtagtatggatgttcaggtggctgaagttaatcaagaattgggcttaaaaaacaggcctttggtgggtgctgggatccaggcccaccgctcattatgagtatcatttgctggaattgtcgtgggtttgggaacccatgggtttatcaattcattgtgcatcttattatcaaaaagaaacccaatttcctatttttgtgtgaaactctctgtcgtaaggacaagttggaaaggctacgggttgcgattgggtttgatggattgtattctgttgatgcgtagaggacatagtggtggggtggccatgctttggcgtaataatgatgatgtgcaactgcttagctatcttttcatcacattcatattcagatctcggaagtagc

SEQ ID NO: 270376 - DNA, 258 bp, Cannabis indica
gtttccaaagtcaacttacgcaggggtagggatgttggaaatattttaccaagatctagatttactaacaagtatgtttcattaacatcctaatataaatttctaaaacaatgaaataaacacataagggtttaagaaaaccttacattatgtgcatcggaatataatgactccttccgttcagatctttagcccttgattcctttctgtagcagagcatcaccaagatctgaacctggatctctctctctctctctc

SEQ ID NO: 270377 - DNA, 522 bp, Cannabis indica
gaaaagtcatagggataggaactctcaatttcgaagggcttcctagactgaagaatgtcatgttggttgatggactaaaagctaatcttcttagcattagtcaaatttgtgatcagggttacactgtgaccttcgatagtaatcattgttatgtgtataatattcttgatgaaattgtctggcaagggttcagatctgatgataactgttacaccatcactacctacgctacttgtcactctgttattgataacaccactaatgtatggcatgaaaaacttggtcatattcattttaaatatctaaggagattctctaatgcaggaccatgtcagcttggtaagaaactgaaaatttctcataagagtgtccctgatgtgaatacttcaaaagttctcgaactcccacacatggacttaatgggtccaatccaggttgaaatcttgaatggtaagagatatatttttgtgtgtgttgatgatttttctcgattttcttgggtggattttttgagagaaaaat

SEQ ID NO: 270378 - DNA, 951 bp, Cannabis indica
gacacttgacttttgcaggaagggtggttcttatcaactcagtgttgatggctattcactcttattggagccaaataatggtgttgccaaaaaaagttatctctgagattgaggctatttgcaggagctttctttggagtggcagccaccaactcaagggagttgctgcagtagcttggaggaatgtttgcaaaggaaaatcagctggaggtttgggtcttaaacaggtaactgaatggaatattgctgctatgtttaaatatgtttgggcaattgcaaaaaaggaagataatatgtgggtgaaatgggtacattgtgtgcatataaaagatcaatcttggtgggaatacaaatccaaaagtaatgatagttggtattggagaaagattgtggagttgaaagagagagtaaaagagctttatgattcagaggaaaggaagaatatgtgcaacaagtatgtgataactcaaggctatttcaaactcattgctacagaaaacaaagagcattggccgagcattgtttggagtcggctaaacttcccgaagcatagctttgttatgtggatggccatgcttaaccgactcaagacaaaggacaggatagttaaatatcatcctgaaattgataagacttgtctcttttgtagcagtgaagatgagacaatggaacatctgttttttgaatgtcatgttgggcaggtatgcattaatcaagtgaaaagctggttggactggaccatgagcaaaagaaccttgccaggtgtaatcaaatggcttggaaaggccaaattgagcaagtttcgtcgaggagtgttggctgctgcactagcagccttggtatacatattgtggtgctcccgtaactccattttttgggaaggaaaagttgtaaaaagtgatacaatcatagcacaagtcaaaaaattacaaagagtagaatttcttgtat

SEQ ID NO: 270379 - DNA, 734 bp, Cannabis indica
  modified_base (629)..(629): a, c, t, g, unknown or other
gatgttaatgaaacatacatggtagtaaatctggatcctggtaaaatatttccaacaagcggttttttcaattttcaatttcgttgatttcggttgaaacggtgttctgtaggtcaatttgaacggttttttcaattttctggattttatgctcacccctagaacttaggttttattttgctcattatccttctatccaaaaacctcactgtaccttaatggtagatttttaatggttcacataattttaatttttaatattataaaaaataatttaaaaattataaaaataaaataaataattttatttgctctctctcttttttttttcttttcttatttctcttttcttttctcttacttattcttcgcccgacctcgacaaattatacccaaaccaaaaattccttacagcagctgacgacccctaaaaaattttcagccgctaaagatccccaaaaccataaagcccgacccaattttccctctctcaccatacctttctcttaagaaccctcactctctctcgatatctccttcttccctagctcgcgccatcatgatccaagttcgatgggttgtcgtcagtcgtccacaaccaagatggaggccatggcggacttccacgngccccaacccacggactaaactcctaaaagtttccactcatccttcgccgttatgtagaactcgctcgggagtgagtctctcacgtctctgtactctgactttct

SEQ ID NO: 270380 - DNA, 745 bp, Cannabis indica
aaatgtctccaattcacaacatcgcgaaatacatcgcgaaacaccatcgcgaaacatcgctaaatatcgcaaatcatcactaaacttcatccctgacctcagatttgttctatcattgcaaatacatcgttaaatatcgcaaaaaatggtaaaccagaagaaaaaaacgcaaaaaacgagagaagtttttttgaaatgtaaggcggccgaacaacactagctccggtgatgggtcgtccgactggtagagtgtgtgcgtgtgtgtggtgtgagtatcctagagagagagagatcgatgtttggtttttatttatttaagggtaaaattggatgagaaaaatggtgtaaggatattttgcatgatgcaatatttcgcatgatgcaaaatatgctagcatatttttagtggataaattaattttaagcatataatatcaaatttcccttctaggatgacactcaattttttttccctttcttttctatacattttcccattttatttcagttttccttttcatttttcaattttagtttcattttgaatcatttcaccacgatcaaaatatttctttccaaaaaattactccaccgcgatctccaacttcagttgaagctccaacccacgatttctctttctatttttttttctttctatccatttctagataaataattatcactcgttcctcttcttctccatctctatctgtgaaaaacccaacgtgttgagaagcctatttct

SEQ ID NO: 270381 - DNA, 554 bp, Cannabis indica
gcacgaagtagagagggagagagagaatactggtagacttaggttagaaattttagggttttagttagaaagagatgaatttgtattcatctatttttttttaattatttatttatatttatttttagggaaattaattttttttctaatcaaatttatttattcctatagtgacgcgcgaaatgtgtttgggtatatgtgtacctactctcatagcgtgtcactatatcttaatattaaatttaaagtgatgatatagtgacacgctaggcaagtgaggatatatttttccaatctttcttggtgtgactctataggttagcttttttaattaaaaaaaaataaaaaaaagtatggatattacttttagtgacacttcaaacttttagtgacccacattatatgtgactaacactaaaaatttagagtctaattatgtgtgtcactaaaaattactcataactatttagtgacccgcacttttgtgcgtgtcactaaatagtgtcactaaaaggcaaaattgtagtagtgacttaataagcagtaaggatttc

SEQ ID NO: 270382 - DNA, 650 bp, Cannabis indica
ttttctttctctttcttcttcttctgccattctcttcttcttcctatcgagagataaaaactgttccatgtatataaaccataaaccaaaactgttccatgtatataatatttacgatcttgattaacaataaaaaattcaaaattaaattaattttgcattaaatttcatcacccaaattgatctgccaggaacaatcgttatggaggtaccgttcaaccagttgtgaaacttcgtcctctgtaagtgggtctccaagaacccgactccattccttcgccagcttatccaggtcagggaccttccaggccggagcagcagtcccaatccatttacggtcaagccggccaggggcgaaaggtgagaatttgggggattctcagaatccgatgggttccacggagggattagactccgaatacgagtaaatgaaatcaaagggaagaaccgacttgagaggtcgttgagtcggggctttcttggatttggggtcattgtttcgaggttgggttttcttgggttcggagagaagagaaaagggcgggtcgtaagcgtcttgggttaggaaacgagaaataagagaacaacctgggttacaggttcagccaatttggggggggggggtctgtcgataggaagaagaagaagaa

SEQ ID NO: 270383 - DNA, 2239 bp, Cannabis indica
gctccattatctatcatagttcgagccaccgttttgttggcaatctgtacttccacgaccaacggatcgttgtgcgggaaattaactttgacaacatcctcttcattgaacgttatggtgggttcccctacccgtggtacttttggcttcctttcttcgacggccaggaccacttcttttttgcttgtgctatgaggttcgggcataccttatctccagctatgtgtggacccccaattataacttgcaaatgcccatccaccagtggtggcagtaaatcttgattattgtctgtctgggcagccctctgattttgatcggtcttgacatatttttgcatgtgcgagttattctttcttattaaaaattgaatttcccgcttcaaattgttgcattcgttggtgtcatggccataatatccatgaaatggcaaaacttggacatgtccctcttacttatgtccttttaatgggagcaggtttcttgtacggagctactgaatgagtagccatgtaaatggtctccaaatcttcagtcaagacagagaaagcagtgaacttggaaggattttctctagggacctgtatgtctttgccagcaaatttttcctttttccatttttcccattgccttgcctgttgttgttagaccttttaacacccgagcttgaattgcttgggtactaggggtgctaaacggatgttccaacggagggaacttgagactggcctggcttaagctcgacttttgctcattgaatggcctcttcaagcttgatgaaaccatctgcgcgatcgaggaagtcactcatagaatttactggtctgtctctcttgatgtccttccaaagctccccgagaactctgatgccccccagtattgcggttaatttcccttcttcggttaaccatgcaactttcgtcgcctccatcatgaatctgttgatataagctcggagaggctcccctggcatttgcttcactttgaccaggtcctctaaatgcaatgggagttggcgagaagaagagaattgtgcatggaattctgaggagaaagccttccacgagttgaaccttcctggtgtcaacttgaagtaccattgttgggcagcttccgagagagtggtaggaaaaactctgcaacaaatatctcctcgtactccttgcaagtccatttgcatttcaaaatatttaagatgtgataagggatcttctttctcggtatacatcttctaggtcggcatcttgaacttatgaggcaactctagcacattaatctttggagtaaaaggggatccacgtgctcgatccaactcgagatcattgttcttctgaccaaccagaccttggaacatgttttttagttcatccaactgtgcttgcatggatggatgaacttgtttggccaagaggccaaccagggtcacgtcaggatcttttttagatgaattttgagcacgagtcccgggctgagtggttggcgagacatactattcgtctaaccctctccttttgttcaggtcatccctgagatcatgagttgttcccaatctattaaatacagatgcattaggttgtcttagtgactggttggtttggccgatcacttggccagaaccattagtctgggtggagttactaggtataacccctcctaacgagttactagataaggtctagctgactaccgcttggcccataggtggaaactatgaccgaggattggatggttgaccgtcaaagtttgggaagcgttcccagttggatcttcgtctgacttgcccagcgggatgctagtcgcaagttgctgattagtaacttgataggctcttcgtatcagtacggtggcctgtcttgttcagtcgtcaatggctgcttgttgagccctcaatgtttccacctctttatccctccattcagcgaacagacgcctttgctcttcaaatgcaaggttcactgcaatacggagctcttcctgatcatgatgcagagtattagtatggccttgcatgagtctaagagcatcatagaggttctggatctcggtgtcgtctccaacggttgttcggacatttgttgctggcagaactccagtactgggaatacccagattggttgctgaactggtatttccaatctgttgcacaccgggtgcgattccatttaaaggagacgtcacaccatggcccacggttggtggttgcgtgatgggttgttcaagatttgtggctggtggaacc

SEQ ID NO: 270384 - DNA, 550 bp, Cannabis indica
ccaaagcaacaaagaagcagccgcatacttcgaggtccttagagaattatacaaatatataattctagacttcatgtcaagcctacccataacccaatgactaacagtctttatgtgcattgataacaacacatgatcagcctgactccaacgtgtaccacatcgaagacgtttaccctttatgaaatgagcaatttggtgctttggatgaacaagagacatttgttcattcgtacttacatatttctcatgcaatgacctgatgctactattgaaatagcaatctgtagttgtaatcttcatgtttgttgcagtagaatacttagctgtctttctcaaataataaaaaatcacatccatatgctgaaaaaattgaaatcatgaataaacaaaaacatcactaacaaaaaacataaaaacaacacaaaacttacagaatcactaagaaagtgatcacaatgatgcaacgagtgaaaccacatctttcgctgaacaaattcacaaccaaaatcaaaacctggctcaatcttattatcagcaggaccaaaat

SEQ ID NO: 270385 - DNA, 786 bp, Cannabis indica
gatctaagctttgcatgggatgatgataataaactttcatgatgaacaagatgatgatagcttgatctctcgctccttctctttccggtttgcagatccttctaaacattttcttatagaaaagcattagttagtgtaatgagaacaaataattaaggaaagaaaaatgattattgatctatctttgtatgaatgtatgtataattttgtttgatgctatttaaagaacccaaaaaaaaaaaaatgccatttcatgttggtattttcttgatcaacctttctctgcatatttgataaaaattatcaaaaattcagagattttttacttaaactaaaaaaaaaaaaagaaaaaaaagattgacttggatgaagattgtagtttaagtttgagaatcattattttttgtttcaaccaatctatatgttgttttctcacttaaagttatagaatctttgagggtttttattaaaattaaaatgaagggtggtgagaaggttagttgggttttatttctttatagaaaaaggaatattactttgtcagagtaacatttctttttctttattcttttgtaggaaacagattctatatgaaataatttagtagaaagactatcaatcatttattttgttgcatacataagttattctaaccattatttgatatataattgtaaattgtgattgccaatcttgattattatactctgttgagaatcatgggataccatgttgagaatcatgggggttccatctcaaaaaccaattggcaatgagtggagtagc

SEQ ID NO: 270386 - DNA, 814 bp, Cannabis indica
aaaattgacgaaattgcccacgggcttctacttagcaaaataaattttatttgggttcttcgtggtgatgcagtgagttatgaagaaccttatgtccttccatctgggtttgaagatgagattaaagatagagctttgattgtgacatggacgaatcaaattgatgtgatctcacactctgccataggaggatttttaacacattgtggatggaattcgacactagaaagcatttggtatggtgtcccaatgttgtgtttccctctaaaagcagatcagttaactattagaaaattattagttgatgattggcgaattggtgtcaacctttgtgataagaaaccgttgacaaggtttgaagttgcggagaaggttaatgtgttgatgagtacaaaattagatgataaattgaggaaagagatgataaaattgagacaaatatcgaagaatgccttggccgaaaacggatcatctgaaaggaatttgtgtcaatttgttagcgatttgaagaacaagataattgaaaaagtatagtaacttaatgtaaatgcaataatataggcttttggtgtagtttttttttttttttttttttttcagatttattctttttaaacgattgctttgagcccttcatgtttgtttgtttttgtttttgttttttaaaatcatcataatcccttttgttttgttccctgcttattatttacttacattcttaattcaatggttaaatttaactatcattctatgtgtatgctgttgaaaaataatcaagcaagagcattgtaatcactacaatcaattactaatc

SEQ ID NO: 270387 - DNA, 726 bp, Cannabis indica
gcttggctttaatacttttgatcactcatttatctttgctcatgatgagcaaatcatccacatagagcaataggaacatgactgtagattgctctatattcttgaaatacaggcagtaattgtatgcgaatcatttgaacccgatttgatgcatatatgtatcgaattttcattccattatcttggggactgtttcaaatcatacagagatctattaagtttgcacactaattcaactcctttccctaccacctcaaacccaggtggttgcttcatataaatctcttcatcccagaatccatttagaaaagcagtcttgacatcaaggtgttcaacttcaaactccaaatgtgttgccaaggacaacatcaaccttattgtcttgtattttaccacaggtgagaagatcttccacctaagtaaaacccttagccactagagtggctttgaatctcatgggttcatccttattgattacctttttcaccttgagaatctattttcactctacaatcttcttgttctctggcttcaacacaactacccaagtcttgttctttcgtagtgaatccatctccttgtccacggtctgaagccatttatacttgtttcctcttaaaattacctcttcataacttctgggctcttcaattttattggactactgccagtgcaaatgctattatgtctgcttctgcgaaccttgctagaggatgaatctctctc

SEQ ID NO: 270388 - DNA, 1232 bp, Cannabis indica
tcaatattttagactccaacccttggaatctagaccccgaccttgacccaaacctggaccctgatcttggatccaaaccatgactcgaacctcaacccctcagattcggaccccgacctcgacctaaactcaaacccggatctcaactcgaacctcgaaccctggccctagacccaacttaaataatagaattattacatagaaaatataaattgacactttatttacaaaaatacctccataaggtaaggacaacatttataccttttatataattttaattaccaaaataccacttacactatcacttacagtacaatcagacaatggttgcagggtggttgcgcggtggttgcatcagacgaatgttttaatcagatgatggttgcagagtagttgttgggtggttggctgaaggttgcatcacacgaaggtttcaatcagacgaaagtttctgtgtggttggccaaaggttgcatcagacgaaggtttcaatcagacgaaataactgttagctaaatatttatgcaactgtaatgcaactgttgtgaaatattaaaaattagaacagtgtttccacgtacgtaactctatcttcgtgtctctttatgatttaatatgaacaaattcaccattagaaatttggaaaataacaaaaatacatcaggataaacatttcactatagtattgatgtaatttttttttggattatacttgagttgcattgtttgggaactccagttcaactttttgagatctgccttttatggatctaaaaattgaaatcaggacattacttttatgcaaattaaactagatttccagttgaattttagtttcgcagtagtttttctacattttttttttatgaattcaaaacaacccttgttttgattgattctagtcgtcttctcaggtgaagttgccaaaattaatggtggttctctttctggttgaatttttgtttcggttgcgtggggttgctgcgtggttatgcgatagttgcccaggaagcattgatcctaggttgaaggtgtgtataagtggtatttgtgtaattttttttatttgggttgtatatttgtttatttggtgagccaaaagtatttttgtaatattgttacttttttttttttttggttaaaactgaaaaaaaaaacccttaataattcaacaaatgagactaaaaataaaatttacaaacgcaccttgtttttgttttttaaaaata

SEQ ID NO: 270389 - DNA, 643 bp, Cannabis indica
gaagcgaacaccaaatcgaccaggatttgcttcaactattgcgcgaggatcatcctcgtcttcgttctagtccaacctcttcaagtgacggacatttgagcttaagtctttcgtccagacataggatgatggctcgtacaaaaaagacaatgcgtaaagtttacgcatctgaccctcaagtggcctggcatgccaccttaccaagtgtcgaacaagatctgtccgtccaggaggagaaggattatgaaggggacgctgaggtccatgagattgacgagtaggacgatgttcgtcctagcagtccttctgtggcggaggaagaggaggaggttgcacccccaaactttggggagtataatgaggctggggagctaatcgatgcagatggtgacgtcctggttcagggtgtagactatgccggtgaggaatttactgtcgcagttcctcatagaaggcaaggcgctttgggtgccaggtgggtgagccctccgtccaaggtcactgaggaacgcttacgggatctcgaccaggatggctacctgggcgagttagactgctatattcccgctcacaacaatcgagccacaaaccctgaaaggggaatgtgtgcctggtcgggtgctcatgccaagcaaggggcatt

SEQ ID NO: 270390 - DNA, 697 bp, Cannabis indica
agaattggtgtgtaggcattattgggaacaagtattcaagagagtgcttctctggtgtacatggtgcgacttggttttagaagtttctcactaacaatgaatggctttttgatgatgtaagtttctaagttatgtactatttactgttgtttatattttttttttatttaatgtgctcatttctaacttatttgtatgaattgtgtagcatatgggtgcgtcatttcatctgatgagatggtggcaacactttttcccaaatgtgtacaaacaccggtgtaccatcatgccaactttatttctttcttcgttgaagggttgatgggatgcttggaaagatgcgaaccactgaggcattgtttaggatgagtccgtattggacctagtttgttgtgatgcagtttagttcttgccatcttggcaaaataagaactgcatatacatgtccatattcttagaggcttagaaacaataggcagctctggagctgaatttggagttgtggatgttattcatcttcgatttgagtactggctcaatcacccttgaggagttgaagaagttgatggaagattttgctagattttcccatcattattggatcagtcttgtttatttgacacctattatatggtcatggtccgttaggtgaaaacctccgaaaaccaggttagaccattcgattgggatctcatcg

SEQ ID NO: 270391 - DNA, 652 bp, Cannabis indica
tgatttttatttgtaggctattttaaagactattcatgcattttgagtcttttggaggaatttcagcatattttggtagaaagtagtgaaagtcggcgagctcgattgtacaaggcggaacttaattttaaattcggacgaacttaaaggcagaattcgacttagagctcagcataaaagctttagatctcgttcttagctttccagaacatcttaaatcgtctaatttcgagtaatatcgagagagttatggccaaaatactatcattcgtcgcagcagaaaatttctggaaaaaagatagcgaaaaaaaaaaaagaaagataaattttcaagaagagttgcaattttttatcttttgtttataagatgagttatctttatctcttagtgagatatttcctaatactattttaaatagaaacctaattctaagaggatttatctatccattataaatagaatcctaattctaataggattcaactaactttctcattactataaataagacctcttagactacaaatagagagggatcgaaaaactacagattaaatattatgattttttattaatgtctagttctgaatagttttcttttagttaagggttatttcaaaacccaaacatgaattcttaatttcattattg

SEQ ID NO: 270392 - DNA, 503 bp, Cannabis indica
gtgtgggttcgcgtcctgggtcttggtctaggttgggtccatgtcccaagttccaatcccgatctaagtctggattcacttctgggtctaagtcctttgttctgatccttgtcttgttcgagttttggtacgggtctaggtctagcttcatgtctgattctaggtgtgggtgtttcggttcgggtccgagtctatgaccgggtttgtgtccaggtatggaccccgatctgggtctaggttcgggtcccaagtgcgggtccaagtttgggtctgggtcaggatctcagtcaagatctacgtctagcttttcgatcccagtctgggtctcagtccaagttcaggctcttatccggatcccttaatgggtccaactctgtgtttgggatcgggtcccaaatttaggtccaggtccgggtctcggtttctgtctgggtacacgaccgtgtctgggcccaagttcctttcttattttgggtttgaggctaggtttgtgttcggttcta

SEQ ID NO: 270393 - DNA, 515 bp, Cannabis indica
atatttctagaaaaaattagaaaacaacaagaagatgaaataccacacataatcaaagtgcatggagtaaacattttatgtgtggaattaaataatagtggttatgtacttgtagaatagacacacttataatcaagggaaaactatatttgattattgaataggaacgtgatttgtttaataaataaattgctgtacattttgattttgttttatatttagattattttaatatcattccctgaagagaataaatagagatgaaatagtatttcaaagaatatagattttacatatactagtaatgtcagaagaaaattaatatacacattttattatttcataaaatcaatagtgcaaagacttgattttgaccgagtcaaatatatatataaaataataattaaataataatatatatatatgtatgtataaaaaaaatttaatatatataataacagatcccttcgtcccccctctctctctacctatctctctttttctctctcttcaaa

SEQ ID NO: 270394 - DNA, 994 bp, Cannabis indica
taacttttgcaaaacacatgatcaaaaatgatatttaccaaaatagattaattactaaatcaacaatgatttagagatgttatgataaaactggttacattttctgtatctattcgtattagaaattttcttaaagttgattatattaaaaaataaaattgttaaaaattgagctcagggtcctatttttaccattttgaaaaatatagggtccattttggtatttaataaaataaagggtctaattgataacttttgcaaaacacatagtccaaaatgatatttacccaaaatagattaattactaaatcaacaaaaactttaaacagtttggtacgaggtgttcaaaataatttgattatagaaaatattatgaaggagaatatgattatagggaaatgtgtaaactgtgtttggttgtgtagggtaataggtaatcatattcctgttaattaaattacactgtttggttgagtacatgaatcttatatattgttttaaaaaataaaaataaaaatatttttttattatatttatttaatgttaattatataaaaaataaaataattatttattaaaaaatttatttattaattagtaaatattaaattttattgtattttttattaattaaaatgaatatttttatatattttatcactacattatttatttttgtttgctatgttatttatgtacaccatccgcataaaatttatgtgtaatgaatatacatatattattgccaataatataaaaataactcaagttaaaaaaaactgatttcacaaactatatatatatatggtaatattttatttataataaatgataatattattggtatttaaatttatttataattcaaaaatgctatttaaattaatataatggaaggtaatgattcaatcctaccattttttaaagtatcaacattaccctcctcaagggtaattatattactaagggaatacaatccaaagctaaacactca

SEQ ID NO: 270395 - DNA, 431 bp, Cannabis indica
taaaaaaggccctgaggccgaataagatatatatataaaatagagataaaaagagaagtgtttaaacagctggagtcccagactcttggttcggttcttctcggccacgtggagcacgaggatctgttgtttgaacaggagaagcatcagcagcctgaccagaggttgaagcagcttggccgaaggttgaagcagccgcctcgttcccaccataagcaacttgggccgcgcagtactcaaggtacatgtgcttagcctcgcccaagtagtcaatgtttgcccgaagattagccttccagaaatcgaagatgagctcgaggccgactatctccagggcattgaccttctccttcaacctgtccacctcagtcgtaagctcccccaccttggcgtcctctgctcctaatacgaagaagaacttgctgcagaga

SEQ ID NO: 270396 - DNA, 917 bp, Cannabis indica
gtatttttttataattgtattaagcaattatttgaactttattttttgacattgtaaatttatttagactttttttaaaatttacaggtggtcttaaatgactacaacataaataattatgaaaaaaattagactaattcaaaaactctccaaaataccgaaccaaaaaataggtttaccaaaacactcatttaggggtgtactacaaattttctctaaattttgttattttatattatttatttgaaatgattacatgttaagaatttagtagtagtatatatcgtagaaagtatctacggtgtaacccttaaaaatgggtgcaccaatacaccctttactgctttaacattaagaagtaattttttaactatctatttttttctataattgtgtacattatagttattaaagacatattacaaaattttaaaaataaaaaaattaattttttttttaaaaaaataatcttcaaaaatctataatgctattgctcactttaaagatttgttcttactctcgtatctccaatataaacataaaatatatatttataatttgtattacaattaagatgtaaaatttatattatataaatttttattaaaattatttataaaaaaaacaattaagcaaacataaataaaatagaacaagaaaaactacacgtgcaatgcaattgcacgtggtatactcacctagtatttataaaatatataaacataatactatataataattaataattaagttgtcttacacatattatataggtcaagattttaaatttcaacaagaacatttttatttttaatatttaaagcatagtgctaaacacttatctttcaatatttttatacatataatttattgatatcaccatctacaaaaaaaaaaaaaaaacttaaatagatatc

SEQ ID NO: 270397 - DNA, 465 bp, Cannabis indica
ataaaatgcattgaagggtgtaacggtaaattaatccctatacaatgtaaatcatctatagagggcattggttattgggattataacaatggataactgataacgtatctatatcggagaacatatagagtgttgacctcgcttttagccaacgacagtgagtcttatttggtaaccgataagtaattgatagcaattgatatatggtaaagcaatgtaaagacacaagaattttatagaggttcagccccgaggagttcggtaatagcctaatcctcgttatttgtattgactcaagaacaaggagaaaggttccttttcttataactcttacaacaatatctctgaatataaattcttagataatatctctagggtaaaatctctcgtcctttgcctagtaaaaatgcatcactatttataggactatgaacttggagaagaagtatatcccttctcgttaca

SEQ ID NO: 270398 - DNA, 1209 bp, Cannabis indica
attagtgaggattagtaaatgtttcttttatagtgatatgcatgtagctcattcctgagagtatgttaacttgtgtgcttctaagcctatatattggctactcgcatgtgtaagaagacctttaacgatctttagcttacatgtagtttatgtaatttatagaagacatatggtctgtttgaatgacatcggtttgttgatgatatattggatcgttatgtgtagggcaacattcttaataattatgctacgaaactataataacggaattgtagctttatggaggaaattaagtaaaaaaaaattaacattcaatgaaagaatgggaacaattaaagagaagtttgcataagttcttctaccctactccttgttgtttgttatttttgtattgtataatgtgttctcaagtggcatataaggatgttcataagagaagaattttttttataaaattacgagcatgttattgcaaaatttatgtatttaaagcacgtatatataagttattgtgatggagtatgttttgttatttaagtaatgtataaaggaataacaatacttaaattaggttgtatatgttatatgtgttgtagtttgaccaataagataaaagttaagtacatatttgttgggtccataaggtagataaggaggtcatgtagtaagtggtgacaaacatgaagtccctcgtgtatttggtagttaaatttcgaggacgaaatttctttaaggagggtagaatgtaatacccggtaaaaatatacatatattttaaattttatttgttatacaatttgtgtgagaataagtattttatttatttctactaatagtgaatagagataattgcttagaatagtattgatagatttctaaacatagttgaaattatagtaagtgtcaaggtaaaattatggtgtttttacgaattaggataattactcaattaaagcccaatatgaaagtctattagagttttatagattatttagtgggtttaatttattgtatgagtgcattaaataacattataatggaattaatgttaaaaaaattcgtaggtttggataaattcgcaggattaaaaactgttttagtaaaatgatcatatctagagttttagagctccgattgaggtgattctagtggcgttggaaagataattcaaagatctataaattttgtagaaatagttatatcataatt

SEQ ID NO: 270399 - DNA, 989 bp, Cannabis indica
cctgaagaggtccttgtccgcttttgagagaagaagaaaagacttgacgccttgctggaggagcgcaggggcctcgccttcgaccacgagttgattaagccagttgtttatcaccattaccattatcattatctctcttttttcttttttgtatatatttaatccttctcccccctctaagacaatttacttattatatattttcttaatgggagacatttaaggcccgtccccaggcctttatcttttttagagcttttctttgggatttgaacactttatattcacgtttgaatacatattcaacttttaactttgttaagcttttggtctgttttacattttcccttgtggtatgctttactacaaccctgagtgacatgaaaattgtttttaggtcactcagttttacaaatttttaatttagaggttgcatatacttgtacggtacaaatttagtttacagaacataagcttgtaacggtccttcccaatttggcccaagtacccccactctgggttcctgagtggctggaaagacccttcttaggactaggtcactaatagtgaattttctatttttgacctttgagttgaagtgtttggccatcttcttgtgataagctgccattcgtatttaagactcatcccgcagttcatcaatttgatccagcgcttcttgtaataaagccttgtttgttgctggatcgtaagtcgtcctcctatgtgatggaaataatgtttcaactgggaccatggcctcacaaccgtatgccattgagaacagtgagtggccggttgtggttcttggggttgtccagtaggcccactacactcttggcaattcttcaggccaattgtttttgtaggccagcagcttcttctttagggtgaccttttaggattttattgacggcttttgcttgtccatttgtttgtggatttgccactacggagaaggttttgatgactccgtgttggttgcagaa

SEQ ID NO: 270400 - DNA, 532 bp, Cannabis indica
attttgggcgaattctggagcaacaactaggattactagcacttggttaggacacccggggatttggaatctccacgtttacaggacattaggtaagacagtagttagcacgtagagttatgcacggtggcgcgtatattgaatatgatatatgtgagtaactagaaatcgggattaaggttattaccctaaagtgagcagtttattggcctagggttaataacctagtgaattgttaatttgtaattattatgccatgatatatatatgtatattaagattatgagttatgcgttcaaggtataatcgggttggactcggtaactagaactgagatgaatcgttctaagaccttattgaatttagacgtgtgagcgtaacacgtaggtctatgccacatagacataaataagcgtgtgagcgtatcacgcgtgtctgtgttatatagacaaatgtgaaatggcatcattgtataagtgatatgttagttatgattattgatatatttactatcttgctgggcttggctcat

SEQ ID NO: 270401 - DNA, 491 bp, Cannabis indica
tactcatctatttagccttgtaaataggtgtatgggcgcctaaatacaagtcagaaattatatgatatgttatatacttttcttactgagtctgtcgactcacagttctactttcatgtgtaggtaagggaaaggcgaaagctgaaccggagtgaacctgagctcagattaagttgtacatgtcgaagcggctcgacctggagtgttcggtgttgggacatcggaggttatatattctgtagtggctgtgcgaccttgtttatatgtattttggaaaaataaatttaaaagtttgaaaacgggatcccgggactagtaaatatttctatctatcataaagtttaatatttactataaaaattttaatttgacacgtttttcaagaaaattttttgattagcaaagattgcattgtaattgaaaaagcactgtagcgtgccttagcaatagggcgttacaattacaatgtaaaattcagccacagagtttta

SEQ ID NO: 270402 - DNA, 574 bp, Cannabis indica
ttagagatctgagtggaaggagacattattccgctgccaccaatgtaaggttttcttacttttatatgtgtttatttatcgatttagaaagttcatatttagggtgttaaacaacatacttgtgagtagatctaagatcctggtaaaataaaatccaacatcatagtcactacagtgaataccagtcaacctggtatcagcgcctgagagtgcaagattgatatgcgagttccttgaccactttccagaggacttaccgggatttccacctacttgggagatttaatttgttatggagttggttctgggtgtggatccagtatctaaagcgtcgtatcgaatggctccagcggaattgaaagaattgaagatacaattgcaagagttgttgaatctgggattcaatagaccgagctactcaccttggggtgctccggtattgtttgtgaagaagaaagatgggaccctgcgaatgtgtattgattaccgagagttgaataagcttaccatgaagacagtattgatgatctgtttgatcaactgaaagggaagacggtattttccaagatcaatc

SEQ ID NO: 270403 - DNA, 663 bp, Cannabis indica
ctttattggatgtgcctagaagtgaggccttaatttgcgagatgcatgaattaggcatagggaaagtttttcaagaggtggatacctcgatttcgcccctagtaaccttttactgacatagtaaactggttgctggtgctttccctcttctcacactattgttccactaatcgcatttttcgagactgccaagtagaaaagtaaagtttctccaattattggttttgccaaaactggaggtgttgacaagtgcctttttatgctttgaaaggcctcctcgcattcatctgtccactcgaactttttgttgcctcgcagtacattgaagaatggtaggcacctatcagttgattttgaaataaatctgttaagagctgccattcgacctgttaaggcctgaacttcctttggttttgttagtgatgacatttctatcaaagccttaattttctcaggacttgcttcaatgcccctagcgttgactatgaatcccagaaattttcctgaggagactccaaaggaacacttttttgggttaagtttcatattgtactttcttagtatctcaaaccactccgcaaggtcttttgtgtgatctctactttttatcaacttcaccaacatatcatcgacgtagacatccatgtttcttcctatctgttt

SEQ ID NO: 270404 - DNA, 636 bp, Cannabis indica
gctaccgtactgatacgaagagcctaccaagttgctaattagcaacctccatccaacatcctgctgggtagctcagacaaaaatctagatgggcatactgcccaaactctgaacggtcagccgtccaatccttaatcatagactccacctgtgggccaagtggtaggcggccataccttatctggtaattcgtcaggtggggttatacctaataactctgcctagaccagcggttctggccaagtgctcagccaaaccaaccagacactgaggcaacctggtgctttagtattcaatagactgggaataactcatgatcttagagatgatctaaatagaaggagagggttagacaaacaatatgttcaactagccactcaacccaggggctgcattcaagatccagctctcctgacgtgacactgatctgtcaagaggccgaacaagttcatccatctatgcaaacacagttgaatgaactgaaaaatatgttccaaggcctggcgggtcaaaagctcaatgatctcaagttataccgagcacgtggatccccatttactccagagatcaatgttctagagctactccacaagttcaagttgccgacctagaagatgtatactgggaaagaagatc

SEQ ID NO: 270405 - DNA, 550 bp, Cannabis indica
aggttcaaggatctcatcagaaaatgtccacatcatgggatcgaaaagtggatgttggttcataatttctacaatgggctgattggtaataccagaacaattatagacaccgcagctagtgggacatttatgagaaaaagtgtaaatgaggcctatgatctgctagaagaaattgccatgaataaccaacaatggccaactgaaagaagccaaacgaagaaagttgctggtatgcacgaggtagatgccatcaccaagttgacagcccaagtggaggccctgtcgaagttgatgactgcttaggtgaaacaggctcaagttacttgtaagcgtttgtgggggcccttacacctatgaggaatgcccggtggatgcgaacagtttaccaattgattaagcaaagcaattgcgaactattctcaaaacaataattatgggcacaaccaacaggggttctaccaacagtgaaatcagccccaacaaaaccaagaacaactgaaacaacaaagtcctagtgaggcttaaatatccaagctgacttattgctcca

SEQ ID NO: 270406 - DNA, 625 bp, Cannabis indica
taaaaataacatttaagaaaaattatattagctctatatataatatttttttaggtttttttatatatacatgtatatatctctgttataatatatatatataaatttatggagagagataaaatttatcattttaatatactttgtaattaaaaaaataaatgaaaatcaaattaatatagatttataaactacgaagaattactaatactttgaatcgaaaaaatctattagagaagagcttgatacttaattatatatatatatatcaaagtaatataatctttcaaagcaagagaaaaaaaattatccaacaattttattgcaaaatattcattggagaataatttgtcaatgaatagtcttttccaagtagtctaaaaatataaaacatcaaaaaattaaaaaatataataaaaacttaaaaatgaacatacattgctaagtagtaaaaatagatcaacatcaagaattaaaaagaaataaaattaatataacaaaaactttaaaactatgagtggactttggtacgaaaaaaaaattattagagaaaaacttaatacttaacttgtaattaaaaaccttgacctaaaaaattgttattaaaaaccaaatataaataaaa

SEQ ID NO: 270407 - DNA, 363 bp, Cannabis indica
tagtattgttataatttttttgtggtatacaattttattactagggtatattacttttcagtaatacaatatattaaatactgttgtatatatatatttaatgatcaaatatatttcttcgttttttgatataataatatgcaatactgaaaaaattatagggaattactccatgtactattttttttttcaaatttacggtttgagtttttaaagtggtttctccagtagtttttaattctatgtggattgctatacaattttttgttgagatttaggttgtaacgctagttacaataggggtttctatatagaattctttaaaattgcaaaaaaaagaaaaaaaaattattttgaagtgta

SEQ ID NO: 270408 - DNA, 794 bp, Cannabis indica
tggagttccaggaatctctcttttgctgtagagaatcactactaatcaattctgttttaactgctatacaggcttattggagtaaaatgatgatttgcctaaaaaagtattgagatcaattgaagccatttgcagggcttttctgtggaaaggacaagcccttttccagggtggaggctcagtagcatggagtaatgtgtgtcaatcaaaggctgcgggtggattgggaatcaagaatattgaactttggaaccaagctgccatttgtaagtacatatgggcaatttcaaacaaccaagaaagtttatggcttcgttgggttcatagtgtgtatatcaagaatcaaaattggtgggactactcttcttcaatacattcaagctagtattggaagaagatggtagctctcaaagatcgaatcaaaaccctcactgatcctgctatattccagacacaaaaatacatgattgctgcaggttacaagctgtttctgcctactctcgaccgactgaactggagtagggaagtctggtcaaggcacaacactccgaagcatagtgtcatcacttggatggctatgcttaataggctgaaaactcaggataggctcgattcagtttggtattcaggtccaggctgctgctatctatgtggtacataccctgaaactagccagctacttgttttttgattgtaaaattgcaggtgactgcttgcttgagttaaagaattggctggaagtggcatgctcaaccagcaacctgcatcagcggatgcgttggattggtagagct

SEQ ID NO: 270409 - DNA, 638 bp, Cannabis indica
tgacaatgcttcatcaggtcttgctcgggcagatgcttctgtcgatgtgcaagatactccatcttgcctttaactttcctgattattgtactttcatatttcttatgctttttcctaaccatgttgtgttcattttgtacagacatgtctcataaaatgctcgaagctttgaagaagagagcgggaggaagctcgggcttatcccctcaggccaagaagtctagggcggtgagacaaccccgtccaaagagaaggcaccgaccaaagaaattattgatctctccgaggaaccaactatcatagacccttctgccccaaaaatgactaaatccaaagactctcgaggagagagctcggacaggccagagcagtcgaagggcagatctgagctagtcagtagcagatctgagcggatcagggctcctgccccacctccggtgctgcatctagagactaaaagaggcaaagatatgcttatccactacatgactcggtcgatccctgaggtgaatgagcagctggctggggctgataacgacctttctctggagctggttatgggaggagtcctgaaggaatttatgagggtaagtctttcctaacagtttcctcttctccttcttcacttagttcagatt

SEQ ID NO: 270410 - DNA, 516 bp, Cannabis indica
gcttgttttagttgtttgcactactagaactaatatgaatgtgactattagggtgttagtatagtgttgtatattagtgttgttacggtgttaccaacacgagtaccaggggtacgtcgtgttcgtggtacaacacttagtaaatacagggagtacaattagggctctaccaacacgagtacagggttggtactttagtgcatttggtacagtagtcgtacttcccttaagaacggtcttatccatttgggagagtaattattgagctcagggcggcttaatcataaagccggcatcgcattatgtttatatatatatcttgcatattttactgagtctgtttactcatcagtttgctaccttgtgtaggtaaaggaaaagcaatgctagaggaacagtgagatagagctcgggagtgattgtacatatcgcgacagtgcagcctggagggtttcgctcctttattattttggagtctgtattttgaggttgcatgctagcgagtttttaaaaaaa

SEQ ID NO: 270411 - DNA, 956 bp, Cannabis indica
atctaagcgatttctaaatgaaaaactaagaggaaaaataaaaataatttcgattaaaataagaatccaacgatgtcctatttaggcgagagtcaaagttattcttattttatgaatctcttcattgtttgatattgaaaacgctaatctaagttttatctttagatgtacaactagatgtcgcatttacaaatatttatctatcgatatctaacactattatatttgtctaacagatgacaatcctttgggatttgtcccattaaacacaacaagctaagttagatcaacaatgaagattagaaattatactacaattaataacatgtttcaatataaattcatacacattcagaaattatcatacatttagcaagtaagaaagacataggaaaatacaaaataaaaacatcttaaataatttttaggtttccaacaaactgatacagttcttcgttttgagttgagagtcaaagatatcattcattgaatagaatagtcaactcatctaaaatagaaaccattctagcaacctttttttgatcgaaaagagaatttgacgttgctttgttttagttgagagtcaaggtcattcctatttcatgagcttccaccattgtttctgttatcccaaattttgcactctgacgtggcatcacgagaatggtgacacgtggagtccacttggagcatctgttcgggaagatagaccgagcaggatacctcgctagcacatcctgagtaagatcttcagcgatccgtgcaaagcgctcaacacttagcgaattcagcttttgcatcatgagtcatcagctcaatccctataactcagggatcaacttatgtggatacgacatacacacgatcccactatcagtgtactcagcctcaatcccacgatccttgcattcagcattgatcacacaatctttctgtttatgcgcattgtaacgaga

SEQ ID NO: 270412 - DNA, 644 bp, Cannabis indica
ataaaatagattacattgaaatggagttttatttagggcataaaacccaacaatctggacctcccaggaaaactgaggtgcttgcttacggaacctttcatacaggggttccattcggttcactgcatctacaggttctgccttcacaacagggcaggagctattggtatttctggagcagggattgcaggagcaccctgctgcctcaactgccgaatctcttcatgtggttcattaatcctagcttgtatttctgcaaacctgttttcccaatcctgggttgcttgggcagcctgtggcgggttagcatcaccccagccacgtgccctgcctctaggtactctacctcggccacagatattaaggggaatctgagctccctgaccaccacttgatccaaccgaattttcgtggctcctggtgtttcgcctggcgtccatactaattagaacagcctgcgtaatcaagagctagtctggtaagatcgtgatcaaagaaaaaacttactaatgccgcttatttggaaattaaagaaaaacatgcacatattttactatcaggctactaacatgcttcctaaaaggcttttcttaaatcatactattaaaataaactactaaagcaataaaagcttactgaaccgt

SEQ ID NO: 270413 - DNA, 589 bp, Cannabis indica
gaggatgcttttgatccaactaggtgtgtaacatttgtggagttagagaatagacaaatccgacaatgattggccaaatctaaccgatgaaacgctgagttggagagagaggctgcagtagccagggcaacacagggaacaattcctcaaaactaacttgatccaacgataaggagaccacgaggaagaccttgaggttccaaaactaggagacaagagacaaaccaggggaatccccaaaatgcccaggaagaacaacctagggatacaaggaatgtcctaatggataatcaaacaaatcctaataatacaagaaatctagaacaaaggcgagatgttccttaaacttcccatggatttgctaaccaagggaatgaacgagctgacgtgccagaggcatctcacaagaattaagaggcgaggaaacctcgactagcgaaccaggggatccctcgcaataatgagagaaaccctggaaatcaaccaaggttaactaggctacctctaagacatcctcaacgtctttctcgagcagatagggaggatgtatacacatagttgaataaaggacatgtatctaatctcttcc

SEQ ID NO: 270414 - DNA, 1045 bp, Cannabis indica
ttgaagggtaagacggtcttttccaagatcgatcttcgcccaagttaccctcaactaagaattcgagaggaagatatcccaaaaattgtgttctatactcggtatggatattatgagtttctggtgatgtcctttggactcacagattctctagcgacatttatggacctcatgaattgggtgttcaaggattacctagacagatgtgtgattgtgttttttgatgatattttattctattttgagtcagaagaggaacatgagttatatctcaaatcagtattgcaattatgagatcacaaggtgtacgctaagttcaaaaagtgtgagttctggttatcataggtctctttcctggggcacatagtggataaggatggaatcatggttgatttggccaagattgaagttgttcgagattggccaacaccaaaactggctatagaagttaaaagctttttgggtttagctgggtattatcgtcagttcgttgagggtttctcaaagattgttgtacccctaacggagctgactcgaaagaatttgaagtttttttggactaattggcgtgagaaaagtttttaggagttaaagcagcgcttaattacgctccagtgttaactcttccttcagataaggaaaagtttattatttattgtgatgtcttgagacagggtctgagttggattcttatgcaagctggaaaggtaatagcttatgcttctcagcagttaaaggagtatgagcagaggtaccctactcacgacttagaactcgcaatagtagtatttgtgctaaatatttggcggcattacttgtatggctagaaatgtgagatatataccgatcataaaagtctgaaatactttttcacccagaaagacttgaacatgagacaaaggcattggctagaattggtaaaggattacagctgtgagattctttatcatcctgggaaggccaatgttgtagctaatgccctgagtaggaaaggccagagtcagatgaatattgtgaagcaaatctccaagcagttagcagatga

SEQ ID NO: 270415 - DNA, 692 bp, Cannabis indica
ttgggttgggctcatatgtatgggcttaattaaataaatataaaaattaaaattttaaaacatgcggtgcggtgcggtttgaatcgcggtttaataattccaaacagcaaaccgcaccgcaccgcgcggtttgggaaaaatttaaaccgcaaccgcaccgggaagaatttcaaaccgcatttttttttatggtgtggtgcagtacgggcggtttgagcggtttgatgtacacccctagtttagataaggttgtgaacaaccagatgtgtgttattttagtaactttggatatttcctttaaaataatactatatcattttggaccctgtattttataaaagttatccattagattctttgttttgttaaatgacaaaatgaatcatgtattttccaaaatggtaaaaataggatcataagcttaattttcgacaacttttttttaatataaccaacttgaaaacatttcgtaatacaaacaaaaatagaaaatgtaagcagttttgtcataacacatttagatcagattattattaaattttattttgacaaaaaattagtttagggtcttatttgtactattttaaaaaatacaaggtccatttcgtcatttaataaaataaaaaatctaattaataacttttataaaatacatagtataaaatagtattttttcaatatttttctcaaca

SEQ ID NO: 270416 - DNA, 826 bp, Cannabis indica
ttattatttagtgtaaattttctaaatagaaagaaaccttaaaatgtaaatgtaaaataaactaattaagctagaaataaaaacatgaaatatgagtttggataatagatttataaaaatatgacctatcaaataccataaaaaatcttaaatgtgaaaaaatatcataaaagagtgacaagcttttaaatatcataaatctcatatttcatatatttgatgtcatcttcacaaataaaattctcatgtatcgaacatagaaatattgaaaattatcatttctatgaagagattacacccttaccacacaagtcgtcgagttattgtttttcttttattttatttttttagaagggggaaaaatctcaaaagaaacgaaggataaaacaaaatttaaatttttaagaaccaaataggaaaaaaaggttaaaaaagaaaacaatttataatttaaactacaaccaaaagtataaaattgggaacttgatgttagtcaaaaagaaaaatcgatttgattagtgagatttggagtatagatctttcaataattgcttattttaaaacctgttgggtgatcaattttccttttttaaagaatgaaactgtgaaagggaatggaaccataggcccactaaagacatattggactgattgggcttgctttgagagagtttgaatctccattattattcagaatcctcttaaactttttttttttattttattttttaattgtaaaatttacactattttataggttaaaaaagtatgttttgttataaacaaaaatacaaacaaaaaaaaataaaaatatatagtgaaaaaa

SEQ ID NO: 270417 - DNA, 626 bp, Cannabis indica
tatagtattatagatcgatctaagcattgaaaatcccttgaaaaatttaaagatggaaaaaaaaaatttcagttaaaactttttcggacccgattaacttcgtgatattaaagtttatatttttttcgtgttttcgtgcataaaatctatgtggatctctttattatttgatttagaacattttagatttgaaaacacgccatttggtcgtcagaattgtctattccgatcggttttgggtcgagtccgttggacccgcgtgcagaaaaacgggtgaaaacgacccagtttggttgaggaagacagcccaaacgacgtgtcgttttccactgagtggaaaaacgacatgtcgtttttcatgtatattggctgctgtcgtttgcccaaacgacgtgtcatttttccctgtggaaaatgacaagtcgtttttcataattttgggcaacctttcagggttctgaacgacgtgtcgttttattcatgcattttcagcacccgtaagcttggaaaaacgacgtgttgtttttcttgttagcaaaaaacgacatgtcgtttacaggcagtgtattttttcaaaaaaaaaaaggaaaaattctgaatttttttataaattttatttatttgga

SEQ ID NO: 270418 - DNA, 674 bp, Cannabis indica
taaacagagcaaaatatcaagtctctccaattgccatggaaatcttaataagaaggtatattatcatgttaactgataatgtaaattttatgttttctttttggttctatgggaacacagcaatttactcacctcaacatcatcttgaactctctttagagccttgccaaatattttatacctataaaaaaaacacgttttcgaatcaatgttaaactaaatgcaaaactgctacagcaacagccaggtagcccactatgacacttactctttgggttcgaatatgagctccttgaaaacggcatatgctgcagctgcagcaacaccaagtcccgcaataatgagaagactgtaggaagcaccttctgtaaatgataatggcttctcgggaatattatatgttggagaatcaaaaggatcctcaacggtagatatgtcctttttagtctgtcaaaggacatgtagaacaaagttatgaagatactttaagggtttaaacaaccaaatgctataaaaactgataatagaagggaaaccaaatgccaaaataataaaatcaagaaacatgtcatattcccatccctattataagaatattttccaagttttcagaaaaaataaatcaaatttcaaagtttggagaaagaacatatgttcaaatgaaacaactaaat

SEQ ID NO: 270419 - DNA, 746 bp, Cannabis indica
gtactgatcttcgtcttcatttttttagtacatttgacagcatcactctcttccggtggtggaagattcaaacatgggattggagtacggttagtgtccttctccaacttcacttttttaagaggagacttggcttcctcttcagacgctacttgagactttgtaacttgttcgtgttcttcaaaagtatcgtctgatatggctattacagacatatttggttgtgtattgtaaaaagaagatttgaagtttgtttaaactctacgtgaaatcagattgatatggaattgtcaatacattttgtgtatttatagttttgtgtacattgtaagactaccaaagggttacagcttttcaaaatcaattaatcaaataaaagatatcatttttcagaaagtatattaagttcccaatgaagctctttaacctcgctcttaagtttccttcctccaaaaacaagaaaacctcttaagtttcccataatatattatttaattatgctaaactaatataataaaattcatttttcgaaaaatcttaataaaataacttaataattgttgacatttaatgtagccattaagcgtgaactttttacattaatatttttaaaatggtaacccaatataaatgactgtcacaataaatgatatgttttatgaataatagaatatttgtttttgttttaatataataattttaattttaagttccaatgttgatatggtatactttgtctcatttct

SEQ ID NO: 270420 - DNA, 536 bp, Cannabis indica
tccggggggatattatctctttttcagaggataaatataacaagtacaaatatagaagggaacaggagctaccgtttgcccgagcgcatgtcgcttaagggagagcctccaaggagaaagcagggaaggagcaaaccccaattcggcctaagtttccctttaatggttcccaaccctggggctcccggtgccactagctctagaatttgtaagtcccctttgactattcaccgtgtcccttctgtccgagattatgttggcctaaggccagtagaattttataattgactgtataagttatgaatgccccattcacggtggggtgacaatgccaagagcttttattttttgaacctaagtcactttttgggtcagtcccggatgggctctgtcctcttggatcattcctcatatatgacttcaagttggttccttccctctgatagctttctaggggatgacgacaccagccttttaattactgaatttgctaggacagaattaaaccatcaaggtaggactagtttcactgtgtt

SEQ ID NO: 270421 - DNA, 731 bp, Cannabis indica
caagtaatactcatacaattatggcaatagtgacctttttaccatttttatgagactataaatacccccaactacattcagttaaggggtcagaaaaagagaggtgaaaaactcttagtaaaaaactactgcattaataacaataacttgtggactaaggatcaaagccctaaccacgtaaaaattctttgtattaaacatcttctaatcatcaaaacaactaattaacagttgccaaaaatctcagtcaaaattttggtgctttcattgagagctgaaggaaacattcaatagaagaaaaatcataaatcgattcttggtacgatggtgttgactagaaaaaactcacattgaccacatccgcgtggagatcctgtagggccggatggagtagaagtggctttaagggtagatgttgaagaacaatacaaaattgaagatcccaagtacaaggaacactaagaaatataggaggagtacgatgatggtagctatgtcgaactgatcgcattgagaaaataagctgctgaccatgaggctgagttagcataataacagtgactcgtggactaaggctcgttaactctccaactacgtagaacttcttcgtattaaatttcttctaattattaaaacaactctaattaatcgttgctgaaaatctcgttcaatagatgtatgcttgttttaagttttttttgttgatacattttaatcacctatatattttt

SEQ ID NO: 270422 - DNA, 741 bp, Cannabis indica
caagttcaatatcggtctctcccgatgcatactccatgcatccaacccaagcttactttaaccaatgtcttggagatgacatagcacttatccaaggtgcaagtaaactacattatagattatcatatcagttaaacccctttgtactgataaatcatacgaatacatttaatcacacaatcttgtttactttccactgtgttggcaacccattaaataagaatatcagtgtgataaggatttggatgaatttattgatcaaataagtaaataaatgatcacatgaaccaaataacacattagacaagtaatttaaatctgtttctttattgatatttgaatagaaaagattacattgaaatagagttttatttagggcacaaagcccaacaaactcccacttgcactaacataaaactatcagtacatttcaattaatcctaaattcaatctgtgcttttcaaatgtagttgcaatcaaaaatttggtgaatggatcagctaagttgtcttcagtgtccactttctccaccagtacgtcccctcttgccacatattctctcatgatgtggtatttcctctctatgtgtttgcttctcttgtggcttcgaggctctttactattggctatagcaccagtgttgtcacaaagtaaaaccagtggtttttccattccaggaacaacaccaggtcctaagaagaactttcttagccaaacaagttccttagcagcttcagcggc

SEQ ID NO: 270423 - DNA, 703 bp, Cannabis indica
aaaaagtatacgtttagttgttttatcaactgctctggtatatttggacgaatctggaatggatgatcgagtctcatgggatttgggcgagggtttctaggtttgggcgagatggttgggaagtggtcgaggttgtactggtatgagtattactgtgtgttcacgattttagggatgactttttatcccgatttttaactaataaccgggataaaaggttctcctaaaaaaaaataatccctgtttggcaaacccataaaaatcgaatcttgaacttattttttttgcctttaatattattttttaacattctaccaaacaaagcccttgtctgacaaaaaatttgctgcatacttgaggcgtcaaatctaaaagtgggataaaaagtctcaatatatcttttatcccattttttatttttgttaactaaaaaagtaggataaaaggtcccctttcttgtagtgtaactcctgaatcttgatccagtagaggcgaagccacctaggattgagtccttgttgttttgtttctgttgtaaatgctgatgtggatatttatgtgtataagtgactggttataagtggaatttactcaacacattccttctaaccaaacaccaccttagctccttttatatatcacaatgtgtccaagtccggaggcatatgatccctcttcacgaagcaatatatatatatatata

SEQ ID NO: 270424 - DNA, 638 bp, Cannabis indica
aagggtttcggctgggatttttgttgtagcaaagaaagagattcggctagggttgctgcagcaaggaaaaagaggaagaagaaagaaaacgcagcagtgttttctgccattgatgagctgctgcgttttgcagcaagagagaagaaggaggtgaagaagcttgctagggtttttgcttgctgttcaaagaaaagagaagaaggagagaagaggagttgggcggctgcacttgtttgaagaaggaaataaatgtgctagggttttctaggagaagaaaataaagcttttatattaaataaaggcatcagattttttaaaaagataaaatttgatattcaaaggggcatattcggttttgggaaggcatattccctttggatccgcaccagagtaaaaagtcagatttgcccttgcctttatgaacgttggggtgttggagtgggggtagtttaggcatctcgggaatgacagctatttcccacagtggtatcagagctcggggaagcaagaagattgaacaacacctggaaacaacgtcaagaaacaagcaagatcatcaaaacagtgaagaagcaaaatatgaaattatcaagaagttgataaaaaggaaaactctaacctaaactttgtcttgttac

SEQ ID NO: 270425 - DNA, 638 bp, Cannabis indica
ggttaaaataccatacacaactactacttaaaaaaaaaataaaaaataaataaaatatatctattgtaaaacaaatagacagtagtcaaaattaataaagtatcttagatccgtttccaaattttacttagggaaaaaaaataccatatgcggttgatccttgtgataaatttaaatgtatgcttttaaaaaaatttatcatatctctcataacgatttcattactattatctttcttaattcttcgcctcctcttaaaacctatacacgaaaaacatagagctttgctaaacaaaccgaacaaaaagtgttcacctgtattattaatattagttaataatattatagaatattaaattattcgaataataatatacccaagtttctctcattccatttttgaaagaatacaaacaaacaatgagacgacaaagtatgtatgatgaagtcaaaatagggcttcctctatgtttattttcctagtcatacgaaaaggattggacaaatcatacaaagacaatgcatgttctttttgggtttattttaactaaaactttcatttaatatatttattattatttggaagactgacttgtacaagtattgtactaagtcatagtaaggccccaccacagtta

SEQ ID NO: 270426 - DNA, 1537 bp, Cannabis indica
caatgtaatttcctctatttttttttttattttttaaagagcccaattttaaaattttgcacaaagcccccaaaatgcttgggccgacccgagttatacgagatatgtaacatatatagttgtgatgtatattaatattatgtgtatatgttatgtataaaatgatagtaacatacataatatattaattagcataaaatttggggattataattttatgcatgaaagttatatatattattagtatatgataatatatgagtaactaatcatatttagggtatatgataataataatgatgatgatgataaaaaggtgtgtttatcattttttgagaataaagagttttggaattaatttttcataagtgataattatctcattttatgagatgagaaaatgaactatgagagttaatctttttagggtttatcttaacaaagagtaaatagatcaaagtggatctaaacttgtaaaatgagttataattgaaatagcaattttagactcaaatcaaagtgaatcatggtgacttcaaaaattgtgaaaagataacaaagttggagaagcaattttgaatcttaaataatcaaagtagtgaataaaattgatgagaattttgtcaactttggtatatataattttgggctaataatctcaatgaggagataaccttaaaattatgggaacaagtaatcacattatttttaagtggtgatgtgagtttgatattttagtttattgagaaaactaaaaatatcaaatgatatttttcaaagtgaccttaaaggtcatttcaagagaaaaatacacaaaaaagtgatattttatatacactttatggtgaaaatgtgagggtgagtcacaaacttaatcaaaatgtgatgagacattgtcgattagttatttgattttgaactcaaattctaaattaattttgctatgtgcatatgcgaaaattttgacatattttgatgtcaaattttagtgaaaataatttcaagaaggaaattaaaaagaaattataaagacaaagtggtcttctatattttaaaatcaaaatattatcttgatagtaaaatgtgagaaagtgtgggggtgatatccaatatttaacaagcaatttagtaaaagaatggatgatatgtgaaatttaggcatatgcttggtgcttaagacttgagtataacttagacatgtttggtgtctaaagttagtgtttaaattttgatatgcttggtatcaaaatgtgtgagaaattgagaaagtgtgaaaattaatcttctaaggagaaaagtggtcatgtaataatggacactaattttggctagcaagattcacttggaatcgaaaagtgtgtgtgttaatttcatttttggcatatttaattgacaaaaatattttattatttcctattaatttcggctggtatgtgtttaatatggtttcctattttgtgcattcaaacttggaaggaaagttgtctagcttttctatttttggaaaaaaggtaaaaatggtaagtttggttaccca

SEQ ID NO: 270427 - DNA, 974 bp, Cannabis indica
aagaaatgtgataaatggcagaggttttcaaatatacctcgcatatcgccaacagcacttagaatgatgaccgcgccctacccattttctatatgggggatcgacctgattggggcattacccactaggcaaggaggagctaagtatgcggtagtaactgtcgacttcttcactaaatggatggaggccgagtccctcgtttccataacctacaagaaagtcatttactttgtcatcaagaacattatctataggtttggaattcccatgaagatagtatccgataatggaacccaatttgatggtgacttgttcactgaattgtgcgagaggaataaaattatcgaaagcttctcgtcagtaacaaggcctcaggaaaatggacaactggaaggcgttaataaaaccctaaaggatattatcaagaggaaggtagaagttgcaaaaggctgatgggttgacgagctacctcgggtactctgggttgacgagctagcatttggctcggaagcaatgctgcctgttgaagtgaacatatcgactaatagaagagagttttataatcaagaagaaaactaggaacctttaaaattttccttggatctacttgaagaaaaacgagctgagtcacgaatcaccaacgcagcataccagcaccgagttacaagatacttcaacaaaaaagtcaagaaaagactattcaattttggatacttggtgctaaggagagtctttgcaaatatgagagatgcatctgtaggagtgttcaacccgaattgggagggtccatatgtcattgaagcagtagttagagtcagagtttataaattggctcgactagatggctcgctaataaagagctattggaaagtagaacatttgcgaccttactactaattaataaatgatgtaactcgaattactatgcaaactttaaagtttagttatgaataaagagaatcatttatattaag

SEQ ID NO: 270428 - DNA, 969 bp, Cannabis indica
gtgcttgacctggggcaatttcataatgggtgacctcctggaaagttttcccaggaagcgtgcgagtgaggacaaagcatgctagaaacactcgtggtggtctgtagggtcagtcatcaatccagaaaacagccagagtggcgtactcgtgtataagagccatcattccgtgggtgtaaggacccaatggaggcttgaagcggggacgttacactttccctcaaagattcatatataatcaaaatttcatattgacccatagtgttgcaaagataggattaggattagataatgagttgatttagaatggtcttttatcttccatataacttgtttgctttgtactttatttgcctatcttaaagaaacacaagtttacttcaaaaaaaaaaatcataaatattttacctccagagatagacactttttttgttttggcgcggggttgtagctcaaataaaaaaaataataataatttgtggtgtaaatatttaaatttaaattttcaattacagataaatatttaagtttaatcttttacggtaataatatttaagttataattctaaattttcggtaagtgtctggctattaagtgtcaaatgaataaccacgtgaataatgaccacttgacagttaacaactagatacctacggaagttttaaaaatataatttaagtattattacattcaaaaattaaacttaggtatttacaccgcaaattactctaaaatatatattttaaaaattaaatattttctttttaaataaatacgtttacaacaaaataattaaaagctcccacaaaataattataattttatttaaaataatataaatattttttataacaataagtctccacaaaacaaaaagaataatttgccacataaatacctaagtttaactctcagtcgtatataaatacctaagtttaatttttggcggaaataatacctaagttata

SEQ ID NO: 270429 - DNA, 543 bp, Cannabis indica
cgcattggaccagctgcttaccgccttcagctccctcccgactccttgatccatcccgtgtttcatgtgtccttgctgcgtgcggctttggggcctcaacaacaggcttctcctcttcccccaggcctctctgcggacctggagtggctgctcgaaccgaaagccttgctcgccattcggccttgcactcacaagaccagccctcaagccctcatcaaatggaggaacctacctgactttgaagctacttgggaggatttctctgtcattcaaacccaatttcctcattttcaccttgaggacaaggtgcgccttcaggccggcggtattgatagacctcccgtgacgtatgtgtatgctcgaaggagtaggaagtctaacatgaggtctgccacaaggaataatgtggctatgtaattctgtttggggggttttgtttgagtgtagctaaggctcatgggagtctcgtggggattacatataataatagaatattgtagtgaggggcagagagtatttttctgagtgaggcttgtaaggaga

SEQ ID NO: 270430 - DNA, 525 bp, Cannabis indica
gccagccgcaattctaatctaactataaactgccaaatgaaagagatagcaaattgaatagggtgtgtgtataaaaagatgcatgagtttctatttcaaaatcaattaggactcttcaataagatttaaaggacatacctttccaaaaaaactagcaaacactgttgatttgagaagaatctcaaacgcagtcatccccatcttattggtcattctcttgtttgtcaaagtattacttgtcaaacgattcataattccataacgagaatgaatagcagcaacatgtagagctgtatttccttcattgtcttgctcatttataagataactgaaagctctctctttcactaaagtatgtaccacagaatgacaattgtgttcagcagcaatatgaagtgcagttcgatctttattgtccaaaatctcaccaatatctgaacattcttccatcaattccttcatcacttcaacatgtcctttccttgccgcgatgtgaagagctgtcatgccttgtttatctttgat

SEQ ID NO: 270431 - DNA, 1266 bp, Cannabis indica
gaaacacgatctgctacatcagattcggatgctgacgcagcagatctgaccagaaacggaaacttactaaaatcgggtccgatcttctatcaatgctagattcctgccaaaaacagattagatattctgattgtatcaagatacaatcgaaattaataaggaaaaggcaataatcaaagtttccctaaaaaagacaactttccaaaagagaattccttctcttttgagaagttttcaacaaaggaaagttcagctgaaagtgcaactttccaaacaaggaaaatggcaactaaaaaccgaatttaaaaggtaagaaatcgaaaatgaatgcatagcaatcttaccataaatggaaaaattattttgtcacctaacttgccaaaaaggactttacaagatcctagtggaccagaaagtttccaatgttcatggagatgagaagttattggcagaaactagaggaaaaaaaaaaaaaaggaaaaagatggtgtactacacgatcatcatgtatctatcaaacagtgttcgaagaaaattcatcgcagagaagacggcgaaagaagtttcgaataaattgaaagatttgtacttaaagccatcaattgttagaaagattaatttgctagaaagattatatgggtttagaattatttcttccctttctttaaatgactccatcactcttggatctatgaacttctggaccaagtatcttctttacttgtcccaattctttcatgtcaaattctgctttgagtttatctttaattcctttgattactgccttgtctttgcccattattaacatatcatctacatagagtagaagatacacaaccgttgactcttctaggtgcttgaaatacaaacaatgatcaaacttggaccttgtgagaccaatctcctgaacacagcatgtcaaatcgtttgttccattatcgtggtgattgcttaaggctgtatagggacttatcaacttacaaaccatctattttccatcttgttccacctaaaatctaggtggttgctccatgtatatctcttcttttagataaccatttagaaacatgattttaacatcaagctactccacttctaaaccttactgagttgccattgacaacataagtctaatggtcttatacttcaccacaggtgagaacacctcgatgtaatctatcccttccacctgagtgaaacctttggcaactaatcttgccttaaaccttactggctcatcttttgtcaccccttctttaattttta

SEQ ID NO: 270432 - DNA, 529 bp, Cannabis indica
gcacacctgaattcagaatcaaaataaaattggtataaagatatatatgcatacatgtttagcttacatgtttttatggttgcctagtagataacatataagtaagggcggtattagtgtacatagagttgcactgaatactcacaaatatatgtttggcatcatagttaagtatagattgacgctatcacatcggctagagtaccgaatatagactgatattatggtcaatcatattttcatacgaacgttctagacttatacacgttagacgcgggataggatcgtgattaggtgtatgagcgtctagttacgatctggttatatgtttatgtttatgcttttcttactgagtctatcgacttatagatatatgtttatatgtgtaggtaagggtaaagcaaaagttggacagcagtgagtctagagttgaatgaaaattgtacatatcgaaacagttagacttaaagtgtttagatcttcaggacagatgggctcatattctaatagtcgttggtcgacactgata

SEQ ID NO: 270433 - DNA, 968 bp, Cannabis indica
ttataacaatggataactaatagggtgtctatatcgtggaacatatagagctttctatatagctcagagtgcaattccaagttctatggcggatgtattgaggaattaataagttagtggatctacttggtaaattctagatctgcttattggaagctcggatatataggcccatggtcaccatactagttgagacaatactgtttgtaagactcagttaattgattttaattaatcaattataattctgaaattagactatgtctagtttataaattttcactaagctagggcttaattgtgaagaaaagagattctagggattatttgttaattaagagactttattaagtctaattaataaaagtattaaatggaaattttatttaataattattttaattattaaataattagatttggcatttaagttaggcctgtatatgggttgggttgggcggtttggcagtgtttttatttggcggttttttaaaatcacagcccatacctgcccaataaaagtttgggttgggcggttttttaaggggcggttttatgccgttttttgggcggtttgggttgcttaaaaatcaaaacttcgaaagtattgtcacaagtatagactccactttttgcctaaacaacatatgtaaattttactcagcaaaaaaatatctccctcccttctcccatgccaatacaacctgtggtatactatattatcaccaaaattgaagctttggtttggtttacagtcacaatttaaagccaccatctaaataactataaagcagttatttatttcacacataaacccaaagctttggattagatgattatattttcaaaataaacatattaaactgaaatttttgatgctataattttcatattaaacatattttattctgtacaaataaaaaaaattaaataatatatatataaatatataataccatacctgagga

SEQ ID NO: 270434 - DNA, 583 bp, Cannabis indica
ttggtggggttgtaaactagttcaaccattgtggaagtcagtgtggccactcctcagggatctagaactagaaataccgtttgacccagccatcccattattgggtatatgcccaaaggactataaatcatgctgctataaagacacatgcacatgtatgtttattgcggcagtattcacaatagcaaagacttggaaccaacccaaatgtccaacaatgatagactggattaagaaaatgtggcacatatacaccatggaatactatgcagccataaaaaatgatgagttcatgtcctttgtagggacatggatgaagctggaaaccatcattcttagcaaactaccgcaaggacagaaaatcaaacaccacatgttctcactcataggtgggaattgaacaatgagaacacttggacacagggtggggaacatcacacaccagggcctgtcatggggtgggggtaggaggggagggatagcattaggacatatacctaatgtaaatgatgagttaatgggtgcagcacaccaacatggcacatgtatacataatgtaacaaaacctgcacgttgtgcacat

SEQ ID NO: 270435 - DNA, 525 bp, Cannabis indica
accaattcaacacatgcatcttcgggttcgctctactcctccacgagaagcttccatcctatcgttggctacttcaaaaatttctcgaatgccatggagataagaagccaaatgttgtagttactgaccaagatgtggccatgaaacaggccatcatggaacacatgcctgatgtgacacaccgtctatgtgcttggcatctcaatacaaatgcttccaaaaaggttaaagatccgatcttcttgaaaatatttaaagatctaatgtacaactactacgaggaggaggatttcgaagcaagatggttagacgtcgtcgaaacccaacaactaacagataatgaatggtgccaaacaacattcgacacaagaaaacagtgggcagaaacttatttaaggggttcattcgttgcaggaatgagaaccacacaacgttgcgaatcgatcaactcagccctaaaaaaatttttagagaagaattattgcttgcgtgaattcgtaacaaccatagatatgacagtctcaa

SEQ ID NO: 270436 - DNA, 746 bp, Cannabis indica
atataaatatatatagagtaaaactaatatccaataaaagtttatttaataataacatctaaattataattagtatatattttttttaaatcttgtactaagaaaatataactaagaataattatcttttaatacaatatttttatagtttataatttttttttatattttaacacatatataaatattatatttactcaaaaaaatattatctattataatatagtattaatatttgtttattgttattgtaattacattgatattttgttttttcggcaaccaattaaataatatattgagaagagctatagaaagtttaatgcaggagatttttacgtgattaggacattaatgagccttagtccacgagtttttggtatttatgagagtgtttattacagagaattttcttggtgaatctctctcttctttactctctttgattttttaattgaaaatcgatcgacccctttccagtctgtttgtggggtatttatagtgttttttgaggggatccttagaaatggatcacttgtctttccgtgttagcttcataggggcacatattcctagtagatacaaaataggaaatacatgacttattataccgtaggtatcttaggagttaggtggatataatctgttatcatctcttgactgatgtgattcctcataatgtagccgtcactagactcatcgattgttgtgtaatcgctgtaaaaaaaggcttacgccatctgtca

SEQ ID NO: 270437 - DNA, 773 bp, Cannabis indica
ttaaattcgtaactctcttgaggatgaactttggacttgataacttcaaaattgtgattggagtgtgagacatgacttgataaagcattgaaatagtttcaaaacgcaagttgattcacgtcaatcgaatcaatcttgagtgagttatggtaattttattgaaggctgctctaataccagtgccaaagttgacaacccagtgcccaggttgacatccagcgcccaggttgacatctaacgtcaacctggatgctgggtgagtgggaaaatgtgttgatgatgtatttttttatgtctaatttgttagggtttataccctagaaagcatgtaaagatatttttgtttataaataagaacatttttatatttagttgattgttaaattattaatatttaatattgaataatttatatataaatattggaaaatttgttattcatacatgaggttgtgacttatattatacagagaattaagattacttagccatgaataaaacagtcagcaacatattaaagttttgaaatctttaatcaaaggttgctagtgcggttcactgatgcccgttattcagtgcaagtaatctcaattcgaattactcatgtagtataacatctaagtgaaggtgttgtatataatagagattatatatgacatggaccgatatgtaattcaattatctttatcaaatatgttgtgtactataaagacctaattcatatcatacaaatgatcaatagtagatcgacatgaattctgagtaatcatgaa

SEQ ID NO: 270438 - DNA, 551 bp, Cannabis indica
actttttccagggctttttattttatgctggcaaaaattctaataccaacattgatttgccaacccccttttgccaacacatcacaagtaatttctattttaacagcgcaataccaacttttgccagcacaaaagtgtgctggtaaaagtaatatttcttgtagtgttcgcttggggaaaacgtggagcttagatcttaattgcaatttttagaggggagacttaattttttgacaactataactggaaagaattgttggagagtgcttttagatgaagattgaatttagcgtttagagttcttttctttcttttttacttataatttatgtaaatttcatgtttatgaatttcttaatgattaacatgaaataaattctttttagtatatttaattgaatctcttgaaatttcattatgaattaatgcaagttttctgtttcatcttcatctaagatttattcaatttgtgtttattgtgaatgtgattaacaactcacctcttacatgctatttaatttgattcagaacctgagaaattagatttaaat

SEQ ID NO: 270439 - DNA, 693 bp, Cannabis indica
cagtctggtaagctctttgtatcagcacggtagcttgccgactacgatcttcgatctctgcatgttgagcccttaatgcctccatctctttgtctctccattcagcgaacatacgccattgttcatcaaacacgagatttactgcgacacgcagttcatcctgatcatgatgcagagtgttgctatgactctgcatgagtctgagcgcagcacagagattttgcaattcggttgcgtctccgatgcttgtttaggcgttgatacctggcagaatagtcatgttatgaatgccctggctgtgtgcagaactattattcccagtctcttgtacaccaggcgcagtttcagtaacaggagctatcccaccattcaccacgcttcccgtctgtccacgattgacagcgggtggaacccttgaactccctgcgtcgtacaatgttggatctagcgtctgtgaatttgctgggttagacaggcctttacaagtttgcaccatcgtgttgaatgtcgaaaagagggatgtgcgattcttctctcagtgaaagcaccaaaatgtggactacgcttttagccaacgataatgagtctttttgataagcgataaacgatatgtcgtaatggatatatataataaggcaataataagacacaagaattttatagaggttcaaccccgagcagttcggtaatagc

SEQ ID NO: 270440 - DNA, 507 bp, Cannabis indica
tcctatgaaagagatacgtagatttgggaagaaagggaagctaagccctagatttattggtccatttgagatactagagcgagtaggccaggttgcctatcgactagctttacctcctacgttgtccagagtgcataatgtgtttcatatctccaagctaagaaagtatgtatcagattcgacacatatgttgagctatggtgatattcagctttagggagacttatcatatgaggaacaatctatctaggttttacaccagaaagagaaagtactttgaaacaatacaattcaattgatcaaagtgttgtggagaaacatcaaggtcgaggaagcgacttgggagttagagtcgcagatgcgcgagtagtatcccgagttcttcaggtaaattttgaggacaaaatttctataaggaggggatagttgtaatatcctagaagcctaattatgaataattaggacttattatataaatatggagtaattagggtacaatgagtagga

SEQ ID NO: 270441 - DNA, 643 bp, Cannabis indica
ctctacgcagttaatgatgagatgtggtatttattcacagagtacaaattggattcccataaattccattccaatggcgcaatgtaaagctcaagcttttttctttttcccttactttttagtatttttaaattgttaattcttatgatattgcatgggcccagcgtgtataccactcaatttgtctttattattatggcaaattatgtaatacctcatatacttctactttttgaggaattgcataccacaacacatcggagccgaatgtccttctgttgaatctggattctttacgatcttacacactatgattgaggtattgatgtgtgtgggcactactctatcactcaagggtttcgaattttaatggtgaagaagaacacttaaagtggcggctaggttagggagagaaggcgctcagtttttctgaagaaaggatgattgtttttctgaagccatcactacctatttatagcaaaccattagggtagggttagaattatttggcattaaaatagtgaaaaaataaaataagagtggccgaccgtgtaagtggataatgggtctcacttttgcaattcgctgttttatcatttctgcatcttattttctcaaaaacgccaatttttcaatttaacca

SEQ ID NO: 270442 - DNA, 916 bp, Cannabis indica
cttggggacccaagcagcaatgttggacctgtagaagaattagaagagattgagatcgatctagatatcccgaccagaaagctaaagatcggaaaaggtttgttgctcgaatcagaattgataaaatttctgagagcaaacctagacgtttttgcctggtcacatgcggatatggttgcaattgatccttctatcatttcacatgttatgaatatcgatcccaacttccggccaattcaacaaaaacgaaggttgttggacaaagaacaagtagtagctctgaggaagaagttgaaaagatgcgcaacaacaacttcataattgaagctttctacccggcttgggtcgcgaatcctgtgtttatgcccaagccgaataagaaatggcgagtctgtattgatttcacagaactcaacaaagcatgtcctaaagactgttttccacttccaaggatcgatcaggtcgtagatgcaacagcaggggatgaaatattaagctttatggatgcttactcaggctacaatcaaatcaaaatgcatccaccagaccaagaacatacaagtttccgaaaagatatgggtctatattgctacaaagtaatgccatttggtttgaaaaacgctggagctacataccaaagattggtaaattaaatgtttaaagaccagatcgggcgaaatatggaagtgtacgtggataatatgctcgtcaagtccagaaaggctgggggcacatagacgacctggacgaatgcttcaaagtcctcagaaagtacaatatgcaactaaatcccttaaagtgttccttcggagtcagctccagaaagattctaggcttcatcgtcaatgcccgaggaattgaagctaatccagagaagactcaagccatcctgaatatgaacttgccaacaaaaacc

SEQ ID NO: 270443 - DNA, 566 bp, Cannabis indica
gtgcggtacttcttcaatcctaaggacttcttggcgaggaggtggtgcctctaacagatagatgacgttaatcaatttttttctctgcgagattgactattgcattgtagcattctcgcgagtctgactggactcctcgcacaaagcctactccagcgggagtagggaacttcattgtgagatgatagatcgacatcacgatcttcatctctttaaggattggctgaccaattacggcattgtatgtcgaatattggtcgattaccgcaaagtcagccattgacttggctactacgggggtagttcctagggtaatcgggagcttaatcatccctttcagtgcgataacgccgccggtaaaaccgtatatactcgacgcaacaggtcgcagatccttctcatgcaaccccatttgtttaaaggcttggaagttcaagagattcactgaacttccattgtccacgagtatacggtggacattgtccacgccaatattggtgacaatgaccagtgcatcagaatgcgggtgatggacccatctccaatcactctccatgaacgtgatg

SEQ ID NO: 270444 - DNA, 532 bp, Cannabis indica
gcttattctcaacaaagaaaaaatataaaaatgttgttgctgcacgaaactaagtgtatgtttgacatcataattaaaaagattgtttttttattctcatttttaaaaataattttttgaaaacaatgccaaatatgttctaagggtctccattttactcttattattagataaatgctaagagcatttctaatgttactcttaattttttttttagctaaaataactaaaaatttaaaataaaaaattatgtttattattattgttgctccaagctctctactacttagaatttaattattttaataataatttataatttaaatttgttaaatataaattaattttagaaaatattttaaaaaaataatagtatttttaattaaaataatataaaaaaaatagtaaaaaagtaaggaacttccctaggtttagaaaactctagttctattctttattatagagaactattttttatatagttgagactcattttttaagtctaacttcttattttaattaagaagtattt

SEQ ID NO: 270445 - DNA, 834 bp, Cannabis indica
tggcacagatgtcatactccctgcgcgcacgcaaggggagtctggtgcgtgggagaggctgcattgcagcctgttgggctgagtaagcttaacgtgagcagcgccttcggacaggatttgtccaagtgtcctcggtcacgaggttgtttgaacctcggtcatgactgaggtgcactcaacctctgcacgcgcacgtgtgcaccaattttgggatattttcactcaaattcaaaaaatcatagctaattcataaaaaattcaaattgagttctataaaaacttaaattatttattatagtaaaatcatcaaatatacatataaactaacatgaacacatacaaatcaacacaaacattgttttaaatccatatttcatgaaagtaaatcattaccatggctctgaagccagttgttggttgcagcggaattaaatgactccttccacgcagatctctaactcttgtttctttctgttgtagagtattatcaagatctgagtccgattctcattcaggtgttggattcttcatagtcttagacactatgattgagtactagacttgctatgtgtgggcatgtactcaatcactaagaggcttgaaattttctaaagaacaatgaaggaggttcgaatatagaagaaagaagaagaagaggtctcaagaactctctagttgtttgacaaattgtaaactaggttatgagtcattagttcgataatgagatcatcttattccttttatactatttcacttagaattagatttaaattatatgacattaaaaaaatgataaaaattggccaaaaattaccttaagtggctggccacata

SEQ ID NO: 270446 - DNA, 848 bp, Cannabis indica
aataaaaaaaaaaaaaacttcatggtgtggctggtatttgatagtggtggtggtgcgtcgtcatggtcacacgtggtgcgtcgtggtggtggtggtggtgcgtcgtggtagtggtagaagatggtcagatagagaaagaggctgaagagaattcgagttagaagaaaaaaatggggaaaatgaaggaagagagtcgaatggggtatttatagaagcattagcggcggatgctctgcccctaatagttaatagattgtttttaatttttttttttattattttttattattattagcagcggggtccgccgctaataatattcgaactgaatgggtaggatttttcccgcccacttactagcggcggaccccgccgctaatactattagcggctggcaatagcgactgacaacccgctgctaataatattaaaaaaaccctatttagcggcagaaattgaagtccgccgctaatactaccattattagcgacagattttagtctgccgctaataattccgctgctaattaagaaaattattgtagtgtaaggttatgattatatagtagtgtttaaagttttcgttcatatcatcatatacatatgtaaatgcattttcatttcaattttgagagatgattcaaacatatattttttactccataaagtattaccatttaagttcacaatttcagatttttaatttaagtaatataatataatatatatatatatatatactattatcattttaagtttttgatctaaactattcaaatagaacattaattcacatatatatttgttattaatttgtaccatttttgtattaaattttgttaaagttta

SEQ ID NO: 270447 - DNA, 558 bp, Cannabis indica
aagaagaagaaaaaaaaagaaatataaaatatatacagtatacatactatatatatacaaaaaaaaatcaaacaagaacaacatttctctatcagcgtagcttggtcaaaattcaaaatatacgaaataaaattttcctaaggtaattatttattgtggatattgcctaaaaaaataataatatatataacatataagagcaatattttagttttaattatttagcaaaataaatatatatcggtaaagaggtaaagttataatatatgcatatataatatactagatgagagttacgtggcgagccacgtaaaggcgagcaacgtaaatattaattttatataagttttagtggtttttgtttaagaattcagtaactaagcaacgacaacaacaatgatagatagatctatttaagtttttcatatttgtaaagattataaatctaaacttttaattttcttgattagaaattttgaattgttatttatttgttcaattcacttccatccaatctatcaattttaactgataaaagggcttcaggattggagactg

SEQ ID NO: 270448 - DNA, 511 bp, Cannabis indica
caagacaagcctgaaaatctgtataacctaaaggatttaaagcaccacccttgtagactaacccatagtttctagtcctcttcaagtacttcaaaatatgtttaattgtcgttcaatgttcctgtaaagaccgcttagtttaatttggaaattagcagttaattatgtttaattatgtttaattatgaaaattatttatagatatttaaataattatttatactgttatttttgaattctgaatgcattttatgtcatatagtgaaatttcataattttgcattccggttcccggtaacatggaacccggtgtttagctcagtaaaaatcacaacttagtatgttagtatactgggacggtttattagacattaggaatgtcgggattggctgggaatttagaatttccaaaaatacccctttagtgttagttatgctattttagtgagaaggggcaaaatggtcatttttccccattgttattttgtcctttagtggactttatatggtg

SEQ ID NO: 270449 - DNA, 941 bp, Cannabis indica
ttgactatactaactattttttttttttaccaacaatatggttagttctaatattttattgatgtttaacaacaaagtttaatacatatcaataagaaaagaagaataatcctcaatctaagctaattcaccatccaccttaagtgcatccacaacttattcatgagaaacgaacatgaactagggatgccttaagaaaactggaaagcaaactagcaaaaaaaatctaaaaaaaaatctagctcatttcaaaagaaagagcgcttttaaataacagaaaccaaaactaaataatgaaattctacataataacaaagagaaagaacagcatgtaaaaccaatccagcactatcattaaggctgaagtttcagcttgaatgactaagaagtaaccaatgagttcagatcttctccaatatgtgaacttttcgtgttttgaagtatagataaacaacctataaaatactaaaaaatataaatgaggtaaggaattaatttatagaaaataaaccaaattttcaatatatatacttgtatataacaattaaaatatgaaaaaaaacttatctatgataatcactgatcctccaataatctttaatgtatccaaaaatttatacactcaaaaaataaataacacagcaaaaatgcactaataaactgagaaaatatgagaatataatatcactatcctttttgtacaaaataaaataaaataaagagtaatttgcggcataacctccttaagtggccaggtttttgcaactaacccccaattttaaaattttggtggtaaaacccttaaattcgtccatttttagctgttaactgtcatggtggaatgtctacgtagactcagtgtacacgcgacataattttattggtccacgtaaataaatattttaaataaaaaaataaaaattaattattttaaataaaaa

SEQ ID NO: 270450 - DNA, 591 bp, Cannabis indica
agaaaagcagtcttgaaatcaagctattcaactttaaactccaaatatgttgccaaggacaacatcagtcttatcgtcttgtattttaccacaagtaagaagatttcagtatagtctataccttccacttgagtaaaacccttagccactaacctggctttgaacctcataggttcattctcattgattccctctgtcaccttgagaatccatttccactccataattttcttgttctccggtctcagcacaactacccaagtcttgttcttccgtagagaatccatctcctcatccatggtttggatccatttagacttgtttacacatgaaattacctcttcatagcttctgggctcttcaattttagtttgttaaactgctgccaatgcaaatgctattatgtcaacttttgcgaaccttcccggaggttgaatctctcttcaagttctatcacgagccaattgataaccttccaaacctgtctgtctgaacccttttggcacctttatttggtctttgttatcttgttcttttgactcaacaatagcttccaactgtgcattgtcttccggttccccaacaacttct

SEQ ID NO: 270451 - DNA, 1303 bp, Cannabis indica
gtctcaggcaaattccaagggaaaaaacacaacggcagacgcgttagctcgattggcaagcagtaatgtaagtgataagggaaacttggttcctattaagttcctcgaagagccgagcatcactggcacagaagagattgaaatgattgatacttccccaaactagatgacaccgatagcagcctacctcaacactcgggaactcccagataatcgaaatgaagctcgaaagatgagaaggaaggctacacgatatatcatagtagagggaattatgtacaggtaagggttctccatgtcgttgctcagatgtgttactaaagaagaagctgtacgactcctatctgaggtgcacgatagattctatggaaatcatgccaccgggcagagtttatctaagaaaattctacggcaaggttatttctggccgacaatgattgaagattcaaaggcttatgttaagaattgtgacaaatgccagagattttcgaagatacctcgagctccgcccaacaagttaactcagatgcaaagtccgtcgccctttgccatttggggaattaatctgatcggacaattacctaaaagtaaaggaggagtccagtatgcattggtagcagttgattacttcactaagtggacggaggccaaaccactcgcaaccattacatccaagaaagttcaagactttattgtgaagaacataatctgccggttcggattgccgaacaaaatagtttcggataatggcaagcagtttgacagccaatccttcactgatttttgtgcgaaccatggtatcatcaaaagtttctctgcagtggcacatcctcaggcaaatggccaagttgaagcagtcaacaagaccttgaaggatacactaaagaaaagactcgaagatgccaaaggaaattggctggaagaacttcctgaagttctatggtcgtatcgaacaactgagaaaacagcaaccagacagaccccatttgctatggcatatggatatgaagctatgttacttgtagagcttgagccaccgtcccacagaagattaacgtacaaccaagaagtaaatcacgtactcctggccgaatcacttgatgaaattgaagagaagcgaaccacaaaaaacataaatttgatagcacatcaacaaaaagtagctttgtatttaaataaacaagtgaaggctcagaaattctttgtgggagatatggtcctaagaagagtatttctaaacaccaaagacagtacgacaggtgtactcggacctaactgggaaggaccatatcaggtggtcgaa

SEQ ID NO: 270452 - DNA, 671 bp, Cannabis indica
gcctctgcgagtaagggatctttacatagtggtcaatgctgataggtggagaagcttcctttgacgcgaggccctcagtagtcttcttctctgctggtatcggtgccagttgatcctgaacctcttcttccattggttgtctctcattaggcccttcatacttcttcccacttctcaagaattgccttacagttttcttttgagttcacctctgttgtgctagtcggttaccttgagggcaggtcgctatttgtgtcgccaattgccccatctgattctccaaggctttaatgaatgatctagtttctgtcataaattgtagcaacaaatttgtttgtagactggaccctccactagaaccttgttgttgtggttgttgttgattctttggggttgatttctctactgatagaactcctgttgttgctgattagaggattgccttgtacattctttcgttgaccccctccttgattatacccatagttattgttttgagaataattcctgatggcttttgcttgatccatcggcaaactattcacatctacggggcattggtcataggtgtgagggcccccacagagctcacaagcaacttgagcctattttgcttgcacatccatcaactttgttaaggcctctacttgggctgtcaatttggtgatggc

SEQ ID NO: 270453 - DNA, 744 bp, Cannabis indica
ttcttgtttcgcccaataacagttgggaggcccaaatacttatcatgagtagcaactgaccccaagcctaatatacccaatacactcgcacgatccgcaggtaaaacattcggactgaatgtgatagcagatttatcaaaattgacttgctgaccagatgccaactcataacaatgcaaaatctgacggatagactccgcctccctcccattggctctaccaaaaatcaaactgtcatccgcaaagaaaagatgagacaccctcggcccagaccttgaacaacgaaaacccatcaactcaccactcacttcagcgtgacggagcaaagaagataacgcctcagcacaaaaaagaaacaaataaggcgagagtggacagccttgtctcaaccccctagtcggcacaacacacccccgtggccttccattcaccaaaaacccatactccgccgtagtgacacaatccataatacgatccacccatcgttccgggaagccaaacttgcacataatagcccgcaaaaaagaccactccaccctatcatacgccttactcatatctaatttcaatgccataaaccccctgacaccattatttttcttgaaaagagagtgcaacaattcaaaacccaccataacattatcatgaatagcacgacccggcacaaaggcgctttgaaacgaagagatcagcggagataatgtacctttcaaccgcaaagccaacgccttcgccacaatttta

SEQ ID NO: 270454 - DNA, 378 bp, Cannabis indica
ggggacaatttcaatacccaaagcggggatagggcgggggcggggataatactatctgcaccatatccgaccccgatatagatatatataattttctttttattcttaacatatatatagtatatatatgattgataatcaaaattattttgattatcatccataatcaaaattatatatcatatgcttaaattatgaagatctaatgacgatagtaaactgatgatcattgtggattacatgtgtaaagatactttcatctcgattcttaatttcatctttgttttactttttaatttgttgggaggcttgagaggtatgcgactatgatcctatacttattgggttattgattttttttgttttttttttctaaac

SEQ ID NO: 270455 - DNA, 380 bp, Cannabis indica
atcaaatgaaaatacaacctttaaaataatgagctttagttataagaacattcgatctccattgttggttttacacagttcttgttttagtgagtaatcatctctaatggatgaacgttcattagtaatttaacgtcgtaaaatctcgaaagataagtattattgtaagtgttttattcttactaatgtccaccccaataatggctgctaagagtaagacttacaaggtatgaaacaatagtggaagctcagaagatagaatgtccttgactctcgcctaaacgggacaatgccggattctagtcttgatcgaataaaaggttgttaaaatggtctccattttagatgagttgactactctattcaatgaatgatatctc

SEQ ID NO: 270456 - DNA, 766 bp, Cannabis indica
gatagcatatctgagcaaaatatatgacttactcgcacagttcaaaagctacgcaaaaaaaaaagaagagaagaaaacacaattgcagacacgctagctcgattggcaagaagaatgtaagtgataaggcgaacttggtccatttccagttcctcaaagagcctagcatcactagcacagaagagatcgaaatgattgataattccccaaactggatgacactgatagccgcctacgtcaacattggggaactcccagataatcagaatgaagctcgaaagatgtaaaggaaggttacgtggtatatcatagtagagggaattatgtacagaagaggattctctatcccgttgctaagatgtattacttaagaagaagatgcacgactcctatctgaggtgcacgacggattctgtggaaattatgttgctgggcagagtttatgtaagaaaattctacggcaaggttatttctggccgacaatgattgaagatgcaaagccctatattaagaaatgtgacaaatgccagagattttaaaagatacctcgagctccgcccaacgagttaactcagatgcaaagtctgtggccctttgccatttggggaattgacttgatcggataatgacccaaaggcaaaggaggagtgcagtatgcagtggtagcgattgattacttcactaagtggacggaagccaaaccactcgcaactattacatcaaagaaagttcaagactttattgtgaagaacataatctgccagtt

SEQ ID NO: 270457 - DNA, 588 bp, Cannabis indica
caaatggatgtaaaaactgctttcctgaatagtgatctggaggtgcactgcaggtatacatgaaacaaccagaagattctcctctagcgaaggggagcatttggtatgcaagcttaagaagtccatctatagattaaaataagcatcccgccgatggtatttaaaattttatgatgttatctttggatttaaagagaatgtcatggatcaatacatatttgaggcgctaaatctaaaagtgggataaaatattttaatatatattttattgcattttttatttttgttaacttaaaaaatgagataaaaagtctattttttgtagtaaacattagcggcttgtatctaaacttatcacatcatagtggacaaaccatatttgttttcacttaccaccccaattgggcacaacatagtgtttgattaagcttcttaattaaatgagtctttgccaatcaaagccgaggggtatttgcctataaattgagaggattctcattttcaatttttaagcaaaaacaatgcaaaaatagtgagtgttataaatattaataatcatgtggatgtccaaatcttttatttattacc

SEQ ID NO: 270458 - DNA, 749 bp, Cannabis indica
attctaacagatcagattacaacatcaaattatgaagttttcctacaacaaactcaatgcctgatctgacgatgtcatctactaactatggtgaaatcttagtcatactagttacatgcctgggaccgttcctgctcagggcatcagccactacattggccttcccaggaagataaagaatttcacagtcataatccttaacctactccaaccgatgtctctgcctcatattcaaatctttctgggtaaagaagcatttgaggctcttatggtcggtataaatctcacatttctctccgtagagacaatgccccaaaatcttcaaagcaaacactaccgcggcaagttctaaattatgagttgggtattgttgttcatattcctttaactgacaagaggcgcaggcaatgacccgatcgtcctgcatcggtacacaccccagacccttcctagatgcattagagtaaactacaaatttctctttattagatggtagggctaataccagagttgtaattaatctctctttcagctcctgaaagcttgcttcacacttatatgtccacaaaaatagttgattctttttggtgagttcgattaagggcattgagatcttagaaaatccctctacaaattgacggtaataaccaggcaaacccaagaaacttctaacttctataactgtcttcggtctcagccaatccctaacaaattcaatattcccaagatccacttttgattccatcttt

SEQ ID NO: 270459 - DNA, 830 bp, Cannabis indica
tagagcccaatacctaatgtcattgtagaaaattaattttatataagtaagggagtagtcacaactatttttaattatataaaatttcccttaattgacatagtttgtaattaattatatagttgtaataactttactccacgacaattttatgatatttatataattaactaggatcacatgttaaattatattctcttaatttattcacagggagttatggggatttaatttaatagcatgttatcacaaatttaattaagatagataataaaccttcatttttcttaaactaattgtttaattatatctatcatacaattcatctaattttattaaatttaaaatttagcccacataaaattttagatttagtaaaattttcgtcttcaatttatactttaaagtctaatgaaccatataattttaaataattaaagagtagccacagtatccttattatataaaattatatatattaagtggatgaggatcacataatggacatgtataataattaattatgtggataaaataattttaccccacagaaattttattatgttcataaaattgatatgttaaagtaaattctcttaatctatcccataggaaattatgtagatttaactcaatagttttattataaagtataaaattttaaaatattttaaaataattaaatgtttcacacatttcattgagatagaaaaatataactttaagttttttcataaatgatttaaatctaccataatctaaatctaaatctgatcttattaaattaaaaatttagtccatagacaatttttgtttaataagatttcata

SEQ ID NO: 270460 - DNA, 608 bp, Cannabis indica
aagcggagtagtaagcctgctgtagtaagctggctgtccttgacctggaggttgatgtcccaatgaagcgtttggattaggctgttgtccttggcctggtgtaggtgcttgaaaattgatatcaaagcgatgatagtatatggacacgacatggccgactctattgcagagttgacatacgggacggtttcctcttcctcctcctctgccacggccacgacctcgtggtgagtaaccccttccttgagagttaaacccaggaggaccattgctgaagttgacaggccttcgagagttagcagcgaggttggcactgggagtgttgagatcacctggagtaggagtattcagttgttccagtcgcatctcttggctttgcaagagaaattgcacttcctgcaaggttatagggtcatcatgagaagttaaagtaataataacagggtcataatcatgccctaaacctccaagaatgtaaagaatcaactcctcatcagatataagttgtcctgcagcagagagattttctacaaggtttgtcatcttcatcatgtagtcatgtatagataggtttcctttcttcagagattggagctgaaatcgaattt

SEQ ID NO: 270461 - DNA, 926 bp, Cannabis indica
ctttttcttatattgttaatgtaatgcttttaatatattaaatagtaagattttgaaggtgaaaaagtgtaagagtcaaaattcacagctcacctgtttgtattttccaatattatattaaattgtatttattacattttaaacctctatttaattctctctcctaatatctctacaactttttcatttccactttttcattaatttaattctctcttgatatttctgcaagtttcctttcaaatgtttatctcttcctcttcttctctctctcattttctctgcaattactatgtacagttgggaaatgacgaacacaacaaataagaacacacattagatcaatgacaagagaaggcttacgacggcggccaccaccaccaccactgccgaattcataacgacgctcaatattgtcgacatccagacctccaccaggtatgtttattcatttcaaaatctctaattttttgcccttctttctttccatctatacataaaaatgtaaaatcctaatttttttataagtgtttctcaatttttttttaatccctaattttttacccctttttctctatatctgtatatataaatgtcacatatgatgaaatttatctgcttttacacatattttaatttaagattttttgttttcgaatttcttggactgatgcatgtttgataattttgcccttaaaagaaaaagctaaaaaaaatatagataacttttttattctttttttttaaaaaaaaaaaacaaaaaaatacaactattagcttactcatcaaatacgtgttagtatactaaattttttatttttcatactatcaagtttttacaatttccgattatctattagtagagtttttaaaatatttgaagataaatctttggttttatcttacattttgctacgtgttgagct

SEQ ID NO: 270462 - DNA, 807 bp, Cannabis indica
aatgttagacattaataaataaaaaggtttaaaaatgatacaaaaaatgtccttatttatttggccgtgaactgaggtatcatcactcctaaaattgtaatttgaatgttgtagatcattcaataaatatacgagacattgttgatcggagctccctactgaattcaaattcaaattgatacaagtattaaacaaccaatccaccaaaattcgaaataaatacattcgcataacaaaacatataattgttgttcgattgttgcagttcgtagtacaaatgagatgacaaattgatgatcgcagctccatattaaatccaagaggtatgaaaaaatagagtaatgaaacacaccattaacagacaaatatttatactaaaaaacataaacttgtttttaaattgttgcagatcatataaggatgagttgaaaattgttgatcggagctcccaatcaaatccaaacatacaataacaaggtattgcattacttctgatgattgcatgttaatgattgaaacatttgattcaaaaaaaattaaaaaatcaaaaccaataacagtgaataattattgttgttttttgtttaatttatgtaaatcatttaaataatcaaaatgttgaagaataaaacaaaaaatgaaaataaatagttacatttaccttgaaattaaaagaaaaatgttgatttaatacaaagaaaaataaatagttaaaaatcatttgaaatacaaagaaaaaaaataataaaattaaaatcacaattgtatataatatcaacattatatagaatataaagatttagtaat

SEQ ID NO: 270463 - DNA, 572 bp, Cannabis indica
tcagtaaaaaaaaattaaaaaaacgcataaaaatataaggttaattaggatttttttttcccaaaattttgatatgtaccaaatcataccttctgaacatttttagacattaaaaattcctcctgaacaagtgagattgttagatttaaggacttttgtctaattaaattcaattctactatttcagtgattatttatgagctaaactatgctctccaaaccatgatatatctaccaaatcacgtctgtcgaactttgatatgtactaaattatgcccccgatactttcatccatgttagaattttttttactaaaattggacaaaaatccttaaatataacaatctcaatagttcagagagcatttttaacgaccttaaaagttcaggggtatgatttagtacatgttaaagttcgggggaaagaattcctaattatagtcaaaatataaatgcaatattataactacatctaatattatatatataaatatatatttatgtttttttgggatgatatatatacctatattggcaatatatagatagaaatatatttatatgagaaatgaa

SEQ ID NO: 270464 - DNA, 1026 bp, Cannabis indica
tttctctctttcggctggggcaaaaactaaggggaaattcattttcaagctcgtgtttactgagtattaagcaaggtttggtgagtctaaagcaaaggtaaaaccctagaacccatgaatatgtgttttgaagctttttctttagtttgagtctgtgatttttgaagttgatggctgttacgatttaaagattatgtagtctgatttctaagcttattttgaataattttaagcttttgatattagttttgagctgtggtgagggaattgtgtatgcttgagctttgaaactcaagtttaggtctttaatggcaagttgagtttctttggtttattaagtgaaatactggttggaaattattgtttatgcattatttaggtatactggagagttttgcaaagtttggtttgattttgaggtcatgggggcattttttgggttcccagcacagaactaaaatttcggttctgggggacctgtaacaatcggtcgatcggtgggtccccaggaaccggacttccagttgggaaccggtctaccagttggggcactttttggaaccctagtttttcccatatttttagatatttagggtattgccatgttatttatcgataggaaaacttttagtttcaagtttaagtccccagaaagtgatttagcgtgtcactcacctatgttatgattaacgtgattagggcatccatctagcacgagactttccgttcaggtcggccagcacacttgaattcggaaagaaggtaagaactgtatataatgtgtgatatgaatatctgagtgtatgtatatgttatgtgtatatgcatgcttaaaatgttagttgcactaccaacacttatacagttatggtatagagtgcattggtatagtgaatgttatctgagagtaccgtgataccagcataagtacggagaggtactgggagtgtgtggtatatcactcagtggtactcagggtatgaaacaaaccctaccaacacttgtacattgaggtacgtagtgtat

SEQ ID NO: 270465 - DNA, 542 bp, Cannabis indica
tcttatgattttttgtcccttttttaatctaacttgccactatttataatcacatagtagacagttaattacaaagttgactataatctttacaatgtttatcccctaaaatcatggggtttgattatatatcacgtagtataaatgcggttattatttgaatatcacacaacagtgatttacccaattttattgggtcaaaataatcgtgtgtttaaacacgtcttaaatcgtagcgttctgagatgtctcgacatgaacttggttccaatgaccttgatagagagccggagctttctcccctatcttttgaaggcttaatgcttcattttgacaatcgcagtgtttattaacagagagtacctcagcagtcatttgaatgtcagcttctgactctccaagactataagtctcactgaaagatttcaggagttcattggtgaaagtaacaggaatgcgtgttcctatagcgagataggcgcctcacttattaggtcttgagtccacccgactgttatacttagtttgtacattatacgcta

SEQ ID NO: 270466 - DNA, 529 bp, Cannabis indica
ggttggtcatgggggactttaacagttatttgtatagttcggataaaataggaaatgatcatcgtgactcttcttctatgtctttgtttgctgattttttggctaagtttaatatgttccctgttcagtttttaggaaataggtatacttggtctaataaaacaatttcagaacgcttagattgggctgtagtgtctgagtcttggagtgatctttatccaaaccataatcttcagcatcttagttattatggctctgatcatcgtgtacttaaacttagcttagctccttctaatgttaactacaatgttaataggactaggcgatttaggtttgagaacacttggcttgaggacccctctttttatgatgtggttaaaaatgtttggactagtacttgtgtttctaattctgataatgttcagcatagccaccttataggtgggtataagagtttcctcaagaagcaaggggcttgcatctcttccctaaaaaattggaatagggacaataatctcctttttaaaac

SEQ ID NO: 270467 - DNA, 896 bp, Cannabis indica
ggaaatttgtagagtgttcaaagtttttttttctcttggtctggggatttcgctctgaaaaactcaaacaaaagttggcaagaaatggaaagtaaccaaatgaaggaaagatggtggcttttataggccaaagtgcatgaggaacaggcgctatcacctaccaatcgaacggctggggaggcgcacgattcaaattcccaaaaatcaacggttggattgattcgtaattaaggcggtggaaacgcttgagtatccgtctgacaccattaatgcgacgtatcaatcaatgggcatgaaacgaatcgacatccgcaaaaagtgaatcgctgcattaaaggcgatcattaaatgcaccttcacgcgctcaaagctcgtgccaggaaactgaggggtcaaccggaggaacttgaacaagccttgttttctctttcaaataagcaaggcttgtggggtaaatgttgcccctgattttgcccaatatacgtggaccaaccggacagggacacgtggatcaaaacgtcttaatgcttgaattatttactaagtctttgtgatataaggcagcatccgggacatgcctcccagacaaggcatgctgagccccatacgctcccggatgcccaagtaatactaaggcatctccgcgaggtgtcaggcttcccctgagcagtcaattcgcatttaatgccgcatgggaggaagcgtgttgggactgctacacgcaataaagtcggatggcacaacccccaatcggcagctacgaagtaatgatcatttaagtgtattgacggctacactgtgaagggtcacatcagtcgaaagacaataaggacattccacataaaagccttactgcacctagggacttgaccatgcattactcatggtatattcat

SEQ ID NO: 270468 - DNA, 667 bp, Cannabis indica
aaaatttatatattttattacacacgtgactatttttcctatacatgtggtcaatagttgtttaaattttattttcaacacgataaattatctgaaattttctaaaatttaaaagtagtcttaaatagttacaacgtatgcaatcataaaaaaaatagactaaaaagttctcctagatgcatgttgtcctaaattatgcacgaggtgacatggtatttatttaggtgatacaggagagcatctttaatttgataaaaatattttataattttattctttaatttcaactgaattgttatttgatttctatatttttgtattgattgaattatataaagaaataaatatgactaacttttctatatatggaaagtgagctataaaaggtaagcttgatgataaccaatatctatctatccaactgtgtatatctgatattttgtgagtttcctaaaatgtttgatcagatttgttgtgaagaaaaccgaagcatgcaaggttttcattttttataaaataaaagtcgcacttactgctcacgattctgtaggtatagaatagaaaatttctaggctaatagaagaattattttaggaaagtattcaagtgagatgtgatcttgtttcagaccgtgtatgagctgacattaaggtgtatattgactata

SEQ ID NO: 270469 - DNA, 625 bp, Cannabis indica
catacatataaatatttctttgtcgtgttagattatttttttaagtttaaatttgaagtacttaaaacaaaaacttaataaaaacgagctagagtctcgtattcttcttatcaaaagcagttacaaaaaaaggagtacttacggtgtttctaaacactattaaaataaaaaaagaacaaaaaaaaaattcacaaaaaaaatatcctaaacaggtatctaccactcgtgatttattctatggttatagtggaaaactttgggattaagaacaaagagaggatgagccaagtcttgtaacgaccttcattcaaatgacagaggatgttcctgagttcatcagaactacgatcttctctccatttctcaacggcgacaagcttaccccgccaactcgaaacatgaccctgaagtaggataactaaagaacataaatattccattgtttctttagatgaggacagctcctcggttagccttaagagctcagcacgaagctcctccatagttttcgtgccagtatcatggaaacacgaacgttgcttttggtaggaacatgaatgatagttgtgtccttcaaagtacgtttgccagatgtggaggaagacatatttggaagagaaataag

SEQ ID NO: 270470 - DNA, 774 bp, Cannabis indica
ctcctgttcccggaatactccaaatgcctttctccaaaaaatacactacttcgttctcgtctctgcaccaaatgatggttcgatcatcaaacatttggctcacttgcagtttcctacccagctctcttgaaagattataaaagatacagctccacgataacccgctattatctctaaacataataaccgccttcttccaatcttttccatcttgttttgcttgcatgaactcatggaaattcctctgtttcattcttctaagcgggaaatcgttttttggtctgaaacttccatttgctttaggtaaaaaatcccaagatcccagccctttaatcttccatttagaaaattccactggggccttattagcagtagcaagctttttgacagcaccattctctacctgagaattctgattggtcattggtctcgcttgctccttcactacatttgcccacgatctctggttcaacaatctcccattacttgtgaatgctttctgtggagctctaatctcgttatcaaatgcttgctctctcttcatagtgctgttgagacaccttaaaaattccgaccaaccatttgccttctcttcttcaggtattatgactgttttcatcatattgttcttaagcactgaaatcttcaaaaagcttccttttgtgttcaagaagtattccacaagataacagctagagctgtttcgaaatgatcgtttgaaactgacccttcgcctttcctctttctgctggacttccttcactgtctcgatga

SEQ ID NO: 270471 - DNA, 1061 bp, Cannabis indica
ctggatgaactgaataaggagtcgtatgagactcattcatgatctctttcttgatactctcatccatgggcacacaaacacgatttccgaatcttaacattcccgtttcatccactgagaaatcactagctttcctagccgaaaccctagctcgggttttcactaattctggatcttgcatttgtacttctttgattcgctctaaaagagtggattgtagggtaatattagccaactgccccacaaccaactcaatcttagctcgggtcatctcatttgctagctgctgggagattcgtttcacaatgctcaactgactctgacccttcctgctcaaagcattagcaactatgttggctttacaagggtgataaaggatctcactgtcataatccttcacaacctctagacaacatctctgtctcatattcaagtccctctgggtaaagaagtatttcagactcttgtgatcattgtatatctcacatttctcgccatataggtaatgtcgccaaatctttagtgcaaaaaccactactgggagttctaaatcgtgagtagggtacctctgttcgtactcctttaactgctgagaagcataggctattacctgtccaatttgcataagcacacagccgagaccctgtctcgaggcatcacaataaacaacaaacttttccttatctgaagaaagagttagtactggagcggtaatcaagcgctgctttaactccagaaaacttttctcacaccgatcagtccaaacaaacttcaggttcttttgagtcaactccgttaagggtacaacaatctttgagaaaccctcaacgaaccgacgataatacccagctaaacccataaaacttttaacttcagtagctaatttttggtgttggccaatcccgaacaacttcaattttggctggatccaccatgatcccatctttgtccactatgtgccccagaaatgagacacgagataactataatttacactttttgaatttttcatagagtttatgatcccgtaaccgttgtaaaatcgctctgagatgtaactc

SEQ ID NO: 270472 - DNA, 708 bp, Cannabis indica
atttgtggttaaaagtaaaaaaaaatgtgactaaaggtatattagtcacaaaaattacaatttgttatgactaaatgtatttttaagacacaatacttgttgtgactaaaattaaattagtgacaacttgtaactaaagactatgctttagtcacaaataacattttgctataacaagtcatatttagtcttaaaaagattatgttatgatttatatatgtcactaaaaacatcaattttttgtagtgtatatatgatcactttatgttatttaattttcaactacgtttatttgcataccaaatgtttgtaaatagtctcatgagggttagctttgattttctatacgtacaactatttctggtttgatccaagttcttgttgtgatcgattatcaccccttaataattaagaatggtgctcaaagagcagaaaagaccagcagtgtaatatccaaataagcttcatggtaaataattagaatttataattatattatgggttaattaggtaataagtaagattatgatcatactaatttagttaaacgtaaattttaaatttgctataattggatataaatcaacgtaatttataaattacagagatttatatgacatatgtgaatgtaatgagttactagtgtaataaaaatatttttaggtgtggcaaccttagagactcgatcgggggccaaaaatgtcataa

SEQ ID NO: 270473 - DNA, 1648 bp, Cannabis indica
agatgcaacacaaattattcaagacattgctggctcgcattatggtattaaagttattcaagtgagtgactgggtctgtagttccatcatactacgagatatgtgggtttttgaatccatgaagaaattcaaaattcaaaatattaggatgaaacggctcggtttcctcatccgagtcataaccggggtaatttcccatgttccccatcttgatactttctgaatttatgggatccagctgttgttgatttgcattaagttgatggcgcaggttaggtgcattctgatttcgtcactcacaaagatcgggttgtcttcgattcaaatgctcacgaagattgggttatcttcgctcataattactcatagaccttgtctctgagtaactcttagattggtagcttcgcgtattgctcatgctttcttggttagcataacgtcgatgtctacttccctctcgtgttttccttcccgatcgactgtgtcctcgagaccttgagtgtcctgaattggaactcgcttcgtcttgtaacggccttctccttcaaaagagatttgatgcacaccctctatttagatatgtgtatgcatctttgctctctgattgaggaggacgctgagggtgtcttagtgatagcccacttgtcctaggttgagtcctaaggtttctcttgttgccacgagggattccctaatctctaggtcaaggctgtctcgcatcctcattcctgcgagaagcttcaagtatgtcgttttgtccgttcccttggtttgcaaattcttaggatccttgaggaatgtctcgctgttgctcttgattatttgtctaattatccattaaacatcatctgttcccccaggttgttgttcctgggtattttggtcatttccttggtttgcttcctatctcttggttcttgaacctcgaggtctgcgtcatggtcttcttactccaggatcaggttgattctaaggatttgttccttgtgctgcccttgtcgttgcagcctctctttccaactcaccgtttcgtcatttagattcgattaagcattgtcggagttgtctattttctagttccactaatagtacatacctagttggatcataagcatcctcaattctaggcacataccctatagaattatgggtatcttcattccttctttttggattttgaatatcatcactatagtttcttcttgaacgtgatgttccagtggtatgtaggggtgtacatcaaatcgctcaaaccgcccgcaccgcaaaaaaaatgcggtttaaattcttcgtggtgcggttgcggtttgaatttttcccgaaccgcgaagtgcggtgcggtttgcgattttgaattattaaaccgcgattcaaatcgcaccacaccgcatgttttaaaatttcaatttttatttttatttaattaagctcatatgagcccaacccaagcctataaatcttagggcaaaatccataactcttcacaaaccctctcttcttagcaacaaacccaaggccatacatgtgtattgaaatttagagtttgaagtttgtgtttgttttatttttaatcaattgttgaaaatatgttagttgtacatttatattgttgttggaatttaattagtttcaagtttgttattttgat

SEQ ID NO: 270474 - DNA, 889 bp, Cannabis indica
tacaatagacaaaaaatcagcgggaacattatcctcgctaaatatacgatctgaatacaaacaagagctacgagcaagacaatgtgcagctttgtttacaaaacgtttaacaaaattaattgtgactaacggcaaatcggccataagagaacgacaagccgccacctgaaggccaaaaggagaaggaatatccaccgtgctttggactgcctggataacaaccaaagaatcagtttcaacctcaaccggtccccattgtttcctctttatccaactcaaagcctccttaacccctaccaattcggccatagccgaatccacacgccccactcgtaacactgtgaaaccttcaatgaatcgaccctgataatcccgggccacccctgccgctccaaatcgaccatcacttgcaaagattgcaccatcgacattaaccttaatctttcccataaccggtttcacccaatgctctaaggccattcttgaacccgtaggaacaagtaaagaccccattctccgttgttgagcatttctccattgattaaggactactcttgccaatagaataacctccgccgctgacattgatttatcccgccaaaccacctcatttcgggcataccaaatcgcccaaagaaccatgagcagctcttcctgggccgtggatgagtgttgtaacagaatgtggctaaaccactcccaaaaagatattttgttaaaaaccctaaaagcttaataattttcaaaattatttttacgagagctatcttagtatgtggagataagtggaataaatttttagacaagtgttatactttgttgaagttatagtaatttctattaatattgtttctatttttacttctttttcttcatattatatatatat

SEQ ID NO: 270475 - DNA, 622 bp, Cannabis indica
ttgaagagtatatgtatgaagggttaagaataatttatatatacatttgatttaagtcttctcatttcaatagcattgattattcagaatcaaaataaattaatagaaaaatattatagaataaataaaaaataattaggattaatatttgtaataatatgttatttattaaaaaaaaattcaaaatagaataataataatttatcttattactttatcaaaaaacgtaatcataatatttaaattgattaaattgcctttttaagttaaattatagtatatgataattattttgtaagacatattttaaagaataaaattgttattatatatttaatattaaaaaataaaataaaaataaataaaatgtattgcccttaatgacatttcttacaaaatttgtgggagaagtattctctttcttttattccctatttaatcaagttctctctttcttaattttaataatgtaagtaaacaaatgtaaaaaaataattaccttactattaatttttattacttatttgtaaacgtacgtaaataaaattctatcttatggaaaaattccatttttatggctgaaatttgtcaatatatagttcaacacatttgtatatagatt

SEQ ID NO: 270476 - DNA, 688 bp, Cannabis indica
agtatatgagataattctccttattattactattattataagaaataaaattatcataacaacaataaacttcataataaaaagaaatgtatatatgtgagcaatttagtaaaattatttttttcttctttcttctactgcaaaattttttattttgattttgattatttagtttaattaatggttaagtatatatatttaaattttatatgataactaaaggttttttttttcaattttaataaaaaaaataacagtattataaaaaaaataataattagccggccaaataaaaaaaattacacaaatacctcttacacacacaccttcaacccacagtccacgtttccttgaattgaaacattcgtgtgatgcaacctttggtcaaccacccaacaacccaacacaactgaaatgaaacccaaccaaaaagagaaccactattaattctagtgactttacctgagaagacgaccgtaatcaatcaaaatagggactgtttcgaattcatgaaaaaaagtggagaaaaattactacgaaactaaaattcaaccagaattctagtttaattaatttgcataaaactaatgtcctgagtttaatttttagatccatgaaatgctgatctcaaaaaattaaactggagtttccaaacaatccaacctaagtataataaaaaaaaatacat

SEQ ID NO: 270477 - DNA, 724 bp, Cannabis indica
ctcgacgttttttcctgagagttatcgagattaccgccacaacaagaatagattttttgattgactttgcacctggaattgaacatagtttcaaaagcaccatatagaatggctccagtggcactgaagagttaaaatacaacttcaggggatgcttgatttagggtttatccaacccagtgtatcgccttggggagctctggttctgtttgtgaaaaattgaaagatggttccctcaaaatgtgtattgattatcgaaaactaaataagctaacaattaagaacaagtatccattgcccagaattgatgatttgtttaatcaacttcagggaaagactgtgttatcaaagattgacctgcgatctggttatcaacagctcagaattcgggaagaagatataccaaagactgtatttcgaaccagatttgggcactatgagtttctggtaatgtcattcagattgacaaatgctccagcggcctttatggatcatgaatatagtattcaaggattttctcaataactgtgttattgtgtttatagataacatcctcattactctgagtcagaagaggagcatgagcatcatcttcgaatggtattacagcgactcagggatgctaagttgtatgcaaagttcaaaaagtgtgaattctggttgtcagagatatcttttctagggcatattgtcggaagatggaattatggttaacctgggaaag

SEQ ID NO: 270478 - DNA, 569 bp, Cannabis indica
attctgcttcagccatcttctgctcctatcttgaccccgatggtccaacagccgacttccctcccttccggcaccaccacgattccatccaccaccttcagtcctccgcccgtccagaactttgttggaaatattttaccaggatctagatttactaccatctatatttcattaacatcctaatatgaattctaaaacaatgaaataaacacatataaagtttagaaaatcttacattgggtgcagcggaataatatgtctccttccacttaaatctctaacccttgtatcctttctgtcgcagagtattatcaatatctgagcccgaatctccttctttgttgaatctggattcttcacgatcttccacactatgattgagatatcacttgatgtgtgtgtgcactactctatcactcaaggttcgaaattgaagagaatagggccggttatgaatagaataggaggctagtcttttttctcaaagaaacaatgtacaagtcatagtttcctgaagccatcactttctatttatagaatgtcatctaggtttaggttagaattgtatg

SEQ ID NO: 270479 - DNA, 732 bp, Cannabis indica
agttttattctcatctgtaatatttgttgatctgagttggattttgggggcttcattgcagatggcttctaagggtagcttgctgctattgtaaaacacttccatctttattctttatatatgtccgtgaattttattgggaagaaaatttaggggttttttttttgtcactttcgttcgaacttcgaacccttttcttcgttcaatttttgatgttttttaatatatgatttttttttttccgtacattggatcaaactttacgcatcgcatggcccttagttgtttttttttttttaattacattttaaggcactttttttttctgtaaaaaaaaaaaatatattttatgttatatttttacgatttttaatagaaacaagaccaaaataacaaaagaattacataaggaacatgaaaataacatttaaataatattaaaacaacaaataaaataaacaagattttgttagttactgtacggatacggattgcaattcatgatgtatggtaaccgtcggatgggcagttattttgatccaaaggctggggtttatgtaagggtttatgtagggttaaataaatggttaccggttactttttttgaaatttaaatttattaaaaatagaaaagtgaaaagtaacatcaatcaaatcatattaactgtcgtcctcctccactattccatttccttgttcattttcattttgttttttattttttcattttgt

SEQ ID NO: 270480 - DNA, 638 bp, Cannabis indica
ttccaatatacgaaaagaaaaataaaaatttgtttcaatatgctaaaataaactaatagatttattagcatatccgatgataggctatatgaaaactatgtaaacaaagaatgaaaatatatttaaatatgtcaaaataaactaataagtttattaaacttaaactagtaaaccacaaatcaaataatacctattatgtatatattttaacaataatacattacaacaactacatataactatgtatcaataaatacaataaacgttaacttatacaatctgaatataaactaaaatattatatacaatactaagaaattacagaaaaaaaaataaaaataaacgcaacaggtaccatgttttataagactaaagtagttttgcaaaatatgtttacaaatgaagtttacagaaggagaagtagacgatcatgttttcaccattactaagcatttagagataagaaataaaattagaaaaataaaataaagaacacttatatttagagagaagaaatggaggcggtttgtgaggtttacaacccactttttggtaaaagtttaaaaaaattcaaaaactgaaaaacgtgcccacaagaccactttgacatgacccccatctcattcaactgacactga

SEQ ID NO: 270481 - DNA, 862 bp, Cannabis indica
ttgatactttattaattgatttcattcgcttggcgtggtcccgtggactaggagtgttcgaaaaaacactaatacttcgtacaaatctcttttctcaagttatttaattttctgcaattatttttttattctgcctgttctgttttgtcactgcaaaactggtctctgcagtaacagaattacattctgcttctgcaaacgtatccagttttatattttcgtatatatattattgacatttacaaaaacccggtttttcaaaatatattttaaataataagatagcataatataatttaaaaatagctaattaattattaagatgtttataaataaggttttagaggtaaccaaattatataatcttaaaatgattttttttacgtaaaagtaactaattagtttcttattagcatcataagtaaccaaaatgttagttttaaaaactcaggaaaatgataaaaaaatgaaatttggaactaattttattttaggcatattattttataattaagctattttttaatgatgtggcaacgtattattgtaattgagattcattaaggtatttttgtaaataatttatattttcagtatataattgacaaaattccaaaaaaatttaagtatgaattttggcccactaactttggcaacaagttatttcacaaattgatatctatattttttaaattaatttttaagatcacatatcatttaacatagaaaacgaaattgaaatttttaaaatcaaataatcgagatttatgattcttttagtccaaaaatatggactttttaccactgtaaggatacggttaaccgtttctcccaaaaaccagtttactgtttgggaaacact

SEQ ID NO: 270482 - DNA, 1272 bp, Cannabis indica
gctaaagaaatatatacgacaaccattctaacacaaaatcaaaaaacacagcaaatacaaccagcccaaaacaactcctaacaactcaacatgcacgttggtgaggtcaatatgtacattgttggagaagactgtcacctcatgcttgatctagattttcttcgcctttacttgcacgacatagcacccatgagtcacaaggactcaacaagaaaagtaataataataatcatatagtatattatgcgaatattgtcatttatctacaataagaatcaaatcatcacacattgttcataagataaaatctaaattactactgacatctgccacgaataaacataagtatataaatatttggtaataaaaccattataccaataataaaatttatattcatttaatcatataaattatatatatgttacctcataaagtaatcatcttcataacatcatgttgccaagtcaggcaagtcgatgcttaaataggataatcctgtattgcattgcctaattaggcaagcctgtgccataacctagcacccatatatcatataattgtatcacttaatcaggtgagcccgtgccacaacttgacatcaatatatcgcatcacctaatcagacgagctcgtacctactcccaatacttatcatatgtcattgatgcccgtatctacacgttgctaggaggaaaccctacaacggtttcattctatataacctgacaattttcatatcactgatatcgtatctacacgtctccaggaggaaaccctacaacggtttcattctatgtcataacttggcaattttcatatcactgacgccgtatctacacatctccaggagtaatcgcctaattagacgaactcgtacctacgcccggtacttatcatatgtcactgacacccgtatctacatgtcgccaggagaatcgcatcacctaatcaggtgagccagtacctacgctcggtactcatcatatgtcactgacgcccgtacctatgcccagtaggtttccaggtaaaattgtatcacctaattaagtgagcctatacctaagctcggtactcatcatatgcactgacgcccgtacttacgcccagtacgtcgccagaaaaattacatcacctaatcaggtgagcccatatatcacatggataatatcatcatattatcgatactcaaccaatcaatcttttcattatataacaatattaattatatctcgatattaatcaattcataacaatactaattgtattaca

SEQ ID NO: 270483 - DNA, 635 bp, Cannabis indica
tttctctatttttttttttattaattaatttttttaaaaagtttagttgatgtgatgctcatggtcaaatcaaagtcactcaatttgacatgtttaaacatataaacacgcaagatggtccaatataccaaaattcacatgttcacttgtttgaaatcaagtccaaagtttaccaaaagtccacataatgacctataattttgagttttcagcaagtatagttcatataggtcaagaatcaagaaattatctcatctatgcatataaatatcatatttggaacgaatatgcataaataagtaagcaaagagatatgaaattttcatagctattaaaccttatatatcattcaagttggtcatgcctagatctcttctaatgaaactaaatctctcatcactaagaggcttggtgaatatatccgctatttggaatttggtgctcacaaagtctagcataacatcacctctttggatatggtctctaaggaagtggtgcatttatgtttggctctagaatgcaatattggattcttagagaggttaatggcactagtattgtcacactttatggatgtacactcaaaatcaatatcgaaatccttaagagtttgtttcatccaaagtatttgtgca

SEQ ID NO: 270484 - DNA, 406 bp, Cannabis indica
attttttttttttttaaattaaaagactccaaagaatgactaaattataatgatattttaaacataaattttggttgtttttcttaatgatttattttactaaatatttaattaggtaagatttagttaatcactggaaagaataatgagtgatatatttataagttacaagtctaacattaatcatatttttacgctatgtaggattttttttttaaaattaaaaaaactctatagtgaatatgcgtattatatagaaacataaaaatccaaataattaaaggtgaacagaaatataccaaaaaaaaaaaaatagattgttttttttattcatttaacaaaatatcaaagattttgtgacatcatagaaaaaaataattaatgaggtaagattaaataatcaatc

SEQ ID NO: 270485 - DNA, 606 bp, Cannabis indica
gagctgcacagtatgtttaaaagtcacgtaatacgcctatgctagttagggtgttacatcgttagagagggtgatgaatgctgcaattacttaccttgattcttagaagaatgctcagctgaaaaatagagttgtgttgccagtttctggcccgattacaattgggtgtgagtaatgggctaaaccttattttggtgagataaatgttaattgtgatgctgctgtctttgaggatgacaatagtctcggcatggggtggatttcttgggatcataatggtttattcattgatgcattggcggttaaaacttatggtcaacccgacctatttttggctgaagctatggcgtgaaggaggcgctcagttgggtgaaggggaggggggtagaggggggtgtgcctgctagtgtggttatagagtcggactccctgcagctggtgcaagtcgtgcaatataagaagcagttgttgttttcggtggggcttttttaatcacggattttgttgctcttatgcagtcctctcttttgtttcctatttcaattaattttattaaacggtccgagaaccaggcggctaactttttagctcattcttctggttcta

SEQ ID NO: 270486 - DNA, 1372 bp, Cannabis indica
ttaattttttgaatgcctcctcgcactgaccattcaaatttctggcatttcttcaggatgttgaagaagggaatgcacttgtctgtgcattgggagataaaacggctcagggcagcaacctttccagttaagctctgcacatatttgtgtttcttaggggaaggcatgcttaggagagcttggattttctctgggtttgcctctatcccccgctgactgacaatgaagcccagaaactttctcgatttgaccccaaaagtgcacttctttgggttaagtttcatccgtatctctggaccacttcgaagcattcttctaggtcatccgcatggcttgcgtatgccttcgacttgaccaacatgtcgtccacgtatacctccatattctgtcccactaagcctttaaacatccggttcaccattcgctgataagttgcacgagcgttctttagcccaaaaggcatgaccaggtagtagcataccccctgatcggtcatgaagctagtgcattcttgatctgtgatgtgcatcttgatctggttgtagccagcgtatgcgtccatgaaggacaatagcttgaatccggaggtggcatccaccatgtggtcgatttgtggtaagggaaaacagtctcttgggcaggctttgtttagatcggtaaaatctatacaaacctaccatgtcccgtttggtttcggtaccagcactagattggccagccattctggataatacacgtctcagatcatgccactggttagtaatttttccagggcttctgcctttactgagtcgagggggcgtcttttctgctgaaccggtggcatgtccgggttgacgttaaggacgtgggttatgacgtgggggcttatgccggtcatgtcctcttgacaccacgcaaaaatatccgtggcagcccttagcgtcttaattattttttttctttcctccggctctagactttttcctagccggaggaccttagcagggtcgaggtcgcacaccgatacttcctcgacatcctccataagttctacaattttttcggatcccactcggggatccaactcatcttcttctgccattcatagcacagtaactttgtggaccattagaatgggtaggtgggcaggaacgttataacattgcctggcctccctttggtttcctctcacggttcctaacccagcctcctgagtagggaacttcaaacacaagtgcctaatcgacgtgactgcaccgaaatcaaccaaggccggtcggccaaggattgcgttgtaagtcgttggccagtccaccaccatgaatgtgcagtacttaaaggtgctttggggtgtgtctgggcacaaaggtgactgggagccttacttttc

SEQ ID NO: 270487 - DNA, 1236 bp, Cannabis indica
tttgaaaaatatttttacttttctacttttaaaaacagaaaactgattaaaaaagtattaccaaacgctacctaagtaaatcatgagttaagctcaaaaggagaaaatgtgtagctataactatggctggcatagtttagtttatagttagagacaaaggttataatatttaaatatattagaggtcacatggtgacaacttacaattatatcctcacgtgagattttttttttattagacaagagtaagggttttgttttgggttttggctagttgaaaagcccacacacacgtgtgcagtggaagtagctagctagtgtgatttgtaagtgtttttagattttagttagtatggtattgtcaatgttcccttaccaactggccattaggctcttttatggggccattactcagtagtagtagtagtagtattgtagtctctcctcagtgactaactgtgtgtgttattagttacaaaaaaacaccaattaactaaggcacatatttatatatatatagtttgagagacaatcttcacatgttgttgttgggaattacaagaattaattaatgagcaaagtattggatactatatggtacaaagtcagatgggtttgtctctttgattattacataaggttataactatttaatgtgtggtgtgatgaaattgggaagagtacaaaatgctcaataaggctaataataatatacaaacaatttctgtgtgtactctggcaaatggagcccaattctctgatcaaaatatgctatactcactcttcaattatcttcttcttcttcttcttctttaagaattactatatattatgagttttctagctttcagtgattttatgtttgattttgactgactgtcttagccaaatttgtacacgatcagctaggaccagcaacaatctaactatatatggactctctaatttgttgggcagttgtaaaacttatagaaatttaaattatgctgctaataataactaatttggtataattattagtcacaatttttttactttaatcacaagttttattgtgactaacactaaaaaaaatttgtagtgaatttgcttacagaattttctgaagtgaataaaaatggaaaattttaccataggaacattttcattgtcaaacgatgtttctaatttttagcgtctttagagtaagtttttagagaagtttataattgaaacttttctatctttgaactatgc

SEQ ID NO: 270488 - DNA, 899 bp, Cannabis indica
aattctcctcctcacaccaactttaattgcattttggagacttggtcgaagttaagcaacgaccaggccagccactcctggcatacatcagcagattcatgacggaggcaaccaaagtttcacgggtaaccgaggatggaaagttatccgtgatactggggggcatcgaagtcctcggtgaactttgaaaggatataaggaagaacgggccggtaaactcaatgagtgattttcttgaccgagccaaaggcttcatcaagctcgaagaagcaattcaacgagcgaaaggtgaacaaaagtcgggcaagtcaaaggctccttccactggaacatccgcccagcttccccactacccaaataattcaagctcaagtggcaagccttccagcaacaatcacaagcaagggaacgagaagaaaggaaaggtcactggaaagtccgaacagactgcccgggagaatcatgccaagtacactgcattcactattctaactgaagatatagaaagtgtatacatggcaactcagtcgctggccccgtacatgaaacccaggcccatgaagaaagatagcaacaaaagggacatgacaaagttttgtcagttccacgaagactacggccacaacactaatgaatgctacaacctgaagtgggaaattgaattcttaataaggaaaaataacccgcacatgcaaaagtatgttaagaccgacgaaggtcaaaggaacgacaacaacaaagatttgttacctccacaagtagatggacatctgcaagtcattgttggaggccctaacattgctggaaattcaggcaaagctcggaagaggtatgctcaaacagtgcaacacgagaaagaagaagtcatcctggccgtggaagaaaggaagcccaaagtt

SEQ ID NO: 270489 - DNA, 598 bp, Cannabis indica
ttttctttgttattagtgttaggttattagctctgatatttattttgttgaacttatcatctatcaatctacattggccaaaaggggttcccttcatccttgcaagaatctacgtactgaagagaaagcaaaagtttcagccttctaaaattggccaaaaggggttcccttcatcctttgaattaatccttcatgttttttaaatttttgaacaattgaagtgaatattccactccctctatatgtcacacgacctgcaaagtgggctgaagtgggaataataagttctggagccatctgtaaaagataaacaatataataattaaaaaacgtaagagaaaacatgataaaaaatactaaatcctatcgagaacctgtcgagaacccatcgataatcagtaaacactcaccaaacatgaattaatactttcgattacctatcgagaatcatataaaaccgattataaattaagaaaaattcattaaaataaagtgcatttcaacactaataatatataatctctctaaattaaccacaaaaaaaaaaaattaaaacaaactctttttaacaacatcttgtcgataacctatcgagaat

SEQ ID NO: 270490 - DNA, 1207 bp, Cannabis indica
ggatgcataagcaatcactttcccatactgcataagaacacaacctaacccctgtttggatgcatcacaataaatcacaaacttttcatcatcgacttgtaaagttaacacaggagcagtaattaatctttgcttcagttcctgaaaactactctcacacctatcagtccacacaaatttgcagttcttccgagtcaattctattaagggcgtagaaatcttagtaaatccctcaacaaatcttctataataccctaccaatcccaggaaactttaaacctcagttgctgacttgggtcgaggccagtcccataccgcctcaatcttcaccggatccactaaaatgctaactttattcaccacatgccccaagaaactcacctgaggcaaccagaattcacattttgaaaacttggcatacaacttatgctccctgaggcgttgcaacaccatccgaagatgtctttcatgtctatgaataaattagaatatcatcaataaatacaataacaaaagcatccagaaaaaccttgaacactcggttcatcaaatccataaatgcttccggcgcatttgtcaatccaaaggacattactaaaatttcatagtgtccataccgggtccgaaaagctatcttgggaatatcctcttcccgaatcctcaactggtgataaccagattgaacatcgatcttggagaagacagtcttgttgggaatattttaccaggatctagatttactaacaagtatgttgaattaacattctaaatataaattctgtaaaacaatgaaataaacacataagggtttaagaaaatcttacattgattgcaacgaaatataatgactcattccgttcaagatctctagcccttgattcctttttgtagctgagcattatcaagatctgaacttggatctctttctctcctttaggtttggttaccgccgtcttactcactatgactgagtacttgacttggtatgtgtgggcatggcactcattcactcaaggtttcaaatatggaagaacaatcaaggaggtttgaaatcactaaggaaggaactctctcatctaagttgaaggcaatagttaaattgataatagttggatgagcgagagcatcatatttcttttatagtgtttcaactagggcttatggctgaattatatggaattaaaaaataataaaatattgggaaaaa

SEQ ID NO: 270491 - DNA, 646 bp, Cannabis indica
tcgcatactatggcgagatacttaactaatcgcccgcctctggcagatgttctccattatcctggcatacgacgatttgggaatcgctgaaagcctgtaagtactcgattctcatctcgagagcaagcttcatactcggcttcattgttagatgcaggaaattcaaaacgtaaagcagcgtgtaccttaaaattgttgggactgattagtatgattccaccgccagaaccttcgctattagaagccccatcgacgtacaacgtccatccttctccttttggtatagcggtgttgatcttttcatttctgagtgacacttcagtactggggaactcgagaatgaaatctgccaaggcttgccccttgatcgcagttctcggtttgtacttgatttcgaactgacttaactctactgaccatttcaacaatctccccgatgtctctggttttgccaagacttgcctcaaagggtagtttgttaaaacttcgatgctgtgggcctggaaataaggtcgcaactttctcgacgatgttaccagggtgaacgctaatttttccatttgagggtagtgggtctcagcatccaataggcgtttactgacatatacacgggtactgttgttcttgatcttcgcagattagtacc

SEQ ID NO: 270492 - DNA, 649 bp, Cannabis indica
atttagagataatttattaattaatatttttattctactttatttaattagagctcattaatttgtcaaaaaaattattaactattaaaattttaaaaaaattatataattatacattataactaataattcactgttaattaatttataacagaataataattcacttatgtataaaagtaaatatttatcgattattgtttgatttattttatatacggagcaaatctactagaaatatattataatctgaccaaatcgactattgtgcacccctaattatttatagaaattttaagttgtatatatatatatatatgaatattagttgaacaataaaaatcatatcaagtgattttaaacctatttttctgtataactagaaaaaaaggaaaatttgcgacaaaagtcctcaaaaagttcagtttgatacagataagtctccaacttaaaaaaatagcggtaatagtcctcaacgtcatgctttttatttgtctgttagtcctaattttaactaagccgtttattttcttaaaattgccacgtgtcgaaatattattagtccaaattattattttaattttaaaaaataaaaataaataaataaataaaattatttaaaaataaatttcttttttcttttttcttt

SEQ ID NO: 270493 - DNA, 900 bp, Cannabis indica
agaatatctataaaatatttaggttaatttcaaatttatattatttatttatcatataagatattttttaatataatatttcaaattaaaagatagggctatcatttaatttaaaatatgtctaatattaaaacatctgatcttataattaaataatatataaatataaaagaaattaacaaattttaaaatctgaccataatttaaaaaataaaatatcaatttttaaatttaaacctcaaaatatcaaaaattaataataatctattaaaaattaaatactattaatttaaaattgatatttaagtttaaatatgttaaaaaatatattttattttgaaattggggtttgaaaattgcaaaaattcaaaatttgttgaaaaatcccacaaaaaacggatttttgggggttgctcacgagacaggctgcacgtgcagccaaaacaggctactagcagcctatacgcgcgtgcgaagcaaaaagttgcagcctcatctgccgagaaatctcggtgtgtgcagcattcccacaggcgtcatgcagcctggcgaggcacgtgcgtgtgcttcagacatgggatcttgtccctatcacacgcgcagaattgggtcttgtccgagtgcctggtgcactcgatgcacctactcgacaaccaattcaactcgaaacttcaaccttcgataactttctcaatttttatcggaatcaagttccgtaaaaaaacaaattggttaattttcacaagaaatccaaataaatattttcagattgaaataaaattattttcatggaagaattttgtaatacacatttaatcatcaaataatcacataaaccaacatgaacacatccaaatcaacatacaaacaatattcatcattttaaatccatatttcatg

SEQ ID NO: 270494 - DNA, 1584 bp, Cannabis indica
ttaaaattatttcaaaagataaaacaagaatgaaaaattaattttgagatattttcatttattatttcttacatagttatattataaaattgaataagaaatagttacaataaaagtgcctaaagtattatgtttgtagtatttcagtacatactaaatgtctttagtagcaaaagcatttaattatagtgcttgtgtactaaattatttgattagtagcaaaatattcaaatttttatatttataaaacttaagtaacaaaattatttttaaaaattatttcattaataactaaaataaaaataaaaaattacaaaaatacatatttatagtatttataacatttttaatgattatttttcttaatagaagaaacaaacggttgttttatggttgttctcaaaacaacgttattttcacatcgctactacaatatattatgtttttgcaaattgaaaataatgttattttttcggaaaaaaactgtaagtataaaatctaaaaaaataacatctgtaaaaataaaaaaataaaaaccgtaaaaaatagtacgatatttaaatattttgtgtaaaaattctattatttttttaggtattccacatacgtagtgtcaaattcgttaataatttgggtaaataaagtaaatgaacacaggattttatagacgttcgacccctttagttatcgggtaaagatctaatccccttttatttgtattgataccgagagattgtaatattcaaaattttcattatgaatagttatgatttattatatattatgagctaattaggtagtaatgagttggattatgatcctgctaactaatttagtataaattataaattttgttataagtagataaataagcgtaatttattaattacaaagatttatttgaaatatgtgaatataatgtaagttagttgtgaaataaaaatattttcaggttctgcgaccctagagagccaattggaggtcaaaaatgtcacaacagttttagttagtaatattgatgggattattgagataagttgattttaaaaataccgaggtattttaggatactcagaattgagcaaataccctaaggttaaagatttcttagtggttaagaaataataaaataattattattaataaatatattattatttttattgttaaagtttttgttaacgcagattttcgttaactaaatttgagcctaactgtgacaatctcacacagaaaaaataaaagttataaaataaatgaacacacaaggctttttacgtagttttgcagttaaaattctgcatagtccacgagtcaatcttattcagatttttgattattttctcagggcctctcttgtatgagtttttttcgtccccttctttgaccttgtctgccactatttataattacatagtgggcagttaattacaaagttgaatgtaatctttttacaacgattatcttctagagtcatgggattgattacaaattacgctaagtaaatgcgattttatttataatttacacagctgtgaatatcccgcttttattgggctaagatgaacgcatattaaagatata

SEQ ID NO: 270495 - DNA, 538 bp, Cannabis indica
tagtagttccacctattgctttatatgcatgcagacgttaatatataaagtagttgaaataggagatttacttctttagatttgggatatgctaatatttgcgggtcctaatcctcattgatcttgacaacttcttttgttatcttgtctagatctatggattttcttgggtcgtgttacttgtcattgtcatggtgttcaaggtattattcttctctcttttctccgcctacttttcatatatgttgtgaaaactcaactatttatgtccttttaccttgcaggtttttacctacagtccaaagaaatcagctaacttccagctagtgcttcgatttacacaaggcgtcacatcattgggactaatcgcagcactagctctagttgtcatatttactgatctttcgataccagacttatttgctagcatccttgcatttattccaaccggctgggcaattatttgtgtaagttgtttattttgatcatcgtggacatggatgtcttctatattgttttaattgcagcattcaactat

SEQ ID NO: 270496 - DNA, 822 bp, Cannabis indica
agtctttaaatatgtgttgcatagtattaccaccagcctcctcatcataaaaaatagttcctttaaaaataatggtacttactaaatcatcatcttctgatattggtaataattggaagtttaattgcatcgaattattattattaaatcatcttcgtaatataactcttcaattaaaccaccaacatcctcaggaataacttcattattttccttattatctcatgttgatggaaattggaagtttaataattatttttgaaattcttccatattcatcatattgttaatatacaaatttgtctatttatatacctaggcttattattaattttatttataacatagagtaattagtaaattcctaatatacataatttgtctatttatatacgtaggcttattatttcaaattagtttttaaaaaaattatgttatcttttttgacaaaaaaaagattattatttttgaactaattaaatgtaaataaataaaaaatgggatttaattttattttttaaattagatagggatttaaatccgttaagtttgacggttaattaggtttgtcactatatatgcacatatgtacacgtatcatattttgattggtccaaataattttaaataatttaaatattacaaaattgttttataattaaaaataactaaaataaataagttatttctcttcctcttggatctctggttcatccaccattactatccatgatcgaccagcagccacaatctatttcttaatccaaatcaacaccaaaataaaattagaaaacaattacattttcatatctaacctaaaaa

SEQ ID NO: 270497 - DNA, 661 bp, Cannabis indica
atgtctaaataaactgccccaataaactaacatactaattttttattctactgagccatacaccgcgttccatgttaccgggcaccaaaaatgtaaaattatgaaatttcactatatggcataaaatgcattcagaattcaaatataaccacataaataattatataaatatctataaacaatttccataagtaaatcttaattaactgctaattttccaaattaagctaggcggtctgcactggctgttcttcatatgtcatgtctggctgcagctcaagactctcataactaagtatatgagtaggatctgaaacgtattttctcaacatagagacatggaatacgttgtgaaccgctgaaagagctggaggcaatgctaaccgatatgccacttgactaaccttctcgagaatctcgaaaggtcctgtaaacctagggcataacttgcctcgtttcccgaaacgtttgatccccttcattggagacaccagtaaaaacacatggtcttccacttggaactcaatatctctgcgtttcggatctgcataacttttctgtctactctgagaggcaagcattctagctttaattttctcaattgcctcattggtccgttgcactgactctggacctacgtaatttctctcccctgtctcat

SEQ ID NO: 270498 - DNA, 467 bp, Cannabis indica
cttgtaatttatttttcttgagaaattatgattgggaaaaatattttttagtttttggaatgtaattttagtataggcgtagtactttcggtgccgctgcgccaaaccgtcaacaactaaagcgagacccggattacacaagaaagttcctaccgtatggtcataccgctagaaacttgggggcaaatgtttacccaaattttaacgacgatgacgtgtcaagagtagcaacatgtggcacaaaaatatcgtgactaaattaatgaagaatgtgtaaagtcatgaccgttgggatgaccgttaatcatgaaaggtggtcatgaccgttagaatggaagtcagacggtcacccttacccctagcttgagtaaggtgggcgtctccaagaaggaaaaatgatggactgacaccttcgtaagcaggatgaacaatcacaacacacctacatgttgggttttatgccctaa

SEQ ID NO: 270499 - DNA, 706 bp, Cannabis indica
ccaacggaactaaggatgatgacatcgccttacccattttctatatgggcgattgacctaattggggcattacccactgggcgaggaggagccaagacgcggtagtagcagttgacttcttcattaaatggactaaggccaagcctcttatttccataacctgcaagaaagtgctcgactttgtcatcaagaaaattgtctataggtttttaaatcccacgaagatagtatccgataacggaacccaatttgatggagacttgttcactgagttctaccagaggaacaaaataattaagagcttctcgtcagtatccaggcccaggaaaatggacaagtagaagctgttaataaaacccttaaggatactatcaaaaaaaagttagacgctgccaaaggcaagtgggtcgacgaactacctcatgtactctgggttcagagaactattgagaagatgataattggacacactcccttctcgctagcatttggctcggaagtaatgctacctgttgaagtgaacatatcgactcccaaacgagagttttataatcaagaagaaaaccaagaacttctaaaattttccttggatttgcttgatgaaaaacgacctaaattgcaaatcactaatgcagcgtatcaacaccgagttacaagataattcaaaaaagagtcaagaaaagactattgaatgtttgtcacttgg

SEQ ID NO: 270500 - DNA, 531 bp, Cannabis indica
tagactaggtgagtgcaaggaaccaaatgtttaagttggagccccattttttgatatgtggtcttgaatagaatatttgaggaagcttagttgtccaccatagtccatgccacattgcaatctgcacctcaacaaccaaagggtcgttgtgcagaaaaatgacgtagctagaatcaactttggtgaatgttatgattggttctctaacacgtgataatttgggctttctatcttccacagcaaggactgcattgttttgttcatattgcaaggctcatgcatacttttctctatctttgcccaagtctccagcgagatgagagccccaaatgataacttgaagatgcttgtccactggtggatgcattagttggttttggttactatcttcttgggcaaccctttgttcttagtcggccttgacatacttttgtaagtgcaggttattttttcttattaagaactcgatctcctgctacaaattattacattcatatgtgttatgtgttggatattattttaccaggatct

SEQ ID NO: 270501 - DNA, 1373 bp, Cannabis indica
taccacatgcactcagtaccgcactgtactagtgttggtagggtaggaaccgtaccccgagtatcgctaagtgttgtaccacattcactctatacctacctgtactagtgttggtaacaccgtaatgtaccctttagacattgtatactataccaatgcactttataccgctactgtactagttttggtagtgtacgaatcataaaaagcatgcatatatatcacacatacatacattcgcatatatatcataagttctatgctattcttacattgtttccaaattcaagtgagttggccgacctaatcaaaaaacctcgtgccggatggatgccctaagccacatttacataatcgggtaaataacacgccaaaaccctaatccaggaaactcaaactccaattaagggttctgctattagtaactactataacaataccccaaaaatcaaggaaataaccaactatggcactggaaataacacgaattgacgacacaaaaaatttggggaacctatttttgatccagttaaccggttttacagggcctatgaatctggttaaccggtttgcacgaggtaacccaaaaaaattcgaaaccatgtccaattcgtatccaaatcataccaaaccttccaaaacacatgtaataacctcaaacaacataatccaagcaacagaatccagaaacacacacagaaaccaaacatgccattgttgagccaagtttgaattcttagacctcaaacttgctcaacccaagaattaaggtccaaacaattagaatcagacctagaacaactcccttaattaccagaaaacaatcaagtataaaccctaactcaaacagtagcaaaatctcaatttcaacatgcttgaactaacaaataacttaaaaactccaaaaagagaaactagagttcttaccttaggatttctctactttatttcagccaaaacccctccaatattactgctaaaaactaaagttcttgctggtacaagggaagctcgaagagagagagaaggggaggtgtaggaaaattgggtttttctatctttttcctttaatttttaattttacaaataattggataaacctaggctgaaatgaagtagaaaaatctagctgtcaagctaccaaacagccaccacatctcactaaaaaaatgaccaaaatgccctcgatgcttaaacttaagctaaatcaagcctaggggtaaaatggtcaaaaactataaccctgctcgaactcggtattctattcatctcaaatatttattcaaccaagaaataggttctagactacccatgtgattctaacgtccatccattgcatttctcgtcgttgccgagcaaaaatcataaaaaat

SEQ ID NO: 270502 - DNA, 610 bp, Cannabis indica
ggcccaaagccagttacaaaaccgaagtctcatcagtcggtaccctagaaatattatcaagctcgttcgttcactactgatcagaggtcggagagttggaattctgtttcaatcattggtcggataaacaattacactcacaacaggtacttgtattgtattgtgtttacgatgaaaactttttttctggttgtttgagttttatcaaattattctatgttttgtttagagttttataatatgaatatgtgttaataatgaattataggtggtttcgttctaattttctgattttggtccaataaaaatgtttctgtttctttcatgtgaaatcaatcccatttgtacggtaattttttccctcggctccaccatattacctttttctattcatttgcagctatgtttgtgaataaaatgttaagctcttcccaacatagtgtcaatggaagtgattttttcaagagtgaattacattttaaattcactttgtattagatagaaagctggagatccaatagactttctttaaattgacaaaggtatatacaaagtttacactttggctatgttgtattgtcagtttttatatgtgatacattaagccttt

SEQ ID NO: 270503 - DNA, 1203 bp, Cannabis indica
aaggtgttggaggcttgaggcttaattatgcaagtgattgaggtagtttttatggttttaaattttttttcccttgctgaaatattgtggtagaaacatgcttaggttatttgattttgggttttgcatgtgtggtgaaaaggatgcttaatcttgttagtttgtatgttaatctcttgacttgtgtggattgagcttagagaataattcttggatgcttgtcaagattgaatttgattatttatttgctgtttgtggttggtagccactggaaaatatgtgtgagtattgggttttagctcaaagttcttgagcttgagtgtagcaagtttgaagcatgagtttgtgtgtcatgcaatctgaaatcttgaattttatttcgttgttgattgttagcatcaatatttggtaatttgaaacttgaattttatttcgttgttgattgttagcatcaatatttggtaatttgagtgtttgattgagttttgagatggaaaagattgaattttgttgttgaaaatcgtgtagagctgctggttttctgggttctgcacccagatgtcgtagcatgctctggagcatgccgcagcccgctcttctgagtggacctgggaattggtcccaggtgccgcgacatgatttgggcatgccgcggcccgccctcttgtttttgggcagtttcgagttgatttttcgaaaattcgtaacttttgattctgaactccgatttgggagttctttatatcgttggaaagctcgttttgagctctgtatgattatcttaattttaaatgccatgcttgaattttttatgagttgaaagttaggggttaaccctaagtgtaaaatatcccggatttgtgtgactaggattaccggcacctgattaggagcacccggggattcagaatctctttccattgctggacaacaggtaagacaatgattagcatgtagagtatgcacagtggcttatattgaaaatgatatgtatgattgtttagtaaccaggattagggttattaccctaatattagcgcttgatggcctagcgttattaccctagtgatatatgtgtttatatgccatgccatgttaaatgtaatgagatttagggattatgcgctcaaggcataattgggttggactcggtaaccataatcgagatgaaccaattctaaggccttaatgtatttagacgtg

SEQ ID NO: 270504 - DNA, 1123 bp, Cannabis indica
aagaatatgatgtacagagagaagataagagtgtttttttattctgatttttcaatattggacttgtaaatatagtctctattgcttctagtgtttgaggttgtgcaaaagattgttagtttattttaatcattttttttttattttagtgttgttttatgattgtttgccatcatttttatttaacatcgattttactgttcttgctgcatctcgtcggaattaataattttttctgtgcgttctcgtattgctgtgatggttctgtctgtgggtgtggaagatgggggctataaatacatttcttcttcgttctctttcgctatttttgtattttttttttattctggttctcctgtaagtatattgacgagctcactgacaaaaaagttttgaggtgtgtggttcttttatgtttttctaagcggttatatatgcttcattgttttacattttttttttgtgtggtgttagtagttttttattatgattttttaggactggacttgcaaatatagttgttattgcatttattggtgttaaggttgtgcaaatgattgtttgtttttttaatctttttttttcttttgtcttgtttgatttgttttagtgttgtttggccataattatttatttgacgttgatttcattacttttgcttaatctcgtcgaaattaatggttgttttctggctgttctggtgttgtcgtggtggttctgtctgtgggtgtgcaagatggacagtcttgatttttttttttttgtgtttacagtataaaagaaaaaagggggggggggggggtgggggggggaagcgaggtggacagtataaatgtaatttctgtgtggcagtaaaattgaaaagtattatccaaatataatatttttgtaaaaaccactttcttaatttaatttccctattattaaagaatttttaattgtaatactgtaattaattattttttaaaaatatttaatttattaatattaattattaataatattttaccatttatactaatggaaaatgcttaggtagagtcacaaaaaacgtttgtacatatagtcaattttttttattatgtgtcactcccatattcaataataagtatttaattatttc

SEQ ID NO: 270505 - DNA, 905 bp, Cannabis indica
tatgtagttcaaaaagcaagcatgatggatagtgaaatcacataaaccatgacaagggaaaatcgcagagtttctaaacttagggtttcctacatatcttctacagaaaagtcaaaggtgcattcaaaaagtaaatgtgcaacgtaaacataaaggaaatcgagaacttagtcaaggatcagatgtctggaatcaggttatgccaagccaaacgggcagttctgatgaagacacttcagtaaactcgaagccaaaaacctctcttttttctctgaacttacttagcaaggaaggatggtgaaaatgagtttgtgtacaaatggtcactggtatttataggcaagcaacgaaaaggggtaatcatttcaaaagatcctcagacgcctcggttcccctttaaaagcgaatatgggaaatcaaaagtaatcaagtgtagccgtcaaccgttgtgagagaaaatcatattttgaaatatttattgtcagagcatttattagtcaaaaacaaaacggacgcccaatcagcctcacattgagtcgcgaatagacgcacttgatacatgtcacccattcaaatgcaaacacagctcggatgaagtctacactcaacttcagaagtctcgtgcagacttagggggcaaatgttataccaatttttgcagtcttacgtggtatcacatgatggtgacacgtggagtcgactctgagtatctgcttgtaggatataatccgaagaggatacctcatatgcatgctcaaggaaaagcaatcagcaatccgcccagcgcgaccaacacttagcgaattcagctttcgcattgtgagtcatcagagaaatccctataaattagggatcagattacagagatattgcaagctgtccaaatcccacgatcagtgtatttt

SEQ ID NO: 270506 - DNA, 942 bp, Cannabis indica
gttaggaactttaaggctagatgcttgataaatgtaacttcccctagtgaatacaatgatattctcccaaaaatggcattgtatgaagacgataaatctactaccacaaacttagtcatttaggtggttatctttagggcttcccttagtgtcaatgggagagtgattcttctagtgctagctatgctatctccaatgaagccaacaaaatttgtggtgcatggttgtagatcttggaaaatgaaccccattttctctaaggttgtcttgtataataggttcatgttgctactattatcgaccaggattctccttaccccctattgttgatttcagatgttatcacctggggtcgttaggagctattagaatttattttaccaagatcaagatttactaacatgtatgtttcattaacaccctaaatatgaattctctaatacaataaaattaaacacataagagtttaaaaaaccttacattgatggcagcggaataatatgactccttccgctcagatctctaacccttgttcctttctatcatagagtaataacaagatctgagcccggatatccttcgggttggttaccactgtcttctgcactatgattgagtacttgacttgctatatgtggtcgtggtactctatcaatatggcttgaattgatgaagaacaatgaataaggtgcaaaatcgctatgaaaggagtctctcatatactagttgtcagagaataaaaaactaggtttaagtttggttgaaatgagttggatgagaatgagagcaccatgttccttttatagtatttcaactagggtttaggatataattatatggattaaaaaaggaataaaataaatggacaaaaattgactaagtgggcggccgattatgtggggcctcactagttacaatttttacaactttatttcaaccact

SEQ ID NO: 270507 - DNA, 551 bp, Cannabis indica
aggaagggcacaattgagaagaatagagaatttaaagtttatttattaattaagagatcttgaaaggtctaattaataaacatatttaaatagtaattttatttgataattaattataattattaaatagataggattagtattaaaataattggagcagaaaaatggcattactgaagaaagataaatttatttcattaaggaagcaaaataatggcaaaattctaactcatgggcttcataagggattcaaccacgagggtccattctaagccattgaatctttttaattagcccatttagctttaaccgtaaacctaatgaatctctataaatagaatattaagggttttttattcagatgatgactctagatatcattattttcgaattgcatagtgaggaagattgtgtagttcaaactgtcaattgaaggatatctaagttcagatcttgatcacagttagagatctgaacggaaggagtcattatattgcgctgctactaatgtaacgttttttgtaactttatatgtgtttattttattattt

SEQ ID NO: 270508 - DNA, 970 bp, Cannabis indica
cattcatttgttattcacttaatcaattcagatcaatgaaaatgctctcaattctttctcgcaatagtagtgcagttacgtatcttacacaatagttgagtgcttgagatacgaggttgaatgagcctgctacaacaattaattccgctgtatcttctgagcgatagataaaattgaatataagtgttcttaaggttaattgtaatgctttaatcttttccatctgattttttttagtatttttgtcaaataatttgggaatcaggctgcttattttttggctcgtttttctaattctagtcctagtcatgtctttaatggggaaatatcctaattgaattgcagactattattttaattaattcctattaataaaatataataattacataatacactaatttttataaaaaaaaaaattataatttcacgttgtattttataaaaatacaaaaaacaacaagaaaaatacatgaaagtaacacaaaaataacataaaaaaataatatacaaataacaataaatcaacaataaaataacaagagtacacataaaaagaccgtattttatgtaaacaaaatctaacaacttataaaaatgttaaaaattatgtacagagtacagactgtatttttataatttgtttgttattttttggggttttttttttaaaaaaaaaattatcccttataataatcaaattgtgtgtggaagttcttaataatcaaaatctatagggcattttttttttcctctttgtactctccatggcttcatagatagcttaaaatataaaataaatgaaggggaaatgagagaaaaagagggcaaacaactaagagaaaaaatgattatgaagttttttgtttttgtttttttgaattataagaatatatattaattggataagtatgtatctaatcatagaatctcaaatttcctaataaaattaatgattgcacatataatt

SEQ ID NO: 270509 - DNA, 809 bp, Cannabis indica
taatgcaaaatcgatctcacacaaaaccatatgacactaacaataattttataactatataatatataaatatatatatataaatcatgtcataatgccgacaatttctttcaaatttacttctaattaattaattttattttacaatataatttttttattttgtgccgacactttaattgaaattttaatgtgacataatacacatttgaaataaatactcttgctaatattattatatatatatataaacaaataaataacttctggaatttactaaaattattcttaaatagtgtgtcaatcaattttaattaaaaataataacatgttattttgaatattaaaaacagtatgggacattaacaaaactaatttctttcttattcatggtgaacaagttttctaatttcttttcttatttattatataagtaaatatatatttgtttatttattttgtgaaagtgtttttttttttttttaaatatcacatggaccattgtattagtaacatttcatttcttaatatattttgaaatgtttaatttatttttaaaattattacttgatgagaccacatttattcttatgattagatgaatttgacctgagtattttcttgagcctataaaaccaaacactcacacatataccctccaatttttatttttattttaaaaaaaattatgtgtaaaaaaattaaaaataataaacagaaataaatttttataattatataaatattgttacagaactatatatatatatagctacgtacacattaattgattgcatgagattaacctt

SEQ ID NO: 270510 - DNA, 668 bp, Cannabis indica
ggatttcagcaccatcatagcaccgcttacagaagttaagaaaaagcatggtgcatttaaatggggtgaagcataagaggaggcatttcaacttcttaaacacaagcttactcacactccagtacttgctttacctaatttttctaacacatttgaaattgaatgtgatgcttctggtataggtattggggctgttcttatgcaagaagggagaacccttgtatacttcagcgaaaagctaggtggggctgcacttaattaccccacctatgataaagagttgtatacattggtgcgagctttagaaacatggaacactatttgtggcccaaagaatttgtgattcacacagatcacgaatcccttaaacatttgaaggggcaaacaagctcaataggagacatgcacgatgggttgagtacattgagacatttccatatgtcggtataaacatggtaaggagaatgtggttgttgatgccctttctcgcaggtatgccatgatctctactcttaaagctaaattactggttttgaacatattaaggaactttatcctgttgaccatgattttttgggagatttatggtgcttgtgaaaaatccggtgagggtgagttttataggcatgagggtttctatttagggagcataggttgtgtgtgcctaa

SEQ ID NO: 270511 - DNA, 836 bp, Cannabis indica
taggtttttattttagttttttttttacttcatacgtatttgacttgatcagaggtgatttactttaaaaatataactctcatcataaactcaattagaatgctcttattattttccttactttatgcatatggaatatatatattgatatatatttaatatcattattattttttataaaataaaaactccgcctcaacaattgacacatatatctctaatgccttcatatatatatatattgattatatgataataataatattataattattactttttattaatcacacatttaataattatcacaaatttatagtgactttctttttgtttaaaaagatttagagtgccttttatttttagtaatttaaatcatataatttatatatatttatattatattcatataactgtaaaatattaaaatgtggtgtgacattctctatatctaattattttaaatagatacatctatttttctatttttttaatatatttttttttctacttttttatattatttcaatttaatgtaatcaatcaactaattaaataatttataatactaaggatacaaacgttcgtgttttataaaacttctcaataataattttgttcataaattatgaaacattcttaaaaccaattatgaaaccaaaggtccatcttaaaattaattgtttctctatttgcaaatattgagaatgtttaaagaaatttaaagttagcatgtaataatgttaatattgaatctaatagttaattgtgttttataatttatattgatatatataattttatattatacattaaattttatttaagttcataaa

SEQ ID NO: 270512 - DNA, 1362 bp, Cannabis indica
gtgtttattttaatcgttttagaaattcatttttaggatgttacaaacatacttgttagtaaatctagatcatggtaaaagatattctaacattctcggcttcttcttttgacttcttcgcttcttctttaaggcgggtgatttcccgctgggcatcatcttgttgcttaatcacaaccccatattgggatagtaatttttggacctcgccctccatgtatttgagccgcttcgagagtcgtcaattggaagcaaaagagaggaaagaagcctggagaattatgaacaaatgaatatgagaaaagagagaaataaaaataataataataataataatacgaccaacttaccatgaagttgtagtcatcaaaagcatctgttctggactcccaagattgattaaatcccaatcagggggaaggagagccttaagtatgtgccagcaagcaatctcgtacgcctgggcaaatttagatccagcctcccctgctgcagccaacaaggtgtcaatggccaggctcgaggaggtagaagcatgagctgtctcaggaggaggagcgttggtgttgggagcgactggaggaggaacttgttcttgggtatcggtattagagacctcgaggtcaataggctcagacaatgacttgtttttgtgggcagtggttttcctttgccttttgggaggtaccacctcggcatttgtggggacccctgaatttgttcccctcttcttccctttccgatccatgatatcttcaaaacctcccatgtttgtaaaataaaataaagtgctaactattaaaaaggcagataaaaaaaaaagaagagtggtagtacaattttccacctaagggatttaccgaagtcactggaaggcgaactatcaatagaagagggggtagaaggaccgtaatatccactaaaatccttacagcctataatcttgaatacatcaaagggctcgatgggttctaaaacctagctcacgtctatatgacttgccctatctgtcatattgccatattgctgagctataccataatatgactcgtgacagttaaactggacgtagaatctagggtaccaactgtcaaacttatggcaactcggtctacgagaagggaatcccaaatataaaaattaaggctggtgtctcggaaggtgactaatgtgttacgttcatccctaagtactatgggagaccaaccacattgattacctcaggatgctccttcaccggcttctcgaggggcagtattttgaagatactatgctcgagccatgccatcccaggccttatcatcttctggaacagtaacctgctgccaagaagaatacttgggaaacttataatcacaagta

SEQ ID NO: 270513 - DNA, 587 bp, Cannabis indica
tttcttagtatttttccaggaaatgccaattatgacgacttttcagacactggcagctactgtggagactttttcggcatcgacaacaaacttcggaaaagtcatcagaattggcatagtcgtcggaaaaattaccaagaaactgttactgatgctagaaaagtcgccggagttcgttgtcggtgcctgaaaaatcactggagtagcggtcggtgccggaaaagtcgtcggagttgctgccgacactagaaaatttgtcagaattggcattgtcgctggaaaaatcactgaaaaaataccaagaaattagtttcttgatgaagaaaccagttacttgatgaagaaaccagtttcttggtgattttgttggtaatttttctgacgacaataccaattctgatgacttttctggcgttggcagcaactccgacaatttttccgacaccgacagctactccggtgaatttttgggtaccgatagcaaactttgggaagtttgtcagaattggcattgtcaccgaaaaaatcaccaagaaactaatttcttagtgatttttttgtgacttttccagcgataatgccaattc

SEQ ID NO: 270514 - DNA, 802 bp, Cannabis indica
tgttagaaaatatttaaaaatattaaaatataacaaactcctaaaatatcttaaattcaaatatccaactaattttaaaatatcttgtttatttaaattaattaaataattaataagataatataacataatatcttaatttgaaatttaaatatttctaatattatatttcaaatcttataatttaataaaataaataaatttgaaaataagatattttatagttagtgttaccccgagtttttctcaaaatacgtggccacgtctatgtatgacacgtggaccaagaggacacctcactcaagaattagctgagaatcgtataaaaagaacaagtgtagttcggggagtgagtccccaaagcagtacaaaaagcatgccctcctctccgggagataataaggcatctccgggaggagaatggcctatttgaatagtcacttcgcatttaatgcagcatggggaaagcgtctgggaacgcccataataggacatgtcagacatcgtacgctttgtttagggcgattacacgataattgaatgggctagtgacagctccattatgaagaatcacatcaatcaaggaagagtgaagattaatctcacctaatccctacgatacctacagtataggtaatgcatgctctattttgtatcttttgggaacttgtgttaatccatagttggtaggggtgtacatcaaaccgctcaaaccgcccgcaccgcaccgcaccgcaccgcaaaaaaaatgcggtttgaaattcttcgcggtgcggttgcggtttgaatttttcccaaacgg

SEQ ID NO: 270515 - DNA, 1136 bp, Cannabis indica
tgtacaatcttcatctgctcgtcctaacggttcctcaactttagccttgcccttacctacacataaacataacactatgagtcgacagactcagtaagaaaagcataaatcatataacatacatatatcccggattatgatcagatgcccatacccctgaccataaccctaatccccgtgtcccacacggtactgagtctagaacgtttgtacgatggtacttttgaccataatatcaacctatactcggtacgctagtcatactctagccgtaccgatgtgatattgtatcagcctatactcggtacgctagtcatactctagtcgtaccgatgtgatactgtcaaaaagtacggtgctatcgaccataatattagcctatactcggtacgctagtcatactctagtaatctaataagcttactaacatgcacgctaaacatgtaaatacatatgcatactattatactatcttacctcgattccgaattcaggtgtgccggtcaacctgagtggaacaatctgctcggcgaattacaggctcctaaatcacatcaatcacaacactgataagggacacgctaaatcactttccggggacttaaacttgaaactaaaagtttccctatcgatgaataacatggcaatactctaaatatcacaaaaatggtaaaagctagtgttcgcgaaattgccccaaccggtagaccgattccccaaccgaaatttcggttttgggaaaaaaattcctaaaagccaaccagaattctggttcctataggcctctctgaaccggaattccggttaagtgcaggaaacactaaaaaattcacaactcatgcaaatcaatcccaattcaaactaaactttccaaacctgttctatacaccctagagaacatattcaaggcaacaaaacaaccactcatacacataatcaaattctaccattaatgagccaagcttgagttcaaaactccaaagcttgctcaaacaacataacaacctctaacttaatgcatagatcaacataataaatcgtaattaaacctctgaaaacaaaaacaaccaactacatcaaccacagcaagtaaaacctcaaagcatgcaaaatttcatttccttaaaacccaagaa

SEQ ID NO: 270516 - DNA, 936 bp, Cannabis indica
attcattccgtgggtgtaagggcccaatggaggcttgaagcggggacgttacaattgcactgtaattgaaaaagcactgtagcatgccttagcattagggcgttacacattgtatatgtctaggtggttagcccgtacttcatgcactagcttgacaccaatgattagagcttcatactcagcctcattgttggaggccttgaagccaaacttaattgcctcgtgtagatgttgcccccaggtgtaatgagggcaatgcctacactagaaagttggttagtgcagcttccatcaacatgtaatttccaggttgattcttcacgctcttactcttgctccttccctggctcttgcttttctcccaaatcttgagagattttaagagatatgcttgtacatttagccacaaagtcggcaagatcttggccttttatgtccattctcggttggtatgtgatctcaaattggccgagcacgatagcccacttgagtagtcggccagttgctttaggtttttgtaaaacttgtcgtaatggcaggtcagtgtacacccttacagggtgagcttggaactacgaccttagctttcttgatgctaagagtaaatagtatgttagcttctccatgagtgggtatcgactttcaacgtcgattagccttttgttgatggactatactggatgctggataccgtcttcttcccttattaggataacactcacaacgtactctatgacggctaagtatacacctaattcctcgttgtgtagaggttttgataggataggaggttgagcaaattgcttcttcagctcttagaatgctttttcacactcccctgtccactcaagttttttgtttccttttagtatgttgaagaaaggaacgcacttgtccatggatttggacatgaatttgcttagtacatcaatacgt

SEQ ID NO: 270517 - DNA, 791 bp, Cannabis indica
catcagtaccctagaggcacttgagggtattgttggaaaaggtattctttctataagttctttgcgttggtttagaatgttagtactgttctagaggtttaagtattttctgctatcttttacatgctgtagacaaggttgttgtctctacatcctgctctcttctacacactgcggttgatcttgtgaatgagactaagttagatgcggagatcaagtcatggcttgcatttgctgctcaaaaagtagttgaagtaaatgccctggctaaggtattgtctggacacaaggatgaggtgcttttttctccctacatattatatttgttattcaatatttttccagacagaaaattatacttaataggctttttaatttagttgcaagcttattagttaaattatttttacataatttattatttatttaaatctaactaggaagagcctgtatgaagaggactgcatataatgtaatgatgaatgttgccgctatcttgttgtgtcatgtgatgatcagtcaagcttggattttattttatgtaactttttgtgttggcctactatataatatactagtgaatatattcagtgtctgatttttaatttgtatccaggctttctttgctgccaatgcagcagctcaagcttcaagaaaatcttcccctagggtaacaaatgagcatgtccaaaaatcagtaagtctttgtgaaatgtgaatagatgtccacttcaacatctcgtgttgtatagttttgatgtgatcatattttccttactctggactgcaat

SEQ ID NO: 270518 - DNA, 727 bp, Cannabis indica
tccagtgatttttcttaacgacaacggtaattctaacgacttttctggcgttggtagcaactctgacgactaatacaccggcagctactccggtgactttttcactaccgacagtaaactctgagaaattcgtcgaaattggcattatcgctggaaaaattaccgaaaaaatcacaaagaaactggtttttttttcttcatcaagaaaccgatttcttgatgaagaaaccagtttcttggtaatttttttttgtatttttttttctctgtttggctgattgatgaaactggtttcaattattttcagtgtatcatttttgtttcttgatgaaaaaactactttcttagcgatttttctagtgattttgttggcgacaatgccaattctgacgacttttttgacaccagcaataactccggcgatttttccgacaacagcaactacttcggggacttttccagcaccgacatcaaactccagaatagtcgtcggacttggcattttcaccgaaaaaatcaccaagaatccggtttccaagcaaccggtttcttcatcaagaaaccaatttcttggtgacttttccagcgacaatgctaatgttgatgacttttttagcgccgacagcaactccgacaacttttccggcaacgacggctactccgacgacttttccggtgccgacagtaatttccggtgacttttccgacacgagtaacaacttcggtg

SEQ ID NO: 270519 - DNA, 686 bp, Cannabis indica
taagtgttttattcttagtaacaatcaacctaatcgtggctgctaggagtaagacttacaaaagtatgaaacaatggtggaagctcataagatagaatggcctggagtctcgcctaaacaggacaacgctggattctcatgttgatcgaataaaaggttgctagaatgtttgtcattttagatgagctaattactgtattaaatggatgatatcttttattctcgcctgaacgggacactggtatcagtttgttggaaaccttgcaaattatttaggattatatgttttagtattttcactagccattcctacttgctaagtgctaataatttctgaatgtgtatgattttgtattaaaccttacttgatttctatttattgatgcttgtagtacccaatatgactatgaacaaccccatggtgtcactattgactgacaacaagctctctggagctaactttgtcaaatggagagagaacattaatatttctctcattgatgaaaacgccctgtttgggttgacttaagaggctcctaagcagccaggtgagaatgcgaccaaggcagtcaagttgaagttcgagcgttgggaaaatgctaacaacaaagaccgatactttatgctgtctagcatggtcgacacctgaaaacaaggttttccaatactctcacagttgcagatat

SEQ ID NO: 270520 - DNA, 629 bp, Cannabis indica
gcaattaatatcataccgagaagaagcataacagcaatttctttccagatatttcttatgaattatctataaaatgataacatcacaaagacaaagcaaagcaatacataaaaatgtgtttctattagttctattttttgtttggtcagtgtaatgcattataatcactaacatataagtggtaacagtacagtatatgccctctatcaagcaataagtagaaacttgagaaagcatattagaattcataattcactactaccagtgatggaatttatttgaaaaggaaaaaaaaaacacattccaaggtacatacagacatacagtatttaatgaaaacaaaataagaggagaacgggagaaacttgcaaattttaactcatatttaaaagactgatcagtgttgcagcacagttttgtctcctaactaataacttagtgcattaaacatcatagcctgatattgtattatagcatacttcaaaaagataatctatgataatgaaccaaaatttgatcacttcaataatttaggaaaggtgaataatattgatctgttactatttggacaagaatccaatacgtatatggtgttaaatcgaaacagtacctggcttaacttttttaac

SEQ ID NO: 270521 - DNA, 888 bp, Cannabis indica
caccaagacactcccttggaaaaagactaatatgcctttgatgcttaattttagcctatttccaacctaggggtaaaatggtcaaaaaccataactccgctcaacctcggtattttattttctccaatacacattccactaagaaataaggttctagacttacccatgtgatcaaactaaccatccattgcattttccgttgtcacctagcaaaaattgtaaaaattgcataattcacatataatttaaataatactcctagagtttaattaaatttccaaaattgagaaattataactctaatgcccatttctaacaattggacccacaaataaattaaattgataaattattataaaaataccaataattaaagctaattgccttttctaatccaaattactaacgcggtcattacaattatcccccattaaaaggattttgtcctcaaaatctatcctgaatagcccaagatattgagtcctcatgtcagactctaactcccaggtggcttcctccaccttgctgtttctccagagcactttgatgaaaacaattgtcttgttccgaagaactttttctttcctattaaggacctaaactggctactctttgtaggataagtctgactgtagtttaagggcttcataactcaagacacgagttgggtctgaaacatatttcctcaacaatgaaatatagaatacattatgaacagccgacaacgctggtggtaaggctagccgatacgctacctgcccaaccttctaggtatttgaaatggcccaatgaacctaggacttaacttacccctcttccagaagcgtcttatacccttcacaggtgaaacatgcaggaaatcatgttcccctgcctgaaatgtaacat

SEQ ID NO: 270522 - DNA, 635 bp, Cannabis indica
aaaaccacaaaaatagccaaagagaacgaagaagaaatgcacttatagcctccatcttcaacacctacggacggaaccaccacaacaacacgagaacacccagaaaataacttttaattccagcgagatggagcaagagcagtgaaattgacatcaaataaataaatcatgaaaaacaacactaaaacaacattaaaacaacactaaaacaaataaaataaataaaataaaaaatgattaaaaattaaatatcttgtgcacatcctcaatactaaatgcactatttgcaagaaagttttggaaaattagaacaaaaaaaaaatacactaactcttatattttccaaaaacgtaactaagaacttcaaagaataaaaatgaaaaaggaaaagttgatgaagaagaagaactgaacaagaaaaaaataaaaaaattatatgttgatggagaaaaatagagagaacttgaagaagtagagagtgaaaaaaatgaagaagatgatgaatagtaaaagagattaatgaggaagtgagattaaagtgaaagaaatgagtattatatatttagggtaatatatttttattaggaatggcaaattggggatttttcgcggttcgagtcggggcccgatccgat

SEQ ID NO: 270523 - DNA, 745 bp, Cannabis indica
cacctaagccatgatatttcaaccgagaaagaccttttgattccgagcaggggttgtcgacattagtggagagaggtaggtcatgcaagcatattgaacatcggttggcggaacgttggtaagagtagaatgagtatgatatgtttttccaatctaagtgttttgcatccatacataattttctctaactagtgcatccaagttaattccaagagtagttgaattgaaattttggtttggccaattgattgaagttgcacaggtggcagttgtagtttaattatttggaggctcagttatctgtcgtgtcgttgttgctttgtcttagtgtttagttttactcgagggcgagtaatgatctagtttgggggaatttgttaggctaaaattagtctaagtttcgggtcgtattttcggttagttttcactctttgtttctagttttagggctattttacgcttgattcttttgtttcaggtcctcgggtgtttaaagaaagtatttacaagaattgaggacaagtggtgaaagaattgagaagaaaaacaaacaagacattttgctgcctaatcccgtcgcgacgggacaaaacccccgtcgcgacggggattggcagagagttttggaaaattttgtttaagccttcgtcgcgacgggcaaatccttcgccgcgagaagctccagtgacgggatttttggacagtttcgtaatttcacgaattttaaagatgagacttggtttaa

SEQ ID NO: 270524 - DNA, 519 bp, Cannabis indica
aaccatgcaacattaaatgttatttctgatctatattaataaacaaatctgattatattgaaatgagttttatttagggcataaaacccaacagtgcttgtatgaacttctaggcatgccttttgcccaacggcttgtctagagagtgttctgtaaaggagaaatctttgagcaacacgtgtgttttatccaacggttggatggtcagatttacagctgtattcttttacccttgcaacaagcagtggtacgaaactctatgtgggtaaagggagtacccttgcccacatgtaagcctataaataccctcattttctatgtacaaagggtgaacaattctatactacccaaacctctacaaaaattcctattaactttcttcttcttcttcaagagaaataaaaggagtgcagagatagaatttatactgtgaacacttgtattattcaacactcacttgtaaggccaataaactaactcgaggactagggatttttaatgcccgaaccaccgtaaaaa

SEQ ID NO: 270525 - DNA, 697 bp, Cannabis indica
acagactggttcaaccgctttgttggccctgctcttgctccctttgcctccgaactgacgagccaatttgtttcccatctgacccaactcctggccaaaagatacgcagtctgcgcttccacgaatgctatttatcaggttcaggatatcagcgctaccatcaccgcggtgagtcttggttattggtttttttctatttgtctgtgctttaccctatggcatttgatccctcatacttaacttgttttcttttccagatcgctgcagagactggttgcctctcaaagactttgatagatcatgggtacgtcatgtccgagtttgggggcatggacgtggccatgaagagtctgagagacctggcggccgagaggaaggcgttccgggaggaggcccagcaaagggaggcacgggtggagaggaggcactaggaggcattacaagccaacgcagaggagctgaaggcccgggacgaggccgtggccaaagcaaggcgtgagctgagggaggccaaggaggctgccgaggagctgactttcaagttgaagtcaatggaggagttgcatcaggcagacttgcagtcgacggccaatttgaccattgaggtgaaggagctcagggattttaaagatcaggccttgaagaaggctaaaagagatgagcacctggccccagtcgtttgcaagcattacactaa

SEQ ID NO: 270526 - DNA, 816 bp, Cannabis indica
atgttctctctccatttgataaaattagctccattgagcttgttgtcagtcaatagtgacaccatgggattgttcacagtcatattgaatactacaaatatcaataaatagaagtcaagtaaggtctaatataaaatcatattctgaaattattagcactttgaaagtaggaatgacaagtgaaaatactaaaacatacaatcctaaaaaaatttctaaggttttcaacaaactgataccagtgtcccgtttaggcgagagtcaaagataccatccattgaatagagttgtcagctcatctaaaatgacaaacattctagcaaccttttattcgatcaagatgagaatccagcgttgtcccatttcggcgagagtcaaggccattctatcttatgagcttctaccattgtttcatacttttataagtcttactcctagcagccaccattaaggtgatcagtactaggataaaaacacttacaaataatacttatcctttgagattctacggtgttaaattgctaatgaacgttcatccattagagatgattactcactaaaacaagaactatgagcttgttcggtaatgtttttaaaagtagatttctatttttaattaaaaaatgaaaatacattctaaaattgtgttcggtaagtaattttgttttttatttttttaattcataatcaaaattttttagaattttaaaaatagatttttgttgattttaaaatttttaaaaacacttttttttctctctctggcttgtcttcctcctctcttcactgtccaatgatcatccatggcttagcaag

SEQ ID NO: 270527 - DNA, 707 bp, Cannabis indica
atataaataaataaatctatatatatatatatatgatcctgttaagtgtggacaaaattctccaactcaatgaaaatagtattgaaaactgaaataaataaaacaaaaattattacgtgttttaattcgattgaaaactcaaactaaaaaaaaaaaagttaatttaagattttgaaaagggtcccacgtttcattccaagttcatatctctaactttgtgttttccaaagacaaaaaggctcctactcaggataatgtaataaatttggcatcatcatcactcagtatctatatattagagttttttaaataaatttacacagtcaaatttgaataaaccaccccaactacacccaataaatttaaaaaaaaatacaatctaaataattttatgaaaaattctaacctcctaataaatatattgagtggcttgaatattattctaatccgttcaaataaactaaataaactgatttatatatttttaaaagtatctataatattatataaaaattacgtttaatagttaaactattttacatttaaagtttgtattttatagtgtttaatttgaaatttagaatttatagttgataatttttattatatttgaatattgaagttgaaatttttacataagtatatttttttattctatttttttttaaaaaaaatattatttagtactttaatatttattcaattta

SEQ ID NO: 270528 - DNA, 550 bp, Cannabis indica
ccaaacccactccatacctcccctccatccacgttgactttaacgaatggaaagtctggtgccgtccatttatcaacaccacccacaacacagctttcagcaaccacaacaaacttgttcctagcatcaacccagtccatatagttcaatttagtaatgtttatatttaaatataatgtacgcatattatttctatctatcaatataattatttatattgaattatcatgtgaatattaggagatatataattattcgtaattaaaaacatattattataattatacaaaaaaaaattagaatattctactaaatttttattattaatagtaatgtttatagataaattataaaataggtatatcttttaataaatacaaatacgattatttgtattgatgagttaactaatttatagttttttttatgataaaaactaagtgatgaaaaataaaaaataatcaattactaagtgcatgtttggcatcataactaaaaaactgtgttttgtttttaaaaattaaaaaattagtttttaaaaactaaattt

SEQ ID NO: 270529 - DNA, 805 bp, Cannabis indica
ggttgtctttcgaagatcgttacgacatgtacaatcatcatcaacgattagtttgtctcacggtttagtaagcttttattgctttagtagtttattttattagtatgaattaagaaatgtctgataggaagcatgtcagtagcctgatagctgaagaggcgcatgttttaaatttctaaaataagcggcaaatagtaagttttatttgatcacggtctcactagacttgatcttggttatgcaggtggttctaatagtatggacgccaggcaaaacaccaggagttaaggtaactcggtcggatccagtggtggttagggagttcagatttcccaaaatgtttgtggctgagacagaggccctaagggcagggcacgcggtcggggtgatgttaacctgccacaggctgcccaggctacccaagatttggaaaataggtttgcaaaaatgcaagcctgaattaatgagcaagatgaagagatcaaacgcctgagacagcaaggtgctcctacaatccctgctccagaaatgcaagtagctcctgcgcctgttgtgcaggcacgacaagtcactgcagtgaaccgaatggaaccactgtatgaaaggttccgcaagcaggcgcctctagtttttttgggaggtcccgatgttatgaaagtcgagcagtggttaacagttattactagaattttaaatttcatgggcgtcaccggcaatgactgaggggcccttcccacatttcagtttcaagaagacactctagtatggtgatgttgggttttgtgccctaaataaaacccattac

SEQ ID NO: 270530 - DNA, 651 bp, Cannabis indica
tggttattcgggctacaatcaaaattctatagcaccgaaggaccaagaaaaaacaaccttcacttgtccatatggtacctttgcttttaggaggattctatttggactatgaatgctctcgccactttccaaaggtgcataatggcaattttattagatatggcgaaaagcattcttgagatctttatggatgatttttcagtatttggtgaatcttttgaaacttgtcttgctaacttggagaatgtgttgaagaggtgtgaagaaacaaactcggtgttgaattgggagaaatgccactttatggtaaaagaaggtatagtgttgggtcacaaggtttctcacaagggtattgaggtggacaaggctaagttggaagtcattgaaaagctaccgtatcctactacggtcaagggtattagaagctttcttagacatgcggggttctatagaagattcatcaaggattttttgaagatttcaaagcctctttgttcgttgttggaacaaaatcgaccatttgagttcaccaaggaatgtcataatgcttttgtgactttgaaaaaggcattagtgacaaccccaattattgtagctctagattggtctttgccttttgagttgatgagtgatgctagtgattttgccatt

SEQ ID NO: 270531 - DNA, 805 bp, Cannabis indica
acccatctcatccataaactttcttgtctagcaatcgcccaaacatacttagacatggctgctctattccattcttcaatcttttttattccaaaacccccaatagatttgggggagcataccatgttccattcaatggatccacctcctccataatttgcaagacctgtccacaaaaaggatctgcagattgcttctattctcctgtacacctttgttaagttaaatgtagcctatgtttcgggtctgtaaagttagcattttctcgtctattggtgtcttttggagcagttttacacttgattttcattgtttcaggttcttgggggtgttaaagttcaaattcagtcaaatggtaaaaagacgggacaaactggcaaaaaaattggaaaaatcggctccagatgcatcagtagtcgcgacctctaaggagccaggtcgcgaccctttttcatggtcgcgactctggtcgcaacttcgagatttggcagaacctctgattttcgaggtttgcctgtagtcgcgaccagcttaaaagctagtcgcgactaggtaaggacatcgtggtttttgaactaattttgatttttctctcaattggaggcacacctctcatccctatataaggaatacgactctgaaggtcaacctaagcagaaatagacctaaatggtggatgaaagtggagaggaagcaacctgaaaaacccggagcgatatcaccttatagtttctttcttttacccttaattcttccttttatgtttagttttgtttcagatttaatcatggatgtttttattatt

SEQ ID NO: 270532 - DNA, 618 bp, Cannabis indica
tttctaattatttgaataccaagaacattactggcttcacctaaatctttccatttcaaattgagtgtttagtcattccttaatgtcagacattttcttgatattgttaccaataatcaaaatgtcatcaacataaaggaccaggaatactaccacttgattatccttaagttggataattttatcaaaccttttgttctaagaacgagaagcttgcttaagtccataaatggacttgttgagcttgcaaactttttcttcttgtcctaaaagtttataaccttctggttgctccatataaattgtcacgtaaagaattctattaaggaaaattgtcttgacatctatttgctaaatttcataatctaaagtgacagctatggagagaagtattttgatggatttgagcatggcgaccggactaaaagtatcctcatagtccacaccttctctttgggtataaccctttgcaacaagtctagctttaaaagtttggacttctccaccaacacctcttttcttttgtaaacccatttacatccaattggatgataaccatcaggtacatctacatattctcagactttatttcttttcatggaatccatttctgaatcc

SEQ ID NO: 270533 - DNA, 561 bp, Cannabis indica
tcttatttttcattcttttctatcttttatttaaccgaatagaagtaaaagtttaattttaacgtacttaactacattccctgtgggatcgacctcactcctgatgagtctactacttgaaacggtacgtacacttgcgtgtgctaaatattgcaacagtactcatgtataaatgacaatgattcttgaagcaggaagcctcataaagggagttgatatgtagaagttatggttataatttgataaaatgtatggggttactattggggtatcaatccaagtttcatattggcagaataagcaaaagttgtcttagatataagtgttttaccttctccactagtattgaaactttcggaaaattgtctaaaaataagatcgtgagggcttagtgaacaatattatactaatgtgtgagctaaggtgaggtggcgacccgataaggtggaagtgcgggacccaacaagtggtatcagagccaaaggttgagaacattgagatagtaggttgcaattgcaatgtgtgggaaaagccctcgatgtgataacttcgcaattgaag

SEQ ID NO: 270534 - DNA, 542 bp, Cannabis indica
ctaattatatatttttttcaagacctattaaatcataatgaatgcaatttaattaatatttattattggtgtaaagataaagtagtaatttcagcaaaataagttagtttctaaaaataacttctaatttcttcaaattatttgatgaaattattgttcccaagtttataaaaaaataatataattttaaaaaatatttttagttacttgctatagcaagaaattagattcccacattataaattattttagtacctattgttattccaaaattgacactctgacgtggcatcacgagagtggtgactcgtggactccacttggagcatttgttcggaacgatatgccgagcaggatgcctcgctggcacatccaaaatggaatactcaacgagccgtgccgaatgatcaacactaagcgaattcagcttaacgcatcatgaatcaccagctcaatccctacagcttagggatcaacttacgtggatgtggcacacacacgatcccactatcggtgtattcagcctcaatcctacgatcctt

SEQ ID NO: 270535 - DNA, 728 bp, Cannabis indica
aactaatctagtggctgaaaaatacaaagcaaccgaaaaattaaaagatgataaagatgaagatgaaaagatgtctgaaagttttttttctctctattacattcaaggcctgtgttacagcaagttatttttcaaccccctttcacatctgagatgggggtatttataggctctaatggcctggtgtacaaagtggtcccatggggacaaaatgtcactttcacactgcatgtcgcaggtgttggaggtggtgtggcacctcgtaccattgtctggtgtcaggtggtctctgattgcaggagagtgatcctcaatcgcaggcacgtggtccccagttgcaggcatgtggtccatgattgcaggttacatgagagtggttgtagcctatggtccccgattgtaggttgtaggagagtggttgcagtgtaccttgggtcgggtcctcaaacctctcatgtccgttgtcgtcgctactcgtatcttcttattttcagagttcttagaaggcgtggtttaacactttttccttgcatgcgttgtcgatgtgtgttcacctctcaccctatatttataatcctcggaacatacttacacatcacacgcaagggctcgcatgtgagacccccatgaactcgcatgcgagacccctcatggactcgcatgcgagcccctaacattaaatacacacacaacacacccccattacacacacacacacggcttgcatg

SEQ ID NO: 270536 - DNA, 893 bp, Cannabis indica
aatgtattttttgtgttaaatatttacaaactcacagtcttatcttaaaaaataaaaaataactaaaaattcaataaatatataaaattatctttttttttaaaaaaaaaataaactaaaaaaatattatgttagcttaagcaaatttaaatttttagaaaaaaaaaaaaaatcaaacttattctcatgatatttaattttactaaaattaaatttctaatatacttattaatatctatctaaatgggttttttaataaaaaataattaattttttaaattatttaattagttttaatttttttaatttcttttttaattttcgtaattatttaaagatttaccaaaaaaaaatatattaaatcattttcatttttatttggaaggatatgatttgatagttatcaaaatttgaggtataaagttgataatttacaaagatacattaccgtttaccattcaaacagaataatgagacaaaatttaacaaaaagactaaatttttgtaaattataaatataaaaattcaagcaaaattttgaagaagttgtatattttaaatggcattatcaaacactttaaaaagctcaaaagaatgatatgaatgtcttgtcttttgacatggtgtgttaagttttcgttttgttcgtaaagtttttgtcaatggcttcacctaggggtgtaaatcggtcggttatggtcggtttttaaaattttataaccgacgggtcggttacagtttttattttacgaaaaccgtaaccgaccgtttagaaattataaccgtataaaaccgatcgtacggtttttggcggttttcggtttggcggttttaggcggttttgggcggtttttggcggttttgacgattttttggttaaactatttttttat

SEQ ID NO: 270537 - DNA, 561 bp, Cannabis indica
tcgtgatttgcagtcactccacttggtggcgtattaccgccgatggcacccacgtggcaataatctattactctggtcggtcaattttctcaattatagttgaccaaagcaacctagaacttcgtaaatatataaattaatattaaataatttgtattattgcattctatgcatgccggttgagaatattaaactgaattattcaaaaaaagaaaattaagaaaaacttggcaaataaattgaccaagtaatgggagtagttttagaatagtatttgataaatataataaaataataatgaacgttttgatgataaatgatactctcgcatctatgaatatgtaggtagtgaaatcactcgaagagtaaattgatcagtttggtccaattgtaacatttaactagtgtaaatatcaagttgcacatctaatttgtaagctaatcaaataagctaattagtaatttttcctcatgaacttttacatgtaccaaatcgtgttctttgaatttttttagccgttaaaaattcctccgaattattgagattgttatatttaagaa

SEQ ID NO: 270538 - DNA, 1057 bp, Cannabis indica
taataataataataatgaatattatatgtagaagttataaaaataaaaagtcacacttgagaatttaatatatgtgtattttctaagaaaataataaaaattctcacaaaataaataagttagactaaataaaatatagaaagccacctcaactcttctaatgctttcctttatatatatatattgatgttaaaacacaataaaagcattagagtaagttacatgaagtatatatcttataacttcgataaataagaagttttcaactttgtgtgtctgttttttctaatgagtttcttttgtctaatggtagtagacatgttaatgtaattctcatatgtgtactatggtgtcttttttggcttaatttactactagaaaaaagattatttttgtcgtttttttaagtgacatatgagagatgtgcctgtgcgccagttgaaaaaactgacgtaataaccctaaacatataataatttcttggtgtcagttataaatagaaacataaacgtgttttgagaatcgacgcagactatatgctaagttgtgatgaatcgcattttctatagactatgtagtgacgcaacctaaaaaaaaccaacccaaatctattcaaaccaaaacaataatacgaaaagatctcacaaatctcaaatctatacataaaatgaagtaccattcattttatacaaataaacatatcaagatttcaatacacgaatctcataagttatatccaatatatatatacacctccgctgcgaacgaagggaagcgccactagagctagaaatcagccgctaaatatatagttctagtagattgtcacacccaaacaaaatcaacaaagagagagattgagttgagttttctttcctaatcatgtaagaggaggttagttagagaaaaatatgtatatatagtactagtgttatgattagtttttaatgagctttttttttctaaggaaacttacaaaaatattagaattttggttcatttttacaaaattactgtcacacacaatttttttttttttcaaaataactatatttta

SEQ ID NO: 270539 - DNA, 887 bp, Cannabis indica
attttgaatatattatgagaattaatttcaatcaatcatctttgtttaatataagttacacttgttaaaaatgacttatcagataaatatatgtcaagtttttatgtgatttatatgtgcacatcttattactatatatttaatggaaaatatttcaatggttatatcaaatttgcaaccatcatgattatatttatttttagttattggatcactattgaattgttgtgactaatttagaaattaaaataaataaataaattgtaaccagatagtaacttgaaaatttattttcttataaaatcttaattaaaattaattatatttaaaattaaattactaataattattaattaattttttacaatttgttacttaagaataatcttttagaaattaacttttttggacttaaattattaaaatatttataataaaattccttataatttaaaattattacactcataaccttaattaataaaaaatagtaaaaaataacctctaattaaatataattctacagtaaatcttattatcaatactttaagtgtcaaataagtgtgtcagtctaagattagttcaagttatttaattttttttatagcaattataaagttaaagataacttttttgccgcacttgacacatctgtacttcattccaccatctgtcatgtaattcttctctctcagagaggaagacactttatccttcattctttaagttctaaattaatatatatgtatcaattgatcagagtggaattaaaaaagaaaaattacaaaagtttaaaaattattgattattattagttattgatcttgaatatatattattgaaaggtttgaaagttactaactattatcggttattgatcttgaata

SEQ ID NO: 270540 - DNA, 351 bp, Cannabis indica
gtgtcattgtactcgggcaattttgtttaggactgacatcagaattcaggagggcaattgaggcaatttgattgagtttgaccaatggtggtgtaatctgaatgatatggatatgcaggtgatgattgcgatgttgtgcgattcaatttggaattggcgcaatgattgtgtctttaataggcaaacaaatgatttggaggagatgtacaaaaaattcactcttcggacaagggatttcgttttcaaagagaatttggtttgagcaatgtgaagagtaacgcatagagaaactgttggaaattattttaaagatctgaacttggatctctttctctgattctttagtgctga

SEQ ID NO: 270541 - DNA, 1177 bp, Cannabis indica
atttgtttctgatacattttctatgattgtcagccccagcagcaacctgatgaattagttgccgggtcattggatcttgtgacaatgttattaaaggcaaggatggtcttattttttttcttcttcttcttcttcctcttcctttttctctcttttgaaaatcatatttaattttgctaattataaatttggattgctgtcagaattctgctgttgatgtcgtaaaagcagtttatgatgtttgttttgatgctattattcggatagttcttcaaagtgatgatcacagtgaaatgcaggtaatcttgtatatgaaactagttattttgtcaatatgtatactagttatattgatccaatttttgtgctatgaatttgaccagaatgcaacagaattgtttagcagcttttgatatcgtgggggaaggcaagatatgctcgcttggggtgactctggatttataatgagaagtttactcgatgtagtttcaaggtattggttttttttttgttttttttttttttgtggttttacgtggcagtatgatcctcaacatattaataatgcatttatgaacttacccggctgatacacaattttttactgcaagtgtacaatgttgttatagcaaagatttaattctaaaaagattgtcgaatccacagaatttaatttcactaattattatactttttggttttatgttttaattagaaaatttaaagtaaataatgtttaagaatgaaataataaataactgaaaaataaacagtcaaacaacgattttaatcagaaagacctagagcattgacttccctatttcaaactatgaatctcaatttaccaattatcttaatttattctatgatttgtagcttcaagaattctaatgtaatctattaacctttattgagtgatgatagaattaacttaattaactaacaagatatctctattaaatattaatcaatcaagcaataataaagcaatatgattctctttaaatgaaactcgtagaattagtggaatctctcaatctcgcactttttccatgtcatgcaattctaagtttgattttagattacatctctcaagtgaaaaacctaaaatctatatactaattaatggtgatcaagcatttaaaaagatacttattagcacaaaattgcataaaca

SEQ ID NO: 270542 - DNA, 528 bp, Cannabis indica
aaaagataatggaatgatgtaaagtgtgattgatataagtcattaatcaatgacgtgtgtggctgcatgcatggattgtgtgtgtaagtggtaaaagtgtaataaaataaagttaatgtgtataaatgttagtttaacagtgtgaagatatatatgtaaaaagtatctattttgtatttttttgtgtaaaaatttcaaaataaaattaataaggtgttttaacaatttacaagactttaccaagcgaaatatataaaataaaactaaacaacatattactatattcgaaactagagaaggtagaagggccccatttttctattatataataataaaagaagaagggcatattggcatcaagacattatttcatatagtatagagtataaatagttgaattgagataagattgtaatttaacaatactgaattgaagactttgtcaaatgtaagcaactcttctcttaagagtcaaaccaaaaaagctaaacaagagaagataataagtagctacattggttcttagta

SEQ ID NO: 270543 - DNA, 1048 bp, Cannabis indica
acacaaagtctagtgacaagaaatctaaggaattggaaatttaagggttgggagtagggcagaatatgaagagataattcataatgaccatcgaagccgtacaaccgccagaattaaaggacgcatttttccaagaagggattttgacgaaaatgccctctgtaattattaaaaagcacttcttaccaaaaaagaaatttttaagggacaattgttatatccaaaatttagctaccatctcagtggaggacacgtgtcaagataaagggaatatggatcgatgcaatcactttttatggaataactcattaattacgtaagtatcagagtatatttgtaacctgctgactgtaaggttttaggagaggaatcgatatacaaactggtgtttagtatattagtgagaaaccaatgtcattgaatgcaaatagcgaggcatcaaagacaatacacataggaagacgaaagcgacacatatcaattgtgaaagcccttagtgtataatgtacaaactaagtgtaacagtcggatcggctcgagaccaagtaagcgaggtgcctgtctcgctatgggaaggcttcctgtaacttcatccaattaacgtcagtgaggcttatgccctggcgagtcagaagctaacattcaaacgagcttcaaagaactctttgtaaataagaatcgcgatcgtcacaagacatgcatcatcgacctcagaaggaaaaatggcccctagctcgctattgagatcactagaaccaagcttctgtcgagacatctccaaatacaacaattaaagacgtgtttaatacacgatcattttgacccagtaaaagtgggaaaatcacagctatatgattttcaaatcataaccgcatttacactacgtgatatgtaatcaaaccccgtgattttaggggatgatcgttgtaaatagattataatcaacttcgtaattaactgcccgctatataattaaaaatagtggcaaacaagatcaaaaaaaggagacggaaaaactcaatacaaaagagaccctgaaaaataatca

SEQ ID NO: 270544 - DNA, 878 bp, Cannabis indica
gaagctcctttttgctgtaactcattctagaatggagtccctgtacggatgcctgcttagagaagagcaagctgttgtctgtcatctattttcttggtttttgaggcttcttccctaaacctctttatggaattcttcaatgtctccgtaggcagctgcttgatgttaatcaaggcgctaacctcctgatgaacttttcttgcggcgacaaattgtctccggaagctggtgtgcaacttattccagcaatccacggaacccggttcttgttttttaaaccactcttccacggatacgcttagagtaagcgggaagcacaaacacttggcgtcattgctgaccctcatggatgtcatgactcggttgaacagtgacaggtgatcgcttggatccgagttcccggtgtaagctgccatttcgggaatcttaaaatttttagggagctctgcctccaagatgtgcttggcacatggttctcgatcctcacaatcagagttggagtcatcgcctttctgtctccgggagactcgggcgacgtcttttcggagtatggcaagctccgccataattccttcgtttaacgttcccgtagagactgcgggtccgtatttcttttggtccagatgatcctggagatcaccatgttcccgttaatctgatttctcagatcaatgggaggacattcctggccccttctccctctcccccagtattttggtgcacggaaatgctctttcggtcctctcgatcctgagggccaagactccctttttggagtttgcccctctggggacctttcccttttgggaaatctgagcggacctttcgcggatccgataccttttctttttccgggggtggaagtagggttttctttt

SEQ ID NO: 270545 - DNA, 634 bp, Cannabis indica
atttaaatattaattttatttatttaatacttatattgaattatcaaaaaaaattattattcaaacatatttattacttagacccacaaagcatcttatttaacaaataaacccctgtctctcttttcttctcaaaattgcctaaatattgtaaaaattctcaaataagacatagtccatcttagaactctaattgacttattagcaattaattgagtctacaaggtagtattatctcagaaaatgtaggaaccatgggcctatgtaaccaagcttccaatgagtagatctgaaatttactaagggtgcgttgggtaacacttttttaattagtttttcgtttctaaaattaaaaaagtaaaattattttccaaaatcatgttctataaaactattttttactttttttttatttttatttaagaatctaaattttaaaaacaaaataaatcactttcaatttttttttaaacagtttttctttaatcaatattttggactccaacctcaacttagatcttgaaaaccgaacccggacccagccccggacttggacccgttcgcggtcccggatcttaacttaaataaaatcaacaaataaaaatgaaaaagaaatttatagaacacactttta

SEQ ID NO: 270546 - DNA, 706 bp, Cannabis indica
agacaatccctatatatatatatggcaagattattgtaggacctagcaaaagtttcctaccggtagggaacttttcttgaccattgatttcagatcttgtggttattatgatgtaaggtgtatactattactataagactgtttgtatacaattaaaattttatacatattataataatatttaataatatatttatttacaaaaataaaatgatattaataattaaaaattttattaatttttaattttaattataattatttttttaaagttaattcgaattgttttatataggtatttattttcaagaaataattttacttacaaattttgttatcaattcttttatgttaatagttaattataacaaaattgattacttaattactttcgtttttaatttgtttacatacatagttctaccataattatcttttaaataatttgttttaatatttttataaaattatgtaataatattttgatttgaaatattttattattttttttatcaagaaagataatttctattaatcaaaccgagtcaattacatccacaaaaggatttccctttaaaagagaattttatctctactagacaattaattttttgtacaagattaagtctaattttgaggctctctttaattttactatctatacaactcggtttcataaactttttttttcttttatatagaaatt

SEQ ID NO: 270547 - DNA, 528 bp, Cannabis indica
tcttgaatgcaaaagataacaatgatagtccttttctctaagtactcaaaagtttcggatccccttcccaggtcatgggtaaccccttatataggggaagggttgatgcttctcgcttcatgagacacgaccattgcagagatatctcaattgtctctttggttttcggaggtggttgaagtctaattcttttcataatatcctgctattttcgtggatttgtaattgttgctgagcttcttgcaggatttgaatatttgaattagttacaaaagatgagggtccctcagtatgaccgtttgacttcctctagagtattagccatcactttgggtgacatcctcgaagcccattgtgaaggggatgataattgtcatctcaggatggttctccacaaaaccccttccacttgatctttgatgttgtgggtatcattggcgtcatgaagatgtactatatcaactatgtgttacgtaggtagaatacgtgacttggaccatgagcgtgtagggagtaggggtatacccc

SEQ ID NO: 270548 - DNA, 683 bp, Cannabis indica
aatacgtaatttcatctacatgctgccaaaaaaattattttctcattgttagttatgatgataatatgatataattattatgatctatatttgaatgataaagcttatctcactatcaatatatcattgctttgccaacaatatctcaaaaaaaaacttctatcatgtgatgtctggccacaacgaatggttcttctaccgttagtatcaccattgtaccacttgaagaatgcttgcacatcctcttcaataggttgcctgaaaggatcgaaagtaggaggttctaacttagagtaccgatgtttcctcgaccacgatgtgaaaggtgatttcaagcttacagcacggtttcttaacctcaatggtcgaccatcttgaacaatttgttctacctcatcaccaggctcttcatagttaatcccttcataaataattgacggcggtgtctcataggagtttgcagacacatgagattgtgtggcgacttcattttctgtaagttgtgtaggaaagttagatgttgtattctcagcagtcttctctcctacaagtgtggagacttgaccaccctccatgtttctctctcttgcaggtgttacaaatccatctccaaaaaagtgtgcatgagatggtgaatcctacaacaatgaagttacaaggcatattatttataaataaaatat

SEQ ID NO: 270549 - DNA, 599 bp, Cannabis indica
ctctcttcaaaatcgaagccctaaagttataagagtgagtgtccacacacatcaattggtactcagtcatagtgtgtaaggctgtgaagaatccaaattcaagagaaggagattcggactcagagccatggtaattgattttctttcaagaaatttggatttaaaacgatatatgtgtgatttggatgtgattcatgttgacctatgtgttttttgatgattatttgatgtttgcaaattttttacgaagaataatttgaattttttctgaaattatttttgttcgataatttggaaaaaattaagcaattcaccattttacagaactcaatttcgatgtaatttgaattagttaggaattttttaaaattagaaaaaataggggtggtgtcaccccacgtacgcgctcggatccctttcgtttcaggggttcacgcgtattcagacaagcaatgtctgagatttctcggtcaggatgggctgagttgtcttaattttgtcccctgtgcgtgttttctcggccatacaccccatcgtgcacgcgcggatggtatgcatacaaatttttccatttttttttttcattttttcatgttttt

SEQ ID NO: 270550 - DNA, 740 bp, Cannabis indica
caaacttaaagttggtggcccataaacaaaagttagctcagtactttaacaagcaagtgaagacacaaaagtatttttgtgagagatatggtcctcaggagagtgtttctgaacaccaaagacagcacgacaggtgagctaggaccaaactggaaaggaacatatcatgcggttgaagttctagaatcaggagcatacaaactgggacggtatgacgataacaagaaactcgttctattaccaaggtattggaatgggaaacatttaataaaatactaccagtaaaagtaccaggtcagatgaccattctaagtacaaaatttaagaacctttactcttaagtaaatggccttcagggcagaccacgcccaaaggttcgggtgaaatgacaaagaactcaggtcggatgactacctctaaaagtataatttcttttaaatgtaatttgttttgtttaaatttagcaaaagatcagattagattagtataatagcttttatgtaagttactacggtaacaaaaatatttcgaccaatgaatgaataaagatttctatttaaattagattgtgtaaatcctattagcaagttataaatttaccattaaatgcatacaaatgtctgctcaaacccgaagaaccgaacagaaaaaaaccatacttgtgaaatgcaagtgataaagagtcaaaagtctcctcagtcacttggggggcaactatacccgtacaaagcattgctaaa

SEQ ID NO: 270551 - DNA, 1055 bp, Cannabis indica
gatattcactttgtaagaaacaaggtacttgaaagacaactagatattcatcatgtgtcccaatcccataatcagataataaattgcttaacaaaaaagctctcacattctcaatttcaattcttagtagataaccttggagtgattgtatcaccctctcgcttgagggatggtgttatagaatgaaattatgcagggacattttagtcatggtgaggctctccaagtttgttggaggttaaggcaatctcgagacattggtcacaaaactgtcctctcatattgttagtacaaaattttagaaattctctaacttgtaatgaatattagtggcacatgtatggctttgattcaattttgtacctctctgctcactagctagacatttctttataattcattatatgttattaaaataaaaaaatgtagtactacaaactttctaagtcttataattttgattttcaattttatcacacattctttcccaattaagaattaatgggacaatttcatgaaaccaatattgtgtaatttattatgtcttatgtgtctttgcttgaagtatccaaattatttatttttctttaaacaaataaaataataataataataataataaaaaactctaaaacatttaataccttcctattattagcctaattctattttggaagttcaatatttagctactaaacataatgtaaatgtagttatcaaatcctatgtatagaataactttttcgtacaacaaggaaaatataagacatgaacctattaaattttcatttagtttgacttcgatcaaattataagataagctaatgcatgcatgtatgtatgtttgattaataattagtcattgataaataaatgtactacttatgaatgataattattcagaaaatatgtgtttttatctttgatttttttatttaatttaaaaaaaataccctcattttcacattatatatgttggaattgttctatcaactcaaaaaaattaaaaaaattgaatttgacttaaatacttttatataaatatattttaatat

SEQ ID NO: 270552 - DNA, 553 bp, Cannabis indica
gagacttacctgagaccctttcaaaaagggttgtgtggcggcggctgatcatacggataaaactgaggaggtggcgccaagtaattcgggtcatcaatcccgatgttcattttgttgatgagagggttgagttggtgaacttgtccctcatcatgaatactccgttgcaccatgtagttatgcatgtgattattttgctgaattatataactcagctgtgcatgagtatattgcatcgctggatcaatcagcccaagcagttgtgggggctcttcctcctctttttcgacactaggctctctttgccgccttcagccttgttgtgcatcagctgggggttgtccgtaaggatgaggctcttttagcctgttgaccatagtgatgtccatttttcttagcgacaccacagtattgtcatattcaagttgtggcacatcatacgccccgcaaacttcagtaatgacaaccgccaagcctaggccaccacccgtggctccttgaacaatttgcttgatgcttcctcggatatattgtccaatattaatattgtacc

SEQ ID NO: 270553 - DNA, 1032 bp, Cannabis indica
ttttaatggtggtatatataattttgttagcatgcaatatatatattttgagtattaatttagtattgttataatttctttgtggtatataattttattactacggtatattaattttcagtaatacgatatatcaaatactgctgtatatatttaatgatctaatatatttattcatttttgttacaatataataatatgcaatactaaaaaaaattatataacttaattttattattatattatttttttttcaaaaaatatgtgataaatgtatttttataattcttattagttaatttattatatttggctattttcttaattttttagaaatggaacatttactaacatagttttcttttttttgagtgtagcgtaatggtattttacaatctgttaacagcttaataatttcaaggtcctaggttcgaacccatgacctctccctttttcccatccctccctcaccactaagctagccttagtggctttactaacatagttttcttttttttttttgaagaaaagcgtacatgtattagattaaaaaacggtcagacctcgtggtcattacaaaatatagtttcgggcatagaggataaaggcacagagccgaacctctgatggaaaaaagcccacttggccacattatgggccataaaattacatcgtctactaacaaatgcaaacatacatccaataaagaaaggggaggtgattttacaaaaagagacgtagttattaagctcccatcgggactccttcctattaagagcattgatcactaccctcgaatcactctccaaaataagaaacttgacaccacgaactttagcttcctgaagggccagacagcacgccattgcttcctcacagagagcgttagaaaattccagcttagaagtaaccacccagatcaccttgccaacgtgatcccttgcaaccagagccgcacacatgctgtccaacccctctgatgtcgcgattcagcttcaaccaatcctgggcggggggggggggggcgggcca

SEQ ID NO: 270554 - DNA, 377 bp, Cannabis indica
tgagattttattttatttttattttcattattttattatatataaataatattttattattttattaaatataaataaaaagtaacccatgaatttttcataaaccaagaattcagttatataggcacactttatatagaatagatatttatatatatatcaggattgggcttgaactaaggtgaattaggacgcacctacggcccattggccaacccaggggcacaaaaaaatattttctctttaaatatatacatattttaataattttaaaaaatatcacatatattttaatttttaaataaaaagctcaataatttttattatcctaaggcttacctaattttatggtcggccttaatatttaggggtaagtt

SEQ ID NO: 270555 - DNA, 428 bp, Cannabis indica
atatcttggacttcgatcagactcgcacccaaatccaccaacggctctggctagtagtgatggatggttagacaaagatttggaggaaagatcatccgagatatgtaaggcctgcttttcagctcagttgaggtcaatgaacaattcacatacaactttaattacttcaaaaggcagtactcatcaagatgcctcttcatatgttgttgattcagactcagattatggtcgcctaattcaagctcttctactcttcctaattaattactttgaggttggagatatgcaatccaatactaaaaccatttatccaattcctcatccatcttttgagggtgtctcttcattaatgtctcctgatatggggcaacatggaattggaggccttggtatgcaatgcaaggggaacaatatgctattcataacca

SEQ ID NO: 270556 - DNA, 752 bp, Cannabis indica
gcatattcgctaacagagggaacataatgcactgataaaggagacttaccggagccgaaagtactggcgtcaggagccccagtatttggcacctgaaccaaaggctttggtctgggggccctcctctcaaccaggctcccaatgcaaagggacttcccggaaaaagttaggcttctcctctcgaccgggctccccacgcgaaggggcctgccggaagccgcctgggccttggaataagccttctcctgggccttccggtagagatactcttggtacttcttctccgtggtggcaataagctcgtcccggaaggtcttctccgcggcaggcaccctcacatttggacaaataaccttagaaaggttagagtcctccactgattggtgcagcagaatcagcttagccttccgacagttctccgtcgtgactaagcctccgacgtcgagatccgcccggtcataagtcgcaaagacctaagcccgccgaagaaagatctcagtaggcgcggtccgctcgtagggaggaatcttgacccactccgtgagaagctccgggtgccccacagctcggaacccagaggagaagaaaaagcgatggcgatactccttgacatgagtttgccgattgtaagggaccaccccatcatttgaagggtgggcccggaaaccataaaaatcgtctttaagtttgtccccctttttgggaacaaaaacaagttcataaaaatacaaaatctccaccggactgggaga

SEQ ID NO: 270557 - DNA, 768 bp, Cannabis indica
atctctaaaaatgtatatacataattgcataatttattattagactgctatttatgcttttattttgaataaataagatttttgtccccgaactatgacctttgtagaattttgccccctgaacttttctcagttgcaaaaattccttctgaactatgcaaattgttgcaaacattccctcaagttacgatttccttatttttctaaataatttgcttatgtaactttgagttgcaagtataattgtagtataatggcttatttaatagctttaagctacattaaattcagtttattgacgttaaacatacaaacaatagctctaagaatgcacatacataagggtgtgcagaaagtcattcaatctaattacaatcgatcgatccaatcccaaccgatccaatagaatcggatatccaatcataattggatcggatcggatgtaaattttaaaaatctaatcgggtcggatcggataggacatccaatccaatggataactcaccaaaccgatccaattatcatccaactgtcatccaattatatttatatatttttaaaatatatttataattttatatatttaatatattttatttaaaaatatatattaattgatttaatatacatttaacacatgagattaaagaaaaaaaaattagatctaaaatattcattctcatctaaaataaaattgttaatgggtattaaataaattttatttttagtgaattttattatgagatcatgagaattaggttggactaa

SEQ ID NO: 270558 - DNA, 584 bp, Cannabis indica
aaaagataaaaattgttaagataaaaatttgtcaagacaagatttattaaaacaaaagttagcaggacaaagacaccaaccttgtcctaaatagacaatggtagatgcctatagcattatgctatccctatggagtttgacattttaggttaattaattatttaattaattcaattaggtaaatatataatttaaaaagtggttataaatatttcaagattattgagatattctctcaagtggttgaaagatttcctcataaatattagtaaccgaatttgctaatagatatttatttatttaaataattaaatgataatttaattaaaaggatttaactactataaatagaagcctaatttgaaaaatcaggacacacttctcacttcctaaacaccattattttcaaaataaaggagagaaaaggaaattatttttctcccaatttttcttgcttatatgttgagaactcaacaagaaaaaaagttgtactttatcctaatagcctacactattcttaatgtgtggtggatcaatttttcgagttttatagttcttaaaaattcctaagagatcagaaatcg

SEQ ID NO: 270559 - DNA, 1265 bp, Cannabis indica
taatttagtaactagtaacttgttacattttttaataactagtaagtaattaaataattaaaattctaatttcgttgtattgtattatattgtaggttgtgagctatttttgaggttcgatatatttcggtattgatcagattttaagtttctatagatatatacattcactaactttttgttgttataattaattatcaatgcatgcttagtggagtttgaatatcttaaatattcatccgtagtaaagtaggttctgcggatacatgtaccgcggtcggatgggtagataaattttgtattgttaatgttatttcgtttgttctgtattgttatattttttttgtttgttactttaggcatttttaaaatttttgggaacgtccaattatagtcgctatgctgctaaaatttcggtagaattagaataaattttactaaaaaaacataaatattaaaggaaaagtacatagcacaaataactagttaattactcgctaattgtaagaaattaggtgacataacacatgttatacccgaagaaggtatgttaatttgattagttttctttgttttgtctcacaatttgaaccgaaaaatgtgaaggaagccatgacttttgaagaatggctcaatgcaatacaagaagaactcaatcaatttgttcgcaacaaggtttggattttagttcgaagaccaaaaggtatcaatgtgattggaacaaagggaatttttaaaaataaaagtgatgaattcggtacaattatgaggaacaaggctcgattggtggcacaaggatacacacaggtagaatgtatttattttgatgaaacttttactcctgtagcaagattagaatctatttgtttactgttgtgcattgcttgtattcttgatattaaactgttccaaatggatgtaaaatctgccttcttgaatggcattttaagtgagaaagtttatgttgagcaatcaaaaagatttgaagatcctcagtttccagaccatgtgtataaacttgaaaaagccttgtatggtctaaaataagctcttcgtgcctgatatgaaaggttaactcaatttttaatttctcatgattatcaaagaggtagtatggacaaaactcttttcatcaagcatataaaatttgattttatcattgctcaaatttatgttgatgatatagttatttgatctacatctaaccatgaagtgcatacgtttgttgatcaaatgaaaaatgagtttgaaatgagcatggttgg

SEQ ID NO: 270560 - DNA, 795 bp, Cannabis indica
gctcgaaggaaatgctgccggtaaaagtaaatatcgcgacacacagacaaaatttctataatcaagaagaaaactaagagctcttaaaattgtccttggatctacttgatgaaaaacatgttgattcgcaaattactaatacaacatatcaacacggagttacgaggtacttctacaagaaggtgaagaagaggctatttaacattggagacttggtgctaagacgagtatttgcgaatacgagagacgcttctgaaggagtgttgaatcaaaactgggagggtccttatgtaatcgaagttggaatcggggtttacaaattaactcgacttaacagcttgctaataaagaactattggaacgtggagtatttacgaccctactaccagtaaactgatgttgtaacttctatttctgatgtaatattttgaacttcagttattaataaagttgaatcatttttcaagtaattataaagtgtcatcctttaaaagtacttgaggggcatatgtgtatgataaaccagaatctatctagaagtacgtgatatattaacccactactttagaattttttaaaattttttaaaattttttaatgtttttgattaaagaacctttcccacgggaaaggaaaataaaaagtaacagttgtaaatgagaaataactcataagaacaacattaagctacatgcaaagctgaacactaacggctcacattttataggaaagtgttaaacgagacaccaagatgctttgaaaaaatacttaaacctaatatatgaatagaaggcc

SEQ ID NO: 270561 - DNA, 725 bp, Cannabis indica
aaagaaaaaaaagaaaaacaaaagcattaccggtgcactggtggtggacgggtgctgcactagtggtggacgggcggcgcactggcggtgtcggggaaaagatgccggagaagggggcggaatgtgtatgaaaacggggaaggggaggtggaatgggggaaggtggggagtgaggaaatgaaaaaaatggtattctgaaatggggagggatttatatagatttttaataccggcgggacctgccggtattaattgggttccgccggtattaataaaaacggtcagaatcccatattaataccggcgggacccgccggtaataagaagttcaaaagattgggcggtaaaaatcccgccctcttttttcgagacggaattctgccggtattaatccaaacccgccggtaataataaatttaaaatattttttttttatttatttaatataatatttattatatagttattaccggcggattgctatttccgctgataataccccattaatagcggcgggtgagttccgccggcaataaaaccgccggcaataaagtaatttgttgtagtgatatatacatgtataccttgggcatttaaaaaatcttgggagacacgcacaactcaaaaacaaaaacagctgattcccaatttattttaaaatttattatttaattacttttagtaattgttgactgaggttttcggcaactaatataataataata

SEQ ID NO: 270562 - DNA, 752 bp, Cannabis indica
atatatatagtatggcaagaatggtgaatagcttgggtgatgatgaaaagtctcataaataaatacaaagaatacaaatagtttttgtttttaatggtagaatttaaatagttaatacatatgttataatgttataattatcatatataaatagtttttatttttattttagaatactataagccatgttttagaatactataagtcattgatgattaatttctttttattagttggttttaatttagtgttagtataacaaataaaaataaaaaatctaaaatcaccacaaaatagaaagatgatgatattattattaaatattaaaaataatttagtgttgggttttttattaaattaaatagatatagtatgtgaaatataagataataaatattattattactgtcactatgtataaaaaatccaatataaaatgtcaattagatttctattttttatcaattaatttttgttattagtataaattaaatacaaaaacaaaaaaaaaagatgataaattagataaagtagaagagaacaccacatgaccttttaaattagatattctccttatgtttgatgcaaatatctagtgaagaagaatttgtctacaaatagccattttcatggtaatctgccatgagagaaaaatttgtctataagtatccaattgtcatagtaatctggagaagaagaagaaaaacaacatcaaaaatttgaaaaaaaaataataacaaaactttaaaaat

SEQ ID NO: 270563 - DNA, 1541 bp, Cannabis indica
gtgtacctttcggttcggcgtgcatggtcgaagactgtattattggatggttcttctttctaagtagttatttttgaatttaaattgaatggaatacaaagcaatttttgctaaatcgagctagtctacaaatctgtacaagttctaactgaatcttcttttttgaaaaataataaccttcatagttatttctgtaataatctatatctaaattaaatatgtacgcagcagttttttttttttttgctggaactttaaataaataaataacagctagcttacagcaactatataaagggttggatggggagaggtcatggttcgaacacaacttttataagctataaaactattaattaattgtaaaacgctgcactaaaaaatatatatataccttactaaagtttttatactctaaattttgtggtttgttagaattaaaagtagtactaccagaatgaagtttagcacctaaacaaaataaaagcccagcaaaatatatagcgcgtgtttaatattaaattagaggaaattatactacatgataacattaatttgtactcccctttttaaaatttattatatttgcattttttgtattattttattaattttatctctatcacttcacaataatttttattttctctaattaaaattttacttaaattttctcacaaatctctatatccatctacaaaaaatattaaaattgtatcttgtttatgtgagaatgttggtacgggctattttcctttttttaaaaaaaaatattaaatttacatactaaccaatcacaagttcacaacaacaaaaaattaataaataaaaaatagaaaaatgtaagtattagtgcttagcaataacacatattactcgtttaaaaagtcaacaattttaagttacatggatccacatttcttagggccactcccattaagttgcacttagttgttaacacaatttcaagatatttgaacgcaatattggtttacaaaatgaatcatatggaaccaaaaaacatagtgaaaattgttcaaaaagttactagctctttaaataactggtttttggtttttcaagaaaacataaaagtattcttttgagaaccaataggggcgtttgagattgttttcaaaatgaaagctaaaaaaatgaaaaaaaattctaattaacatctttgtaaatatttttttttacattaaaaccaaagaatattccttgagaaccaataggggcgtttgagattgttttcatacaacagttttaaaaaagaaagtacaaaaatgaaaaaaaaaaattaacaattttgtaaattttttttacaatttctgcatgtaacatttactagttcttttccctctcattgctttctctcaccattttttttctcaaaaatttctctctccttgttctctctaatcattttttcagtcttgagtttgaggttgaactttgagtctgagtccagacctagatatttatgtcgaggtctggagtatttttagagaatacgtgttgaggtgtacagcgtagttagc

SEQ ID NO: 270564 - DNA, 918 bp, Cannabis indica
ttatgtttttagtttttgttttagtttatttagtatttttgaatttttagttaagtaccagacattagttttttctagttgaatcgtgaaaaaacgtggaaaaaaaaattttggactaggaacccagtggtcgcaaccaccaggttcttcggtcgcgactaccaaaaatgcgaccctttttggtagtcgcgaccttggtcgtgacctggggttttacagaaaccacgaaatttcttatgttccagtagtcgcgacttgggtctttggaagtcgcgtccccagtcgcgactagcctcttttccagaaacgcttaaaatttgaacttaagctagtcgcgaccaaccttagggcaagtcacgaccagctaacagattttctataaatatcctatttttcccccattcaaccctaaaccaaattcaaactttttcaaactctcctcagccgcccaagccattctctcctccaaaaattcaatttttcatcaccaatcttcaattttctcatcttttcttcaatttctcaattccaatccattcaaaaacccaatttcactcatcaatctacacattccatcaaaaaccatcccaaaatcacccatattatcccaaatccgaaaataccattgtcttcatcttcaacctcaagctttcaaggacaatcaacaatggaggtggagtaaaagcttctttggggtttgtaagtatcacttcctaccattttttttttactttgtatagattttgggttgtaatagtgcgtgttgtgatagaattattgttgatattgggttagttggaattgtattatggtgttgagttattggagatattatttgtacagtttttgaatgattgtgaatttttggggagtagaaaattaaggggaggtgctgcccaatttttcttagaattattt

SEQ ID NO: 270565 - DNA, 735 bp, Cannabis indica
gatgattttgagactgtgtaggtatgagaatacatagttgaagatggcttaaatggattgattggtactacttatattaacaaggtgcatcttatttttcggtagcccatcacgaaagaactccacggttaagcgtgcttgacttggggtaatttcaagataggtgacctcatgggaagttctcctagaaagtgtgcgagtgagaacaaagcacgctagagatactcgtgttggtttgtagggttagtcgtcattccatgaagcagtcaaagtgacgtacacgtgtataagagtcatcattccgtggatgtaagggcccaatggagacttgaagcgggaacgttacaataaaattgttcaccgtttgtacataaaaaataagagtatttataggcttacatgtgggtaagtgtattccctttacccacctaagatttgtactaagcatgttgcaagggcaggcactacaacattacgatctgaccgttggcttgtaggaaacttcccctcgtgtggtgtacgactgcagtgaaagatttcatgtgaataaggacacttgtcactcaaaggtttcaccttgaaaagttgttgcctagacaagccgttggacaaaaagggggcttcaaaggctcgtacgcacactaccatggtctaatgcaggggacaagatctgattcagtgtcaaatgatgggtaaccgtcactttgcgttccggatagggtatagtcgaataag

SEQ ID NO: 270566 - DNA, 906 bp, Cannabis indica
aacccagcacgagtacagcaacagcaagcacagtttctactaaagtagacaatccaagtggttcaaacacgaaaagaaatgataattcaaaagaatcatctaagaataaaaagaaatagaaaaagcacgacaagtatgtatcgatttatttagtatacaccaagttgaatgaaacttgtgagaacatattcctcacaaatgaaaacagggtcgcatttcgcaaacttgagcccatgaggcatgcgagacataagtgagattcttcaaaatactaccggttccacaaagacattagacatacaagtgaagaatgtcgacagttgaaagacaagatagaaagcctgatctcgcgagggtatttcagacagtatgtaagacaacataggaaacgagcctaaccagcctaaccagaaaaacaaccctaatagcgcaaataaccagagaatgcaacctcatcctgttgagggcgaggatctactggtcattttgggctggggggtctcaccccgctggaaatagtaataatgacccagaaaaggtatatcaatgaaataaagaatggacaattggcatttgctccggaacctctaaaaaaggaaaaataaaaatgaacctctcattatcttctcagatgaagatacaaaacatgtaaaatacccgcatgttgacctcttcatcgtaacagtctagctcaccaacaaaagggtgaagagattgttggtagacaatgggagttcagtcaacatcctctacaaggacacactaaaaaagatgggattagaggatgcaatgttaaaacctttgtatggtgagcttgtgtgggtttacaaatgatagtgtcgccagccaaggtatcatcaaactttcattaactgtaggagagccaccgttatcaatgacaccgat

SEQ ID NO: 270567 - DNA, 515 bp, Cannabis indica
gtgtttctgatgtttttgatgtgaaattacttgtggggaaaattgtaaattctaatgcttctaacagtttagaaaatttacaaaatgaacttagaagtaagctaagtggaaagaaatacctgctagtgttggatgatgtttggaatgagaatggtgaagaatggcataagttagagatgttgttgaagtgtgggggaaagggtagtagagtcttagtaaccactcgtagtgaaatggtcgctaggataactcagagtacagttgggccaattaaagtaaagggtttgagcgaagatatgtcttggtccttattcaaaagaatgacgtttaagaaaggtcaagagccagtcgaaggctcaaaaggaaaggagctaggaatggaggttgtcaaaaaatgtaagggagttcctttggccataagaacaataggaagattattgcagcaaaggttatggcagtctggagactcacaaaaggagttgtcaaagtttttgaatagtgagtttgcaaaaata

SEQ ID NO: 270568 - DNA, 642 bp, Cannabis indica
atgtcacagagacaagactaatcgtaatagcaaaaatcgaattgcaatagcaaaacacaatcccgaccaagccgcacctatgcccagggaaggctgacgggcctagttggagaaaaaaaaacagcctcctgtaattataaatttaagaacgagaaatcctaaattacaaagcattatacatataaaataggaaggacaatgatagatacgagaaaacaagcaaaaaaaactactaaattaaaagtggggatattttcataaatactatccaaaaaatgtcaaaaaaattaaattattagaatactgttgtacaaaattttaaatatttttacaatttataaattttttttactaacaaataaggactatggttatttttatatttttttacttgttatttttttgttgtaatcttatttttctatatatataatttattattatttatatgtttttattattattttgtaaatactataagctaaacaaacagcatataagatcaaaatcttcctatcaatgtaattaaaataatcttttcaaaaaaaaaaaactagtaattaaaataataatatatatacatatatatatattaattattcaatggttatattattatggttatattttttattatgacat

SEQ ID NO: 270569 - DNA, 795 bp, Cannabis indica
caattccagagattttattaaagtctaggggcattatttgatttatatgtgaaatatgttatttttgtaatttttgctcggcgacaacggaaaatgcgatggatggctagtttgatcacatggataagtttagaaccttatttcttagtgggaaatattttagagaaaataaaataccgggtttaagcagggttatggaatttgaccattttacccctagcttttgagataccctagttttatgagtaagggaaatttggtaatttggttaaatgatgttttggtggctgcctattagagtgacacctagaaagattttacttcagccaaggttaatgtattaccctttatttccacttagggaaattaaatgtaaaatcaaagaaaacaaaaaaatagaaagtcatctatttctttctctctctctctttcggctgagacaaaaccagtgcaaggatcagttttccttcctaattctctgaaattaagctagggattcaaggaagagcaatcaaaggtaaccctagaaccatagttttaagttttgaagctttaatgtttggtttgaacttgtaattttgaaaattagtggctgttatggtttgggatgcttagggttcaaattctggacttagtttgagttgattaagggttctagcagctagttttgatgttttgttttagttttgtgcaagtttaagctttcagttcaacgctttgatcattaatcacaagttgagtttctttagtttgttctgtgaaatactagttggaaaatgttggttatatgttgtt

SEQ ID NO: 270570 - DNA, 537 bp, Cannabis indica
aaccatgcaacattaaatgttatttctgatccatattaataagtaaatatgattatattgaaatgagttttatttagggcataaaacccaacatactactatgacaaaactacctatgctgaaagggtggataaggcactgcgagctgagggtgcagttggatgtatgtcagagtctgttggaactctagtggttggcgaggctactacccctcctgcatcaagttttagtaggggaggtagtggttcggccatggatcagaaaaggaaagcatctgctgcaactagtggctcaggtcaaaacaacaggttccgagcgaaccagggtcgaggcaatcgccagggtagttctgaagcccgatacacttacccagaatgccccaattgtaaaaggcaccatctaggggaatgtagaggacaagggtgctttcagtgtggcatgccagggcattacaagagggattgccctcaactcagaaccgaagcaccgaagactccaacgaaacccactccaggaagggtgttcgccataactcag

SEQ ID NO: 270571 - DNA, 534 bp, Cannabis indica
tcggtccttgatactcgaatggaaaactgatgtgttggaatccccatttttaatccaaatggccttggatttttgttgcagaaaagagattagtgctttatgtttttcagcatactgctcacgaacacctttctcttgctgcattaatgtttcatttaatgggtccaggttcagtcttctttgacactcggtcatgagctccttcatcctcatttcttctccttgtatatcagcaaaaccagacctgttgattgctgccaatacaggttttagtcgcttcaatttagtgactagttgatacattttagttcccacaaccgatcccttccaactatccccgacttgcctttgataattaggagaactcgaccacattcgaaaatatttaaacggttttctaccacttggaagtgatggataaaccgtcaatattacgggggtgtgatcaaaaagtccctcctgcaagaaaagtgcctcagcagttggatataaattcagccaactaggatttgccataactctatcaatcttaga

SEQ ID NO: 270572 - DNA, 1019 bp, Cannabis indica
aacgccgcgttccaaaataccggacaccggaaatgcgaaatataaaaactgctgataacatactcatgcatatctgaattccataaataacaatgataaattatttaaatagctataaataatttcctgattaatcataaataactgctaatttccaaattaactaagcgggctttacactacatgaatcccttaatttatgcatttggattcatttagaattgattttgggtattttagacgtcgggattcatttttacgactaggttttgggctaggtccgtgcgacccgcgtgcagttaaacgggtcaaaacgacctggacgaaggtaggagatgaccgaaaaacgacatgtcattttcacatattgtggaaaacgacgtgtcgtttgcccttaagtgttcagccgctaaactctctaaaaacgacgtgttattttattcttatagcaaaaaacgacatgtcgttcacaggcagtgattttcaataaaaaaaaaggaaaattccaatttttttattttataatttttttatttatttaaaatattaattattttccaattttgctttaatttaatcaataaattacatttattcaatttctatttttatttattacatatatttagaatcaatatgttatttagcataaattgaaaatgaaaatttgttttaatttggtaatttattacatgattcatttaggcatgtaataattgtgtaatttgtataattgtgtatttaattatatattaccaaatttatgcaatttttttttatcaagaataataatctttctattaatcaaacaagccatttacaaccaaatagggactacacccacaaatttacatcaaaacttacaaacttttagcatttctaaggacaatcctctcaaaactagaaagcttcctatcttgaataagagacaatctaattttgtagattctctttaatgcttctatctatataaaatggggctatacattttccttcaaaaacacacaagttccgattaa

SEQ ID NO: 270573 - DNA, 839 bp, Cannabis indica
ataaaacccaacacatactttattttaattatattttctatcgcttaccatttgacacactgtcgttggctagaaacgaggtcaacagtgttagttggtcgttcttggacagtctttcgatgtggataagccttagtaaaatgtgattagaattttactttagtttaatcaaaaattatttctgttacacaaaattataaatagctacgcaagtgcacgtaataaattagtactcatacaggtgaggtcgatcccgcaaggaattgagctgaataccactaaattataatttttatttctatttggtaaacaataattttgataaaaataaaaataaagaataacaagaaattaaaattaagcaataaaagtgtttgatcaaggatgagaaattagggaaacgaatcatgttgcttcaattacccaattgttaatgctagttactattcttctttcttaaagtgaatgacattttacaaaaattaactaacttttttcatatattttaggtcctaaataacatattatctaatcatctctaagatggactaacatataattcgcattaaacaataatctaaatgtcacaaaggctatgcaaatacttttgtttcacatcaaaatcaagtttatccaattttagcattcccaaaactcacttttcatattttgaattgggatcataaaacatgcctaaggtgatcaatcccaaacatcgaattaagcacaaatatagataaattcacaatcaagaaataagaaatagcaattatcgttaactcaagatattgttgggttttatgccctaaataaaactctttacaatctgattagttatc

SEQ ID NO: 270574 - DNA, 687 bp, Cannabis indica
tttgtttttacggaactcgattccgataaaaattgacaaagttatggtagtttgaaaattagatgccatgggtgtcaaagcttggtgcacgaacgcactaggagcttcggacaagatcctgatgggcgcgcgtgtgcgggaacaaatgttgtttgaaggatcctccagacacgactaaagcttcgtctgtgcatccccctgcaactgatcgaggtttctcagtcagggaggctgcaggctcccacctctgcgcgcgcccaaggatgtgtgcaaccttgcttggcagtaagtgcatgatgcaccaaaatttgattttttttgggatattttccattaatgttgaattttttacttttcaaaccacaaatatcttaataaaatattatttttaatatttaaacttttatatcaaaattttaaattaataatatttaattttaatagattattattaatttttttttgatattttgaggtttaaatttaaaaattgattattttatttttatttatggtcagattttaaaaatttgttaatttctttaatatttatatattatttaattacaagattagatattttaatattggtcatattataaattaaatgataaccttatcttttaatttgaaatattatattaaaattatcttatatataaataaataattaataaatttgaaatt

SEQ ID NO: 270575 - DNA, 718 bp, Cannabis indica
aatgaattatgcgaagaattattgcaaaattcattagatatatggattccgcgaataatatgaagctttttcaatgaactcaggtgctgaaatgatactaaagacaaacaacaattatgacctcttagagaaactacttccaaattagagtacagtggatctactacccactccggcaatttcgtaccttgataaccgtctatctggaggctcttcaaatttggatgtggttggagtgctgtaagtatttttgtgtccctaatagaatcatttgcctcaccaacccattccaatgtaagctccgtgagatactctttgttctttaagttgacttccaaaacatcactcacttctctaacatgctgaagccctgaaatacgcaagcgtccatggagattatccaacttacccaactcttaatcctgcatccatcatttttacacaaaataaaatcacttaacttttgaagatttttcatgttgcaaatcctcggcggcatctcttttattgacgataatctgatattaagatggagaaggttaattagctcacatattttggtaggcaacaaactgagtttatcgcaacattccaacaagagtgtttccagattatacagtcagacacacagaagcaggtaactctttgactcctgtgtaagatacatctaagtacctgagatatttaaatttccaatcgaatcaggcaactgggtaag

SEQ ID NO: 270576 - DNA, 954 bp, Cannabis indica
agatgatttctcaaaattcactcgttgactcgaagcttgcccataaagatcatctaacactaaggatgcaacaatataaggtaaattattcaaataaaaatacgatcatcctcaaaaagtaaaaattacacatacacacactacaaaaaacagctacttttagtgacaaccttttagtcagaacataaattttttatgactaaatatgacttttagttacaacaaaatgttatttgtgactaaaacatagaatttagttacaagtcatcactaatttagttttagtcacaacaagcacataatttagtcacaataaattgtaatttttgtgactaatacttttagccacagacctttagtctcaacataagaatgatgttttataattagtcacaattttttacttttagtcacaaattttgttgtgactaaaaataagatttattgtagtgtgtacatacaccactttattagtacattagaacctctatttaagaataccctattcaaaaataacctctaatttgttataaaaaaaaaaataaagtctcaatttgggcctattataaataagaataaactctaaattgtaattagttatacaatttctatatcccgtattaacaaaatatacctctatataagaataattatatcttaataaaacatatacatatattttataaaattatttatgtagaattagtaattttattgcgaattgtaatacatgtataaatattatattgactcaaaaataattctattataatataatattaaggattgtttaatgtcattgttgctacattgatattttttgatattttgaaaaaaaaaattagtgtaactctatttaattataacctctcaattagaatataatttgcttagtcccaagtgtattcttatcatttaacaaaatgcaagtaaattaaaaataaactagaaata

SEQ ID NO: 270577 - DNA, 1381 bp, Cannabis indica
atctagtttggggaagtatcaattattttgatctcttccgtgtcagtgatgctaggctctcggaggaattggataggaaccaagttcattttatcacttacattactactcgccaaccgagctaacgcgtctacagacgtgttttcttcccttggaatttgtctgagactatagcttttaaattgtgcaagcatgtcatgtattttgcccagatatgctatcatcttttctccccaagcctcgtattctccaaatacgtgatttaccaccagctatgaatcactgcagatttcgatatgttcgtctttcatctgccgggatagtttcaggccagcgatcaaagcttcatattcgactttgttattggatgctctaaatacaaacttgactgtagcgtgtaggtgttgcccccaaggtttgactaggatgattcctacatcggatagttgatctgtagccgagccgtcaacatgtggtttccaagtcggcttgtcttcacagttacatggctgaggtatttgtactggcttggggttgcctttcgatatgctttcttctttgcctgtgcattctaccacaaagtctatagggcttggcctttgattgctattcggggttggaaagtgctttcctactaacccagttctactgctcacttgagcaatcgtctagaggcatccgacttttgcagtatttatcttaatggttggtcagtgtacacccgaacaagatgagcttgaaaatagggtcttaactttcttgttgctagaatcagacagtaagtgagtttctctatcaatgggtatcggccttcggcctcaacgagtcttttactaatgtaataaaccgggtgttgtatgatgtttttcctctctaatcaacacgacactcacaacatgcttcgtgacagctagtatatccaaagttcttctccgtctagaggtttcgagagtacgggaggctttgcgagttgcgtttttagctcatgaaaggctttttcacattcctctgtccactcaaattacttatttcctcgcaggatgttcaagaatggaacacacttctttgttgattttgaaaaatatctgctaagtgcggcaatccgaccagtcaaagtttgtacttccttggttcttgtcggcaatttcatatccaggaggggttgaatcttctctggattggcttcaattcctcgggcattgataataaagcccagaaactttctcgagctgactccaaagtagcattttaagggatttagtttcatgttgtacttcctaaggactttaaagcattcgtccaggtcatctatgtgccccccagccttcctggatttgccgagcatgtcatccacatatacttccatgtttcgttcgatctg

SEQ ID NO: 270578 - DNA, 673 bp, Cannabis indica
tgacacacaaataggtgatgaaaatacttctgtttctttattgatatttaaaagataaatattacattgaaatagagttttatttagggcataaaacccaacactattatgaagtgacgctttataattagttagtgttgcctttgatttttcctaatatatgtggccgcgaatgagggtgacacgtagacctaaaagagcatccactcacaaaaatcaattaactcttgggcgagaaagtacacctcatggagcgagcctcccggaggagagcataagacacgcttttactctccggaaggctagaactgtaacaaagcatctctgggagggaaagagattgttcgaacagtcacttcgcatttaatgccgcatgggggaaaacgtatcaccataaaaggatttgacagatggcgtaagcccctttttatggcgattacacaacaatcgacgagtctagtgacggctacattatgagcaatcacatcaaacaagagaggataaaagattatatccacctaatccctaagatacctacggtataggtcatgtatttcctattttgtatctgctagaaatttatgcccctaagaggctaacataaaaagacaagtgatctttctctagggatccccccgaaaaacactataaataccccatagacataatggaa

SEQ ID NO: 270579 - DNA, 783 bp, Cannabis indica
tttttttatttgttttacggttgttttctataatttattttttaacgttgatttcactggtcttgctcaatcttgctggaattaatgattgtggttcttttatgtttttctaagtggttatatttgcttactgttttacatttatttttctgttgttttagtagtttttttattctgattttttaagattgggcatgcaaatataattgctattgcattgggtattgaggttgtgcagaaaatttttttagttttctaaatcatattttctttgttttgtttgattttttttagtgttgttttaaagttgttttgccatgattatttatttgacgtcaatttcactattttttctcaatctcaccagaattaatggttgttttctgattgttctagtgttcctgtggtggttctatccgtgggtgtggaagatggatgcctcattttttttttgtgtttatagtataaaagaaaaagaaattggccaaaacagtataaaaataatttctgccgtgcggcagtatttttgtaaagattgggccaaaaatcaatatttttgtaagtttctctattttatttttatcaacctagtccatttaaatatccaaattaaataggctttctatatgcatctaagcccaattacaaatatatatgcttatacaatacaaatgatttggatgggccctgacatttaactaggtttatcacagatgaaagaaattacaaaatttacatgttacaaattatttatatgatctgttgacctcgcttctagccaac

SEQ ID NO: 270580 - DNA, 557 bp, Cannabis indica
accctcctatgaccacttgagctagcctcaagtggttgtccatgaattatgtaactattgacaagttggtctccaaaggattttttagccaattagtcccaaaatatataagtttggacaagttccttccctaacctttcggcaaattgctccttgaatttttcgtttcttagagactaattggtttatgatttaaaaattgtctaggcatttctctatcaaaattataatattctatttataggcaaattaacaataaacttaagatctatttgtatataatataaaacacgataaattaacaataaactcaagatttatttgagatattgataccacatgttagataaattaacaataaactcaatatctatttgtatataatatagaattcgatattaatatatgataattaagtatatgcgtacctaattgatctatagtaattaccgcaatttgatagtgcaatactatcaactaagtattcctccctaaatctctaaattataaacaatttatttatctgattattaaaaggtatacaattgtgatgagac

SEQ ID NO: 270581 - DNA, 1078 bp, Cannabis indica
attttttgcgcctcatttttgtcgtttggaagctgtccatctagtaaattattgataataggagtcatccatgtaggagagctgtctgtcatctctacgtcttccagttcacatatacttggctcgcttagcatttccaccggtactaagttcaattcatccaagtcgctttgcgagcccagttttgctaaggcattggcattggagttttgttctctcagaatttgttcgattttatagtaatcaaatatttccaagttcttctgaaccttctctatatacctcgccatttttaagcctttaacctggtattcctcgaggacctggttcacaatcagttgcaaatcactatggcaaatgaggtttttgattttcaacgcttcgactatctttaagccagtaatcaaggcttcatattcaacctcgttatttgatgcgtgaaattgaaatctcaatgcatagtgaaatttaaagccttctggtgatattaatattatccttgcacccaaaccttgctcgttggatgcaccatcaatgtataacttccaagattctgcttctcgatgtacaggcagaatttcttctagagttataccttctattaagaattcggccaaagcttggcccttgatggatgttcgagggggttatgttatgtcaaactgccctagttcaagggaccattttatcaatcttctagaagcatctggttttgataacaattgtctcaagggctgatcggttaacaattttatgcggtgtgcctggaagtacagccatagcttacgagacgcgtggactaggcacaaagtgagtttctctagagggggatatttagattcttcccccagtaaccttttacttacatagtaaataggttgctggtgcttacccccttctcgactatagctgcactaatcacatcttctacgatagccaaatatagaaatagcgcctctctagttattggttttgccaaaaccggaggcctcactagatgcctttttatgttctgaaaggcctcttcacactcttttgtccccttaaacttcttattgccttgcaatacattgaagaa

SEQ ID NO: 270582 - DNA, 534 bp, Cannabis indica
tctcagaagaattaaagagccatatttaattatatctccaatagattttcaagattcctgaaaaattgggtaaaatcaatacagcagcatacaaatttaatcaatcactctttcaggaacatcaaattaaaagtataccacacaacaatcgattcaaaatcaataagtaacttacaattagaaggaagaaagtgagaagagggtagcataggcgtagacatttgagaaagacggtggtgaatagccgaaaggaggcgagggagataagctgcagtggctgcgaggagggaagagagaagcagtggttgggagaaaagagaaactcattcagaggagtcacacaagagggaagaagaagaaggctgagataccatataaattggttaaaaatgatttttttttttaacaacgaaaaacttcatttaaaaaaaaagaaaatatcatacaaactttaagaattattaagaaatcccaataaagaaatctcaataaaaaagaaatcttaatcaaattatactaattctctatccaccc

SEQ ID NO: 270583 - DNA, 411 bp, Cannabis indica
gccattcttgggacaaaaaattggtgtagaattctttaacaacttccatgaccgcctatcctccctgcttgacaaaaagtccccaatttctcctatgaaccatttcactaacccatccaagtaactcgtcaatgtcctttatatctgccactaatcctcgctccatataaaattcccgattgtccaccttatcataatactttgtctcggctgccttgcaatgaaattttggaatctcatgaagtgatttctgtttttttttttctgttggcaaccctcttgacattcgacattttctcttctttttcacttgcacactaccccaacacaacaaatttcttctctgctttgtcttctttacaactattcagcaccacacccctaattccaacaatacaatactctagcaat

SEQ ID NO: 270584 - DNA, 803 bp, Cannabis indica
  modified_base (759)..(759): a, c, t, g, unknown or other
cccatattccctcattgatatcacttctaatgtattcagcattgccttcttcaaggttacaattaacttccgcaacttgttcatgaattggttgcccaacaataaagtcatcataacataaattagcatcctccttaccctcttcattctctaagaacttactttctagtgtcgataaaacaacagaccatttatcattagccgtattagaacttgtactgcttgactagccatgatgaatagatcattcttgcttcctctcttacttaaatcaaccaaagtaaaactaatctcgtcagtttttactcaaacattggtgtcaacccaagaacatttaaaaaatggaatcgaaacgaaaataattgaggtcccatatttcttcaataaccccataatatgtcacggtaccttaagcaaggtttttatctttaaaaatgaatggtttctgcgacgatacttatgtcactattttgaacctctcgagcatcatctcttgactttgtatgaaaatatttaccccttacaatatatgcttcatgctttgctaccgaaaaatttgctgcaagagcaatgcgactcaactcatcagatactccatgattcggttagttcaactttgctataatgatattctttaacttaccgaactgaaagttttacgatgatcatctgcaaaggtactcggggagtgaaaagttgctggctgagagaaagccaaaggaaattacagagatggagggagagtggcttactacaccntacatcatgtacctgtccaatggagatggaagttcagatgggaa

SEQ ID NO: 270585 - DNA, 715 bp, Cannabis indica
gagaagtatgtggtatgtttccatgattccattccgtggtgaaaatattgtttggatctctgtttctattctttctctaatctaaatatgtgaatgtctgcaggaaaagtttgccatgtcaaccccaacacttctatttaatcttgaactcgagacattacggtaaaatctttaaaaaggtcttgattgaatgactcttatttcttttactgtttcagtataacaaactgtgaactttgcagtgctgacttgggtcttctgggatttccacccaaagatctgcattaccgatttctttctcaattcattccagtgttctacattcgaattagagaatactcaaaggtacatgcgtctgtctcttcccttaatcttatgtctcagctcagtattaatatccatttgtgttcttgatttctaagacaatagcagtgtccccttatattgttaactacaatggagcactgtttcgccaataccccggtacataactacgaggaaaatttaatgctttatttgcatactattgttgtcagttcttttgaatcttttcttcaatattgctcagggccatggcaagtaatgcttaaacaaaccgacagttcttttgcttgtgtggctgagagtactacacgattcactctaggcgaagtaaatatttgtctccaactccaatctgcatttcctctgttcatttctagatattcagaagcta

SEQ ID NO: 270586 - DNA, 479 bp, Cannabis indica
ttcattttctttttcaatttattttctcatagttttatatgtttatttgcatgaaactattttttaggtgtcttatgtctgttcaatatcttacactactacaaaattgactttttgcttcacttgtaaaatgacacaaaaaaattttgtgtccgttgtataaattgacgtaatacagcagacgcaaatagtcaagttatttgcttcatttctaaaccgacgcaaactttattatgcttcggttgagaactgaagcaaaaagtatgctctattagcgtcagttcttgaatgaagcaaaaaatttaacttcaaattgtaatcgaaactaattagattattgcgtcggttacaacttgacacataattttacacatttttttttttttactttttgtcggctataaaatgatgcattgctaggggaaaattgcagttttctttacaattttccccacgtgcatttttagatattaaaattg

SEQ ID NO: 270587 - DNA, 545 bp, Cannabis indica
gagagcttaggatcatctttttggataaagtttaacgacttgggagtggtagggactcaacttgattattggacttgattttatatgtattgcataatattagacatattctaatttttatgatttacaaattgttcgaaaaattaaaaacttaatttccatatttttctagactgttctggggctctgaataatattcatgcagagtatgatttttgggtttattcaaaatacaacccttatgctgccaaaatttttagaaaataaaagggaacatgttcttttgctattcttattatctgcctgcttttggttatactgatgagcgacatgttgatcataatttgtgcatattgttatatcacaacctagctagtctctatgtcatcataggtagatcatgtgtgcattcacctgtaggtgaaagacctaaaatctatacaggaagtgaattgaatttgagccccggtacgttatggtggttatcaggtgtgactaccaagtctttggatgttgttttttatgattggtatgtgagagttagg

SEQ ID NO: 270588 - DNA, 2542 bp, Cannabis indica
actattctaagagctctttattgtaactaaacctaagaatcatcaaaagacaataaccacaataatagatctatgacatttgcatcttgttcatagtggttttgacaagattagtgtcttcaaagagaaataagcaaatattcatttgaaggtaggatcatctgtattctaacatatggatgtacattcaagagtggatgtgagttatcgttaaattcttaaaacgatcactctagatatttaccttatgcaaagaaatttaaaatgtttgagaaatttcatgaatttttagtaatggtgaaaaaccattaaggtaagtggttaaagacttgtgaactaataggggtggagaaatatttggttatgcagttcaaagatcattaagttgaactttgaatagtattcaaacttacctcctcaggaatatagattgcatattgatgaaaataaaagatctatgattagttactagcagctgcctaagtcattctagggaaacaacctagtgataggaaagctttagaatgatggaatggttatatatttagtgtaaaccattactagattcagggatgtcctgatcatgaacttaaaaaaaacttagaactgttaactaaggtttgcatgtttgatagctattctaaagtgattaggagtggaccgtcctatagtcattaagataagaaagtgtttgtttcaacaaatactaattttttatgaacttgacaaaatctgaaaataaagtagcaaagtagaggagatattttcaatttcaaaagtgttctatcatcttattctatataagatggtcccactacctctgttgtattgacccaaccgatgaagataataccattaatgttcctagactgaaagtcatggtaccttatcgtagttgaaaggttttaaggaactcaccctattatgacttagaagatacctatgataaaaatctattgttagtttaaacaagtaatggatagttagagtaaagagcttaagaagtaaagccaaaaaaactacggttaaaaccatgcgaatggagtaaccaaaagttttctattgcaaagacaagaagagaaattttgatgataagtctattcaatggacttaataaatttttccaatcctagtatagtaggtttgatattatctaaacccatggcttgtggtatgcctagtaatttacttactctagtacaagcaatttactttagtaagatgctggagcatttttctaatgactaactctaaaggaagtcttttgacacctagatatatattttatatatctaaggaacagtttcaattattccataaaagacaaaggcaccgaaagaattccttaagaatcaatagtgagagatctcatgtatgttttggaatacattggaccagacacttattgttgagtgggagttatgagtaggtattagtttaatctaggaaaggaatattggaagacaatcaaataaatcttaagatcaaaaagagaaactatatgttagttgattgggtggtattttaatactcatagactacaccaaataagatttctagacttgcgttaatgctagaaagtctacttattagatggtgattactctgggggtggagcagtaatttttagggaagtgtaaaaacctatctgaaatctctaactctagcagtgagactgaatgttaaagttgccaaaaaggctactagataattattcagtctatggaaagttctatacagttttcggtattatttcaatcatggattaactactagtgttacttcctgactaacacagatatagtttccaaatagtaaagaaaccagtatcccaagaggagtagacatatagaaaggaattttacaatatcagggattttgtgattaaggagatgtaatggtagagaaagtttatattgaagacaacctgtcagatcccattacatagataatactacattctacacttgatatggacatcaaggtgttgagattaatcaaaatgcacttttagttttatattagtacaagtgggagtttgttgggattttgtgccctaaacaaaacctatttcaatataatctgatttactaattaataaaatattaaaaattattttatgttgcatggtttataggatttctttcatgattataagtttaatgtataaattctattaaatctagaacatatggttattaatgattatagtgttgtcaacatagtggaatataatcatgattatatatttcaaagtttatgttccatgatttgtcagtacactagatttacactaacatgataatcaacgatagagcttacttacaccctggataagtgttatgtcctttccaaggcattggcaaagtatgctaggatcagatgtatggagtatacattggactggattgatattgacattggataagatatcataaacttaccgtaatatctatctaagtcaatatcacctagttgatcttaggtcaatagatcttaatcttgatatggttaggtttgatctcaactatgttatttatgt

SEQ ID NO: 270589 - DNA, 972 bp, Cannabis indica
ttcaagatttttccaattattattttcattattttaatgccaaataattactaacatgaacctagtagtttcctataaatagaaagtgatggctcacaccaaaataagaagttattcagtaattcaggaaactgccttttagaaaattgagccactcacttggtcaaaacatggacaaatgttcttaatcttcaactgaaaaacagaaacaaaaaaaacaaaacatgaaacaaaaaaaataaaaaaaacaaagattaataaactggcaccaaacaaagataaaaaagtaaagaaattgaaaatcaccttgtttaacggcaaatcaaaaatcttgcctttcaagtctctagaagttggatttttggtcccaacatcattggtccaatttcaaattcttggaatcctggatgcaactcttttgcaaaaggtgtttaccatcacaggacaacattcataaaaccaaactatgaacacccaaggacagcccaacactctgtaccaaccatcgtaggactgacctcccttctcctctttattttctattttaataccatgctctattctgcctttaaaagaatcaatagtacactcaaacgactccctaccccaacaatactcatcccattgaccgctatcaacggcatctaaatcaaacctagaaactttcttatctagagtattgctaagaagaaaacattggatgaaatacaacacagagagtttcaaacctagggattcatcttgtcgccacctactgcccaagaaagcatcctctatagccttatgatcaatggtttttatgccagggaaacaaaccacaattaactggtttgattcttgggaaaataacagtttattgcaatccccaaaataatcaagaccaataatcaagtaatactcctcgatgttgaaccgtatacaacaaccagcaaccttagcctaaaattctttgggattgggctggtaaacctc

SEQ ID NO: 270590 - DNA, 702 bp, Cannabis indica
tggtaaaataattcccaatactaactccaagagccctcaaattccataacaaaggttcgtaacatatcttctggtgtctgaattgttctttcggactgtccatcagtctgaggatggaaagctgtactgaatttcagtttagtacccatacccactgtaaactctgccaaaatttcgaagtaaacttcgaatctctctctgaaactatatactttagtgcaccatgtaatcttactatctctttgacgtttaaatctgcatactgatccactgtaaaggttgtttttaccaataaaaaatgttcagactttgtgaaatgatctaccacaacccaaattgaatcgttaatagccgtggttctaggtaatccaaccacaaagtccatggtgatatcctcccacttccactcaggaagggtcaaaggctggaacaaacctacaggtctatggtgttcagcattgatctactgataagttgggcatcgcgatacgaaatctaccacattcttcttcatcccgctccacgagaattagggtttaagatcttgatacatcttggtggtgccaggttgcaaagaaaatggagtggtatgagcctcttcaagaatttcgtttctaatttccacactacttggaacacaaattttggtcttgaacaacagcatcccactatctgacactgtaaaatctctagcttgaccag

SEQ ID NO: 270591 - DNA, 1288 bp, Cannabis indica
aaaagttcatcgttgttcacgcagaagttgtagtcttaattaatctaactaacaatttctttgatccccaccacctccgccaaagttagatccacatgatcaggtctacacaatgaggcagcttccaccaattagccaacactatcctgagccaccattccaacatcgacctcattaatacagaatattaattatcagacctagggttgtacgttggtcgatttaatcgatttatactacatacttttaacctattataaaggtcagattacaacattacaaatacaacccttctaaataaaggaaaaaagatttacccgactaatataatgaaaaaagattttttttttttttaaaaaaaaaaattaaagttattaaagtcaataataataaaaagaaagtgttttataatcattagtgggaactgtaactcattaaatgtatcacttattatttttatgcaaatatataatattacatatatatataaataattaaatagaatgtaaaaaaaaaaaaaaaactactaatcgggttgggcgaattatttcaatttaattggacaggttggacctatttttaacctgcacaattaacaaattgggcggtttataatttggtcgagtattttcggtttgaattttttgtcgaatatttcggtttgatttggacggtttacgaagatttatattatgtatatccctactactattaatatatattgatagaactaatagatattatgtctgaatagatcaatcattaaaaaattaaaattagttcaaattatatatatagggattgtctactgtgggaccgactctttctaccctacagtataagaattttttctccaccaattatcaagcatgattttgagtttcactttaatacaatgcatttcattgtagaaaattattttatttattttattatattaataaatttttggggacaggatttggtcccgttatgccaaaacagggaatacaatccgtgattgtactgtagccgttggattaaattggggcatgatctaatggctggggttaaagtaggggtatttagggggggaaaaatggtaaccggttggttttttgtattttaaattaattaatttttgaaaaactgacaccgattggcgattgacgtgtgaggtgtgacgtttgatgtacgggtgacagttagcaattttgaaaagtcactaaatagtgggttcgtggggtatttagggcacatttggttcttcttcacacttcttcagatttcgttcttcttcttcttcttc

SEQ ID NO: 270592 - DNA, 535 bp, Cannabis indica
tctccaaacacgactcctgtgcttcagcatgaaatcgcgacccttcttggcatccccgttcgtgagatgatggataagtacttgggtcttcctcaagcatttggaagatctaaaaaggatgccttcaactacattaacgatcatgtttggtctcacttaaataaatggaattctaaattcttttccaaaggtggttgagaagtccttttcaaatcagttgtacaagccattccttcttatgccatggcttgctttaagcttcctgcatctttccattctaagattgaatcccttatggctcggttctggtggggcagcactaagacaaacaggaaaatccattggaaaacatggtcttttctttgctattcaaaattccatggtggtctcgggtttcgttctatgaaagctttcaatcaggcgatgttggccaaacaagcttggcggctactccaatatcctcattcactagtggccacactccttaaagctcgatacttcccacacactagcttccttcattctggcaagggcc

SEQ ID NO: 270593 - DNA, 681 bp, Cannabis indica
ctccaaatcagacctagacccgaattggaagccgtacctggatcttacccaatcctggactcaagacccgaacccgaatttgaactcagaggcaagcatggaactaggctagggacactgaaacagggtcgtgacctagaactgcaccccagtatcgctcccgaacccaaattcagaaatgggacctaggacctgaaccagaaccagatcgagacacatgaaagttatcaagatcttgactcgggattcgggtaacggggcctggaacagaccagtattcagtgtcaagatctgggactcagacttggaccagaacccagacaaagaaccaaactcgaacccagacctagacctgggacccaaaattagaacctgaacaagaatcgctgaaccaggaccctagaacaagacaaggaccgtgagctgtaccaggacccaaacctagaaccgaacatagacctagcctcagacccaaactgagattggaactcgggcccggacacaatcgtgtaccaagaccagaactgagacccagacctggatctaaatctgggacccaatccaaaaaacagacttgcacctagatatggatcagaatacgaacctggactcataccaagacccagactaggatcgaaatgatggacgtagatctggtttgagatcctcacccagacccaa

SEQ ID NO: 270594 - DNA, 876 bp, Cannabis indica
aataaatatatattttaaaataagtatattaaaataaatattagatgtaagaaaactttaaataatgagctttagtataaggatattcgatctcaattgttggttctacatagttcttattttagtgagttatcattcctaatagatgaatgttcattagcaatttaacgctatagaatctcgaaagataattattatttataagtgttttattcttagtaacgtccaccacaatagtggttgctaagagtaagatttacaaaagtatgaaactatggtggaagctcataagatagaatggccttgactctcgcctaaacgggacaacgctggattgtcatcttaatcgaataaaaagttgctagaatgtttgtcattttagatgagctgactatgttcggttttgtgccctaaataaaactcatttcaatataatcagatttactaattaataaagatcaaaaattgacttttatgttgcatggttcacatgatttatttcatgattatgtttgatgtataaattctattaagtccagaacatatgtatttgttcatgattatagtgtcgtcagcacagtggaatataatcatgattatatgttcaaaagtttaattctcatgatttgtcagtttactggatttagactgacatgataatctgtgataggtttacttacaccttggataagtgttatgtcctttcaaaggcattggcaaagtttacagtatcagatgtatggagtatacattagaagggactgatattgatcttagataagacatcataaacttagcgttacatcattctaagtcaatatcatagttgatcttaggtttatggatcttaatcctgacatgtttaggttcgttctc

SEQ ID NO: 270595 - DNA, 977 bp, Cannabis indica
ggaatatgtgcccctactgaaactacacagaaagacaagtgattcagttctagggatccccccagaaaaaacactataaataccccccaaacacactaagacaagggtggagaattttgggttcacaataattaaagagagcaactaagaggaaaaactactaagaacattctctgtaataaatactctcataaataagaaagactcgttgactaaggctcattcatgccccaaccacgtaaaaattcctacagctttcgcatatatattattcaattggttgtcgaaaacctcggtcagcactaagcttaccttattttcgaattcaggtgtgccagtcaatctgagtggaacaactgcacaatgatttacagacccttaaatcacaatattcataaaactgatgagtaactcgctaagtcacctttcgaggacttaatattgaagctaaaagtttccctatcgatggataacatgccaatatcctaaatattacaaaaatgggaaaaactagggttcagtgttgaaaaccccaaaaacaatctaaacatgtcaattcgaccccaaatgatctcaaaccttccagacctcttaattaggccataacaagtataaatcaagcaatagcatcaagtaatatacccaaaatataaaaacacaattagagagcaaagtttgacctcttaagctcaaaccttgatcaaacatcaccacaagcctcaaacctaacttaattcaactctaacaattacaaaacaacttttgaaaacataatcaaaaccaaattaaatatacaaaaccctaacctttgaaaatcatacaagaacctaaccttgaacttaagaaatcaaagagaggagagttaaggagtttaccttgaattggatacaccaaatacttgctaaaatactctaaattgaaactgaaaatccttaatcccttgcaagtttctagagaaatcgagagagagagagaga

SEQ ID NO: 270596 - DNA, 583 bp, Cannabis indica
agatcttaaaatcatgatgttatgagcaagtaatctatttttgataaacgcaccttgattattctgaacaatgatgggaagcacttcagaaagtcttgtgcatatcattttggagatacacttatagattgtgttgcaacaagctataggtctgtagtcctttgctgagttcgggttagcaatgttcgggatgacggagataaccatttcattgaagtgttttgggagcctaccatttgcaaagaaccccaacacagcattagaaacatcatccccaatcttcctccacatgtccctgtaaaatcctgacccaaatccatcaagccccgggcttttagaagggtgaatactgaacaaggcttttttgacatctaccttgttaaagggtcttatcatatggacttgttgttctaagttaagacatcttccatgattgatactttcaagatctatcttcaaagtagcattgctcttgctgcccataaaggtctcaaagtgcttcacaaagtgcttgacaacttcctcaaagctatccacaatcttattatctttaacaaaggtggtgattctattctccattctt

SEQ ID NO: 270597 - DNA, 760 bp, Cannabis indica
aaagaaacaattcaatgcaatttcaaacatgttgaaacaagcaagtggtttcggttggaatgaggacctaaagtgtgtggttgctgaaaagagtgtctttgatgattgggtaaaagtaagtgttactttgttcaacttaacttcacaaaatatcatatcttaattcttttaatatattttttattcattgcagagtcatccaaatgcaaggggcttaaggaataaagcatttcctcattatgatgactttgttgctatatttggaaagcatcgtgcaaatgggcaaggtgccaagggattttctgaaacaatgaatgagattgatagagaagcagaaaatgatcaacaatatgagtttgatccatttgccccaatagatgatcttgttggaaatgcaaccgatagtcacacaagtacgggaacaacttcagcacaatcaagaaagagaagtagaaagaggtctaggaatgaagattcattagttgaggtattgactaccacagtgaacaaatttggtgaaatactagctgctgctggtgatagtattagaagaattgctgattgtttctagttcgagatagaaagtgcaagtagaagactgaaagtgtttgatgaactgaaaaaaatcgataaactatcatttgaacaatgaattgaagctaaaaaacttcttgttcaaaatcaagcttatacgaatcttttattgactttggatgatgaatacaagatggcattcattcttggtttgtttaagtaaggt

SEQ ID NO: 270598 - DNA, 493 bp, Cannabis indica
catgatgtggacatcaatattagacacgtggcatgaaggatgacgtcaaggagttaagtatacccgagtcatagtagtcaacctgggagggaaccctagccctgttactaggttgactctaggatggaagtttagaattcaataatttgaatccaacccactatctttcagtattttgtactatgaagatatgaagtagcctaatcatagtcctgggagataaaattacacgaacttgtaactcgaaagccaacctaggcacctagggttcacccggtgcccaagttgacattttcaactagggtttcagttttagggatcgccttagtgcgaagtggacaaaacttgtattgggacatcaactagacataccacatacataattgaggaatcaaaatcagaatcaaagtaagttgatttttaagcacctggccccggggctcgagaacctagtgcccaggttgacaatctatcaatctgggcaccttttgag

SEQ ID NO: 270599 - DNA, 460 bp, Cannabis indica
aaataatttccaacaggtccttcatctcccattctaggattttggccctccccattctgagctctccacgaacgtgtcgttcgtgtactgggaccaacctcaggttgggtcctcctggaacaagtggtccgaatgctggggccaccctcaagttgggtcctcttggagcgagttgtctgtttagactgtgagttgaaaggccttctggagcacatgggctcttttccaggacggtgatgagtttcttcatgtggtgtgttaatgttctctgtgttgtctaccatgaagaagattatttttttatatgtaaggagggtttttttcgatcttttttacgaaggctctcaatgaaagtactaaactgttaacgtgaattttcgttaactagatatgagccttaaaggtgataaacttgcacaaaaaattaaaaatagtttaggaaaaagtatgaacacaaagg

SEQ ID NO: 270600 - DNA, 482 bp, Cannabis indica
ctggtaaaataatttccaactgatcttcgtgcagaagttcaagtagatcctggtcgatttgatgcccgagtacccaagactcacctgaatttatccacaaaagacaacacacaagatgagtgttggacggaatatcaaacgataaacaagcaaatatgccgaccaggagtactcaacagattaaagaacggctatgtctaaagaaaagtcaaaactcaagaagtcacaaaagttttcttgagttagggaaaaaaagttcataaagcttagaataagaaaaattaaagatagacacaatgcagttcagacacaagctctatggctgtaagcctacatgaaaacatgataaagaagagtcacagaagtttctaaccctagggtatcctaagcatttttctacagcatagttgcattcaaagtgtaaacatgcaaaggaaagcataaggaaatcagaaactactcaaagattcaagtgtctgggt

SEQ ID NO: 270601 - DNA, 1003 bp, Cannabis indica
aaggctattacacatagagaaaaaagaattattgtacttaccaagctaaaagaaatcctaggtacccacaagactcaagagagcaaaaaagaactatgaacaagaaaatagcaagaagaatatactctgtttttctagatgtaaaacagagcaactcttacttatagtacctatatttgtatatatatgtgtgtgtgtgtttatatgagccagattgaatagcaagtgtaaaaaataatttttaatcgataactaaaaacaactaaacatgatgaatttttctcttatataaggtagaattttaaaaaacttttcttatgccattctcatacacgtactccattattatacatatgatcaactctcatgcatttactctactagtacttgctccacaataagtctcaaaatactacaaataaatacttcacatttttcaaagtaattaatatcttgcatattaaattagtttgtgatatatgttagactttgaaattatattagactctttagtgtgtgatattaatgtggtagtttcataggtattttaatacctctaacactcatgtttatagatgcaagtgtagtattatattttgttgttttgtaatttagtttttgaattaatatattgtagaattgatgttatgttgtttttttgttgtttgtaatttattttaggttggtgcaaaatgagatttatgtcttgtcgtttttgagttgtttgttggttgtttcacattagaataatataaggtggagtaaaaaaatttcaaaaaatactaagaaacctccttcgaagttatctaaagttgatcataaaatgagttttgaaacgcattgcgaagaaggaaatgggtgatgttgcagagccatctggttctaaaaaaaagacctcttccagataagattgagtctcgtaaggcaaagagaaccaaatcttcgaaatctgtcaaggatgtaagttgggttttgttgtttttcgatttttttttagtttttt

SEQ ID NO: 270602 - DNA, 638 bp, Cannabis indica
tagatatttgcatagtttgttaggtaatgacgaaagactaaaatgcccttgaatctagatattatttagccattctgttggagttttaaggcccaatttgtagcttattagttgctgtccacgggtcaaagtgcaaaggaaaccctgcagagcaactcttggccggcaaggcccttgtggagggtcggctagtcggccatggtgcaatctaaagtatggctagccatagggccgactaggggtggctggccagctcttgtgagggagttggtctctgtttgcttaggtgctgacttggccttcttattggtgagatgtaataccacgtggtattgattttttccacgtaagtatgccatgtcaggacgacaaaaattcagatagcgcatctcgccacagtcatactctcaatttgtgcagtaatgactaggggtcgttgtgtggggaaactgttggaaatattttaccatgatctagatttactaccaagtatgttttattaacatcctaatatggattctaaaacaatgaaataaacacataagactttaagaaaaccttacacactattcatcagtcaagggtttcaaaatttagagagaagaaaagagagagaagcgcgtgtggcttttctgaaa

SEQ ID NO: 270603 - DNA, 939 bp, Cannabis indica
tttgatacaacaatggacatacacaaacaggacaaaagcacagaaaacaacaacaattttgacacttacagcagagaaaaagctagtcaagaaccttgtggactcattgacagaaaacgtaaatcacttaaaactacaagttgccttatagtttcgttatagtttctttttcagttttcttcatatttagaacattgattatcttgacctaatatgcacgtaaagcaaataaacgaaagcatgtttgaagtggtagaactaacaagatcatgggtgatcaatctaaaagagaagacatgcagttgcaacagattccaactagacgaattaccatgtgctcatgtgcttgctgtgataaaagagatgaacttaaatgattacaattactgttcacattattacacgaaaagaacatggcttgaaacatatagcgggtcaatatatcctgtacacaatcacacaacatgggatgtaccacagaacataaaatatatctttgttctgccaccaaaccagaaaataagatctggaagactaaggaaaagaagatttatagctgattgggatacaaaaaagcagaataggtgtaggaaatgtggtcaacatggtcataaccgaaagacatgccacaatcaagcaattaaatagattcaacataattatttgaattgtttaaatctctatgagaattttgacaacatgaaatgttagttttggtagatttctattacttaacaaaattgaaatagttttttcgtagttgcaaaatagtttctagacagttatgatacttatgtaagaatttattacattaagaatttcaaaagaaatggtttttaaaaagttggatatgagttttataaagttgtattataaaaagtacaaaaagttactaaaacagttggtaaatctgttgagatagatatttgaaataaattg

SEQ ID NO: 270604 - DNA, 631 bp, Cannabis indica
ctcaataagaaaaagctttgaaaagatacttactcaaaatattgaagagaccaagtcataagaagaagcagcgcgtccaagctcatgtaaacgcctctcatctagaggactcaagagagcctcaacatgtccttcaatcgtagacacattcgagtgcacacaaacatttcttggaataatagtgccctcttcgtcgtcgctcaccaagtccactctacatctcgtatttagatcttccctggcattagtttttgaagtgacaacatccttcagagacgcaaaagcgcctgaaggtctcgtaattgatgattgccccttggaaccaattttttgagtcgtagccttcttggctcttgccaaaatattggaagaggacgacattatgaaagacatcctcttagtgtactggtctgctacaatcagttcttcctctgttaaatgagtaagaatagaaaactttgcaccagtcaactctaaagctcgcttaaataagaaaatagaaattcaaccactcggtcgaataaggaaattaccttctgtccgcccctcgactttgctccaaagaaaacttgaagccaaatccttctcatttaacaattttttccaccacctatctgttgggttttatgcc

SEQ ID NO: 270605 - DNA, 641 bp, Cannabis indica
ccaagtctagagtgccatgaatgtgcactattacaagaattatagaattgattacaagtagatgaaaaaggggttttgtgagatctgtcagattgcagcaagaagtatagattgccaatccgtttagcagtcccaatcctcttgttcattatgccctgtattgtgcaataagaattggtgaaaagcatgttgttagttgtgttgttgagataactcgaaacactaaagagattaaatttgaatgtaggaacatagagaacatttgagaggtgaaaatctggtgagaaactaatgtcacctgaatgaaaaactttagtggtcgatccattaggtaaggtaacagtgttagctatagtgtgtttatgcacattagacaaaagagagaaatcacaacaaatgtggtgtgaagcaccactatcaacaatccataggtgattagaagagttaccagtaatattagatgcaaatgcatctgtgggaggatgagttggctgtagcttctgtgtgaggagggatattattgcttgaatgtcttcttacttggtaagattggcaagaacactgtattgatcaacagaagatgaagcattatggactgagggctgctcattctttttcttgtcaccataaccggggggaaa

SEQ ID NO: 270606 - DNA, 556 bp, Cannabis indica
ttgatatggaaagtagtagcttggcggtaaccatcttttatgagaaagtatcaaagaaatctaattcttcttgttgatcagtgtagccttgtacaatgaggggagcttcttaactcttgacagatctctcacttctcactgttatacttgactttatagacccaacgacaaccaattgctctcttcttttgaggaaggggcactacagtccaagtcttgttgttgggcaaagctagaagtttgtcactactacaaaaataagctgtagtgatccacatgacgagagactctaaagatgcttactgatctttcaatgtgggtgactgaaaaagtaatatttagtgaccctttagcgcgggtcactaaaacttattagagattctcactgaacgtcactatagaattttagagtaccacactgttagactctaaagataatagccaccctcccaatgtgtcgctaaatatatttttaaaattatatttcacatgtattttttttaaaaatattctacttatataatttaaatgggtataattattattactttttttt

SEQ ID NO: 270607 - DNA, 1212 bp, Cannabis indica
aatccaattcgattttaaatttacattcgatctgatccaattataattggatatccgattctattggatcaattaggattgtatcgatcggttgggattggatcagatgactttctgcacactcctaatttagacttttaaaatgagtgaaccttagacatggacttaatttaccttaacctagagttgacattgagtgtaacaaagtttgaaactcgtataatttaattatgaaacatggcttttacttccatctcgtaaaacaatcttgtatagacttgaatagagtaggctaataaaatgccataattttcctgaatgagtaggggttatcgctcaacctcctaaaaccttagtaatagtggtaacatatcaatcttgagtggattaacaattggtgactatgaatttgttaagcaaactatgttggcctctcctaccctttagtagttattcaaaaataattgcgtggaaagggacatagaattaatgctttcacttgatctctactccactcatttatgattaagactaggtagttcactaagaccaaaggtgaggcaagacatgcacctattgtagtgatagagtgtgttatttgaggctaagatttcattgggatcaattctcaagttgtacttataaattttgttttttacaaatattaaaagggtgcattaggatcaaggattgaattttgaactttaaagtcttaaaaacttttactattacattagaatagcgttcctaaatctttagaagctggaggttgtcttttttctccgactagactcgctgaccgttcttgggcttatgcgtagcttggtcattgaggtttttttatttaatttgctactacaattaggttactgtatttagattttgctattgtagttagtcttgtttttctaatatgattttgagtgtcttttgtttaggttactacattagtcttgtctctatgatacgattttgttttattttgagtcgttgttagttcatcttctttgttcttcgactgctcacataacagatcgttgttagtggctgagaataataagttctctgtggcagattgggtagttagtagtgtcgttacgtatcttctgttagacatttatatgtataatataaaatatatgtatgtgtatataacatgcggaataaataaacaaatacactatatgaatataaggatcgaaatacctccag

SEQ ID NO: 270608 - DNA, 582 bp, Cannabis indica
tccgcatctgcaaaaaagacaattgaatattcgaaggagaaaggcttgtttcagcaaaagctgaaatgttaggacttgtatttgatggaaagaaaagtccttgacctggggtacgtttgaggtattgaagcacacgatgtgtggcttgaagatggggtacccgtggagatgtgagaaattggctgagatggttgacggcataagatatgtcaggccatgttatcgttaagtaaatgagtttgccaatgaggctcctataagtggtgggatcgggtaagaggtttcccttgtccttgctaagcttgagattaggttccatgggagttgaagcgggttttgctcctaggtaacccgtgtcattgagaagttgcaaggtgaagggtctttgagatattgaaatacctttgtttgatctagttatttctagaccaaggaaaaaccgaagtggtccaatgtccttgagagaaaattttttgtccaagaaggatttgaattgagtgatggcaaccttattattgctagcaatgattatatcatccacctatatgaggatgacaagttggaaggttggagtttttttga

SEQ ID NO: 270609 - DNA, 536 bp, Cannabis indica
ttagaagcagtgtcctcaaaaaggagttttaaggctcggtgatccgatccataaaaccccaaatgagtgagggaggcatggggaaaaaggctattccaggagggggtggatgtgcaccaatcgagacgctcaaaaattgtaccatgacgccaagtgaacttatgtcccaagtaaggaaggggggacatgttccgagtacgtaaaaaattatgaaactggtgcatagcatgggaggggggagaagtggtggagttacgatcactaatagataagtagtcattaaaatctccaataaccagccaaggcaaaagaggagcagtgtcatataatcgatttaaaagtgtccaagtaaaaatttttgaatcaatgtaaggagaaccatagaaaccagtaaagtgccattgtctatcattaaaattatttataaaacaatctacatgattgagagagtaagagacaacggtaatatcaatacaattgttccaaaaaagcaaaagacccccccctaaaccttgcctaggaacctctaaaacatt

SEQ ID NO: 270610 - DNA, 521 bp, Cannabis indica
gcggtaagcttgaggaataagttgatatggcgcaaggccgacaaatacaaggaagttaataaaataatcttggagaggaagcatggccccggccatcaggtgtgtctggctccaggctccgaagcccccgtagttatggttaggcgtctcctcatcccggggcggccggaggtaggtcccggtggttgtaagcttgatgcctgccaccaccacgatctgttccaactgatgagggcaggtcagggtgcagcgaagctcagctgcttcccacccgttggcacgggacttgtgcccttcttgggccacaggacccttcatgacctcctccagggttgtcagacgcttctctcccttcttcgaagacttagaaccggatgcagacattttggttctgaaaaagattgaaaaaatctagcagtcaagccccaaaccaaaccctaattcacaaagggaatgggggtcccctaaccgttggaaagaggccccctccggacacttgccaaaaaagaaagcctcaaagg

SEQ ID NO: 270611 - DNA, 739 bp, Cannabis indica
tctttttattacccatatttttcatatatttttgaaaattcttggttaataaagaaatttcatcatcacattcattatcagaattttcatgttcagcaacttttaaagcgatactattacctttattagcaatggatttgagtttgtccttttgtttgatttgttgattcaattcaaaagtatacaaggaacccattaattcttccacattcattgtgctaaaatatttagcttcctccatggccaaaagtttagttcaaacctctctggaagaactctaacaatttttctaacaatgatagaatcatcaagcttttcatcaagagcaaaatattcattagctataccaaaaagtctttcataaactttagttagggtttcattttcagacatcctaagctcataaaatttggtttgaagcataataaatctagaaggcttaacattaggtttccttcaaactgagtttgaagaatctgccaagcttccttagcagattcacaagacgatataagcttaatataaccttcacctactccattaaatatggcatgtaatgctttgctattgtaagcagaaagtttatcatcttcaatagaccattccagctcagattttattttagaattaccttcagaatctgtttcaacaaaagaagaccatcctgacagaaccatcctccaagctttctcatcttaagatttgatgaaagctctcattctaacttttcaataaggat

SEQ ID NO: 270612 - DNA, 559 bp, Cannabis indica
aagaaaaaaaaaactctccttccttctaaaaaaaaaactctcattcatggctgaaaatcccaaaaatgttaatacccaacatgaggaaactcatcatcattctaggaaagggcccattggctgtagaatgtctaccaacccacaatccagacacaccacctgctctaggaggagtcaacctaagggaggccccagtgctcgaccacacgttcacggagaacccaacccgacattggtcctagtgcacagacaacacactcgaggagaactcagcgtgggagttgcccgaaccctgagataagagatgaagagcccaaatcgtgaagagacccagcctctgggagaaggtacctataaaaatggaaaactgccacttaagacgccgtctagaagaggcgcaacggcgaaacattgaattagaacgtgaggcagctgtggtcaggacgacacaggggacggaatgctcaaaatcaacctgaacttggagtgagaagaccacgagacagacctcgtggctcacgaaccaggagataggaaaatgtctgggaagaacaaccca

SEQ ID NO: 270613 - DNA, 724 bp, Cannabis indica
gggtgagcagttgtttggagaagcgactaaaaaaacctcaatatcagactctacaatggaggccaagtacatagaggccgctgaggctgctaaggaacttgtttggctaagaaagttcttctcaagacttggtgttgttcctggtatggaaaaactacaagttttactttgtgacaacgttggtgctatagccaatagtaaagagcctcgaagccacaagagaagcaaacacatagagaggaaataccacatcatcagagaatatgtggcaagaggggacgtacaagtggagaaagtggacattgaacacaacttagctgatccgttcaccaaagttttgattgcaactacatttgaaaagcacagactaaatttaggattatttgaaatgtactgattgttttatgttagtgcaagtgggagtttgttgggctttgtgccctaaataaaactctatttcaatgtaatcctttctattcaatttattatcccaatttttgcactctgacgtggcatcgcatgaatggtgacacgtggaatccacttggaacatttgctcgggaagcatattctgagcaggatgcctcgctggcatgcccagagcaaagtattcagcaatctgtgcagagtgaccaacagttagtgaattcagctttcgcatcgtgagtcatcatataactcagggatcaagttacgtggatatggcatacacacgatcccacta

SEQ ID NO: 270614 - DNA, 617 bp, Cannabis indica
aattctcacttgtttgcaaatctaaaaatcatcatgggattctctagttttgttggtaataatcttcttctttatgtactctttcttttcctcactttattatcatctttctctttctcacagcctatttgccatgattttgaaaagtcttctctattgaagtttaaggaaagctttattattaacaagtctgttacaaatgatcctgatgcttattcaaaggttgccttgtggagcaacaaagaagattgttgtatgtgggatggtgttgtgtgtgatgagatcacaggccatgtcatcacccttgatcttagcaacagttatctttatggctctcttgactcaaatagcaccctcttcaacctggttcacctccaaagccttaatcttgcaaacaaccattttaactactctcaaatacccaatgctatcaacagactttcgatgctcaccaatttggacctatcaggctctgtcttttctggccaaattccctctgaggtttcagaactatccaaattgatgcaactttctttgtgtgccaacatagatccaatttcacaagaaaatcttttgaaactcaaaaagccaaactttgagagcttgatttcgaattt

SEQ ID NO: 270615 - DNA, 548 bp, Cannabis indica
atattttgtcatagttttcatttattttcattgtgaacttaaaaattacaaagatatacaaaagacttcatgcaaattataaactagtgcaaattgagaatagctcaagtgtccatatataagatcgggggtggtttgtttgggagttcgggtgtatgaggtcaaaacccaagtgtgtaattgaaaaataaaaatgtatgaataaaacatgcttctttcaaaaataacaaaatacaatgcttaaactccgtgataagcaataaaatatgttaccattcataggccaaattatacatactcatcttacatcatcaatattattttattaaatggcaatttgaatattactcaacactctcatgtggtgtacgtaacttacatactcatattacataaactagtacaacttgagtgtaaagaccgcttagtttaatttggaaattagcagttaatcatgtttaatatgaaattatttatagctacttaaataattatttatactgttattattgaattcagagatgcattttatgtcatttagtagtttt

SEQ ID NO: 270616 - DNA, 738 bp, Cannabis indica
ctgaaggtgaagatgaatctgagattgagattgagtctgttgtagcagaagaagaagactttacaaatgaaagccttgaaaatgagattgagattgagtctgtctcagaagagtttacaaatgaaaggccagaaattgttaatgattcttcactagaaaatgagaatgaatatgatctctccaaagtgaatgaaatcccaccagaaactgttgatgggaatgaaaatggtctctccaaagtgaatgaagaaatcccagaagcagcaactgttgatgatgatgatgcttcaacaatccaagatgtgaaaagttcacaagtaacaatggcatgttgtgctatcttggctcttcttattgcatcatccaccatagccattgtgttgctagtaaagaaagtggattcagcaacaactcctattctgccagagaagtcaaaaaactcttgttgtccatctgaaatgagcagcagcagcagcagctttcaaaatcaaaagctcacaaagaagaacaataataggagagaatccactgctacttcatcatgttcatcaatggaagaagattccatttccatttcatatggaagtttcacaacttatgagaagattcccactaatgatgatgagatcattacacctgtcaggcgctctagcagactcagaagaagccaagtcacttcaccgtgacacatatgattggattgactctactcttactactgctttccatccttttctt

SEQ ID NO: 270617 - DNA, 698 bp, Cannabis indica
ttgtccatttatccctaagggattcccaaagcgggacgatgcgggggccaaagcctggccgtgactctatccgggagtaccagagaattgtatgccactcattggtggagtcgcggtcgggacagtacccgacagcggtgctccgggcatataccctgctatcccaatgggatagtatcctccatagaccactatttgggcctcttcaaggttgatgtatttttggactcttttctggaagtcctggaggtttgcagctccttccggttgtagttcattctagaatggagtccctgtacggatgcctgcctggagaagggcaagttgttgtccgtcatcaactttcttggtcttcaaggcttcctctcggaacctctttatttagtttttcaaggtctctatgggcagctgcttgatgttagtcaaggcactgacctctaggttgacctttcttgaggcgacaaactgtctccggaagttggtttgtaacttattccaatagcccacggatcctggttccagcttcttgaaccattcctctgcggacccactcagagtaagcgggaagcacagacattttccatcattgctgactctcatgaccatcatgacacggttaaaccgcgacaggtggaagcttggatcggagttcccagtataagctgccatttcgggcatcttaaagttcttggggagct

SEQ ID NO: 270618 - DNA, 778 bp, Cannabis indica
ttaaataaaaaattaaaattaaagttgaaatcaatcacgcaattaaaaaaagaaaaaaataatatataatataagtaatgagtgagtgataaagaaagtaatataattacatggcatataaaaaattaattaaatggaatcctaataaccacatataaaatattaaattagaaaaacttcacaaaaataaaattaaaatataaaaagaataaataaattaaaacttattaatatgattataaaaaaacgtaagataattaattggtgaactgtataataagtataatatcgatcgtctccacctcttgggaaacctgagaattggtaaaaaaactggagctaaaatccgataccccattcttccgtcaccggcgcctgcgactcttcttctgattccgtacagctttctccgcctgaagcagaggcggaggatgaccggcgaagggtggtcggacgatacccatttaatcgtggactaagatttatacctaaatcatgtaaaaatactcatttcaaaatttttattgtttcttctagcccttaataatatttattatctattttcgaaaagctcgagaaataaaatatttgtccaaaattggcttcaacgttcattttgatctattttgtgaatcagattatccatttagttatttaataaaatatgtgcggtgcatgagtattgagataaaatacaaggaactaaattagtattttatcttttttctttcttacactgagcaaaatgcatggacaacatcaaactgaattatttgat

SEQ ID NO: 270619 - DNA, 533 bp, Cannabis indica
aaaatacggttttacggaattttaaatatttttacaatttttttgattttattgacagaaaatacggtttttttatgttgtactcttgttaattttttgttatttgtatgttattttttgttgttgttttgatgttatttagatgttattttcatgttacttttatgtagtttttttattgttttcatattatttttataaaaaatcgtaaaaatataaaataaaaaaaaaatcttaaaaacgtaaaaatgtaattttttataaaaaaatagagtactttatgtaattatccttaggtatagaggaaattagactctaccctttttatattgacttcttttatttttaccttttttttttaaaagcctatcatttttacatctttttttaaaaactttaccaattttacccgtgtcacctcaaattagtagaggtaaaaatttgcttaatatttgtgatatttttgagaagtccaatatgcaagttagacgagcccatcaataatggatccaacaatattgggcccaataaga

SEQ ID NO: 270620 - DNA, 487 bp, Cannabis indica
atcttctttgaatgtatcgaattatgggccatgaggaattgatccctccaatttgttcaccgaaatatttaaaaatccgagttgattcagatttgtagtcaattgtcttggaatcattccatcaagcttgtttgaggagagatcaaaccattccaaattggtcaaatttcccaatgatgaagggatattaccaacaagcttgttatgtgaaaaattgaggcctttgagtgagttgagcttaccaataacctttggaatctctcctgtgaagttgtttcttgagaagtcaatggtcataagcatggtttgaatttctggcaactcaacgtcacgtcctttcatcgtcaatgtgcttatttcataataggtagttggtcctaaatggctttgcatgtggttaattccccagtattggcatttcatcattccccacaaaaattcttaaaaaaacttttcgtggtaaatggccagtgaattgattgccact

SEQ ID NO: 270621 - DNA, 824 bp, Cannabis indica
gttttcacttgctccattcaagttgaactactagatctagcccttccgaaacaagatctaacttagcaaattgctattcatggccaagaaacaacaatcaaataaaatgaaaatcacttgaatgaacaaaggtaaaaatgctaaagtaagcttaaaaattaatcatacccaacattgaagttcctagccatttaagcctcaaaagtctagctcatattcaaataaaaaactaaaagtccaatctaaaaatgtatcttccatagctactgtccagttttacaatttaacaaagtcttcaataactaaatacaaacaataagaaaagagaatgagaaaggaaactaattaagagagggtaaaagaaaaatcaaacactaaagcttggtcccctttcttcctcctctgttgtgctttttttgcacttaattcccttccaaaaattgcagctcctacgtgatagagaagatgatggtgtacttagcattttccccgtttttttagttgttgggtccttaaggtacaaaaatcacatcctaaaattagaagcccaatcctttttgcactttggcccactaagtttagtcctgcctttacaaagcatccaactggtctcatttttagtgacaaatacactcctgttgatgtggacagctatatctcgtgtttccacgtcactgccagaatgttgaattcgtttcagcattacttcagcattgcttcagcaatctgccccaatttcagctttcattcccacttcttccttgcttccttttctttatcctatcaacttaattcttcttctttcaacaacaaacaagcacaat

SEQ ID NO: 270622 - DNA, 828 bp, Cannabis indica
tgtgtttatttcatatcgtttttagaagttcatatttaggatgttatataacatacttgttagtaaatctaagatcctggtaaaataattccaacaaaaatggggtaggacaccctatcctcaagttcaagaaccacggaagggtaaaacaacatcctgaaagctccaaaagagccctcagtgtgtgctaggttatgcttatcagattttgattttgtctcatttgtttgtctagtttttcatagtgactaagagctctgaagtcagtattggttttatggtaataaatcaggtacgcaatggaagatttgtttatctgattatcattatatcatagccttaaggatctccaaatgtataaacattaaatcaaaacataaattatgtgaaagaaatatatacctcttgatgactatcagggtatcctcaaaacttctcgtaagttgaatcattttaggttgattagaaactcacaccgtagtcttccgaatcgatgcaccacacacaagaaatagtgtaggctattaggataaagtgtataatttgttcttgataaattctcaacacatgagcaagaactatttgagagagaaaaatagtttttcttttctccctgtattttgaaaataacaatgtgaaaaactttttctgattctcatatcaggctactatttatagtagttaattctcaaaactatttatttaataattataattaattattaaataaaattgtcatttatataatttattaattagaccatacaaagtcccttaattaataaattgaccccaaaatctcttttcttcacaattaagcacttgctt

SEQ ID NO: 270623 - DNA, 903 bp, Cannabis indica
catccaggacccaactctaagagatcttgacgtgacataggtcatttaagaagccgaactagttcatccatccgtgcaagcacatttagataaactaaaaaatatgttttaaggcctggccggctaaaaactcaccaatctcgagctggaccgagcacgcggatcacccttcactcctaagatcaacgtccttgagctacccctaaagttcaaaatgccaacctggaagatgtacacggggaaagaggattccttgtcacatcataaatattttgaaatgcaaatggatttgtaaggggtacggggtgatgtgcggtgtagggtattccttgccacactctcagaattcgcacatcagtggtattttaagttaccaccaggaagatctcattcatggaaagctttctcttcagagttccatgcgcaaatctcctcttctcaccaactcccgttacatttagaagaccttgtcgaagtgaaacaaagaccaggagagcccttagagcctacataagcaggttcatgaccgaagctacaaaagtagcaagattaactgaagaaggaaggctggctgccatactgggggcattgaagtacttggagaactgtggaaagacattaagaaaagtggccatgtgggatctacggtggagtttttggaccgagtagatgggtttatcaagcttgaagaggccattcagcgagcagatgtcaaacctaggctgggccaaccataggtctcctcagcaggagcacctgctcaaagcccacaatatcctagcagttcaaccccgcacaaaaaaaggtccaataacaatggcaggcaaggccatgggaagaagggaaagttcacatgcatagtcgaacacacccctagagaaaatgcctccaaattcactgcct

SEQ ID NO: 270624 - DNA, 723 bp, Cannabis indica
ataccccttccatcatacaccaacaccacatgttacaacacgtgatcccatccccgactacaaaagcttgatgatgctctgcttctggtaattatcagtgtggttgtgatgctttcttctgctgtatttcctactcaatccttgcatttccagaatctcaagaaattcttcaatctcaaactttcgtttcttttctactgtgcttgagagagaaattgaggaagatgaaaagattgttggtggcttagctaagagaaatgaaggggttgtattgtatgtatatatctttatatattaaaagtgcctatctaacggcatttcttggtttaatagaatatacttaaaaaataaaagaatattctgttaaatttaacgattacgtttgatctcccgttaataaataaacccaataattaaacccaaaaattaaacaatcttttaaatattaataatcttttttttgcaaagaatgtgccgttaataaataaacccaataattaaacccaaaaaataaaaaaatcttttaaatattaataatcttttttaaattaaaaaaaatcatcttaccccatctctctctaacatcttgggagaatattaataattttttttatttatcttttaaaaaagaaaaatatagataaaatgtctagaaaagataatataaatgtgagactgtatatgagtatttatcttatatgtttgtgctttatttttagtttt

SEQ ID NO: 270625 - DNA, 1920 bp, Cannabis indica
atgggatgggtataaacagagtcgataccgctatgttcttccattgcgctctctaagcaaggtttttctttcgtttctttctttttttttggtatgattctttcttcctaatgaaatttcggttttttttttccattgatgtcgaaatttttgaattgatatatttttttttaattaataattaaatgtttagtgaataactgattatttggaagtgatggagagttcaatattacccagaaatctgttattgtatttgcatttctgacttacgacattgtctaaatgtctaaatacatgtgaattggttatttgagaaagcagcaatgggtttgtaattgcattatcgagtaagtgctaaatgtttgttatagaattttacatgaattgtgtttttggatgttacctttgtagatgttgtactatggaagttcattttcttagaagagtattgctcaaattcagttgcttggatgttatatttcagcttgaaggctatcgagaaaagtgctgatattaccatggtatggtacgacaccaaacaatgatagtgatgttataagattgaccctctcgcagttaattaacattatatataaggaaggtgtttcccttttgttcaaagatattagaagatattagagttattccactttatgaaaataaattgtcatatctcaaattctaacaaaagatctcttaacttttgttgataatcaataaagcacttaagagatgcttcgaaataaactcacttgtaattttttcgttggcattgctctttcttaaattcaagtaatgtcaaaagttgtaagaaacaagctgaggaaggaaaagtaagtatactaattttgttttcttttataaagttaatgtttttaattttaatttgtattgaagttttttcttttcgtttttttttttttcttgaaatgatttgtagtgaagttatttatacagctatcttaagatttttgtgatttggggccatggcgagtttaataatggtccattaccatgtaagataaatcgtaccatattttcttagtgcaaatccaatactattgctattgtagaagtagctgtcaaagaaagggattaaaggtcaaaaaaaaaataattgatttttcaaccttaaatataatgcttctgttgagcaccgctatccattctttttttcttcaattgattagtttattaatattctaattaaaaaataataaaatacaaccactaagttagctagcattggacctttatattttgagtgtcccttttcctatatttaagtattatttatatatccgtctactagggcagtaaatagatgaacatgtagctgatattcttttagcaataaattctccgatttataatatttcttgtaagaacataagattcactccacccaaaaatgatagtggtcaatttggtcccaaaagaaaatgctcacatatatagcaaattaatgaagataataaggacagagtgattgttcaaaaaaatatgtatacaaggatagagtgatctaactaattaaagctggcaacaaagatgtttaagagaaacttgtcaagttaaaacaagcaaacaagaagtcttgacagattcaaaaaaacaaaacgacgccaatagaaataaaattccagtcattactgaccacatctctgcatcctaaagctgcttgaaaaaggagtaacacattagcaatagcgaataaagtttactggtcctgttatagtccagaggtggtgctttacttcaagtccattttcaaaacgctcccttgtagatataaccaactaaacaaaacaaatacctctttagctaaaaatcaatgcaaagctatatagttaagtataaatgtgtatggagaaaaagcagaaaccaaacaaggagatgaggtggactggtgcttct

SEQ ID NO: 270626 - DNA, 1141 bp, Cannabis indica
tcaagacaagcttgaaaatctgagtcgatatagcctacagaatttaaagcaccacccttgtagactaacacataatcccttgtcgtctttatgtatttcagaatatgcttcacaacagttcaatgttcctttcctgagttcgactgatacctgctcacaatttccactacataacaaatgtctagtctagtgctagcataacatacattagacttccaactgttgaagcataaggaaatcttctcatatcttctatctcttagggatcactgggacattgttccttaaatagtcacacatcatatctggaaggcataactgcccctttggtattgttcattgggaaacgctctagcaccttattaatgtaagatgcttgcgagagagcaagtgatttgttcttctagtttctaatgatttgaattcaaagaacataattagattcacccaagtctttcattacaaattgagtttttagccattcctttatgccagtaattttcttgatattgttaccaataatcaaaatgtaatcaacataaaggaccaaggatactaccacttgattatccttgagttggtaaacacaaggttcatcctcattttggtgagagccgtaggttttgattatttcatcaaaccttttgttccaagagtgagaagcttgcttatgtccataaatggaccaatttagcttgcaaactttctcttcttgtcctggaagtttataaccttctggttactccatatagattgtctcgtcaagagttctgttaaggaaagttttcttgacattcatttgccaaatttcataatcaaaactggctgctatggagagaagtattctgttgatttgagcatggcaaccgaactaaaagtatcctcatagtccacaccttctctttggatatagccctttgctacaagtctagatttaaaagttttgacttctcaaccagtacctcttttcttcttgtagacccatttacatctaattggatgacaatcatcaagtgcatctacatattcccaaactttgtttctcttcatgaaatccatttctgaatccatgtcagctgaccattatttttgttctagacttgacattgcatgttgttatcactactacaatctggccttt

SEQ ID NO: 270627 - DNA, 579 bp, Cannabis indica
attaagagaaggagatttttcattgaaaataatttaaaatttattattaaagtttaaataatacaaaaaatatgtttgataaaatttctaataataaatattaccagagaagtcgttggagaaagacaccgacatcaaaaaattcatcgttgttggaaaagtcgtcagaaaagtcaccaaagttagatatctcagatataaattaaaatagaatcgattccatatcataatgaataaaaacaagtttcatacaataattcaaactagttataattaaaatacaggaaatcaattcctaaatcactaaaatataaattaaaaaaaaaactagtttcacaacaaaaagagtaaaaacaaataacacataataccttagaaagcggttagaattaaaaaaaaaactaggaatcaattcaaaaaaatattgaggcataaatctaaacagaacctgttccataacaaaataagtaaaaaaaaaactaaacacataataactcaaaatataaaatcaataaaccaattatatttatcaactgttaaaaatccgagaaaacaaattagttttgtaaagcaactaag

SEQ ID NO: 270628 - DNA, 577 bp, Cannabis indica
ctaacaacccctatatctcaaaatgacaacttgaaatcaaagcaaaagcttcaaaatacaaaatcataggttctagggttaccttagctccaagaacacctaaattcctagctgaattctagaaaataaagatgaaaaacttggtttgcttctagtgttgtctcagccgaaagagaagaagagagacagttctctattttgtgattttttggcttttcctttatatttctctaaatgaaaaaggatttcctaattaatcctttgctgaaattaaatggccatgtgtcactcacctaggaagccacaaaaccaccattttaaattactaaaatacccttttaggctataacctaggcatttctcaaaactagcggtaaaatggtcaaattccataaccccgcttcaccgtggtattttattttctcaaatatgtatcccactaagaaataaggttctaaacttacccatgtgatcgtactagccatccattgcatttttcgttgtcgctgagcaaaaattaaaaaaataacataattcacatataagtcaaataatacccctagagtttaataaaatc

SEQ ID NO: 270629 - DNA, 523 bp, Cannabis indica
ccctggtatgagagtgaaaggacaaggaggcactgcacttgaagacctggggttttaacgattttggccaagtgaattgaagattgcgttgcctcagagatgtaggagcatgggatttctgtgttttaagtaaatgctgtagatgctcatgctgatatagctactctgtatatctctgtaactaggaaagacagtcactttttaggccagcttgattggaagtaatcgactgtgtgctgttttcatcaaagctttgaatgatttgaagcttcacaatggttttcatagtggcggatgttagctgtgtagcaacttttaagtttggggaacggtagagaagatttttgattaatgcgggttcaagtgaagagattcatttgctctggtggtgaagaatcagagagtagttttgtacaagtgagtggtcaagctggaaaatcatcatttagattaaaagaaattgaagaaaacaaattctttttcagataacttaagcgggctaccagacatgcttgttctgtaa

SEQ ID NO: 270630 - DNA, 771 bp, Cannabis indica
atatattggtgggttttttttttcgaaaaacgtagtaggtatttaattttataagacataaataaataatccaaacaaaatataggattaaaaaataattaaagtttaaaatatggaaaaaaaaaaagaaacaataaataaatttaataaaatttgtaatacgaaataactcaaactagtcataactaaaataaaattggttataacataatgaatataaacaagtaatacacaataactcaaaacaattacaaaattacaattaaaaacaatcagttcttatattactgaaacataaattaaaaacaaaactagttccacaacaaaatacctcataaaatggttataattttttttattaacaaaaatcaaataagatcaattcaaataaatattgaagcataaatatgagacgaaccaattgcataacaaaataaataaataaaaataataacacacaataactcaaatataatataaagaaactagttatatttatcaactaattaacaatttaacaaaaaaaaaaccaattttatgaaacaactaagataaaaactcacacatgaaaaccagttaaataaaataactcaaacaaaaacactcattcaacatggtccaacccacaaaaataattacacttatacgatatctacccaaaaataccatactattacagatgcttaactcaaagattcttttctcatataattcacatgtaagtattaagggtgatttatgataatattatcatttactaataaatcatac

SEQ ID NO: 270631 - DNA, 790 bp, Cannabis indica
acaagaatataaatgtgatatggatttggatgaatttataaatttaataaacatataaatgataacatgaaccaaatcatacacaataagtaatgaaaataattctgtttctttattgatatttaaaagataaagattacattgaaatagagtttacttagggcataaaaccccacatcttcttcatcccgctccatcagaagtagggtttaagatcttgatatatcttggtggtgccaggatgcaaggagtatggagtggtatgaacctcttcaagaattttgtttctaagttcaccactacttggaacacaaaccctggtcttaaataacaacatcccactatctgacactacaaattctgaggcttgaccagctgaaacactaattcttcttagtaagctcggttaagggtgctgaagttttagagaacccttctacgaaccgacgataataaccagccagacccaagaaacttctaacttctgtagctgcttttggtctcggccaattcctgacagattctatcttccccggatccaccttgatcccgtctttgctaacaatgtgcccaagaaaggacaccccagatagccaaaactcgcactttttgaatttggcatacaacttgtgttctcgaagccgttgtagaaccatccagagatgttgctcattctcctcttctgattgagagtacacaaggatgtcgtcgataaatacaatatcacaaatattgaggaaatccttgaacaccctatttatcaggtccctaaaagctgtaggagcattgg

SEQ ID NO: 270632 - DNA, 508 bp, Cannabis indica
attttttttatttttttatttccgggcccccggaaagtgtgggccctaggcacgggcctagcccgcctatgcctagggccggccctggttgtactatggagaaaaacagcggtagttgtgctgtgagaaaaaataactgtagctgaacttgtgagaaaaaataactgtcgctgaattgtgaaaaaaaaaactaacggagtgtttggtaaatttaaaactttaaagttaagttattaagattctattataataataataattatgttataatctaattcattattatcataaatatttaaaaaaaaaaattatgttatataaaatttttatattctatatattttttaattatttttttatagtagaaaattatatgtattcaaaaaaaattataatatttttaaattatatttttatcacttgtaaaaaaattacaatttataaaaatatctaagttgatgtagtttattaatttaaaatataaaatattttttaaaacaaaataaaa

SEQ ID NO: 270633 - DNA, 643 bp, Cannabis indica
tatatatagccatataaaataaatctagatttttctgagcactctaagtatttttcctaattaatttatgaaataaactaaataactcacaataattccaaataaattcaaaaaattatgaaacttcaccaatcaccttagaataaattaaaaaatcaaaatatacaaaaatatctaagaaaaaaaccttataaatgctcaaaacgtgatcgccggtgttctcgtcgaaatgaaagatttgggtgaacctgcctatgtgctcggtattcaaattatcggaaaccgaaagaacagatcccttgctctctctcaaacaacttacatagataagcttttagagagattctcaatgaccaacaccaaaggggaaactatgccctctatattttgtatatgtctatctaaggaatcgtgtcccactgatcctcaagagatagaggacatgagaagggttccttatgcttctgcaggtgggagtctaatgtatgcaatgctatgcactaaacctgacatctgttatgcagtaggaatcgtgagcaggtatcagacaaattcaggataggaacattggaatgttgttaagcatatcttgaagtacttacagagtacaaggaaattcgtgttagtctacaagggtggtgct

SEQ ID NO: 270634 - DNA, 2219 bp, Cannabis indica
gaggtcaacatttttggacttttcattgagagcagtatcaagaatcgctcttcattctaaatttaatcacaagtacgatggtggtacagactcgtagcgggatggttgatccagcaaatccataggcagtggatcctgcattgcgaaacccaggaaacacaagggttccgccaactgttaatcccgagcaactgtgaaacgtgggtcatggtgtgacgactcttgtggatgaaattgcgcatggtgtgtaagagagtgggaataccagttcagcacccagccaggacattcataacacagccgtttcgcctgctaccaacgtttgaacgaccactggagatgatactgagatccgaaacatctgtgctgctcttcgactcatgcaatgtcataccaacactctacatcatgatcaagaggaactccgcgctacggtaaatctcgcattcgaagagtagaggcgtgcatgtttgtcgaatggagagacaaagagatggaagcgttaagggatcattgtgcagagattgacaatcgtagtcggcaagctactgtgctgatacgaaaagcctaccaaactgtcgggcagcaacccccgaatgtcacccccctgggtgaaatagacaaagatccagcgatgaatacttcttagactataaatggtcagttgccaaatctccgatcacaggttccgcctgtgggccaagcagtaggtgggcaaaccttgtctagtaattcattgggagaagtgatacgtgataattccaaccaggttaatggtgccggttaccatgttaaccaaaccaatcaatcactgagacagccaggcgtatctgtattcaaaaggttgggaatgactcatgatatcagaaacgatctgaatggaaggagaggagtagacgatcagcttggcacgctgatcgtgcagcccaaaaacccgtgctcaaattcctgctcaaaaagatactgacgtgactcagaccggtcaaaatgccgaacaggttagtccagtagtgcaagcacaactggacaaactaaagaatatgttccaaggcatggccggacagagaaacaatgatcttgagttggaccgagcacatggaaccccttctctcccaagatcaatctcctagcattgccccacaagtttaaaattccaacctggaagatgtacactggaagagaagatcctctttcccacctaaaatatttctagatgcaaatggatctacagggggtacgaggggacttatgttgtagaatttttcctgctaccttcatggaagccgcccagcaatggtatttcaagctggcccctagaaagttcaactcatggaaagctttctcctcagaattccatgcaaaattctcctcctcccgcaaacttccgttgtatctaggagatctagtcgaagtcaagcaaagaccaggcgaacccctccgagcctacataagtagattcatgacggaggcgaccaaggtttcaaggtttcacggaggcgaccaaggttgtccgcgatactggggggcattgaagtcctcggtgaactttggaaggacataaggaaaaatggtcatgtagactcaatgagtgattttctcgaccgtgccgaaggcttcatcaaacttgaagaggccatttagcgggcagaaggcgagcaaaagcctaccaagtcaaaagctcgttccactggaacgtccacccaactcccccattacccaaataatttaagctcaaacggtaaatgttccaacaacaacaatagacaagggaatgggaagaaaggaaagttcactggcgaaaccaagcaagctcctagtgataatcaagccaagtacactgcatctaccatcttaacggaggatatagaaagtgtttacatggccactcagtcattagccccgtacaagaagccaacgcccatgaaaaaagatgtagcaagagagacatgaccaaattttgtcgatttcatggagactacggccacgacaccaatgatttatagaagtatgcccacacatagctggagatttgggcaaagctcgggagaggtatgcccgaacagcacataacgagcaagaagaagtgatcctggccgtagaagaaaggaagcctaaaattccacgggcaggagggcctaccataaccttcaacgatgaagatgctgtcaaaatcaggtttctgcacaatgacccgtcggtcgtagaggtccagatagcta

SEQ ID NO: 270635 - DNA, 993 bp, Cannabis indica
tccttgatcgcctctactctcaaccatattgtcctgacttcttgtgtttcatcgggcctccatattataggactagcctacgaacccataaattaggtaggtcagatagcgattaaatacaatctaaacactgcatacatggaattttaggcaatgcactattcaactaacaaattactaacatgcttcatatgatacattttttaattaaaataaattactaaacaagtaaaggcttattgaaccgtgagtccagcttgtctctgatgatgattatacatatcttgatggtcttcggtaaataacctgacagctctaataccaaactgtagcaccctttttacttaaacatgctacattgatattctaattgttgtgcatacctttgctaatcaaaggtgttgacctcagatttagccaactgggagctaaattaccgcgtgtaaacaatgagaacaagtaaataaaaaggacataacaattttatagaggtttggctccctttgttagcaagtaatgagctactccccttttagttgtattgatattagtgataacacaactcagatcacaagtgttgtggattctaaaatggctctcttaagattacaatagtcagaataagaggctaatctcaagtagatgagatgagggagacttagtctctactacactgctaatggcatgtagaataaaaggtgagctagggttttcagtgcttgaactctatgacttaagagttagagcttcaaagcttaagacttagaacttagagcatagaacgtagagattttagatttaattaaatgccctatatataggagagagcattaaagagatagtaggttgatatccctataaaatgaggagatatcacctatttgttactcacaaaattagtaacaaaaaatatgttaattaatcctcaagaataggtaaataactgaagttaatctcctatttgtatggggtttaaagacccaatttgtaact

SEQ ID NO: 270636 - DNA, 862 bp, Cannabis indica
aaactcaagaaagatcgacagacctgacccaaaaaaaagacagcctctactagttataaaattaggaaggggtggcaaaacgtgtcatcgtgtcgtgttcgtgtcataatttatgtgacccgcttttatatttcgtgtcaagcatgtcaacccgtttttttaactcgtggctaattatctcaaccctaacccgacccgtaaaaaatcgtgtcgatctactgtgacccgttttgctattattgaagctggaattgtagagaaaaataataaatttgagtttcattagaaaatttatatacatttatctatgtataatgttaaagaaaattaaatttaaaattttttaacttaacattgaatcactaaatatatatttttatataattatattattattattattattaaattttattttattatattttaaaaaaatcgtgtcaaacttgtcacattcgtgttaagcttgtcgtatcgtgtttgacctattttattttgtatcaaatcgcgtccacccattttcaatgcgcgtctaattttttctaccctaactagtaaaattggtatggtgttcgtgttcgtgggccgtgtcgaaacccgttttgccacctctccaggaccccccaatattaacccttctattcagccgattttaacctaataaaaataggtacttttctgggctcgattcgacttctacatcagcttgtatgctcaaatcaaatgaacagagtaggaaattcgaagacaaagtcgtaaatgccaatggagggagaactgggtcgactcgctccttgctcttctcttgctgttgattctgtcctccgcgtcggaacagtaaacatatatatttttaatatct

SEQ ID NO: 270637 - DNA, 864 bp, Cannabis indica
tattttaaaagaaatatattttaatatcaaaataaaattattcaaatttaataaaaaatatgtaatatctaatcttataattaaaataaacaaaataatctaaaatttcaaaaattaaccataaggctatttttgtgagaaatcaaatttcaaaattcaaagcctattaatgtttaaaactaattttaattaattaaaaaaaattaataaaaattaatttattctgacaattagatttttaattaaaaattcagattctacacaaaattctacttaaatttgacttttgtttcaatgaaaaatgattttttaatcaaaagatatgaagaaaacaagtttcgtgctcaggggtatgcgatgcatacccctgcgagcgcggaagcaagggaatggccgagatagtaggctgaatgcagcctacttgaccgagggagctcgacgtgacacggcttcagacagcctgtgtctaagtttcctcggttaggctgtctgaaaacgcgtggaaatgtcggcggtccctaggtgcgcgcgcgtgtatgtgctcaacttgagatattttcatccaaattcaaaaaataataactaattcataaaaaatccaaattaggttctgtaaaagccaaaattcatttatttttcatctacttttcatataaaatattttcagatcgaaataaaaaatacttttacagcatatactgtgatttctaaactatcatcaaataagcacataaaccatcttgaaaccatccaaatcaacacaaaaacatcattttaattcatatttcatgaatgtaaatcattaccatggctctgaggccagttgttggaatatgttttcccatgatctagatttactaccat

SEQ ID NO: 270638 - DNA, 798 bp, Cannabis indica
aaaaataattccatgaaaaataaaaaaaaattggaaaaaattgatttggtgcggatggtatgcattcataccatccgcgcgtgcatgctaggtgatctaggcctattttgccgcacatagaggctgcaagcagggttcctgcacgcgcatggccccaaatttaaacgaaatctgcccatcagaccgagaaaacttggacaccaggcttgttcgaagccgcacgcacccgagaaaagagggatccgcgcgcgcatgggaggtgtcacacctactgattttttccaatttttaaaaattcataactaatttaaataaaatcaaaattaagttctgtaaaaaaaaataaattgcttaattttttccatcctatccaataaaaataataacataacaaaaaatccaataattttacgtaaaaatttcgcaaacatcaatcaatcatcaataaacacatagatcaacatgaatcacatccaaatcacacatacatagttttaaatccatatttcttgaaagtaaatcaattactatggctctgaggctagttgttggaatatcttttaccaggatctagatttactaacaagtatgtttttaacaacctaaatatgaatttctaaaacgatgaaataaacacataaaaggtatgagaaacctgatattggttgcagcggaattaaatgactccttccgctcagatctctaatccttgtatcctttctatcgcagagtatcaccaagatctaagcctgattctccttcttgttgaatatggattcttcacagtcttacatacta

SEQ ID NO: 270639 - DNA, 603 bp, Cannabis indica
gcctgttaggaagcatgttagtagcctgatagtagaataggcgcatatttttaatttccaaataagcggcattagtaagttctcgttgataatgaccttaccatgctagctcttggttacgcaggatgttcagactagatggacgccatgcaaaataccaggagtcagggcaactcggtcgtgtcaaatgaaggacagagagctcactttcccctaaatgttcgtggctgaggtagagcacacagggcaggccacgtggtcggggtgatgctaacccgccacaggctacctaggctgccatgttgctaaggaaacccagaattgggaaaacaggtttgtagaaatgcaagccagaatcgaggaacaggataatgaaatctagcgattaagacactagggtggtcctgcagtgcctgctccagaaattcaagtggcacctgcccctgctatccaggccgaacaaatagttgtagtgaatcggatggaacctctgtatgaaaggttccgtaagcaggcacctccagttttgctgggaggtccggacgttatgaaagctgagcagtggctaacaatgattacaaatatattgaatttcatgggcgt

SEQ ID NO: 270640 - DNA, 702 bp, Cannabis indica
acacaattctgctaacatataatattattaggtgtgaacttaagatagacagtttgtcgacaagataaaaaatagacagattatgccggggtacctatttttttagagtgaaaaaacaaacactaataccatatcaacaaccacgtagcactatcatatatacctaccaatttggcactaccatatattatatatacctacgaattcagcactgcatagcggtcaaaaactgaatatcttgaaaagtaaagttccactactaatcttataaagtgatacgtatacatattgatatcaatatcaatgatcaatcacattatattatatataggatgattacaatctcttaatcacttttatatcaatttttttatttaaatttttttatagttatatttattatagttaaaatattaattttataaatttttttaaaaaaattcaaataaattaccgtgtcaaaataaaatttctaatattttaatctactatgattgttcaaaaaattttaaacttatttcttgcgtggtaaactatttaaaatttttaaaaaatttacagatataatgttgtagttataacgaacataattataaaaaattaaaaaaaaataccaacatgtatttatgggttccgaattaactagaaattgtaataagagattgacgtatggtaataatctccttatatacatacatatca

SEQ ID NO: 270641 - DNA, 627 bp, Cannabis indica
tctgtttggagaaaaaacgctatctcttctgggttttggtattttgagggtttttaggaatgcacgtttgtaggaaatacatataggactatgttttttggtatggaactgggtaatcttagatataataacctgaaatttgtataaccgtgaactttaggaagaatttttgaatagtcgcaactttatcttttgaatacacgcgggtattcggatgaacacttcgaatgctcgcatgtctattcatcctaggtttcatagagactttatcacttctagtcgttgcttaaaactttaggattttgtactctgtatattctgttgtgggaacattggttaagtctttcaaatggtgggtgtgtcacagtattctaatggtgatatatacgattatatgttccttgaagtactgtgatacacccagccatttgcggcatgcgccaatgttctgataagcgcattcttgggctggcagatttgctcgaaacggtgggggtatccccgtaacttcagggtcatgcttgggaacgcatgccccttgagtcactgggatacacccagccatttttgaggtacatcgccagttggagacgcgtgacatactcccaggttgtgattagttaagtt

SEQ ID NO: 270642 - DNA, 478 bp, Cannabis indica
tgtgagtagatctaagatactggtaaaataatttccaacagttatcttgttagttaatttaagttaaatctatcatcgctcgagagaggttaatagattacattaggattattgaaactacaaattttaggatattttgggatactcggtaaattgagattcatactttgaaataaggaaatcaatgctctaggtttttactttttgattaaaaaatcgttgtttgtctattactttccatttatattattatttgattcttaactataatttactttgtgttatctaattaaagtataaaattaaaagtataataattagtaaaatttaataatcaacccatgtgggttcgacaacctttttattattaaaactttgctataacatcgttgtacacttgtagtaaaaattgtgtatcaagttttgtgtgtcgttgttggggattgaaaattcttaaattattgctaatattattact

SEQ ID NO: 270643 - DNA, 1002 bp, Cannabis indica
tgagatctcttgaacagtccctttgcatttaatgccgcaaaagacgtattgaaatttacaaacgacatgacagatggcgtaaaccccctttttcagctattacattataatcaataaggctagtgacgactactttatgaagaatcacatcaatcaagaggggataaaagattatatccacctaactcctaagatacctacggtataggtcatggatttcctattttgtatttgctgagaatatgtgcccctatgaagctaacgcagaaagacaagtgatccattcctagggatcaccccagaaaaacactataaataccccacaaatagactgaaagagggtcgaacattctgggcttaaaggaaccaaagagagaaaataggagagaaatccaccaagaacattctctgtactaaatactctcattaataacaaagactcgtggactaaggctcattaatgccccaaccacgtaaaaatcccatgcattaaactttctacaactcttcttatatattacttaactggttgccgaaaacctcagtcaacattttggtgctttcgttgagagctgaaggaagcgtcttcaaacagacagtaatctgagaagttgagtcaacaatggtggaaactcgcaacaacacacgtcaaccccgtcctcctcaggatgctcaaaatctagaggacgaggaagtggcctcgagagtaaacgtgaactctgaagaacgagatgaggctaacgacgatgagtacgagggaaactttgacgagtatgacgcctacgaagaaggcagttatatagagttgttgctattgagacaaaagtccgttgatcatgaagttgaaatcgcggcccaaaaagaacagaatagaaagatgcaagaggtgatggtcgccatgcaaaaagccatgaagacagtagagattcatatacaccctaaggccatccaggcaggacctgaagatacgccggacgaatcctctccaaacacccagaaaca

SEQ ID NO: 270644 - DNA, 421 bp, Cannabis indica
tttatgtttggtatgaaaaatttagttgaatcaaatttttttgaggaattatttcatatactgtttttttaattttttttttaaaaaaatttatggtttaagtttctaaagtggttgcagcgctagttgcaatagggatatctttaagattttttattgcgatttaagttgcagtgctagttataataaagatttctatgtaaaatgcaaaaaaacaaattttgtaagtgcaaaaatgaaaaaatacccaactttttacgttacaattttacttttctataataaatattttttaaaatttttttactttatatttttcttatctttatttttgtaaattactatgaattttaagtcatagcctaaaaaatagatatatagtttttttttttttattttatttttagtttttatttattta

SEQ ID NO: 270645 - DNA, 719 bp, Cannabis indica
aaaatcatagaaaacgcagattttaccaaaattcgattttttaccaaacaataaacaaaaaatacaaagaaatcacagatcgtttaaatggataatttagggtttaaatggataatatttttaaaaaataaaactaaccttccacattctcggttcgtgggtggttatcgatggttggggaaacttcgtgggtggtactcgatggttagagaacttcgttggtggtgcgaggtggttgggctgcttcatgggtgaccctcgaggttgaaatttggtgcattttagtttagggaagaaggagaagagagcgagagataaaagaaggaagagagatgagttggggtttaaaaatggagagggcatttttgaaataaggggaaagttgacatattcccccaatattagtacacataagttaatctatgcatatataattaaatttttttataattagtgtttgattattttaataatattttacaatttgaatttgttaaatataaattagttgaataaaataataaaaaataataatattttatatcaaaataaaaaaaaaatagatagctaattacgggtgcgggtgcgtttagtaatacttttttaattaagtttttttttgttcttaaaattaaaataatgaaaatatttttctaaatcatgttctataatacttttttactttttaattttttaatttaagaatctaaattttaaaa

SEQ ID NO: 270646 - DNA, 964 bp, Cannabis indica
gcagtctttggtatatctttttcttaaattttgagttggtgataaccagatcgcaagtcaatctttgaaaacacaatctttccttgaagctgatcgaataaatcatcaattctgggcaacagatatttgtttttaatcgtcagcttgttcagttcttgataatcaatacacattctaagggaaccgtccttctttttcacaaacaaaaccggagctccccagggcgatacactaggtcggataaaccctaaatcaagcatcccctgaagttgtacatttttagcttcttaagttctgctggagccatcctataaggtgcctttgaaacaggttcaacttcaggtgccaaatcaatcacaaaatctatttctcattgtggcagtaatctcggaaactccttgggaaatacggcgagaaagtctctaacaaccctgactacctcaggcccaaatgtttcgggtgtgctggagtcaatcacaaccgctaaaaatcctacacatccactatgtagtaaatctctagcccttaacactgaaatagtcgagatccgagacccctaaactgatccaacataaacaaatggatcctcaccctccggctgaaaagttaccatttttcgcttgcaatcaatgctggccaaatacttggacagaacatccatcccaagtatgatatcaaattttgttaattctagctctattaagtcagcactcaactccctatcttcgatcctaacaggcttagacctaatgcgcctattagagataaccaactccccgctaggcattagggttccaaaccctctttcaataaaatcacatggcctacccaaaagatcgattacccgtgttgccacatatgagtgtgtagctcctgaattaaataacatagtataaaaggagttgttgacaggaagtttacttgtcatcatagaaggactagctccagcatcagcttgagtgat

SEQ ID NO: 270647 - DNA, 643 bp, Cannabis indica
acttccaggcacaccccataaaggtctacaccgatcaaccactgcaacgggttttacagaaacctgaagcgtcaggtcgactactcaaatgggccatttagcttggccagtttgagatcacatgccaaccaagaacagccataaagggtcaagcccttgcagacttcgtggttgagtgcactaactcaactcttgagacccctcaagactcaggagaatagcaagagccagagaagaagtgagagcaagagcagcaacaaaatcccgaagatctagcatggaaactccacgttaacgaaagttgcagtgaccaattgtccagtgcaggcattgcccttacagcacctaggggcaacaagtgcacagagcaatcaaattcagcttcaaagcctcaaacaatgaggctaaatacaaggccctgatagcttccctcaagctagcacatgaagtacgagctgaccacttggacatatttagtgattctcagttagatgtgagtcaaatcctgggtgaatacacagcttgaggtgatagaatggttgcctacttgagcaaaatcatagaataattaagtcagctcaaaggctacacggtcaagcaaatcctcaaagaatagaatgccatagcagatgcacttgctcgc

SEQ ID NO: 270648 - DNA, 462 bp, Cannabis indica
agtattagtttaggaaaaaaaatattagatatatgtaagtataaaatttcaaattttccattaaaatatacaatatctaattttaaatcacactaataatgatataatattagacaccattaatatcttatagtttcaaatagttatttgtaccaaattatgtcaaatagctatttggtaacaacccaagttaccaaacttgatcatctctattttgggtgttggggatggttcaaacatctctattttgggtgaaccttggctgccaaacttgatcatccccaactcaattcgggtttcattaatttaacacacgaaaaataaagagtaaatactattttggactacgtattttgtaaaagttacagattggaccctatattttattaaatgacaaaatggaccctatattttctaaaatagtaaaaatagggtcctaagcttaattttcaacaacttttt

SEQ ID NO: 270649 - DNA, 785 bp, Cannabis indica
ggttttagcaggggaggtagtggtttggccatggatcagaaaagaaaagcatccactgcaaccagtggctcaggtcagaacaagaggttcagagggaactagggtcgaggcaatcggcagggtaattctgagacccgatacacttacccggagtgccccagttataaaaggcaccatctaggagagtgtaaagggcaggggtgctttcaatgtggcatgttaggtcattacaagagggattgtccccaactcagaaccgaagcacgaaagactgcagcgaaacccactctaccaagggtgttcgccataactaaggttgatgtagaagccagcccttcggtagtaataggtcagctctcactcaatagctcttatttctctgtactatttgactctggggcaactaagccataatctttaataaatttgatagatcgcacgatagttatgaatcagtgtttggaaccctattacctggcggagagttagttatctccaaaaggtgtattaggtctatgccgatcaggattgacaatagggagttaagagttgacctaatagaaatgagcttagcagattttgatattatactgggaatggatttcttgtccaaatattcagccagtattgtctgtaagaggaagatggtaaccttccaactagaaggtgaagaaccgtttgtttttgtctgttcagttcagggatctggggtcttggtaattttgatgttaacagccaaagaattgttatgtgatggatgtgtagggtttctggccgtggtattg

SEQ ID NO: 270650 - DNA, 1100 bp, Cannabis indica
tctttgagaaaccctcaacaaatcgacgataatacccagctaaacccaaaagcatctaactttcgtagctaatttttggtgttgggccaatcccgaacaacttcgatcttggctaaaactaccatgatcccatctttacccactatgtgccttaagaaaaagacacgagataaccaaaactcacacttttttgaacttagcgttcaacttgtgatctcataaccgttgtaataccgatctaagatgtaactcatgttcctcttctgacttagagtagaccaaaatatcatcaactaacacgatcacacatttgtccaggtaatccttaaacactcaattcataaggtccataaatgccgctggggtattagtgagtcaaaaagacatcaccgaaaacttatgatgtccatgccgagtctgaaacacaaccttggtccgacattcaccctgattgtgtgccttacagttcggacactctagatatgatcagaatgaagatatgcggccctgatgaccacctctgtttctccaaaacttctgttacccctgatgttctggaagcgttagcctttcgcttgtgatcacggttaccacagtcggtccccttactgatgttaccactcacaggaggatttgatgccgtgacggcatactttacagcctactcgttaatcacatgttgctcagcctcctcagctatcaaggctagttcaaccactttcttatataaagtgtcgtgagcaatggtatgttggaattaattttaccaggatcttagatctactcacaagtatgttgatttaacaacctaaatatgaacttctaaaacgataaataaaacacataaaaagttaagaaaccttacagtgatggtagcggaataatgtgtctccttccactcaaatctctaacccttgattcctgtctgtcgcagagtataatcaagatctgagcccgaatgtccttcagatggatgtgatccttcacagtcttccaatctatgattgaggtactgtttgttgtgtgtgggcacttctctctcacaaagggatttcgaaattctctctcttttctctcttgatttcgtgtatgaatgatgc

SEQ ID NO: 270651 - DNA, 738 bp, Cannabis indica
gacgattaggctaatagtctgctggtggagctacttcatccttggctggcggtaacaaacactgaagcttgctttgagtcttcagacggcagcaaagaagaaacgagaaagagataaattagtttgagagaaagagaaacttttagggttttttaataaatgttacccttttaatttatttttttattattatatttattttatactttattatttaatttttttatactggctgataatagagctaatattttattttaattgattgagatttttaattgattaagagagagaatgtggcgagatttactagggaccattattatatatatttatttattaattgagctgtattttttattataaaaaaatagaattatgatatagtgacactccagatgagtggggatatatttatccattcacgcttgtcgtgtcactgtatactaatattttttaaattaataaaaattaaaaaaatttaggttttaatctttagcgacactctatatttttagtgacccacattataagagactaacaccgaatatttagagtctaattgtgcatgtcactaaaaatcactcccaactctttagtgaccctcacttttttgcgtgtcactaaatagtgtcactaaatgaccaaattgtagtagtgccaagtaatcaaagttcgcctgagggttagccttccaaaagtcataaaagagctcgagaccgactgtctcaaaggcat

SEQ ID NO: 270652 - DNA, 621 bp, Cannabis indica
aagatctgaaaagagttaggttaatttttataatctgtcattcaccttaagaaagaggaattgtaattaacaataacaatttggtaattagaaaaccaaggttcatttccctaatttctcatccttgattaaacacttttattacttaattttatttttggttttctttatttttatcttcaacaaaattattggttactaaatagaaatacaaatctaatttagtggtattcagttcaatttcctgtgggatcgacctcacctgtgcgagtaatacttgattacatggacttgtatagctgttcataatcttcgtaacaagtttttggcgccgttgccgggaaattgtttaaaaattgatattacagaaattagattaatttttgctttgctttttcttcattacttcttgctaactattttgtcttaacttttcctatcctatatcatgtgcttttggtttatgcgacgtcaaggagctagttcaagagttcttgttgatcctcagattgagaagaactataaacaaaataaaaggaacgagaggttagaaagagctacattgagggctgaaccagaaatagtcatggctgagaacgccaataatggcaacaatagaaa

SEQ ID NO: 270653 - DNA, 714 bp, Cannabis indica
ttcttcttcttcttctctatttcaaaattgttcttcttatatactgaataattcgaagtccatagtgattgagagtatgcccactcaagtcaaagcaatacctagcatagtgaggaagattgtgtctaaccaaagcgaaggagagaagatccaggttcagatcttgataatgctctgctacagacaagaatcaagggctagagatctgaattgaaggagtccttattattctgctgtcacaatgtaaggatttcttaatctcttatgtgtttatttcattgttttaggatattcatatttaggatgttagcttatagattataatcaacatacatgttagtaaatctagattttggtaaaataacttccaacaggaaatcctcaacctttcctagaagaccctcttcgtagagattggtcaatctcaaaaacttaggatggatagtggagagacccacctgttggattatgttttaccagaatctagatttactaccatatatgttatttaacatcctaaatatgaatttataaaacaatgtaatttaaacacatataaagtttgaaaaaccttacattgggtgcagcgaaattaaatgactccttccgctcagatctttaacccttgtatcctttctgtagcagagtatcaccaagatctgagcctgattctctttctcttgaattggattcttcacagtcttacacactatg

SEQ ID NO: 270654 - DNA, 570 bp, Cannabis indica
gcaaccaagtggtgtgtctcatactaatcaagttcttgtgacaagatcagaatcaagtcgtggtaggagtacatcgagaggaagatatgatgacagaagagacaatcgtgctcattcatgctcttcgagggaagtggagtgctactattgtcacaaaaagggacatgttaggtggaattgtgaagagttgaccaagcatcttgaagcaatgagaaatcaagaatgcaaagacacatcagattccacaaatgttgctggtgaaggctttgaaagtgactctgatgttctctctgtcatagctgatgaaaacttttctgactcttggattttggattttggttattcgttccacatgtgcctgtataaggagtgctttgacacttataaaaggcatatgatgatttaccagttttgatgggcaatgattctagctctaaagttgctggaatatgaactgttaatgtgaaaatgtttgatggtgttgtgaggacactaactgatgtgagacatgttccaacattaacgaggagtttaatctctttgggatctttggatactcaaggttgtgtc

SEQ ID NO: 270655 - DNA, 747 bp, Cannabis indica
ttaataaaatttgttgaatgaaattttgttgattttttttttttatttataccaaaattaatagtaatattttagtactaagtctagtgttggtgtatttttagcttgaaataggtagacaaatattgatattgagaaattttacacacattttttatttagaagagcgattaattagtcttcaatgttctaatatattaatattgagaaagtcttagtaactatattctactaattatgtaataatttttttgtgcttgtttatacttaattgtagatctattgggtgaatttggttttgatttctaagaagtttcaagaacattattgtaagtagttattagttactatatttacttactatgtagtcactagttatatatgtattagttacttgttagtattctaacttaatatttattttgaacttttttatattatattttaatattgtaggttgtggattgttattggaaaataaagtaaaattttggtgatcattgattgctagctagaggtacgttattgacttatttctttttactaattataaaactgttataggagtttgaatatcttagaaattcatccgtagtaaagtaggttatgcgatttattgtattgcggtgaatagagaattaatatgcatgttagaagagtttgaatatcttaaatattcatccgtagtgaagtaagttttgtgaaacacatatactgcggtcagatgagtggtaaattattatattc

SEQ ID NO: 270656 - DNA, 627 bp, Cannabis indica
taatttaatgggtaaaaaaaattccttaaaaagattatagacattattagtaagcttatagaaaaattaagagaaacaaaaaatacaataacaatatataaaaaaattaattctgccaacaaaaattattatataaaaagtcaaataaaagtcaaataaaattcctgtactgggtgattcttccatggaatcccgaagcttttttttaattgattaataatgttagggttgaaaatactttttaaaatgaggttttaattttggaattacattgaaattaaagtagttggggtgtgttgacctcgcttttagccaacgacagtgagtctcatttagtaagcgacaagtaattgataacgattgaaatatgataaagcaatataaagacacaggaattttatagaggttcagccccgagcaaatcggtaataacctaatcctcgttatttgtattaactcaagaacaaggagaaaggttccttttcttatagctcttacaacaatatctctgaatatgaattcttagacaatatctctcaagtcaaatctttcgaccctttgtccagtgaatatgcatcactatttatagggctatgagcttggagaggaagtatttcccttctcgtt

SEQ ID NO: 270657 - DNA, 1005 bp, Cannabis indica
agtccggttcctgggaccaaccggtcgaccggttgctacaggtcccccagaaccggaattccaattctgtggttggaacttgaaaaaatgcccccattacctcaaaagcaacccaaactttgcaaaactctccagtatacctaaacaatgcataaaaaacattttccaaccagtatttcacagatgaaaccaaggaaactcaacttgccattaatgatcaaagctttgaactctaagcttaaacttgcataaaacctaaaccaactatcaaaaccagcaactaggacccttattcaactcaaattaaacataaaattcgaatcctaaacatacataaacctaacaaccccttactagcaaaatcacacaatcaaaccaagtagaaattaaagaagggtactactagggcataccttgggttcaagaacctttgaatccctactgaaattccagaaaaaggggttgaagtgaggtgattctcctctgatttttgccctagccgaaagagagaaagagttttcttgaatttttgatttttccttcaaatgagagaaaaggtttctctaattaattcttgactgaatttactagtgctaggtgtcacgcaaacaaggcagccaccccactaccaaacaaaatgaccaaaatgccctttacattaaaacttaagtatttctaaagctacgggtaaaatggtcaaattccataaccccgcttaatcccaatattttattttctctaaaatatttctctctaagaaataaggttctaaacttatccatgtgatcaaactagccatccatcccatttttcgttatcgccgagcaaaattacaaaaataacatatttcacgtataaatcaaataatacccctatagtttaataaaatctcaagaattgagaaattataactctaatatttatttctaaatattaaggcccacaaataaataaattgataaataattataaaatttacaagaattagtgttaattgcctttact

SEQ ID NO: 270658 - DNA, 936 bp, Cannabis indica
taagtattttgtaagttttcgcccgtattagactctcccctacagtgactacttagagataaatttacgaggtatgaaacaatggtagatactcataaaataagaataaccttgactctcgcctactgggacaacattggattcttgttttgatcgaataaaaggttgctagaatggtgtccattttagatgagctgacaactctattcaatgaatgattactttgactctcgcctaccgggacacagtatcagtttgttggaaaccttggaaattatttaagatatgatagttttgtattttcacatgtcttttttatttgctatatgcttaataatttttgaattgtgtatgaatttatattgaaccatgttattttgttgtagttgtaaatttcgtgtaaaataagaataactttgactctcgcctaccgagacatcgttggattcttattttaaatcaaaattatcctaatgtttcctctaagcttattcatttcgaatttgcttaaatagtatatcattggatgaatggtttataaatcattttcttatgatgtcattctgttttctcttatgaaattgaatggcgcaaatgactatattcccgacattctatcccgaaatgagataaatcctcgatcttagaaatctcctacttgtataagtttactataggtacattagacttagagttagattagtagtagtggtccaagctagaatcattactcaatgtatatttggtataaatttaagtctttgactttaaattttagattccaaatataaattttatatttctgtttccagaatacaatacagttcaactttaacaagttattaatatccattttccgtcaatggatctaaagtgtatgttaatgtatggagtttgagtttagcattctgtgaccaagatccacttggactattc

SEQ ID NO: 270659 - DNA, 909 bp, Cannabis indica
agacttctttttacacaaattaggattctcttcctatataataaatttttaaataattaattatttttttaaataatattaaattattttttacaactagaaaaattaagtgtgcgtttttctattcgagtttgtggttgcttcgttttctggggaagattgactttgttttttgattctggtttgattttttgagtaaatgactccttataaaaaaaaaaagatagagtttagcttttttttttgaaaaacacattcaacctattttaatttttacttttaaatatttaaataaaaaactaaataattaagtgtaataattttaaattaaagttaaaggtataataaaattttaattatgaaattatatgagtataattttaaattataaagagttttgctataaaaaatttaataatttaagggtcaaaaaaaataggctaaaagattttttttttaataataaattacgaaaaattaattaataattataattaatttaattttaaaatataattaatcttcattaaattttaaaaagaaaataaattattaagtgactattaggttataaattaattattttttatttttatttaattttcaaattaatcacaatcattcaataatgatttaatgagtaacaaaaatataatcatgttggttacatgtttaatgtaactattgaaacttcctctaatacatttataatgttagtaataaattaggattttaagttttcatgtgatttcaagatatatttattattttatataatctcttatattgtatgtagctgtgggttaaattaataaataaaaaaggatacttggctgttttctatttaatactttcttccaaataaattctcaaaaattattgtgaaaaaaaaaaattctttttctttga

SEQ ID NO: 270660 - DNA, 839 bp, Cannabis indica
tttatataggcatccaggtcctaaaaagatggaaaaccgcacatgtttaaattccattcatatttgaatttttgggaaacctcacaccagatattttttctctgttgacaaagaggcgggccgcggcatgctaaacccatgccgcggcttgtgtggctaagtgagggctccttcgactttttccatgtaggcgggctgtggcatgctaataccacgccgcggcccgtgtggttctctgtacccaacttccacatgcttttttcttttttccgaatctgaatttgatcttttcccccgggatatttttatgcgatgttttatcctttttctactgatattttctaactcttcatctattttaaatctgtaaaattaaaagataaaagcgtaaaaatgctccaaacataatttaaactaaacagaaaaacgtgctaaaattaacctaaatttaatactaaaaataacctaacaaattcacccaaactaagcttttactcgtcctcgagtaaagtactaactaaacattaagtaagtcaatctccaaaacatgagtaattttcaagtagcttcaataacatgatgatgaaaagtttcacttgtacttataatccagaatttacgttcaatcacacccctgacagatttcaatttattttcatttagcttatgaaatcatagaatgcaattaactaacaattaaacaactttatgcatgccaattacaatcatcaatccactaacccaaaattccatatgcttgcaatacttactattctccacttatatagattaatgcacaaccaagaatcagaaggtctttctaggcttgtaatgttagg

SEQ ID NO: 270661 - DNA, 575 bp, Cannabis indica
attaattaagaaaaaaaaactaaaaaaatttttttttttcaaaattttaaaattttaattctgaattaaatattgaaaatgaaaataattttataaaacatatttttgaaaaatattttcacttttttaattaaaaaagtgttacaaaacccacttgttttcatcataattcccattttgatagagaattcttgcatcaagggtggttctttgaagaaaatatgtaaaaattagcaaaagggttacatcgatgcattcttttttgttctggcatttagaataatttttttgtctaatttttcatagttgtatactttgtaattatttaagatattctgcaaaattttaaaaaatttaattggtcaaaaagcaagattaatttccattccattcctttctttggttacattttaaagtattagaatattattctaatggaatgacctttccaacattttggtggaatgactctttattttaaaatggaaggaaagatcatttcaatgcaagatttgaaaaaatttaataatttttcttatcaatttttttaaggcattttaaattttattctattc

SEQ ID NO: 270662 - DNA, 879 bp, Cannabis indica
caatgaacctcgggctaagctttcctttcttcccaaagcatttaatatctttcatcggttatattcggagaaacaccttgtccctgatttgaaaatcaatatcccgacgctttggatcagcataacttttctgtctattctgagccgcgagcattcgtgctctaatcttctcaaccgcctcacttgttctctgaacaacctcgggacccaagaaatttctttcacccacttttatcccagttaatgggaaatctacactttcttccatatcaaagctcataaggggccatcccgattgttgcctgatagctgttattataagagaactcagtcatgggaaggtactttacccatgatccctcaaagtcaagcacacatgcccgtagcatgtcttctaatatctgtatactcctcttggattgcccatccgcctgaggatgaaatgccgtgctgaactttaactgagtacccatagctcgatgcagactctcccagaatcttgatgtaaactttggatatctatccgaaataatggactttgggacaccatgaagacgaacaatttctctgacatataactcagcatactggtcaatggagaaattcgtccgaacaggtaagaagtgggctgactttgtaaacctatccactatgacccacacaaagtcaaattatcccgtggttctaagcaaacctaccacgaagtccatagcaatatcttcccatttccactctagtatgttcagtggctgcataaccctgcaggttctgatgctcagcctaacttgctgacaggtaagacatcttgcaacatactcagcaatgtcattctttatgcctggccactagaacatggcctttaggtcttgatacattttc

SEQ ID NO: 270663 - DNA, 798 bp, Cannabis indica
ttaacgtactgtgcagctcgttgctaatcaacgaggttaatgaaaaacgtgaataattaaaattttgtttatttaattaaatacttgtaatatagcatacaaaatactttgggatcccttttacaaaatactttacaaaaattttgttattcaatacaaaatatttgtcgcctagcgactaactacaaaagccctgatgtcccgaggatcgtacgctccaggcctaaccaccccgacatgtacaatcttcatttgctcgtcctcacggttcctcggccttagccttgcccttacctacacataaacatagcactgtgagtcgacagactcagtaagaaaagcataatataataaacatactaaatcccgagttataatcaagcgcctatacacttgaccataactctaactgaatcaggaacgtccatgacaaagtatgattaaccgcagatccagcctatactcggtactctagtcataccgatgtggtagcagttattccatactatctaatagccgagcatatatatgttggcatctcggtgctactctatgtacaccccactgttcccctgatatgctaagttgacggctatataaaatttgcctaacatatatctaatatgttaatctgatggcaactaacatgtacgctaaacatgtataagcatatgcaagacattatactaatattgcctcgattccgaattcaggtgtgccggtcaacctgagtggaacaatctgctcggcgaattacatgctcctaaatcataataatcacaacactgttaagtgaca

SEQ ID NO: 270664 - DNA, 811 bp, Cannabis indica
aactagacgaacaatcaaatagaatcataatcggataagcagaacccagtgcaccagaccatttgtcaacatgggcactgggtacctcatttctaggctcccgagttgtcgttttgatacttctaaggttcttaaacttgaggacaaggtctcctaccccatttttgaccattctgaattgaatgtcaaatcagatttgccagttgaataattgaaaccaacgcaccaggttgattttcaacatgggcgttgggcccagcaccaggtcaacctatgctaggatctgcttccagggttttctcactaagtttgcttgaatcttcattattttttatgacagaaaaagtgcctgaaatacttgtcaacctgagcactggccccagtgccagtgtcaacctgcgcgttgggtcccctttatggcccttcgaaagcttcatttagtctccaaaaatagttgaacattaatctttgctgaaaacagagaagatgctcaaaagaattctcaaaaaacatcatcgaaatcggtccaagttgacaaaatgtcaacctgggcactaggccttgcttctagcacccaggatgtaacgccttatctcatggggacacaagtgtgtgcttttggaacagtttagtaatagtttggggtgttcgcgatgccggtggtgcagtttttgactattttttcaaaccaacccgcacatgcggtttttcaaatttcccaaaccgcacccgcaccgcaaaataaaaacccgtaaaaactgcaccgcaaaaaatagtgcggtgcggtgcggtttttgtggtttatgcggtt

SEQ ID NO: 270665 - DNA, 754 bp, Cannabis indica
tatggattatgaactaaactcctatttagggagatgatgattgttgattgacattatctttagttaatgataattgctatttctcctttcttgattgtgaaatttatccatatttgtgttaattccatgtttaagcttgatcaccttttacatgttctatgatctcaattcaaaatctgaaaagtgagaattgagaatgctaaaattggataaactaggttttgatgtgaaacgaaagtatttacatagccttagtgacaattagattattgcgtaatgctgattatatgttagtctaattcagagatgattagataacatgtaatttagggcctaaaagatctgaaaagagttaggttaattttataatctgtcattcacattgagaaagagagtagtaattagcattaacaattgggtaattaaatcaacatgattcttttccctaatttctcatccttgattaaacaacttcactgctttctttaattttcttttttatctttattttaaactttattaaattacttttatctaccaaatagaatcataaatctagtttagtggtattcagttcaattccctgtagttcgacctcacctgtatgagtttactacttgattacgtgcacttgcatactgttcatattttttgtaacaccagctcgtgacccggcaccagagttggaaccagactgggactcgagattgggattcggatcttgaccgagggcttggacaaaacccgtagtcgg

SEQ ID NO: 270666 - DNA, 554 bp, Cannabis indica
aactgtctccggaaactaacttgcaactttttccaacaatccacatatcctggttccaactttttgaaccattcttccccggaactgctcaatgttagtggaaagcataaacatttggcgtcattactgaccctcataaccgtcattactcggttgaattgagacaaatgatcgttggggtctttgtccccggtgtatgctgccatctcgggcatcttaaaattttgggggagctccgcctccaaaatatgtcgggcgcatggttcccggtcctcacaatcgaagtctgagtctgagtcatcccatttttgcctccgggagacccgagcgatgtctttgcgcagcgtcaccagctctgctaaaattccttcattcagcgttcctgcggagaccgctggtatatgcttctatttgtccaggtgatcccgcaagtcaccgtgcttttcgttgatttggtgtcttaaattaacgggagggtatctttggttcccttttcctctttccccgggttcttggtgcacaaaaacgctctttcggtcctctcgatcatgagg

SEQ ID NO: 270667 - DNA, 634 bp, Cannabis indica
tatgctctagcttgagggggagtgttagaatattagttgtatattagttgtaaaaattagggtaacttgtatttagtagtttctaattttgtaattagtagtttcccatttagtctcctagttttgtatataaatatgtactattctatgaaatacatacacaattcgattcactattttctacaataaacaataaaatatttaacaaaataaccaattttaaatttaaaaatattatggttagaatatcaataaaaatatctaggttaattttaaatttattaattatttaatatatcctataagatcattttaataaaatgtttcaaaattaaaaggataatgcaattatttaatctaaaatatgtccaatatcaaaatatctaaccttataattatataataaataaatattgacaaattaacaaatttttaaaatatgaccataattaaaaaaaataaaataattaatttttaaatttaaacctcaaaatatcataaattaataataatttattaaaagttaaatattattaatttaaattgatatttaagtttatatatatattaaaaaataatattttattttgatttttagggtttgaaattggaaaaaatcaaaaattgtggaaaa

SEQ ID NO: 270668 - DNA, 719 bp, Cannabis indica
ttttgagtcaactctgttaagggtgttcaatctttggaaagccctcaacaaaccgacggtaatacctagctaaaccaagaaagcttctaacttctgtagctgactttggtgttggccaatcccgaacaacttcaattttggccggatccaccatgatcccatctttatccacaatgtgccccaagaaagagacacgagatagccagaattcacactttttgaatttagcatatagcttatgatcccgtaaccgttgcaaaactgatctgagatgcagctcatgctcttcttccgattcagaatacaccaagatgtcatcgataaacacgatcacacatctatccaggtaatccttgaacacccgattcataagatccatgaatgtcgtcggggcattagtgagtccaaaagacacacaaggaatttataatgtccataccgagtacggaacgcagttttcgggatgtcttcctctcagattctcagctgatgatagcctgagcaaagatcgatcttggaaaagactgtctttcccttcagttgatcaaacagatcatcaattcgaggtacaggatatttattcttgatggtaagcttgttcaactcccggtaatcaatacacatccgcaaagactcgtctttcttttacacaaataatacaggagcacccctgtaacgccctaaataattaggcacgctacccataatacttatgaaaa

SEQ ID NO: 270669 - DNA, 887 bp, Cannabis indica
aataaatgaaaacaaaaatctgaaacggaggacgtcgttgagccgaaccgaaccactcttagacgactgctcttgaacccctcacagaagaagaggttgatgtgggaatgagaaaaactttggcatcaatcaagaagatcaatacaatagtcttctccttcagtaatatcttgtcttcaagtttattgtctataccattgcctcaggcttgccgaaaaactctccaatttagattgtgtgtgcataaattcttgaatggaagagatggtggacagacgataaaataagagagaggaaggaggcgattcaaatctgttccaaaattcatatttttagaatttcgtcactaacatttttctattttcttcccaattaattcttttttaataaaaaaaagaataattctttcgtattttttctaatctattcaatcattcttttgcctcttatacaactatatttttatttagggatattggcggctaaaccacatgaactttacagtttgtaacacttaaccacaaaaactaaatttttggcggctaaactacctaaaccctggttccgctttgctctgcacacctccgtccaaaaatcacagttaagtgccacggtggactgtccacgtgtatacacttgtacacgtggcaattttttagtggtccacgtaatattaattttaaaaaataattataaatattaaaaaaattaaaaaatcagaaaaaaaaaattaaaaatattttttttatcttctttcttcttcgtttttcttctttggccatttggattcgtgcaccacaaacggtggctataccaggttcttcaactcgtgccagatcggtccccgcgagttctgcggcgaggagctactaacttgggcgcttgat

SEQ ID NO: 270670 - DNA, 805 bp, Cannabis indica
tagtcacaagtaacattttgttgtgattaaaaatcacatttagtcacaaaaaaattatgttgtgactaaaaagttgtcactaaaggtaacaactttttgtagtgattttatagcatctcaaatggtagtttttttttttttttttaaagatgccatatatttccatatcatccaatgatataatatatatatattttatatattattgttgcaactcttatttaaaaaaaatactccaatggtatagtatattttaaaaatgctataattatgatcacacattattatatacatataaatctttttatttattaaactattatatatatttcaccttaatttttatttaaaaaaaaaacatagcatcaatatcattgtgtggcatcaatacaaatttcaagaataacattcttttatcaccaatagtaaatcatctctatattttgcaacataagttttacttttctctccaaagtttttttccctcactttttttttttcctaccaaacatatagggttacactatatttgataagagtgttcattcgatctaatctgtattatttttgtcatattgcatccgatccgcactaagtataaatttcgtattttagaccttatctaattctcataagggataattgcggcaaaagtccccacaaacttgaggttgatgccgattagtcctcaacctcaaaaattggcggtgaaaatacctaaggtcccaatttttgtttgtccattggtcctttttctaacggatccgttaaatccaaataaagtgccacgtgtcaattttttatt

SEQ ID NO: 270671 - DNA, 647 bp, Cannabis indica
ataaaatttagtatacgtgctttatatatgttagttgatgtattatacagtgagaaatttataaggaattgactttcatttccaacaaatccaatattagttacttttgaacatggatttgtggtatatatacatgagtcacacatatattatatatgattatttatattctcacgttttttttacatcatatatatatgtaatacatgatttttgtactaggatcggttctcctatttttaagcataaaccccaatttagaagttatatatataaatatagggcaagattatagtagtacctagcaaaagttccctaccagtagggaacttttcttgaccattgattttaaatcctgtggttattatgatataaggtgtatactcttactataggactgcttgtatacaattaaaactttatacatattatattaatatttaattatatgtttatttttaaaataaaataataataataattaaaaaatttattaattttactttgaatttatttttttaagaactcttatgtaaatcttcacagttttcgcaccaatattagtgttgctttattttttttctcacttgatatattaaactagtgttctcctttttcttttctttttttttatttccttttttgtt

SEQ ID NO: 270672 - DNA, 789 bp, Cannabis indica
tgggtaaggaagtatttcagactcttgtgatcagtgtatctctcacatttctcgccatataggtaatgccgccaaatctttagcgtaaaaatcactgctgcaagttctagattgtgggtagggtacctctgctcgtactcctttaactgctgataagcatacgctattaccctctcagcctgcataagcacacagcagagaccctgtctcgaggcatcacaatataccacaaagttttccttatctgaaggaagagttaatactggagcggtaatcaagcgctgctttaactccagaaaacttttctcacaccgatcattccaaataaacttcaggttctttaatgtcagcttcgttaagggtaccacaatctttgaaaagaaaaccctccacgaatcgacaacaatacccagctaagcccagaaagtttctaactttagtagctaactctagtgtcgaccaatcccaaacagattcaattatggtcggatccactatgatcccatctttatccacgatgtgccccagaaatgagacgcgggataaccaaaactcacacttcttgaatttagcatacagcttatggtcccgtaatcattgtgaaactgatctgagatgcaactcatgttctttatctgattcagattacaccaagatgtcaccgataaacacgatcacacatctaatcaggtaaccttggaacgtccgattcatataatctatatcaaatatactacgtagctttggcccatcttccaccctgatggtgattcttacatttcggacatt

SEQ ID NO: 270673 - DNA, 683 bp, Cannabis indica
aaaactattgtgagaggtttgggaaaaaccttggtgaaaaattccccggttgtaagggttagtcaagcccgttaacttggctcgatagttgaactcaaagctaggtccatagctttgaagaccaaggacgtaggtggcttagttctaccgaaccttgtaaaaattaagagtttgcaatttctatccctaaactccttacatttctagtttgttatttgtttatacttgtgattatctttgttattgcattaaacttaaatatttgcatgaattgtctttgggatttttaaatttctaaaattagcttaaatttccaattcaccccctcttggaaacatatcttgggctaacaattggtatcagagcaagggctcaaattatttgattagatttcacaatctagagcatggcgtttccaagcaattcacacaataacatgctagaaggtttaagcacaagtagagcaccattctttgatggggtagactttccttattggaaaattagaatggaaacgtatcttcaatccattgattatgatttgtggcatattgtatgttatggtccttacattcctatgcatgttgtagattgtgtagaaactataaagaaatatgatgcatataatgaaaatgataaaaagatgatttctaaaaatgctaaggctaagtatgctttaatat

SEQ ID NO: 270674 - DNA, 909 bp, Cannabis indica
acataaacaatcactgaaatagtaaaattgattgaaattaaacaaaagtccttaaatctaacaatctcaatagttcaggaaaaaattttagctgtagaaaaattcaaagatataatttaatatatattaaaatttaaaaagtgaaaatcttaattaacctttttaaaaaatattactaattacttgcaaaacaccataacaatactcttccacctaaccaacccatattaaaaccttttcttctcttgggcaagaatctcagtacacatgtgtcagagccatgtaatataattgtaaaatattgtatatctaagctatttactacatttttagaaagaaaagggaagaagctattactacatggaataatcaatcagagccgttggattcatctcaaaaaaaagagtatgaatctattgctattaatatagagtcattacatggcaaagagtgattggttaattgggcgtgtggagtgagcatgggtccggaccacccgaaccactttattcgggtctgacacgtggtttgtggttctagtgcgtgtgttaggtaagtgttcaacatttgtacgagtgtgtccttcttgtgcccaaaacccttcatttcctatcatacaaaaataatcaaataaaattgtgtgttttgttagacaagaaaaaaaccactccaatggagttggggcattagggtttgtttggggtttacatcatttgtttttttctttttggcacaattgatccaagttcttaaaatttaagatacgtaacgcattactcttatttgtactgagaataacataatttttatttttttgaatttatttaaggatttagatcgtgtttttagtttttcagactcgaaatagataaaatattttgtttccactattaattaactttgtctttt

SEQ ID NO: 270675 - DNA, 473 bp, Cannabis indica
gcccaattgagaccatagaaaagcgctttagcttccatctcatgtgatttaagattgccgagtataggcatggagagggcagctttaacatggccattcacatcacgaagtattgcacctatacctgttgtgtaagtagaaacgtcaacagccgcatcagtgttgagcttgaaggcaccagctgctggtggacgccaaagaattggagcagatggccgactgggaaactgatttggatgagttgatggtgctggtgcaggggctggtatggcagcagtagacctctgttgggctgctctataattttggagaaagaccgaagcaaaagcagcaagattttgagcacgtcttgcttttttcccatgaatgacattgtttctttcagtccaaatagcccacattgtacataggagctgttccatttcagttttgttgtagatggaggagagatgtgtcacataatcaccattttt

SEQ ID NO: 270676 - DNA, 875 bp, Cannabis indica
caccaaccaaaaataaaagaattttatgactcttattggttttatgtaatgttttttcaaatgggtgggcacatagaccaaaataagtgggaagggaactaaggtaccatcactagctaggcctaatatttattttgttgtttactttctataatcaatttgatagttatatcttttgtcctatatacttatgccttaattttaatatgcacttaaatgaatggttatatgacttggacaaatataaagacaatttatcttttccttttacttcttgtcttctttatgttatcgacttgttttgtagtaaaattagaaaatgaaaaataaaaaaaaaaaaaaatcaaaacaaaacaaaaattgcacaattattcccaataactatttatcattatgttgttcataacttacaaagacatttgaaaattgcacaattattcccaattactatttattcattatgttgttcataacataaaaagatttttgaaatttttacaattttttttgaaaagattattgtggtatacactatagactatttaataattccagtatttaaatattttattgtaagtgtgattatttttttatacgagtggtaagtaattatttaaattttatttttttaactataaataatttaaattttttaaaatttataaataatctaaaataactataacatatacgataaaaaataattaaaaaactcatttagatgttgaaatgaataaggagtgtaaaagaaaaattataagtaagggtgtgataaattaaatagggattttttccttaataggctttttagatccaaaatttacatttttatcttagtatgaaaaaataaacaaaaaaggaaagacaaaactttt

SEQ ID NO: 270677 - DNA, 2056 bp, Cannabis indica
ctatatgggacccgatacttaattgcaccaatagcgatattgacacgtaggagggtgctaggcaccaatagtgccctttagcatttctcttattaatgtatagataattataaactaataactaattagttaattaattaacttatacataattattaattaagtaactaattagttaattaattaatgtgggtgcctcctaaaatttagggctgcgctttacataaattaaagcagaaattttttggacttttgtagtttgcgtagacagatacgtacttaatttgttaattaatttataccatagtaatattcatacatatatatatatatttattaattatatatgtattaatttttaattccacacagccacgtacgtatatataattttgattccaacaataatgtattattgtgtatatataagacataagctataatggtgaaatgaaatacgtcattactagcataaaatatataaccagatcactgattaaatataaatgaaaataacaggtgcatatgcatttatcatgtacctgtagactatatatatttataatactcgttaataattatataaatattatatttgtatgttgatttatttatggaaatgatgattaaagaaaaggttatgaaataatgcatgtatactttatatatggagaagccttattttaataattgcatgctcgtttcgtacaccgtattatattatattttatttagatttgtattgtattgtattagctagtagtatttaatacaatattatatttagtattgacttatattaattaataataagttgtgtaaaattatatatactatttttaccatagacccacctcgacctgtcaactgaggtcgtcggagtctgagatccgagtctaggactaagtctagggtctggtctgggattgggtttgataccaggttttgggttcgagcttggcctgggtcggagttgggggcgggtccagatatgaggtcaggtctagggtctagagtctgggcctagtttcagggcctagggtccgagttcaagtccaatttgactttgagggttagggtccgagtctgagaccaggatacgatttaaggtcgagtttaggatccggggttattatggttcgagatcaaggttcgggacctgattcgattctggggcaggggtctgggttcccaatcccgaaccattactaaatattataatacatgttaatacatatcatttgttatatattaaataatattattcacattgtattaaaatttatggtcgtaataattaatataatacaaaattttacctaaacatagtgttcattgttatttaataatataatacgactcttatatgacttaacaaacaaagtctacatattctatttatatagagcatttatgttatggggtcatgactttaatttgtctcctacgcaagtgttttctgttttaactatttagtaaaaaaagaaaaaaaaaaattattatatgcaggtatgtacaaagtaattacttatatgatattacacttatttttataaaatttaaaataatttacaattgtgaaaaattggttcaaaataacttatttcatgagcatataaaataaattttaaagtagtttctttcttatttcatacattattataatttattcaaaacttttaaaaatttataaaaaaattctaattaataatttataataatgcatgttatcttataaaaaaataaatttacatatttatgtgtcgaaaacaaattattttaaagtttatttagcaaaacaaattatttaaaatttatttttaatattttaaattattcaaaattttataaaaaatctaaataattacactatacatggtcattgaagccatgttattcaagcaatttaaatgtgaaaactttttgtagttgtagttaaaaaagctgacgaagttaagaattacaaaaccatagtattagtagattaattattcatagctcaaatatatatatacatgtatagacaagtctactactactaaaaaacattttgtaa

SEQ ID NO: 270678 - DNA, 509 bp, Cannabis indica
tttttagactcatgaacttaacccattttttattttatgattcattttattttcggattaatatctttattaatgagaaatgtgagattaaatgttgtagaatgggttttttcttaatatttagggctgttgctatatgtttttacagtaaaatatcaagtttttataaagctcattaatggaggaaaacccatttcgggttcaaaatctttatctattattttgtaatttttgaattaaatgggtattggaaaataatagagggttgaaaatggaacaaaacccctcaaacggcgtcgaatttggtggccggatgtaggagatatggccgggtcacgaaccgggtcgcgccgatccggatttcagacccgcggacccgtctggggaattctgggcgacagggacgatgaaaaacgacttgtcgtttttgcctctgtcaggcaaaacgacatgtcgttttgtcgctgctctcatctaaaaaaaaaaaaaaaaaacaaaaaaaaccaaaa

SEQ ID NO: 270679 - DNA, 751 bp, Cannabis indica
acagaagagttcaggaaatatccaataactactttggttgaatttatcaggttcacactccaatcgtggttcgctgatcgcctcgaaaatgctgacaaatgtaccacccctttggccacgctctttgaaaaaaacttggcaaaaattcatgaaaatgcaaggtacaggcgcgtccaacgaaatggagccaatttgtataacgttggtaggggacctaacggtgaaagaggtggtgatgtgaatctagttgaaagaacatgcacctgcggcgtgttcacgttattgaaactcccttgccttcatgcatgtgccgcggcattgaaaacgaacacaagtgtgtacacgctttgctcaccttattattcaaaagaaacgtggaggaagatttacgatgataccatcaatcttgctggtgacgaggatgattgggttctcccagaacacatcaagaatatgaaagttggggtacctgtggaaaagaagcctgtaggtcgtccaagaaaaagcaacgctggaagaagacgggagaaccgtttcccgtctggtgataaaaaaggttctgtacctcgaaactgcagccgctgtggcagttcaggccacaacagagcaacatgcaaagcccgcatttgaggcgtagtatacttattcgttgtaataacatgttttctatttcaggttcaaaactgctttaaaataatgttgaggttgaatattttttgttgtgaatcaaagacaatgttaaatattttta

SEQ ID NO: 270680 - DNA, 575 bp, Cannabis indica
catatgttcagaaggaaaggctatattccctttagattttttgaagcttggaccaatgtggactcctgccattcaactattcaacaagcttggaatggtgtggagggtgattctatggaaagcttttcttcaaagcttcataaaaccagaagtgcacttcaggtttggagaaagactgcttttggagattgtgatttaatgataaaacatttagaggagcgtttagcatggattcagaatcaaaacttattgccccatcttgtatccgaggagaaagacattctccaaaatctgaatatgtggtggatgcgaaaggagagtatcaacagacagaaatcaagggaggtgtggcttaggcttggtgatcggaattctcggttctttcatactgctactgctgtccgtagtcgaagaaatcaaatttggtccctcaaggataaatttggtagatcgtgggatgaaagagagaaaatctcaggtattatcaatgattatttttataaccttttctcctcttgtcatccatcaatccctggtgattttgattctcttttttctgtgaaagtggatgagaa

SEQ ID NO: 270681 - DNA, 462 bp, Cannabis indica
cattttgtctacgaattaagggcagtattctaattatattttcttatgtatgtaataattattatagggctcgtttagtacgtcatattgtattgtgttgtattatattagtattatttaatacaatattatatttggtattgacttgtattaatatattgtattatattgtattactattatttaatctgggtctcggtcctgggtccgggtcccggtcccggtcccagtcctgggtcggggtgttggttcgcggggttcgagtccggttcgaattctgggtccacgtccaggtctgggtacgggtcggggtcggggtcggggtcgaggtcgaggtttgggtcgagattggtgttggccctgaatcctttataaatattataatacaaactaatacagaccatttgttatgtattaaataatacaacatacattgtattaaaatttttggtcgtaataatt

SEQ ID NO: 270682 - DNA, 641 bp, Cannabis indica
tatataatatttcataatacttttccttggatgttcataataactacctcattaaaaaccttgcagaaaaattttgtcaaaagaaaaagagtgcagcgtaaagtaactctccctcattttaggcatttatggagatcttctaattaacgaattctaatcttgtatgtcgtcttctcaaatattgatgctggtaaagcctgcaagattgacacttgattgaatatgttggacaccaatatacattctcttgaaatgtataaacaagaatttggtgaaatatgttttaattctatctccttaaatgtactctccttttagttgagtgatgcaagcagtattatcttcatagagtgttgtttgtgttgatactttgttatagagtgtaatccatatgttacccgaatatattgtgtcaatgatttcactcctacacattctctactttcttcataaagtgcaagtatgttaacatgatttaaagttgcctagttaaaaaccttgtcaggaaaatccagtgggacaaaatctgagctaagaaaaaaagagtacaacatgaatatgtctccccctaatgcacatatgatcaataattattttggtgataatatattttataagattattgttatcacttttaaaat

SEQ ID NO: 270683 - DNA, 582 bp, Cannabis indica
taaaatatttccaacagaagccagaatgaaaaggacgaccaatcttgagagaaaggagatactagtgctaaatcgtatcattggattttgtattcaaatatagttatccttaataagatggacccgtagactatgaagatttaatttcaaaactacattaaaaccttcctgttatttactatttattagataattaattgctatataatcaattttgcagtttatttattacacaaaggctaatattttaattaacgaaaatttacgttaacagttatgatgaacttatggagaacaaaatactatatgttcacttatcagaaatcaaaaaatagaaaattttggagatcattaagaattctgattctgatcttataaagattttagtagtgagatttttgtcacatatagctacaaaattaggaatagtattgaaaactattaaagatatatgttgtgacaataaatcaatcaagttgcattttagtaacaacatgagccttacaaggtcaaaggcacattggctttgagctaattgttattaaaatgaaatttagattaataaggtatctatagaacata

SEQ ID NO: 270684 - DNA, 485 bp, Cannabis indica
ctattgttatgtttatttacaaacttttatgttattattatgtttattacaaattcatatgctaagtgtctataatttaattgacaattttattcttattatatatttactataactatattgaagaatattttatcttttcaattttgccctttatgctactgttatatttatttacaaatttatatgagaacattggttgtaagttgtgttttattacttatttcactgaatttttttgataaataattaaacaaataaaacgtattctcactttattaattggtaatggaaaattaaagcataaaaatggataaatatttatatttataaatttatttttgttttatcataaactagattattatcagtgccgtctcaaatattttagaggtcctgttctaattttaaaaagtagggcctaacaaaaaaaaattacaatttgtaaataatatttttaaatattatcatattacaaaaatata

SEQ ID NO: 270685 - DNA, 636 bp, Cannabis indica
ggtctagtactggagttcacctctcgaactctttggtttaattccttagtagagaaagaggtaagactaaattatcatagaatttcttattccttgctcaccaaacacactcacacaatatagcagtaaaaacaataaattgatatttgatctctgtctctacggaggaaaggaaaatagcattgaacatccactcaaccaaatcataatccgaaatgaactgatcaatcaaagtagtacgaataccccatttgcttgaaaaccacaatgaactaaacgacgaactcgagaacatgctaaatttatgatcacttgtaggaaggacagcccgctcgctgccactttccacggagccttaacctctcggggatagggacttgccaaatttttgaccacaaagaagagatgatggtgaacctatgattgttcaaagcccaataagcagatttagtgctaagttatacattttttgatcccctccataataataaattgacaaattagcatgaaagtttctaacttgtcagaatatgctccacagcctccggaaggaaccaggaggaaattttatcatatgacaccacgacccagtatcaattaaaagctcacacactttaggagtggactcgatagaca

SEQ ID NO: 270686 - DNA, 1059 bp, Cannabis indica
gtccgtgttatatatttgttatttaacaaatatataatgaagattaaaatgtggcatattatatattaatatgagattaatatatattatgtgttggaggttatattatatcattatagtataataatacacataaattgtaacaaatgaggagttacaaatctgaaatagattgtaacctaaggatcaaaaattgataaatatgtaattatgtgagttgttacatatgggagttatggaattaatgggataagtttctagctgttagaaactgttacaatactcaattatatcatttaaatgggtattgggacgttggaaaatgatttaactcggagaggagttacattttgagttctcaggaaacagttgtttaatagttgtttgtatgttgttttatggttgttttcgaacatctggaaccagatttttgaaaacgttcataaacgcatacaaattaattgagcatgtttccagctctcttgtccaacgtttttatcccatcaaacacaaattaatgtgttggtaacagccatgtgatgaaggaatttgattttcaaatgtgatcctcaaaacactataaatagagggctttggttcacttgtagacaacaacaattttctatcttctaaacactaagctagaaaatattgagaggcttgtttattcccaaaagcatttccattctgttccctaagtgttttttatagggggaaataagctttttggacaaaggtgtttaaaccttgttcaagcctttggtgatccccctttacttacttgtgttcttcttcatcttctttttcctatttgttttctgcctcttcttctctttattatatatacatatattatatctcttctatattcactaatatatatatatactatatatctactatatatcatttatatatatatatctctttattatatatatatattcttcttttttacttttacatttatgtgtatatatttgctttgagttgtatctttgtcctcatcttttctttctctttatttgtattttgtgctttgggattgtaacttttatt

SEQ ID NO: 270687 - DNA, 570 bp, Cannabis indica
tttatagtgtgagaggtattcatcgatagatcttttgctgttttgcccaaggggatgacggtcacaggttgtttcgtggcaatttgataggcttttttgatcaacacagtaacttgtcgactacgatcgtcaatgactgcttgctgagccttcaatgtttccaactccttgtccctccattcagtgaacatgcacctttgctcttcaaacatgaggttcaccgcagcatggagttcctcttgatcttgatgtcgggtgttggtatgtccctgcatgattccaagagcagcacggggattttggattttagtcttgaacttttttggacgcgatggttgctagtggcttgacttctgtccatttggggaagtaatcaactgcaaccaacacatactgtacgcctcctttgccttgggtaattgtccgatcatatcaattccccaaatggcgaagggccaaggactttgcatttgggttagctcatttggccgttcacgaggtatctttgaaaatctctggcatttatcacattttttaacataggcctttgaattctcgatcattgtcggc

SEQ ID NO: 270688 - DNA, 805 bp, Cannabis indica
aattaatcataattaactgataatttccaaattaactaagcgggctttacagtacagaagttaaagcaagtcctggtcaattcggtgtttgctttccaaaaattcaccggggttcatctacaaaagacaacacatgagatgaatgtttggttgggatatcgaacaataaataggcaaatatgtcgaccaggagtactcaagagattaaaagaatgaaaatattcaaaaataagtcaaaacccaaaagtttgaaattttttgggtttaaggttatatttcatgaagcttcgaatgagcgaggtgaaagacaaacaatgtgcaatcaaaggccaacgtcatgaactgagaagttttacagattattacaaagaaaatcgcgaagttttaaacctagattttctatctattttctacagcaaagtcaagaacacatgtatgaaaccctgaaattaaacatgcaaagtaaaaagaggaagaaattggaaacttactcattgttcgacgtttaagttcagcctaaatgaagctgctcgggtgcttttggtagaaatctcacgacagatttgaagcaaaaaccttttttgctctaagtttggtttaatggagaatttggtaaaattaaatttgtgaatgatgctcaaccctatttataggcgaaaaagtgaaaaaaggcaatcatttcaaatgccttagacacatcggttccccccaaaaccaaatattgggaaatcaaatataatcaagtgtaaccgtcaaacatggtgaaaaaaaactgggttttgaggcattaattgagtcaaaacat

SEQ ID NO: 270689 - DNA, 639 bp, Cannabis indica
tttacaattataataaacaatacaaataatataaaatacttcatatatgtgtttattttatttaaaataaacataccaataacatagaataataacattcacataagtttattatatcactctatgtgtgtcatgtttaatttttaaaaaataaataatatatctatatataaaaattgtttatctttatctttttctttgataattgtgtaatgtttattttttctaattaactaatatttggagtttataaagttatatttgtttacttattttttgatacaagaattgtatttcaataaaaaattcgttcactaattcattagaaaataatcaatgtatagaaacaatagaaataaaatatatttattttagtatagtataaattggctatgtctacttttatatttacaattataataaacatactaataatataaaatactttgtatatatttattttgttttctatttattaaacatactaatttaataaacaaaataataatattcacatatgtttattggataactattcaataatggttacatttttattgtaaccatcatgattacatttttctttgacctgtaatagcaggttactcataggtaaacatttttttttagaattaatta

SEQ ID NO: 270690 - DNA, 224 bp, Cannabis indica
ttgaagcagtgtagaagagaaggtttctaggtatttttttaccttttttattttcttttgtttacttgcatccctatatgagtccactaaattctttttctaagatattatagatgagaatttttgtgggagaaaattactggattttttttttctttttttaggatatttgagtagagttttgtttgttgggttggttagactcagttttctcttagtgagaa

SEQ ID NO: 270691 - DNA, 660 bp, Cannabis indica
ttttattatccattttacgcttagtaccacgtgattccacattcaaggtttcattataagaagcaacggtgtcaagaaaatataagttgtcataaaccataagagaaccagttccaatagtatttgaattaatagataaactaaaacaattgtttccaaatgaacaacaataattcaatttgtccaaacaagaaaaagaaaccaaatttcgtctaaatgacggtacaacaaaagtatctattaagtccaaatagtaaccagtacttaacaaaaacctaaaatgccctattgcttctacattcaccgacttgtcgtctcccacataaatgcttgagctatttccataatgtactcccttatgttttccttgcccttaaacttcatggaaataagtttctttaaaagagtacttgtttctgccttatcgctttttgcaaagcgcttctcaattttagctaggaaagttgtggcatcggtgacctcctcagacatcgcacccctaaaagcctcaggtttgctgcgcttaatgatcataagactaatgcggtttgaacggtcccacttctcataaatcctcctttgctcagaggtactggtatccgtaagaggagcaggacgatccatccttaatgcaaggtcaagatccatgcagccaagaac

SEQ ID NO: 270692 - DNA, 1166 bp, Cannabis indica
acaataaaggaacaaaagacaaagtccaattacactgctacaacgataaagcaaaaagcaaaatcaaatcccgatatacaggacgagacaaacgacaacaaggcctaaagactgacctacattcatagtagtcaaaagtcattgtaaagtaccataccactatagatggaaggtaaagaaaaaaaatcaaggatacaaacccctaaaatctctaacaagagaatgtccataactggaccaaaaaggaaaaagcaagaaaccaaaataaaacatcaagactaaaaacagtcgaagatctaaagaaaatatcaatagaaaaataaaaacataaccaaagactccacaacaacgagaaatgaagaaacatgcggccactaacaaactttcgatgacggaggaggatcgacatcgggctgccaaaccaccacaacccgtccccaaaacctaatagaaaaggcaggggaccaaaaccagttacgttggctgagcaaggtgggttacggtccccaacgaagaccctctgctgcaaattccgtagcttccaacgaacatctgccattgtagaccacgaagccccgaaaccaacaacaccggtcgagcaaggatgatgttccccatcggagccccaccgctgcaacctccgttgtagaccacagagccccaaacccatcgatctcctatcaaaggcgtctccatgaaagcttgcccctaaccagtagcttcctcacttccgaagagtagagatctatggccataagaactgccatccctaactccttctcggccagagaacaccagacgcatggcaggccgacagctgggtcccttgtcgagaaagaggaaggaaatggaaaagaaaccctaactcaagaagaagagagaaaaaaccctagagagagaagcttgctaaagggtatgtttgatttgatgttttggtatgtactttccttgagaaatttttgagtcttttaaatgatagaacaaaaaaaatgttgggaatgccctaaaatatatatatatatatatatatatataatgggtgaacctaaaaataaagtgtggaacaaaatatacatgattgtgatgaaattggtgtgagtagctagcgtagtgacgctaatttgtacttttgcacatgaaaaagcttagtctcaacgtctcatacg

SEQ ID NO: 270693 - DNA, 776 bp, Cannabis indica
attgggttgtattattgtaactacacaaagatgtatatatatagattgtcatacaaatgatgacaggttgtaaaacagtttggaattgaaatacaaaggagctaattttctcaaaaaatatatataaaattcgaaaataaataaataaataaaaatataataaaataaatttaaaaattatctaatttaagttgttctaaaataactaaattttcaaacttaaaataatattccaagaatctctcgataactaattcctagaattcctcaacttaattttgaatttcaaaaatattcaaattcaagttgataaaaaaaaattaattataaataaccaatttacaacctaaatatgaatatttaatgaaaattaaataattaagcttcacaagaatctaattagttataattctatatttaattaaatacaagaaaaatacatatagtttatcttgaataagtttcattaaactaagtgtgtttttcttaaattaatttcaaaatattcaaatgaatcaaatgaaaaatcaatttcatatatttcgaaattaattatgttgctaataaattttattaggttaaactaatttaattggccttcatagtggggttgttcatgtgagggagggttgggttcagtatgtcgtacccacttctaaggccccctaagctctcacacaaggcccaaaagagataaatttaaccttaaaatgaacaaatgttattaattgaataggcacaaacactaattgggcctaaataaaatctatcatggt

SEQ ID NO: 270694 - DNA, 866 bp, Cannabis indica
ttttagtgttgttgtggttggaattaaaaaaaaaaattggtgctaaaatagtaactttttggtgttaatttaacaccaaatttgagttttaccattggagattgcctaagaagacacagagcattatggagtaatagcacttttagcaataaaaatcatgtataaaataaattaattcacagcaaatagtttttaccaaaaagacaccaacacgaagcatgagaataaaacttgaccgagaagggaatacaaaggccatgaatgatctaaccaaaatataagttaaaaaaaaaaaagaacaaaaaaatatgagaatagtattacaacaaaatctattgatgaataagcttcttccccaagattactatgttaagattaagcttttagactctagtaaaggctttgaatgaacccccactaacacagttcctccactatgaaatacacaccaagtatgacatcaaaatacttaattttttcaactagatttcctccaaactctacaattttgagactagaaaactaaaacaattattatgtaggcaaaccacgttcagaacatttgacttacatgcaattgcctctgaacgttccttggtcgcttcttgggtcagcgaggaggtttgtgacctaatagagagatgaaatcttcttcgatctctttcttcgcgagcttctccggtggcgataccctttgagatgtagcaaaggaggtttagaaccctaaaaagaactaataagaacacgaaaaatgaaaataaaagcactaaaataccttggtaatgatcttcaaacaataaaagagaactgaagtttgagaattttggagcttctttttaatttttttagctgaaagtgagtttttg

SEQ ID NO: 270695 - DNA, 564 bp, Cannabis indica
caaaaataacttaacaaatctcaattacaataatgccttgctacatcataaaaaaataccttaattccaaactaatatacctaaaatgaaactaatcccgaaattctatttttttgttttcatgcatttaaaaagtaacattttggttacttatgatgttgataagaaactaataagttgctttttcataaaacaaaatattacttttatattatataatttgagatacattttagctagctctaaaacgtatatgtatacaccttaataattaattaattaggttatattaatacatttgagtgaccttcaagtttattttcaaaaataatgagttgtcatgcagtaagctaccactttagtaaactgtattttaaaaaaaaatatacatacacgtttaagccacccatattttttaaatgcaaattatatatgcattttaattaattaattaaagaatgatgttacacataacttttaaaatattacaaaacgagacacattttttttggaccaattagttattatttggacaagataccaattggttactttttataaaat

SEQ ID NO: 270696 - DNA, 514 bp, Cannabis indica
agatagaagtaagtttgtactctatttcataacagaatcaaaccagttttaaaatcgttgccttgcactaataaccatttcaaaatcacaggaaaagaaagacattccattcctagtcttctgcaatggacaatttgatgatcgaatgaattatgaaaattatgaagctagtggacattacatttcagccaattgtaactatgaagaattacaacagaagctgaaagatgtcctggaatgcaaccaagaaaacactgttttgcaactgaaatatcaagtcaaggaaggataccaaccattgaggataaaggatgatcaaagcctgcatttctacatacaactcaaactgaaggaccccgacttcacaacatacccattgtgtgtgaatgtcatcaacaacccaacaacaaccatcaatccatcattcttgggaaatgtcaattcattaattacacatacaagcgccttcgaaccgatcgaatacaatgcagcaacaacagaagactcaacaaat

SEQ ID NO: 270697 - DNA, 1147 bp, Cannabis indica
aaaatgttggcacaataaaattgtaaagtaaacaagttatgcactagacaaattttactagttggaatataagagttatttaagttaaggtatgatgtaaagaaaattttaaagtgatattttaaaaatattttcaagtgaaataagatttaaagaggattaagtttaaacttttagctatagttggttcatatttttagggattattagcaaaatgggaaagtggtggaatttagtattcagattctaatattattatttaaaattaatcaagtaatttaaataataaatacgaagatattgtaataaaaggaggtgggaacactaattgtcagatgcgaatttattgtgttcagatatatttgggaagtcaaattttatggaatttggtttgtaatctatgtcgtataggaaggtatcattataaatgtttttatggtaacttaaaaggatacaatttttggaagttttacaacctgtcttttggaaattaaaataggaataattatgtcataataactgaattggattattttaagtaatttcaattcaatatagattgattataatcaagttttaccataaataaatatgtataaaaattacttttttgggataagtacaataaagaatttgtaatattttagaaatggggacattaataatgaattaaaatggttgattttgtctattttgggaaggattatggaataaatgggtcattaatgcttaataatcaaggttattttgtttcattgtattgaattacactaatcattgataatcaaggttattgaagtacattattcgttgcttactttattattgcgataattttcaaagtaaacttttgatatcctatggatgggagcattgcagggttttttgttattactagattacatatcaaaattttttaggttttagggtcttagtaagggatagtaatcctaagatgatgatgaagtaaaatacaagagttaagttgctactagccaaagggtttccctttggctagttatagtattttatatggggatctagtttttcagtttttgagttttgagtgttttgatcggattgataattttctaataaatttttttggttttttgatttgttttcagtttattcagattcgttagct

SEQ ID NO: 270698 - DNA, 690 bp, Cannabis indica
attggtggtcggttaggatctcttaaatactggtataaacagaataaagtgaattacttggtggccaactctgctgtttgggatgatgatgctgtgcgtgcagctctagagagtgcttccttttgggtcgaaaatttgcctttcattaaatctttgtctgggtattggaagtttttcttggcttcaagtcctaataaggttcctcagaacttttttgatggttcatttcaggattttgaatggagttctttgcctggtatgcatgcctatgtaatctctttgttatttgttaatttgataggatataccctcttttataatagctctctacaagcattgttagctaatctttctttacatgctatttgataatttattatgtctctgtaatgggatgggacagttccctcaaactggcagatgcatggatttgatacaccaatatatacgaataccacatatccatttccacttgatccaccttttgtccctgaggaaaatcctactggctgctacagaacatactttcatattcctgaagaatggaaaggtaatgttctcttcaatgcacgccaaatctactctgagtgagtcttgtttgacccttttctccttatttattattgtgaaatcgttgctatgtgaaatccatatgtaaaatacacagttaatatattgatattagctatc

SEQ ID NO: 270699 - DNA, 762 bp, Cannabis indica
gtttttgatagttttaatgttttattttatatagttttgtaccttttatggcatttctaccatttattatggcttgtccctattcatttagggtggtttggtggtatggtgaatgggcataagaattgatccattttatgctcatgttttctatttaaatgactttttcacttttaacagataagtattttaagtctatttaagcattatcattaatatggtttggtttaccatcgcttctttcatattacctttcttcattatattgtgtagtaatagatttttattttttgttattttgtaggttattttgtgaagggtctatgattacagaaaatttatcgataagttaaattttaaatataatctatttgatattaattttcagcatttttaaattagggggtttcttattattactagccaaagggtaatacctttggctagtttttcttataaattttgttagttttttagttatattttgagttgtgatatgggttgtgtgttttattttgagtttgtatattaacttttattttaaaattgtcattataatataatgtggttttggtttggtgttgtgatgttttttcagttttgctaactctggcaacaactattaataaagggaaagtatttttcaatgttatggggtgctgattgaagatgttatagctttattgtctatatttccgggggtagttttgtcccaagtggctcgcaattaatattctgcagctcatggtttgacaaaacatg

SEQ ID NO: 270700 - DNA, 645 bp, Cannabis indica
ttgaagattgggaggtgagtagcaaaagttcacctactcttgagcccgaggtgcaacaccatttttactccgtgcagatcgcaggagaaggctacgaacaatttgtttgggagcttaggaaggggtggagatgttaccttccatctaactggaccaatatcatccggctaggtgtcattgacactattcctataggccgtccaagttttggtgccttcggcatcccaatcgctgctcctgccgtgactgctgcacgacacacacaccaatacccgtccaagaggaggatgatggaccgtacaaaacagacgatgcagaagattaatgcgactgaccctcacgtggcccgacatgccacgttgtctagtgtcgagcaagatctacctacttctgaggaagaagactatgagggggacattgaagttcaggaggtggaagactaggatgacgaccgtcctgatagcccttctaaggctgaggaggagggagttgctcagcctctgcgctttggaggctacaatgaggtcggagagccgatatttgagcttggtgacgtcttggtcgagggggaagattacgtcacccaagagtatgccaaagcggtccctcataggaggcagggtgccatgagggctagatgggtgt

SEQ ID NO: 270701 - DNA, 1728 bp, Cannabis indica
tggaagccaaggtcacataaaattgaagtatgttcacccgtgcctatcgtacggattaccccagcatgaattccatacgaagctcggattgtcacccaattcagttgaaagaagagttccgttggcatagtatttagctttaaaaactttactcaccaaggatgtatcattaaccaacaacctccagcattgtttccccaacaaggccatattcaagtcccccagactttgaatacccaaacctccaacatgtttgtgacgactcaatctatcccaactcatccaactaacacccgttctacgaaaacagagtccgtttgccaccagatcttagccatgagacgctccaactccctgcaagtatccaaaggtaacagaaaaacactcattgcatagctaggaattgattgcgcaacagatttcagcaacacctccttccccgcacgagacaatatcctcccttcccatcattggattttcttttttattttatctttaagaaaaccaaggataacatttttattctttcccaccgaatatggaagtcccaaatacgacctattctcatcagcctcataaatttctaacaactcacaaatgatatccctttaagaggtactagtgctgtgactgtagaacactgacaactttgaaaaattgatcttttggctagaagcaatctcatacgtatacagtaactctttaaaattatgagcttcctcctatgttactttataatagatgtaactatcatctgcaaataacgtatgtgaaatagtaggagctcttctagaaaatttacaccgtgtaattaatccactctgctcataactgcgcaacaaactagagaaaccctcgacacagagaataaacaaatatggcgataaaagatcaccctggcgcaaccccctttgtgcaacaatagagcccaactctttttccccatgagagatcgtgtacgagacagtgcccacacaatgccatcgaagcccattctttcaagcatagcctgaagatatccccattcaagtcggtcgtcagccttgcttatgtcaagcttaagtgccataacaccatcccagcctcttctcttcctcttcaaataatgcattatctcataagaaatcataatattattcgatattaaacgaccttggagaaacacactttgagtatccgatataattgaaggcataatagctttgagtcgattagcaatgacctttaaaataatcttataaagaacgttacaaagggcaataggtcttaagtctcccatgtccattggttgtttcttcttaggaattaacactaaattagtattatttacacctctaggaagatgtcctgtttgaaagaaattccgaaccaaagtaattacaacactactcacaaccgaccaacatttttgaaaaaatactggtgtcattccgtcaggtcccggagccttggcagggtgcatttaaaacaaagccttgcaaacctcttcatcagtaatcggctgtaataagtcgacattttggtcagctgaaactcgactgtccacaacactcgtaacttccagccaagaattaattgaagaagaaaaaaatgtagaaaaataatcaaccataacttgaggcagacccgaattccaatcaacccagttaccattattatctttgaatttagtaataaagttattatgacgtcgattagtagcattagcatgaaaatatttactattat

SEQ ID NO: 270702 - DNA, 531 bp, Cannabis indica
ggttctacttatccgaatctgattccattttgaccgtccgtcttattttttacaataactaagatgcattaagtcagaggagagaagtcaaattcacaacttcgcatttctaatttttaacatgggaaactcactcgaaaatgaagagtttcgagtctctcatttccgctgaacaaaaacatctctgagaacttgtgaccatcctcgccagaatacataaacagaataagtgatgtcaaaatatcacttaggtatcttaaagtacatcccttggatgtttttgcacttattctgcgtccaggttgacgtcatatgtcaacttgggcgttaggttgtgaagtaccttcaatgaaacagccatagctcactcaatattgatcttatcgaagcgattcaacttgtgttttgaagctatttcaatgctctatcaagtcatgtctcacacttcaatcgcaattttaaagttatcgacttcaaggtttaccctaatggagttacgaaaataaactccaagttacctgcgatgggtcc

SEQ ID NO: 270703 - DNA, 667 bp, Cannabis indica
ttagctttaattcctcgggcatttacgataaacccagaaacttacgcgagctgactccaaaggagcactttaattgattgagtctcatgttgtatttcctgaggactttggaacattcgtccaagtcatctacatgcccccccagccttcctagattgacgagcatgtcatccacgtacactttcatatttcgtctgatctggtctttgaacattctatttaccaatctttggtatgtagctccagcatttttgagaccgaatggtatgaccttattacagtacagacccatatctgttcggaaacttgtatgttcctggtcaggtggatgcatcttggtttgattgtaccctgaataggcgtcaatgaaacttaatatttcgtaacctgctgttgcgcccacaagttgatcaattcttggaaatggaaagcagtcttttgggcacgccttgttcaggtcagtgaaatcaatacatactagccacccaagccgggtagaaagcttcaattatgaaattgttgctgcacagcttttctacctcttcttttagtgctagggctcgttctttttccaacaatcttcttttttgttgaacaggctggaaattaggatcaatatttaggatgtatgaaattatagaaggatcgattccgatcatgtcctcat

SEQ ID NO: 270704 - DNA, 554 bp, Cannabis indica
atccatgttagaatttttttactaaaattagataaaagtccttaaatttaacaatctcaatagttcaggaggaatttttaactgccagaaaagttcagggacacgatttagtacatgtcaaagttcaggggaaaaaattactaattagctttttttttattagggttaattagtaagattataattgcaaatgttaaaaggattttaccacaattaatttttttttattctgttattttgtctactctcaagcctccacctccacctccaccacaaaaatagggaccgaaggattcatctcttaattgttttttaaagcaggattcatctcttaactaattaattacagatattattacgccaacttgttatccctatcgatcattgagaaactgcactttgattacattagtataatactcatgtccatttttttttttttttttttattaaaatgtatgcaaataatagtcataatagttaaactgatggtttgataataaatttgtattggtttagaattggaataagtagatatgtggttaatggtttgt

SEQ ID NO: 270705 - DNA, 1325 bp, Cannabis indica
aaaaataccccgacctgccttgcttggggtagactcaggtcgaagaaccaagcgacctcatgaggggaaggagcaccccatcattgagaagcatagaggacgaagagagcggacaaatacttaatgccctttggagtaatctggctcgggcagaggccgaagaagtccgccacatccctgaagtacttatgcaagggcatcagcgccccttgctggccgtgagcccccgaccaggcgcacatacccttatcaggatttgtggcgcgattgtcgtgagagggaatgtagcagtccagctcgcccaggtattcgtcctggtcgagagtgcggaggcgtgccttcgaaatcttggacggaggacttacccacctggcgcccaaggcaacctgccacctatgaggaactgcctcggcaagctcctcactagcatagtccacgccctcgaccaggatgtctgcgtcagtatcaactggttgcccagcctcattgtaccccacgaagttaggggctccaacctcttcctctccctccgcagcgggaggactgcccggacgcgcctcgtccagctcctcaacctcctggacttcagcgtccccctcacggtcctcctccatcgagaccgccaaatcctgttcggcgtcaagttaagtggcgagccgagccacttgagggttagaagcgtcaaccagacgcgtggttttcttcgtacgagccatcatcctatggctgagtacggagtcagaagaatttccttcgctagaaggagggttaggacgaagatgagggtggacttctggcaggagttgaagcaggtcctggttgatctgatgctcgggctcccaagactcacccagattcatctacaaaagacaacacacaagatgagtgttggacggagtatcaaacgaaaaacaagcaaatatgccgaccaagagtacccaatagattaaagaacgaccatgttcaaagaaatgtctaaactcaagaagtcagaaagttttcttgagttagggcaaaaaagttcatgaagcttggaataagcaagatggaaagcagacgcaatgcagttcaaaaataagccatacggctgaaagctaacataaggacatggaaaaagaagggtcgcagaagtttcaaaccctaggttttcctaagcgttctttctacaacatagttacattcaaagcgtaaacatgtaaaggaaagcataaagggaatcagaaacttactcaaagattcgaatgtccagtttcaagcaagccaacaatcgtctgtaggcacttcggcaactctgaagccagaaaattttctcttttcgctctgaa

SEQ ID NO: 270706 - DNA, 825 bp, Cannabis indica
tcactggttctctagctcaccacctcagaacctttccacatatacaagactataacagaaatagagtgaatgaggaagttttgtagtctgcttgttttctttcttttagtaggagttataaggtaatggtattgtaatccatttgcgaccaggagaagtaatttacaatatccttcagtcagtttggtggagtagattatgctggctatctagtactgcattttttgtaattttgagttttttacttattgcgccattctattttggtagcatttatttgagacttggatatttagtttttccttttcaatgactatagggataacatacagctgctgaggcaacgatattactatgcaacttggaaagctgatgggacacgatatatgatgttaataaacgttgatggatgctacgattgatagaagtttcaactttagaagggttcagatgagatttccttgcaaatctacaagcgaagtatgctttctaatttttgagataaaattattcttggaccttattttttgaattattaagtacaaggttactactctttgttatagtatattttatgattgttgctattaatttttgcattatgtaattagtttatagttagttattacgatacatagaatataaattttaggatcgtttctattaacaattttggtattatgtaattagttaatagaattaattactaattttatataagttttataaacgttattttaatttttttttgtatcatgtatttactattatataaaatcgttctaaaatttaaaaatgcaaggaggaaaaaatgcatgaaaattt

SEQ ID NO: 270707 - DNA, 773 bp, Cannabis indica
aagagttcgagttgtatactcgcttcattgagtacacagcaaaacctacgttgatttgaagcgtagagagattaaatttctagtgggagactcagtatttctttgagtatcacctatgaaaatggttcgtagattttgaaagaatggaagattaagccttagatgcatcgatcctttttagatattggagcacataggccagatggcctatcaattagttttataacccgtgttgtccgcggagcataatgtcttccacatttctattttgagaaagtatgtgtctgttccaacacgtattttgagttacgatgatattgaactccagacaacttattttatgaggaagcaacttgggaattagagttgcaaatgtgggagctgtatctcgagctattcaggtaaatttcgaggaaaaaattcttataaggaggggatggttgtaatatcctgatatgcgtaatggtaaataattagggtttataattatattatgtgttaattagatgataagtgggattatgatcctactaatctagttcaacataaattttaaatttgctataacttgataaataagcataatttataaattacgaagatttatatagcatgtgtaaatgtaatatgagcaatatgtggaacacaaatatttttaggtttggcgaccttggagactcgattggtggccaaaaataccataactagtgtaattattagtttgaattagaatatgtgataagttgataatataggtattagagtacttaaga

SEQ ID NO: 270708 - DNA, 616 bp, Cannabis indica
ttcaatatatataatcaatccattgttatacattgtcatatatatacacatataccactactcatcatcattcatattcatgtgtttgtttgttaattatgaaattaataattacctttatatttatgtataatgttaatgatctttatattttaaatttgtgatagctcttgatcataacttgttttaatatgtttaaagagatctagagagggagatctttcttataatgggacattttttaaggggataattataatgtgactttttatttaattaatctttattttattttttttattttaaaaagaaaaagttaaaagacatcaaatggtaatttttatttataagaaaaatatgaagatgtaaattattcattcacacatcttcaacactttcgcaatcattttctttttgaaaaagaaaaaggaaatagtttgcatttggtcttgttaaaatgtgaaacaattatttttttttcttctctaatttttaatccagtcattaataatttatttacagatttataatatgagtgtgttatgttatacaggtacgttggtgtaggaaacgaacccttcttaacaagttacaatggaacattcataaaactagt

SEQ ID NO: 270709 - DNA, 513 bp, Cannabis indica
ggatttccaattaaggtaaactttagtaccgtaattggggagcaaaagaagaggaaggatagaatagaaaggtggctgcacttggagaaggggctggtacgaaattgcagaaaaaaaaaagaaacctaagtacagaaaaagaaagaaaacgaagagagtacaaagaagagaagaagaagactaagaagaaggagaagaaggcaacctacaaagagaggatttgagcctcaaactcatttctattgctctcctcttcattttgtttcattttctactctctagttttctctttaactccatgaacatttcattttctagttttgagtttttaatttcagctatgaactaaactctttgagatttgggtggttatgaacccttgtatggacttgtattttgattttgcaatgattaagtaatcttgtcttagttcaattagttgtgatgaaatgttgattgaatgttaatttttgtccatttttaacatttggcaggctagatcttacttggaaa

SEQ ID NO: 270710 - DNA, 1402 bp, Cannabis indica
aggtgttataacgattcgacccctttctcgtcaaaaaggtttggtcaggttgttataacggtttgactccactttcgtcaaagaggtttagtcgagaacctttaaatttcaaaaaattttgaaatggcgggtttgcattatacaatgtatttccagatgaactcccgttagtcatacataaatgccccttaagtaattttaaagaatgaaactttgtaattacttaatacaaatgattctctttattcataactgaagtttaaagcttacatcagtaatgcgagtcacatcatttatttattgatagtagggtcgcgaatgttctacattccagtagcttttttattagcaagccatcaggccgagccaatttaaagactttgactccaactactgcttcgatgacatatggaccctcccagtttgggttgaacaatccttctaatgcatttctcgtatttgcaaagactcgtcttaacaccaagtctccaacattgaatagtcttttcttgactcttttgttgaagtatcttgtgactcggtgttggtgatttgcgactcagtttatttttcctcaagtagatccaaggacaattttaaaagttcctcgttctcttcttaattataaaactctcttctatgagtccatatattcacttcaacaggcagcattgcttccgagccaaatgctagcgaaaaggagtgtgtcccgtggctattttctcggtagttctgtgggcccagagcaccaaggtagctcgttaacccatctgcctttggcagcgtctaacttcttcttgatagtatcctttagggttttattaacggcttccacttgtccatttgtctgaggcctagatactgacgagaagcttttgataattttattcctctcgcagaattcaatgaacaagtagccatcaaattgggttccattatcagatactatctgtatgggaattccaaacctacagataatgttcttgacgacaaagtcaaggactttcttgcaggttatggatacaaggggctcagcctccgtccatttagtgaagaagtcaactgctaccaccgcatacttagctcctcctcgcccagtgggtaataccccaatcaagttgatcccccatatagcaaatgggttgggggaggtcatcattctaagttcggttggcagtacgcgaggtatatgtgaaaatctctgacatttatcacatcttttgacaaactcatgtgtgtccttattgatcgttggccaataatatccttgtctaatgagctttttagacagactttgccaacccgcatgatccccgcagaagccttcatgaatttctctaacgatatcgtttgtttctgcgggaagaacacactgaagtaggggcattgaataccctctttt

SEQ ID NO: 270711 - DNA, 1561 bp, Cannabis indica
tacactaggcgatattgacttgaatagatattacggtaagtttaataaatctaagtcaaagttcaatatcggtcccttccgatgcatacttcatgcatccaacctgagctttactttaattaatgctctggaaagaacatagcatttctccaaatgcaagtaaactctgttgtagattatcatatcagtaaaaccctatgtctgataaatctaagaaactttattttcacatagtcatgtttacttttcaatgtgttgatagcacaataaacaggatcaagtatgtgaaaagggtttcagataaatttatacattatgtacatataatcatgaaataaatcatgtgaaccatgcaacattaaatgttatttctgatctatattaataagtaaatctgattatattgaaatgagtttatttagggcataaaacccaacattttgaagttctcctagagcggagcttttgtgattctcctaacacatggcttcgggtccttatcctagagtcagtgagggccccactttgcttccagaccaactttgtcagggcagtgatttgctcctctagccttttggtatcactgtccaagagatcttgtccgcgaaccttgtcaattaaatgatttttgaggtcattcacttgtggcctcgccttttcattttttgctttttcatactttccgtcaaaacgcattcaaagatctactgtggaccaactatcattagaatacttgttccctggtcccactatcctggtttacagaatcactgtggcaatttttccttcccctaggcctaggtacttgcgtaccagtctctttttatgtagcttgacctttcaaagaagaagggcgttcgagcctggaggcatcggtggccttctgcgcctgagtgtgcctattagttggattcacagttttttttgaggacgtatgagagttgaaggattctgagggtcacctacttttgcttttcccttatcctatacaggagcaaaggttccagtattagcaaggttttccctattatttcctctgacacattccactgaggggtatcatccgaatctccctcatctaaatctccaaacttagcttggaggcgagccatcattctttccaatttttaagaaaatctcttgatggaccaacttctatttagtcttgagcaactctctagacactcgaactactttgggggtcctctcgtagtggtagccatatttgtaatatctgtctttaacatattctccatcgtcatcttcctcctcatttttagcatctcgatctttgctaatgtggtcgtgctggttgtttaggtcaccttcttggttgtcagtgttggatgcatccccttccctcacatggcttggtcgggcatgctctggagagaaagggtttacatcctccatgaaagcgtcgaggccacctggaggagtctttttgggaactattttttgggtaaacaccatggttacagtgacactatggttttgggtctttcttcagctctcaatgaaagcaccaaaatgtttgtcaagattttcggaactaaatatt

SEQ ID NO: 270712 - DNA, 714 bp, Cannabis indica
caaagggggagattgtaaagtccttttttggtaatttagatgccaaaatatttttcattttatggtgagatttgtttgcactcttaactgattttctcacctttaatattcagttttattgctcttttctatgttaggaaagatgtattttcagctggacttttcttgtatggaaacttcttgtaagagaaacaattctcttatggaaagtttgtttttaaaggaaacgttgactcttgctattttacttactaaattcgattgtgtcttgatacaatcagattatacacactgtttttgacaggtatcaatacccaatacaagattgaactcgtttatggcaagtttccttttctggtctgatttcatgcgttagaatctgtttctgatgttgcaaatcaagtttatcttaagaaaattttgtacaactgtagattcgactttgtggatgtctatagggttatgttctataaatagaacctaaagagtagccattcaaatcggctcttctagtttttcattttgtgcatttttcttatttgtgataagagagttatttttgtgaaaacctagttgttcatctaggttctagtatttttcatatctgttcttactttgtctaagagtttgttagaatgacttgactgaacaagagagtggtcttcgggagaagacttgtttaagccttacttcgggaggaagtaagcaatcaca

SEQ ID NO: 270713 - DNA, 1212 bp, Cannabis indica
atttcagtctaagggtggcaaaacgtgtcattaattattaatttagattctattacatttatctatatatagttataaatataataaaaattaaaaattttaaaatatattcttaaaagaaattccttacaaaaaaaaatatattttcaattttattttaaaaaaaattaaattaatttttttttttttaacctttgaatcacaaaatatatatttttacataattatattattaatttttttttattcaagaagaaaaaacttcattaatcacaaacaattataaacaaagccaaactgaaaataaactcagcttctaaagaaacacacttatttacaaaattatgctctatataattatattattattattaattttaattttattttatttaaaaaattgtatcaaatttgttaaattcgtattaatcggattgtgttgcgtcgtatttgacccgttttttatttcgttttcacgtcgtatcgactcatttttcgtatctaattttttcgactttaacctataaaatttgtgtcgtattcacgcggtgtatcgacactcctaaattttaaggcatattaaacgagaaaaagtgttgatttgtaatgggctgaaaatatatctgtatatgctctaagatatccttctcgtggcctgtgggtattaaaaaaaggaaaatagacgtatttgtttatatattgcaaacaagttggatagtgactttggtgtgagagagtttggtgatgtaaaatgtgccaagtcaatcttacgggaaaatggtccacatttggaacgagtctatcttagttagcgtgctaatgtagtaacgtgctatctatctcttcttccacacagaggcccttccctagacacacatttaagtatcttgttcctgacatttaactatcaagtgttagttttggccaattatatcctccttcaccaaaattatttggggattgtgtttgtttgtgatccctacatcaccaaaataaataaataaatagaagaattgatgattaacaagatctctaatggtgtgatgtcaaaaatctctacaatacttaaaaatataatataatattgaaaaaattattttatgtattatttttttatttttttttttaaatttacggtttgggtttttaaagtagtttctatacgagttgttatacgatttttagttgcgatttaagttgttctgtaagttg

SEQ ID NO: 270714 - DNA, 635 bp, Cannabis indica
ttttcttcccttggaatttgcttgagagcatagcttttgaactgtgcgagtagatcgtgtattttgctacagataagctatcatcttttcctcccgagcctcgtagtcttcagatacatgatttaccaacagctgtgagtcgttgtagatctcaatgtgctcggccttcatctcccgggctagttttaggccggtgatcaaagcttcatattcgacctcattattagaaagccttagaatccaaatttgaactacgaatgtgcaggtgttgccccccaggcgtgacaagggtccgattcctgcatccgatagtcgatctatagttgacccgtcccacatagtacgactttcaagtcggattgtcttcactaatactcaactaaagcatttataactaggctctagggttactttctgaaatgctctcttctttacccgcacattcaactgtaaaatctaccaaggcctgacccttaattgctgttcggggttagaaaaataatctcatactagcctaagtccaccacctaattgagcaaccgtccagaggcgttccggttttgcaatatttggcgtaatggttggttagtgtatacccgaacaggatgagcttgaaagtagggtcttagctttct

SEQ ID NO: 270715 - DNA, 425 bp, Cannabis indica
ttgctttctggtatgctttcttccttgcatatgcattctaccacaaactctgctaaggcttggcctttgattgctgttcgggattggaaagtaattttgtattggcccaactccaccgcccacttgagtagctgtccagaggcatctggaatttgcaatatttggcgtaatggttggtcagtgtacacccgaacaggatgagcttaaaaataaggccttaactttcttgttgctagaataaagcaataagcgagtttttctatcaatgggtatcggccctcggcctcaatgagtcttttactgatgtaatagactgggtgttgtatgttgttctcttctctgattagcacaacactttccaagttctcctccgtctagaggttttgagagtacggggggttttgcgagttgtgcttttagctctt

SEQ ID NO: 270716 - DNA, 859 bp, Cannabis indica
tgaacccaactatgactaggaacaagacaaggacctaaacccaaacccgaacccagatcaaaacccaaacagagacctaaactcgaaccgagactaggactcgtaacccgaaccttcaccgagacccgaacccctagaataatcgagacttggacccagaatcaggatagggaccagtgaaatacaacaaggaccgggacctcgtacgcgacccattcctgaacttgaatctaggacccagctcaagtccctacaccaaaagtagaaccagactcagacccaagattgggatccgcatctagacccaagtattcgagaaaaacccgtagtcggtgtttggatttggcacacggccctggacccgaacactgacaacgacctgaacccacacccagacctgaaccaagtccctaacccaaaagttgacccgaacatgtaccctgtgacccaaaattgtaacctaaatcgaaagttgaccgggactggaactaggacttggacttggaatcataactgaaattggacatagatctagaactgtaaccggaccaggacccggactccaaatcagccctatacccaaatggggagccggaaccggatgcaaacccaaacctgtactcgggacccgaacctgaacctgaactcagacccaaacatggaaccagactagggacacagactagggtcgagacatagaaccgcaccccagtctcgatctcgaacccaaactcagaaatgggacttgggacctgaactggaaccacaccgagacccgtgacagtgatccagatcttgactcaggattcgggtaacggggcctagaacagacccgtagtcggtgtctagatctgggact

SEQ ID NO: 270717 - DNA, 794 bp, Cannabis indica
gtttttatattttcttatatacaactgacatttgcaaaaacacggtatttcagttatcaagaacatcatttgcaggtttggcattccaatcaaaatagtatctgatcatggaactcagttcgatagcgagctattcactaagttatgtgaaaggaataaaattattaagagcttctcgtcagtatcaaggcctcaggcgaattggcaagtagaagctgttaataaaaccttaaaagatattattaagaagaagttagatgctggaagatgggttgatgagctaccccaagtgctctgggcccacagaactatagagaaaacaacgacaggacacactctcattggcattcagctcagaagcaatgttacccatggaggttaacattgcaacccacaggcgtgatttctacaatcaagagcaaaaccaagaacttttgaatatgtcattggatctacttgaagaaagatacaatgagtcgctaataaccaatgtagcttaccaataccgaataacggatactttaacaaaagagttcgaaaaagattgtttaaagtaggagatttagtattaagacgtgtatttgtaaatacgcgagatccagcagcaagagtgttcaacccaaactggaaagttccatatgttattgaggctgtcgtagaaatcagggtttaaaaattagcttggcttaatagctcgctaataaataatcactggaacagtgaacatttacgaccttattaccagtagttttatatgtaaatattgtatttatctctataatggctgatcattg

SEQ ID NO: 270718 - DNA, 496 bp, Cannabis indica
ggtcacataggacatgaagttttgaaaaggtcgtaggccacatggagcgtaaaagtgagtaatgttctaaaacctaaaatgccacaggccataaaaagccacatgtatgcaaaacatgaaaataacgtctatatgatacaaacataatgacaaatacaaatataggtgttgtctacatgtttgcataggcaaagggagctgagagatgccacatcgggatccatagagtccaggccagcttcatcatcatcatgctagccgacttggtggctagcatcttggcgggccacctcctccacacgtaggtcgatcagctcctcatcacatgcacccgatgatgacccctctaaattagcagcagtctggtctgtctccattcggctctcaaacagtgcctacccacaagcctacccttcattggtgaaacccgcaagaaaacatgttcccctgctgaaatgtaacatctctgagcttcggatcagcataacttttctgc

SEQ ID NO: 270719 - DNA, 705 bp, Cannabis indica
attcttttataaataaataaattgataaaatataccaaccacaaaaatcaaatattctcaagaacaatactttcatacaatatcaaaaatatctatataagtttcatacaatactttcaaactatttatgccaaacaacgccttgatctttcttgtttttagtcctctagcagctgaacttacaaacttttagagggtaaaaaacacaatcacattcctaggtagaaatagcatatactctaaggggtgtgcagaaagtcatccaatccaatcccaaccgatccaatctcatccaatccaatagaatcggatatccaatcataattggatcggatcggatgcaaattttaaaaatccaattggatcggatcggatgttggatgagacatctgatccaatggataaccgaactgacccaatccaatatcatccaatgtccatccaatcatatttaatatttataattttatatatttaattattttgttttaaaaaaatatattaattattaataggttttactatacacctgcacatattgatttaatattttatataatatttgtatttaatgtattggactggtttattaagacttttgcttattaagttagatttgtgttatatttttattatgggatcatgtaaattatgttggatttggattaaactattgtttattattggattattaagttttaaatt

SEQ ID NO: 270720 - DNA, 724 bp, Cannabis indica
aaaaatcaaatacacttcttttatccagagattttttttatgctactttgaagtcgctctgtagtctggacttttaattcaacgtaatgctaagaagatacatttagctttattaaaaaaacattatgtggttctctatattgaactaattttctttttttaaaaggatattgaactaatttctaggaaaaatcaattaagaaaaatttacgaaaatatattcctaacgtgttatccatatctatgtaaacataattttattccgaaaacaaaaataagtatacgtccttaaccatataaatgagtaaatacaaataaatattagatatactatctttgcttttattggaaaacgatgaggtatttttacattttgttttcatactgttttaaaaataaaagttaaaaaaaaagtttgttaaaatatttcattgctattgtattgtgaaaatctaattatattgaatttaattgatcgtgcatgaatatggtaaaaaagtagcattatatgtaatagtagtaatagggaaatttcatttttgaccctaataatacaacatatatcaaaatttatacccctttataatttgtacaaatttattcctataattttaaaagtttcctaaaataccccctaaattaaaaattccctctctcagacgttccctctctctttctgacgctccttctctctctcgctcttcacgatcaccgaacccccccc

SEQ ID NO: 270721 - DNA, 735 bp, Cannabis indica
atactgcttgcaaaaccactgaactcccttcctgtgtttcagcattaattcctgtgtgtcctcactctaaacagatttatacctatgctgatcttgtttcaccaagtttgaacccaaatgatgttgtccataatgcttcagctcacattgaccatgatgctttatgtgatttgcctgtgcctaaccctattgcttgtaataatgctgctaacaacttgcacacagaccagccatctgtttttgctgcaggagaaacatctggttcaagcaatactgatttttcagtcgagttgcctgctgcaacacacatcagtgaccttcctactatgcaagataattcaataacaccacagagagttgattctcctgaacatggtgctactgtgactgctggttcatcaccacagagagcttctgtaccagataccagacctgcaccagatacaagaccagcaccatgtttctcctctccagcagccataccactcataactggttgtttaaatgctcctggaagaaacaactctcaccacatgacaagcaggtctaagcttggagtgtttaaacctaaggcatttatggctttgagagaacctacatccttaaaagaaggcattacaaacaagagcattggaaacaaatgctatgggtgatgagattcttgccttggcaagaaacaaaacttgggtacttgttagattacctgaaggaagacaagccataggatgcaagtgg

SEQ ID NO: 270722 - DNA, 607 bp, Cannabis indica
atatatatacatataaaaacgtataatatatacttaattcaacaagttacatgagaaatgtgtagcacaaatggtaagtggagtttttattggatttgaagttcaaggttcaatcctaaactcaccactttttatacttttaattatttgtgataaataataatattataacttaaatatttgtattagaaaattccaaccgtgccaactgcccacctatctacattaatgcacagcacataaaaagcctattttagtgcacactaagacctaattatgtgatatatgaaaagatttataataattaaattgtgtatttgtttgataaaaccaattaattagttggctcctagtaaaaaaaaaattaaattattggcatatgaaaagattcaaccgtcggtgcaccattaatcttttttttagttatataaataagcctatatatatgttctcttttacaattttaaacacaatacactaatataagttatactatatcttttatattctaaaatcttcatttgctgttgaatttactgtggtattgagtttgcaactttgcatatactagaaaaaaatcatcatagaggtacactttcattcaact

SEQ ID NO: 270723 - DNA, 826 bp, Cannabis indica
aaactgtatagaactttccttagattgaataagtatctttcttgcaagtttaacattcagcctctctggtagaattagagacttcagataggtttttacacttctccaaagtacggattactgaatactttgctctgggcatgccagtgaggcatcctgctcggactgtggaaaagaggatcttgtcttccaatgtacatcctcaaagttggcattttaaacttgtggggcaacgccaggagattgatctcaaaagagaaaggggttccacgtgctcggtccaacttgagattgtttctctgtccagccatgccttggaacatattctttatttcgtctagttgtgcctgcatagctggactaagctgttcgacattttggctgatttgagtcacgtcattatcaatctgagcgagaatttgagcacgggttttgggctgcacgatcggcgtgccaagctgatcgtctaatcttgtccttttgttcagatcgtttctgagatcatgagtcgttcccagcctatcgaatacagaagcgtctggctgtctcaatgattgattggcttggttaacaggtggactggcaccgttagcctggtcgaaattatcaggtatgacttctcctgatgaattactagacaaggtctgcccacctactgcccttcccacaggcggaacctatgaccggatatttggcggctgaccatttatagtctgggaagtattcatggctggatcttcgtctgtttcacccaaagggatgacattcgggggttgctgccctacagtttggtaggctttttgtatcagcacagtagctggccgac

SEQ ID NO: 270724 - DNA, 1363 bp, Cannabis indica
agggtctgaggtgtgtactgatgtaggccgatcgggttattgcctatgcctctcgtcaattgaaagagtatggacaccgatacccaactcatgacctagaacttgccgtggtagtttttgctttgaagatttggcggcattatctctacggagagagatgtgaaatttatactgaccataagagcctcaaatatttctttactcgaaaagacttgaatatgagacagaggcattggttagaattagttaaggattacgattgtgagatcctttatcatcctgggaaagccaatgtagtggttgatgccctgagtaggaagggtccggggcaggtaactagtatgattcagatttcaccgcagttggcagaagacatggtcagttcaagcatcgagtttgttgtaggcaaacttcataatttgacattgtaatatgatttattggacaaagttaaagtcgcttagttaactgatccggaactggtgaagatccgagaagaggttttaactggccaagctaaagattttatggtgtcagataatgggattttgttagacaagaccagagtttgtgttccaggtagtgcaaaacacagaaaggagattcttgaggaagctcataccactccatactcgctgcatcctggcactaccaagatgtatcaagatcttagaccctactactagtggtgcgtaatgaagaagaatgtgctaaaattcgtatcgcgatgcctaacctgtcaacagatcaaggctgaacaccagagaccggcaggtttgttgcagcctttaacactacctgagtggaagtgggaagatatcacgatggactttgttgttggattacctagaaccacgggtttatttgaatcaatttgggttgtggtagatcgattcacaaagtctgcacattttctaccagtgaaaacaaccttttcagtggatcagtatgcgaatttgtatgttaaagagatagtaagattgcatggtgtaccaaagtctatagtttatgatagagatccaaagtttaccactaaattccggcagagtttgcagcaggctatgggtactaaactaaaattcagtacagctttccatcctcaaactgatggacaatgcgaaaggacaattcaaatactggacgatatgttacgagcatgtgttatggatttcgagggctcctggagtaagtacttactgttgatagagttctcgtacaataacaattatcaaagtacaatagggatggctccctatgaattgttatatggtagaaaatgtagatctcccattcattgggatgagacaggagagaagaaatacttcggtgcaaaatcagtacaacgaactaatgaagcaattga

SEQ ID NO: 270725 - DNA, 628 bp, Cannabis indica
aaattagatatgaagtggtaattttatatgaatttctaatatctgacgaaaaatttagtttttacacaagaaaataatactttttagtagttaatatttaaaaaggaaaagttatagtaagtgtaattggaacccctcaatcacctccaccaaccaatcacacagttataatgtaattacatggttagacaaacatgcagaatcatgcaattaactctaattacacagttggctttccaaacatgtttttagtgttactaccttagtaattacagagttactttcaaacacaccccttctaattttttgaaaaaataaaagagaaacaatacaagacaccactaatgtctaacacgattctcggtgtctattagtgtaattaagtatcgaatctcatataatttatgacaataacttatgcataggctggttaggcctgtgcttagtgcccacctagcctgggccaaaaaaaaaatattctccttttaaaattaaatatttttttttaattaattttgaaaaataccatatttttttttctaaataagagcctaaaaatatttttttttctatgaccctctaaattttagggttgactgtatctataggacatgacttatagaaggtg

SEQ ID NO: 270726 - DNA, 891 bp, Cannabis indica
tttggaatctaaaatttaaagtcaaagacttaaatttataccaaatatacaatgagtaatgattctagcttggaccaccactactaatctaactctaagtctaatttgcctaaagtaagcatatataagtaggagattctaagatcgaggattatatcatttcaggataaaatgttgggattatagtcatctttgccattcaatttcataaaagaaaatagaatgacattataagcagatgatttataaaccattcatccaatgatatactatgtaagcaaattcaaaaaaaaaaatgaataagctaagaggaataagtaaaggataatttcgatttaaaataagaatccaacgatgtcccggtaggcgagagtcaaagttattcttatttgtataaacttcttgtttcatattgtaaatacttgtctaaggtgtcatctattgatgaacagctagatgttgcatttacaaatatttatctatcgagatctaacactattatgtttgtctaatggatgacaattcattaggatttgtcccattaaaaacaacaagccaagttagaccaacaatgaagattcgaaattaaactacaattaataacaagaaaacaacatggttcaatataaattcacacacaattcagaaattattaagcatttagcaaataacaaagacatgtgaaaatacaaaactatcatatcttaaatatttccaaggtttccaacaaactgatacagtgtcccggtaggcgagagtcaaagtatcattcattgaatagagtttgtcagctcatctaaaatggataccattctagcaaccttggtaggcgagagtcaaggttattcttattttatgagcttctaccattgtttcatacttcgtaaattt

SEQ ID NO: 270727 - DNA, 540 bp, Cannabis indica
aagcaataacataatatttaattcaatcgcaactaattaagattagaaattggcaagtaatgaaaaatgaatgggcaaataagggaaaactcttgcattccaccgattgagctctagcgttcgctaaactataatactacaagaaatgtcacttttaccagcacagtactgtgctggtaaaagtaacttttaccagcgcatttcgcaaactgcgctggcaaaaagatcaaagttttaccagcgtacatttgcagtggctaaaatctaacttttaccagcgcatttacgcgctgggaaacgtcatttttgccaatgctttttattttatgctagcaaaagttctaataccaacattgatttgtcaactctcttttgccaacacatcacaagtaaattttattttactatgcacaataccaacttttgccagcacattttaaaagtgacatttcttgtagtataagcaagtttgttggtttctcgatgatcgaatcacaaaattacaaccctagaaattgcaacatttcaaattatacccta

SEQ ID NO: 270728 - DNA, 1023 bp, Cannabis indica
agattgaatcattaccttctattatattaatttgaatataatttttgaattaataaattaatttaaataccaataatattatcatttattataaataaaatattacggtatatatttagtttgtgagatcgtatttttttaattgagtttatttttatattattagcaataatatatgtatattcattatatataaattttatgcggatggtatacacataaaatgacatagacaaacaaaaataaataatgtagtgataaaatatatagaaatatttattttaattaataaaaaatacaataaaatttaatatgggcttttttatttttacacttcaaaattagtttatttttattttacatttttacgaaattctacatagaaacctctatcgcaactaacactgcaacctaaattgcaacaaaaaatcgtacaaaacccatattgcaactagcgctgcaaccactttagaaactcaaactgtaaatttgaaaaaaaaacagtatgtgaggtaattccccaatttaatatttactaattaataaataaatttctttaataaataattattttatttttatatataattaacatttaataaatatataaaaaaaatatttttattttaattttttaaaataatgtataagattcctatactcaaccaaacagtttaatttaattaacagtaatatgattacatattaacctacacaaccaacagtttacacatttccctataatcatattctctttcataatatttcctataataaaattattttgaatacctcgtaccaaacgcacccttaagaaaatgcttctaataaaaatagtaggtgttaaaagaaagaaatggaaaaagaaattagaaaattatgatatggttaattaacattattataagaataatcagccagtttaatttcaaaaaaaaaaagaaaaaacaataatcagccaaaagaaaatttataacgatactttgtcgaaaaaaaaacaattataacgatccgcgtcacgat

SEQ ID NO: 270729 - DNA, 714 bp, Cannabis indica
gtgtcgtacaagaagccatctcccatgaaacaagaagtcactaaaagagatacaataaagttttgacgctttcatgttaattacggccacgacacacacgaatgtaataatttgaagcaaaaaattgagtttttaattagatagaataaccctcacttacaaaagtatgtcaaggctgaccaggatcaaagggccacccaagtagactataatcagaaccaattgattcccccaccagtggacgggcatttataggttattattggaggtccacatcttgttgaaaactcgggcaaagctagagaaaagtatgcccaagccttgaagtatgaacaaaatgaaacagtcttgaccgtggaagaaaggaaaccaaaaaataccacatgtaggggagccaacaataacatttacagtagtagatgatagccacatcatcttcccacacaacgaccccctagtcgtagaagtgcaaattgcaaataagacagtggcacggagtatgatagacaatggagcttcctcgaatattatatttaaaacaacttatgagaagataggaccccagcttaaagacttaatcccttgcactcagctcatatatggtttctccaatttgagtgttacaccacttatataaatccgcctaccacttactgttggacaagctccgaggagcatagctataatggcacaattattgataattgatgtccc

SEQ ID NO: 270730 - DNA, 748 bp, Cannabis indica
tcagagtgcaaaaattgcgataaaatttgccccaaagtctgtacgggactttcaaaattgcgtgtagacttcatccgagctgctgttgcctttggatggggacgtgtcaagcgcgactgttcgagactcgatgtgaggctgactgagcgtcccttcgagttttggctaataaatgctcttacaattaatatttcaaaatccaattttctctcaccacggctgatggctgcacttgattatttttgatttcccatatttgcttttaaggagggaaactgaggcgtctaaggtttctttgaaatgattacctcttttcgtgacttgcctataaatatcaaccaacattggcacataaactcattttcaccatccttccttgctcagtgagtttagagcaaaaagagaggttcttggcttcaagtttgctggaatgccttcatcgaaactgcttgttggattgatgttgtttgaacccagacatctgactcttgattaagtttttgattccctttatgcttatttttgcatgtttacatttcgaatgcaccttcgactttgctgtagaaaatatttaggaaaccctaggttcaaaaactctacgcttcttctttgtcataacttcatgtgattttacagtccataatgcttgttttttgaactgtgtaagtcagtctttcatcttgcttattctaagcttcatgaagttttttttccctaacttgagaaaatttcaaactccttgagtttt

SEQ ID NO: 270731 - DNA, 611 bp, Cannabis indica
gacaactcactttttatcaaaaataccaatactttctttctagctatcttaatctatgtcgatgacataattgtagctagcaacaatgacatggcgattactcatttcaaaatctttctagataaacaattcaaacttaaagacataggcagtctaaatttttttcttggacttgaaattggtcgcacaaagaatggaatttccatatctcaacggccatttactctccaattactcacggatacaagttatcttggcgctaagcctgcatcaacacctatgaaaactaatctcaagcttagcaaagataaaggcaagccattgcccgaccctacaatctatagaagccttataggcaaattgatttatctaaccgtaacacggcttgacattacttacgccgtgaatcacctaagtcaatttttatcttctcctcgagcacctcatctccaagctgctcatagaatacttcaatacctcaagaggactcctggacagggcatttttttccctgccacctccactccccaactatctgcctatgctgagaccaatctgtctccaaccaacgtttagttatccttcttcgccgatgcagattggggagcttg

SEQ ID NO: 270732 - DNA, 730 bp, Cannabis indica
gaatgtcgagattagtcgggatcccaaaatacccccttagtgccattttatgacttttagtgtgggaggggcaaaatggtcattttgccccatttgtcttttgtcttttgtgagtttggattttagtttataattagattttattattattatctgattttaattcaagtttattttatttcattcattttacaaaattagaaagaaggaaaaaagggaaaggctttctctcttgcaactctctctttctctctctcgaaaaatcctagggcagctagggttctttgttttcttcttcaaattgctgtaatttctagcaagttcttagtgattccaagacaaggtaagctctagcactttcctctctagttttcttgaatttaaagaaatggaatttttgcatgaattgatagttttgctgttgtagttgttgtagttatttgttattgttttcagaggtttagttatggtttattatgttgatttaagtaggttttggtagttgttggaaggttaaaccaagttttgagtttaagaactcaaacttggagctttaatggtgaaattcaaatctgagctttgattgttgttttgttgcttggaatatgtttattggggtataatatgcaggtctggaaagtttggttgggttaggaaacaatttggttaggggtttgaatttttgttggttttctgggtaaaaatggttaaccggttttacactgcttgt

SEQ ID NO: 270733 - DNA, 566 bp, Cannabis indica
aaaaagaaaaaaagaattgtcaaaagatgcttaaccaatcgtttagcttattacctttttatttataatgaaaagccagaattgaatacaagttgcttgaaacataaaataacagaacaagagtaaaatgtttaactgctaactaactgatcagttaagtggtttataaatataagttgaattttttgacttgcaaatctttgtgtttgatttgggtgtcttcacttttcttcaaataggccattaattgaataattaataatgacttagtttgaaaactaagacactttcatcatcgccataatacgtgctatacacttatatatattatattttctttatatatgattgtgtttgagatcatgtttttctactttttgaccattactttaccacattcctgatattaatttaatatattttggtagtggtgttctctttttctttttcctttttagccttaagctagctgatataaaagtacatagtgattatatgtacatagtgatataaaagtacatagtaatatatggaggcctaatatgattattttcctaatattaatt

SEQ ID NO: 270734 - DNA, 839 bp, Cannabis indica
cttggacctaactgggaaggaccgtgtcaagtggtcaaagttctcaaatccggagcatacaaattaggtaagtataatgaaaaactgcaactcattttagtaccacggttgtggaatgggaacatttaagaaaatactaccaataaagtaccaggtcggacgaccacactaagtactgaatgaacatttactcttaagtgaatggcctgtgttatagtgagatttctctcacctagaaactcgagaccagactcctgttcggaggacatgtgtattcagttttccaagaaaagctgaaatgtccacgagagattcctcgagtttaaacctcgcttgagttagaatcagcgagatgatgcgaaaatgaccaaagtctagtcgcattcgcattatgtaggaccaaggaacgaatttaactcgcatgtaccaggatatgtgcgagtatcccctcgaacctcctgcgaaaacatagagatcaactctctatgatgcgagctagtctcgatgacccaacaacctcgataaaccaatataaacttgcgtatctaggttctatcagctcgttatgcgatgtccgtgagtgcgactatgcaagaacgcagacatcctagacttaactaaatattaggtatatcctaatcccgcgagcttataccagaatatgaacagccaactcgaacattagaagtcgcatacgttgctgtatttagtgaataaaaactattattcatttattgatgtttacgtttttagtttaattactgtaaatcaatgtataaacggattgataatgaatgcaatccttgtgtaactaactggacacttgctttgtatataaa

SEQ ID NO: 270735 - DNA, 438 bp, Cannabis indica
tgtcgacatggggtcgatatatcacacaaaaataacagcataaagtgtcgacaacatatcgacatacaatcgatatgttgtcgacattctaataaaatcaacacaacatagcatcacacaatattatcgacattgtgtcgataaatcaacacaacacatcatcacacaatattatcgatattgtgtcgacatcatgtcgacatggggtcgatatatcacacagaaaataacagcataaagtgtcgacaacatatcgacatacaatcgacatgttgtcgacaacgaaataaaatcaatgaatttacattgtgtcgacaacgtatcgacatacaatccacatatggtcgacaaataaatttaaacatcagatcaaaattttttcaactcaacatatgtcgacattctatcgacacaccatcgacatcctgtcgatacact

SEQ ID NO: 270736 - DNA, 567 bp, Cannabis indica
attgcctcgtatctttacatttgaacttaatatgtttgttatttgcaattttaatcacaacttaaacaattatactttgatcaaattaagatacttcaagtaagcatttctattgatctcgtttttcctttgagattgattaagtagttataatctactatgtgtgtatgcgagcagttatattctgctatgctttctattagcgagtattcttatcagttctactttgcggagtaattataatctgttgtttataatttgataagaaaatttaaacatactttgaataattcattttatgaattacttcgtacattttttgattgcttatatgaatagttaggccttctattcatatgtttaggttaagtattatttttcaaggtatctccgtacctcgttcataatacatgcttgaataatgcgagtcgttagatattcagcctcgcatgtagcttaatgttgtttttatgagttattctcatttacaactgctactttgattttcctttctggagagaaaggtttgatttttgactttatattgtccatagacaactttaatca

SEQ ID NO: 270737 - DNA, 526 bp, Cannabis indica
taatacccttatataactataggtattttaaggtactaaaaaatataaaggaccatttgactagtacggggggctactatttacaaccccatagaatgataaatacacctatattaaaaaaatataaacttaaataattttaaaaatattcttaatattatttttttaaatatttttcttcaaattattttatgctaatttcaatacttattttgagttcattttcataatttttttcaactcatgtatatataattttatatattttatataaattaaaaattataaaaatggagtgtgtttaaaaattttgagagtgcaaataaaatttcccttgctatattattttcaaaaggggacattaaagcttagtaaaaaggaataaatggccattctcatgacactttaatacctaataacccaccattattaaaatgatcattttatttgaatcaaatttcaaataacaatacaatataagttgatattgaggattttaatcgaacagttgtaacattaaattttg

SEQ ID NO: 270738 - DNA, 1031 bp, Cannabis indica
cgtgatctgacagaaccactatatccctttatcttctttatatttccagttttcatcaagcatttacgatcccagttcgagtactcgccgttctaggttgaatactcgcacttgttcttcatattattattattattattattattattattattattattattggtgttgcaaaattcgctcgacaatatttggcgccgtctgtgggaaccgagaaatactttcttgctaatttagaaaagaatcataatggctggaaaccaagcgaacgggggtcttaacaacgaatccattaacattggaatgatgaacgttccactgtcagaaggtagagtacctcccgtagatgtcatcaacggcggagtagcttcgcgccctgcaggccaaagtggatggaccgaacagggctcgacgtcctcctcgagcacccactgctcgcacggaaaatcctcaggtaagtaactctagacggcgtaataaccgtactcgcagggaacgaagggccaatccagaaggactcgacttgaatgaaccaacatcgagagaccaatccacgagacatcccaatcaggaggcacagactgaggaagaccctgaatgacgtaatcctcgcagcaggcctgagtcgtgagacaacgacatcgaattcgcctcctcatcctcgcatggtcgcacacccagcaggtacactagatcaggttcggtggaaacactgcaaggaggacgatatcaagttcacatgggtgatctacgtgatcaccttcacgctgtcttcagggcgcactcccagacgcctcgtgattttgaatagccccgtgatccccgaatgggcgatcaaggcataaataatcgcgtcaatccgcctaccgcactagctgcgactactggggttaatatcccagcaaacatcaccgcgatggtaacaacgcctgcggcagcaccagtcactgctcccttagctgggaatatcgaccaaggtatgcttgtaatgaccgctctagtaatttggattagtaagggcaattagcact

SEQ ID NO: 270739 - DNA, 678 bp, Cannabis indica
gtctggttccatgtttgggtctgagttcaggttcgggttcgggtcccgagtccagtattgggttgggatcctggtgcggctcccaattcggctctaggtctaatttaaagtccgggtcctggtccggttacagttctggatctaggtccaatttcaattaggattccaagtccaagttctagttccagtcccggtcaacatccggctttggttctaattttgggtcacaaggtacgggttcgggtccaattttgggtttgagacttggttcaagtcggggtgtggatcggggtccttgttatggtttcggtccagggctgggtcccaaatccagataccgactacgggttttgtccaagcccttggtccatattcggatcccaatctcgggtccctgtctagttccatttctggtgacgggtcacgagtttggtcctagaatcaagttaaggtctgggtcgggtactaggtcccggtcctagttctgtttcccaggtccctatcctaattctaggtccacgtcccggttattatgtgggcttgggtcccggtctaggttcgggtttgagtcctaatctcggctcgggtttaggtctctgtctaggttttgatctgtattcgggtttaggtgtaggtcctggtcctgttcctagtcctagttcggttctagttccattt

SEQ ID NO: 270740 - DNA, 383 bp, Cannabis indica
taaaataatttccaacatgagcaccaccaacagttatgttgggttcttcatttcctatttttgggttctggctaccttcaagttgagtccttcttgaacgtgttgaccgtttattttggccaccttcatgttggttccttcttgaacgagtggaccatgtggatcttgaattgggaggattctgtgagcccattggctcttttccagtacggtgagtagtctctttaggatgagtatcaacattttctctgttaccagccatggagtaaagatttttttttttggttaggagggttttttctgtagctttttttacgtaggctctcaatgaatgtaccaactgtaacgtgattttgtcatcgatataagcctattttcgtgat

SEQ ID NO: 270741 - DNA, 276 bp, Cannabis indica
taattgtattatagttgtcacgagattatttttcttagtttattttttgtttttttttttattagtttatttatggttgtcgtgatgttaatttcttattattttttagttattttcttactttttgttgagcaaaagtgtatttttataattttaaaactttacaagcatatttttgtaaggataaatagcggcataaatatcaaaattttaagtttgtaagcgacataaactcaatatttaattttagtggcatattaagtacctaatgtttgt

SEQ ID NO: 270742 - DNA, 543 bp, Cannabis indica
atttgggagaatgatttcatattctagtgactgaggctcttcttgtggttgtggctgtggctgtgactgtgtatctggtgtcggcattccaggatcttctaggagtctcattatggtcttcaactgacccataatctctgtctgtcctcttaacagagtggtctggccttccctcaaagcaatctgctgtctctccacagtctccaaccttgccaaaatggaagggtatactggttcgcgagcctctgaggtgttgggaatagatgctgataggcaaaggggaggatcctctgatgctgcagatggggcaacaccagactcatctagtagtgaaaaaggtgcacatggtggagacagtggatgtggtgtagagtctctgaatattcgggctgcatctactcgttcttccaatgtcgaggcaagctttttggcttggcttcgcaagcatcctgtgttgttgcccatcatcacccaacacaagttcctctaagtcaacaataaagcgcctgatcgccagtgatgcaactcacaaactcaatctca

SEQ ID NO: 270743 - DNA, 557 bp, Cannabis indica
gtaattaagccacaatttcagggaaatattgttataagatttgaatttgaatgtaattaactgccaacctatgttattataaataggtgcagaatgtacagaaaatggggacgaaaaatccttgagagaaaaataagaaccctagttctgtatcagaaaagtctgaataagattgacttgtggactatgcagagttaattgcaaaactgcgtaaaaaacttggtgttacttttacttcttttatttttcatttattgtgctaaacctatcacgaaattaggctcattatcgttaacaaaaacctgcgttaacacttttaacatagagattatcaatgtcaatatctatgacttacacactcactcaattatgctaccgagttcccatgatgtaagtatgagctagtctttagggtaagctagtaacgaacaagtcaaaaaactcaaataacacaattaggccccactagttctcccatgaaaatttttaataaacaaataaatgaaaatcaataccattaattaattctcatcgctttaagtaaacatgctattata

SEQ ID NO: 270744 - DNA, 649 bp, Cannabis indica
aaaaattcaaaaatataattaatttaatataaataattaaatttaagtttgttcatttaaaaaaaagtttcttaaattttttttttctttaatcaaaattttttaaaaaaactttctcatatttattaattaattaataattatttatataaattatattaatttataatttacataaattttttaataaaaatttactttatttataattaattacatatcatgaaaataattacaaaataacaaaaaattattaaaatatttaaatacaaaattttttattttcaaacacaattgtttaaataattaaactaattttataattatataaatttattaaaatttggtacttattatttaagaataatcacactaaatatataattttaatttttttttctatttataattaaaaatattaaactaaactttttaattttttaattcctaaagttttactaattacaaaactaaaattattataatcacatacaatcataactaaaacaatataacattactttaaataacgaaaaataaaaatacactaacaatattaatcacaaataataatccaacacttaaaaaaatatttaacaacacaaattatatatattatatatgaaaatacataatatacaaatatata

SEQ ID NO: 270745 - DNA, 913 bp, Cannabis indica
tggacaattgtggataggaaattcaagtatcatatattatatattaatataattgttattatcaaataatttgtggtggtatgatagaataatatataagatattgcaaagatttggaactgtacatgttactacgatcctatcatgcatctctatttttaatacatgatatgtttgtaccttatataaatgtcataacttttacattttcaaacttaattggccaaaccgcatatttatattatatgaaatgatatgatatgaaattatgggcattaattctgctttgaaatcaccatctactctcttctctctatgaataccaaactataacagcagtacccagaatcaacagagaagaaaacttctttacttttcttcttggttgttctttttttctttctttttgcacaaaaacagctaggtcgtacttttatttgcagtagtaattaaattatagtttgtttcatttttacaacactacctcaacttatcttcacgaatctaccctgcaaattgttgaagaaaaaaaaaaacattattacttgaataaaaaggatcaaaagtaattgtatatgtcatatatgaccgaataccaagttctttagccataacttaactagcataatgtggcatgcatcaaacaatagatgatcattagaatcacaattttacaatggattcttccgcaactttctcctaatatttatttgatttattcaattatattcttattctcattcatattccatctgcaatgcattcatataggggatatgttgagaaatatctcttttttagtatttattaataaaaaatatttatattatatttcattaaaatctatccacttttatagtaacttgcctaatatatcttttctctctacttaagtgtaagcacataatttaat

SEQ ID NO: 270746 - DNA, 968 bp, Cannabis indica
aatgagaaatcgaagcatattaacataaagtacctgtataatctcgaaataaaaacagcataaccttaaaatataagcagcataacctcaaaatggaacttttataaaatagaaacagtataatctcagaatagaaacagcataacctcaaaatgtatacaacttttattaaaataaaaaaaaaatataaaaagtcgttaaagtaaaaaaaatatagtatacatagcaattctccaataagtaacctatcttttaatttattaaaaatctcacactcagctaattagtgaagtctcaaaattataatcccatcttagttccacctaaaaaaaaaaaacaaacgttcttgcttgaaaaatattgataagtaacttgtatcaaaagcaacatttataggaaactttttcaaaaataacttaatcaaaacttaataatacagatttaacgacaacatctttcttaataatatttcataattataattaattaaaatcatgaggtcttctattattagaaactgaactaactgttatattattttatataatataatatttagattaaataattaagttgtaaataattaagtgtgacaaagtattaattttgtcaaattgtaacatacattatggagttacaaaatgtatgtagaatgatcacaaaataggagttgcaaatcctttaaattgatgatcacttgaatatgtaactctcatctctttttcactcttaaattagtaaaagatgttactaattatttatgaatgtgaatgaatgatagctattaaaaatatagttgttggagacttgatttattcatttataaggtgtataaatggttcaaaatcaagtgggaatgatttggaacactttggaaaagaattggccaaagctgaaaaaatggtaactagtaactagttactgtttttttcagcatattattgcccacgtttttgaaagtttgagag

SEQ ID NO: 270747 - DNA, 521 bp, Cannabis indica
actaaaggataaaaaagtaattagaaagataaaacgataatttgaccaaaactaattacgaaccaaaacaaggagggataatcactggaattaattattataaatggacattgtagttgttatttgcgttttttttataagggacatgtggacttcaagtcaacattcaaagcccaccagcagacccaaagaagataacttgggccaagtccaagtctagtaatagatactgacatattaattatatattactcattatattatatatcctattttgaaatcataagattttattatttatattattaatgtaactatctatttaacttttaaaaattaaattatcattttaactatcattaactaaaagaaaaagagaaaaagaagttgaaagaataaagttgtacccacaaatttcatgaaaaaaaaataatgtaatagtactaaaagataaatctaattgtcaaaactaagtaaaaaaaattgtaatacaaaaacatattgaggaattgatattattt

SEQ ID NO: 270748 - DNA, 553 bp, Cannabis indica
atcagacggaggtttcaatcagacgaaataactattagcaaaatatttatgcagctgtaatgcacctattgtgaaacattaaaaattaaaacagtgtttccacggaactctatctacatgtctctttatgatttaatatgaaaaaatttaccatttgaaatttggaaaacaacgaaaatacaccaggataataaattttatagtattgatgtaattttttttggattatacttgagttggattgtttgggaactccagataaactttttaagatctgccttttcatggatttgaagattcaagtcaagacattagttttatgctaattaaactggattttcagttgcattttagtttcgtagtagtttttctatactttttttatgaattcgtaacagcccctatattaattgattttagtcgtcttctcaggtgaagttgccagaattgatggtggttctctttctggttgaatttttatttcagttgcgttgggttgctgcgtggttgcgcgatagttacccagaaaacatggatcctgagttgaaggtgt

SEQ ID NO: 270749 - DNA, 757 bp, Cannabis indica
ataattttttttagtattgcatattattatattgtaacaaaaatgaataaatatattagatcattaaatatatacagcagtatttgatatatcgtagtactgaaaactaatataccgtagtgtaggattttaccactttaacctgcaccaacaaaacacataatatcagtgtccaaggtcaattttgacctttccttagtctaatgaattttagacaacaaacggtagcgttttaaccctacgacactaatccctgtgtcgttttatccctgagcttaaagactcctcaagaaaagtctagaagccctaatactcgaacacaactcacacttagcctctcagagcacgaaacccaaaatcacacccacacacacacaaaattagttttagcaattgaaaaacaagagtaagggagagaaaacaccagaaattattcagagttcacccaaaatctgggctacatctctgtcaagctcatctcagagatctagcttgatatccactacaaaaaatgtctatttataagttttggagcttcctgtcacataagaacgaccaggtaaactcgatttctcttttgtacaatttctgtgtttgttttctttttgattttgttctcgatctaactcaatttcttgttgttgtgcatgtacttccttccctctgattcctcaccacgagaactccattctcgtctctggatcttggagctgaggtcttcaaagaactagggtttacttcttctctctctctctct

SEQ ID NO: 270750 - DNA, 750 bp, Cannabis indica
gtttgatcaacttaaggggaagatggtcttttccaagatcgatctttttcttagaatatcatcagctgagaatttcagaggaagatatctcaaaaaactgcgttccgtattcggtatcgacattatgaattcctagtgatatcttttggaatcaccaatgccctgatagcattcatggatcttatacatcgggtgtttaaagattacctggatagatgtgtgatcgtggttatctatgacattttggtatattctgaatcaaaagaagagcatgagttgcatcttagagtttttttgcaacggttatgggaccataagttgtatgctaaattcaaaaagtgtgaatttttgttatctcgtgtctctttcttggggcacatactcgataaagatggcatcatggtggatccggccaaaattaaagttgttcgggattagccaacaccaaaattagctactgaggttagaagatttttgggatttgctaggtataatcgtcggttcatttgagggttttttcaaagattgttgtacccttaacagagctgacccgaaagaacttgaagtttgtttggactgatcggtgtgagaaaatttttttggagttaaagcaacacttgattaccgctccagaattaactcttccttcagataaggaaaatttaatggtttattgtgatgcctcgggacagggtctcagctgtgtccttatgcaagctggaaaggtaatagcctatgcttctcggcagt

SEQ ID NO: 270751 - DNA, 608 bp, Cannabis indica
tgtacatttgcatgtatgattgcattatcattctttaatgttgtaactgacatgtgtacttataagttgttaattctttaataattaattttatgttatgattatctttcttaggattaattttgtattatttgacctgggttttttatatgggtctggaatgagatttattttctctcaatactatttttatcttactcaactgtgtccaaacttattaggctaagtcatggtcgggttttcactttagcttggttcttggtttgtctaggactgccctggggcataactgttgtgacaaaaaatggtacgttttacatttatcaacttgcaagcgcatgactctttattgtagtgtaaagattgggaaatataagatcgaatccattgaaattgcgtgagatcgaagaaaatacttatttagtctaagctattaaaactctaacctagttccaaaaatagtgaggcttttgggtaacaaaaaaaaagtattttaacggtaaaaatgacagtaacagatattttcagtgatatttgagaatattattaagggttcaaaatccacttaagtgtatataaattttttttatgtttatattagttctcat

SEQ ID NO: 270752 - DNA, 714 bp, Cannabis indica
ccaatcataacacatgattaacatataagcatattattaccaatttaaatttgttattatagcaactttttgagtaaatatctatctatcactataaaagatgaagatctttcaagatcaacaacctaacaaaaagttcttaaagacctaacaatggacatcatagaaacctaaatttagactagaagaaagagtaatttcaaaactaattataggaataagaataaacatacccaaaattataatacctttgtactctttgttgcttgaagaaaagtatatcaccataaagttgatcattagttataagatgtatcaagaatgggtgggttaacatgagcataatataaattatataatgattaccataatttatctaagataatgacacttataaataatcatgtatgaatcaacatgatataattagtaaaaagattcgattggggcatatcagtattaagagaaatagattataattctaaatataaataaaatacatcaaacagacttagataatttgacggtcgaataggcaacggttatagattaattagaatatacctcttaaagactattaaaacatcctcaaaactttttgtatgttctatcctttaatccagatatgcaatttgaattcacaccagtgtcttccaaatcgatccaccacacataagaaatagtgaagagaaaaaaaataatttcatttttccc

SEQ ID NO: 270753 - DNA, 1423 bp, Cannabis indica
ctcagtgcctctgatcggagctggggacaatccctcttatagtgtccggggatgccacactgaaagcatccctgacctctgcactcacccagatggtcccttttacaactggggcactctgggcacaaaaactgggtctcagcaccaccttgacggctgtctctactctggttcccccggaacctcttgttctgccccgaaccaccggatggagtggatgttctcctcttctggtccatggccgaaccactacctcccttgctaaagcctgatgtaggaggggtaggagccctgccactcactggagtactagccgactccgacatacatccaactgcgccctcagctcgcagtgccttctccaccatctcagcataggtggtcttgtcgtcggtggtgatcataaggtcatgtttgatcttcacatttaatccgtccagatacttttccttcttgctgaaatcggttggcactattcccgaggccaacctcgccaaccgatcgaactgggtggtatactcagtcacgctcatgttttcccgctgggtcaggtgggtgaactcttttctcttggcacttctaactgcctcattataatactttgcgttgaagagttcctggaacctttcccaggtcatggtggtgacatcatgaatttgagacaccatgtcccaccagactagagcgtcttcttggaactggaaggtggcacacaccaccctgtcatttccggtgacacccataaagttcagtatcttggttatcaccgttagccactgctcgactttcatgacatccggacctcccagaaaaaatggaggtgcttgcttccgaaacctttcatacaagggttccattctatttgccgctaccactatctcggcctgggcaacaggggcgggtgccactggaacttctggcacaggcactgcaggagccccctgctgcctcaatctctatatctctagatcttgttcctctatcctggcttgcatttcaccaaacctagtctcccaattcttggcttcctgttcggcttgggcagcctgggcagcctgggcagcctgtggcgggttatcatcaccccgaccacgggccctgcccctgggacctctaccacggcccctagcatgcaggggaaactgggctccctaaccctgatttgaccctactgagttgccctggctcctggtattccgcctggcttccatctactctgaacagcctgcgaaaccaagagttggcacatcaggtcatgatcaaagagagcttactaacgccgcttaattttgaatattaaaaacatgtgcctattctactatcaggctactaacatgcttcctatcaggcttttcttatttcataataatttcaataagctactaaagcaataaaatcttactgaaccgtagaacgagctaac

SEQ ID NO: 270754 - DNA, 663 bp, Cannabis indica
tatttttgtacatatggtatttgaagttttccgcattagactctttgaagggaattttagtagacttgaatgaatttaaacatttatagctaatattttcactaattaaaaatacatacataatgataatataatgaaatgatatattggacactatcataatgtggtcgaactaggtagcaatatttcttgtttaagctataaatttgcatgttctttctgtctttattttgattattgcttactacgtacaacacctaagtaacaattagacaagacaaaatctgttttcttgcctgtcataccaaagaatgataaattgtaaggtacaagaaaacagaagacaaaatctgaactgaaaatccatgctaggaataagtgaagttaaaataaacctgagattcgcaatacagcccggcatacaaagaagcatagaaatattcattctctgatcggccatttgtaaatacattctcttgtgtatccattacaatattatccaattttattcatatgtacaaaataattttatccaattcttcgaaattcaaaaaatttcaaatgtagatttgaactatagtattcaatctcatgaatcaaacatgacataattaatatagaggcgtaaatactattacacattaaaaaataaaaatataattt

SEQ ID NO: 270755 - DNA, 689 bp, Cannabis indica
attttcttaatggaaatatcagagttctctcatcttgcttgatattgtgttgtgttcaaaaaatggaataattaatttgtttaggctatatatgtttgatagtttgatttttagaagttttttttttatttttacacttttaaaattagtttttttttttttttttgtcatttttacgaaattctaaatagaaactcttactgttacttgcgctgcaacttaaatcgcaacaaaaaatcgtatagaaagccctattgcaactagcgctgcaaccactttagaaacccaagaccgtaaatttgaaaaaaaaaattaaaaaaaataatatataagttaatttaccctaaaaaaaaataagtggttaagtgtcattttttttaagaaaattaagtgtcattattaatatgcatagccgttattttaattatagtagttatgattttaaaatataaatatatacatatataatatctgggagggttcaggggcatatctatttggcgtaagttgaaaaatagtacttttattaatcaattaattaaatttatctctaattttatatttaattgaaacatacatctttttatatgtattgtacctaaaatattttgaaaataaaaaattggtataatatttaaataataaggtaaaaataataaactttataaaagagagtaaaaataaaagag

SEQ ID NO: 270756 - DNA, 576 bp, Cannabis indica
aatttactgacacaaacataacctgtgatacaaaataatttataaaatacggacacgagcagaacttgcaaaatctcatatcatgttcgtattaaaccttacttgttgtgaccgaaattactactcattgattattattttctaaaaaaaataaaatcatttttatattttgtctttttgaggtaataataaaaatgtcaataacacaatatgtcaaaaaaaaaaaatctaaataacaaatgataaaattagatggtaataatagtataaccctttttaatttaactcaactcatttttactttactttttaaattccatcgttaataccctctttttaaatcattatacccattatactcctatttcatacctctttctaatttttatttctctaaaacaaaattattcagatgaaaaacatatattatacaatatatattgatattaaagacgtttaagtccacaaaaataataataatcaagaaaaagaaaatcaaaagaaatatatgacaacacgtcaatatttttcttatatatatttttttatttccaccatttattatgaagacgattc

SEQ ID NO: 270757 - DNA, 557 bp, Cannabis indica
catagtgtgtaagactgtgaagaatctgaacaactgaaggagtttcgggctcaaatcttgatgatactatacgacagaaaagatacaagggttagagatctgagcgaaatgagtcatttaattccgctgcaaccaatgtaaggtttctcataccttttatgtgtttatttttcatcgttttagagatttatatttaggatgttaaaaacatacttgtttgtaaatctagatcctggtaaaagatattctaacaggtacatgccacatgtgagctcactcggccccactccatcatcaaggatttccacattaacatcaagacaccttctctcctattttgtgacaacataacaacaattcatattgctgaaaaccctgtctaccacgagagaacaaaacatgttggaatcgattgtcacatagttcgggaaaaaaataaacaatggcagcatcaagatgaatcatgtccttctaaaaccaacttggccgacatcctcaccaaacctctctaccccctctctttttcacgacattgtatccaagatgggtgtaaaaaa

SEQ ID NO: 270758 - DNA, 533 bp, Cannabis indica
gaaacttcgaggtcaaggaataatctggtttcatcttatgaacaatgcgtgttagtttgaatctcattgtgaataaatgataatattcgaattataaactatatgattattattattgcttttcttgctgagtccttgtgactcacgggtgttatatgatgcaggtaagggcaaggaaaagttcgagcgtccgtgaggtgactatcttctccgtaatgtacatattgacatcaccggcctgtgtaccggatttccaggagttatcttgagctgtatctactttgtattttggttttatatttttgaggcgtcatcgtatatagttcttctataaaactctttataatagggattcccagaacacgctttttatgccgttataatgtctattttttgtatttcattttagttaagtttttaatattatcacggtttctaataattaattaatcaattagtattaaactagtttataaaatcatacatgcggcgtctcaataaattagggcgttacagattcactcgttaaagtt

SEQ ID NO: 270759 - DNA, 877 bp, Cannabis indica
acttatgtttattcaaaaaaaaaattgaatttgagagacttttcatacaaagcaaagagagtacatttttgaaattcataaatacaaatacaaaattatttttgaaaataccgtaaacattacttttatctattttatcaaatatgccaatagagaattttacagaatgtaatggaataaaagatacattgaccaaaatattcctattaattttatttttataattataaatatttagggcgatgtttggttggaaagaatgaaaataaaagaattgtaataagaataggaataagaataagaatggaatgtaatcaaatttaaaatgcataaaaaataataaaaaacattattcaaattttcttatcttttatcgaaatggtcattcatttctttgtaaaatagaatagtcatctcatgaaaatgatggaaaaatcattacattcgcataacattccaaaactttaaaaatgaaactaaacaaaatgaaataaaataaaaaaaaataataattttttttaattttctaatttcatttaacttactttaagtttttaggagtagaaaatagaattaaaatatttaatttgaattgatctcaattgatacaagatagctccacagagcttatatgctactgaagcaaaaaatacaaaaagcagtaacaaacaataacaacaaaccagcaactgtatcaacaacctttgtaactaacaaactcaaccaattacaataaatcaactgtcaacactccccctcaagatggagagtagacatcaatcaatcccatcttgtctttaaggttcttaaactatccaggaaacagagctttagttagtagatttgcgatttggtctttggttgagatgtgagctgt

SEQ ID NO: 270760 - DNA, 864 bp, Cannabis indica
aaaaaattgaaaactttttaaaaggtcctcgaccaaacctttttgacgaaagaggggtcgaattgttataactccctgaccaaacctttttgacagaagaggggtcaaatcgttataacgccttgatcaaatctttctgacgagaaagggatcaaacaactgtaatttttggtttaaaacctattttacgagaaaggaaaatcaaaagttacgattagcgcataaagctgaatactaagggcttctgcaaagggaaagtaataaacgagacgtcaaagtttcttgaaaaaatacttaaacctaacacgtgggtagaaggactaactactcatgtaagcaacgaatatatatacaagatgacaagttcattaaaaatttatttgagtttgcttaaaataagatcattttttatgatcgcgaggttgaatcaatgatggctcgcagattgagggttggacagataagctgctgcgcgtaaagtaggacattaactactttgcatcagaggaaaagatgagcaatgcaaacccctaataaactttatgcatgtgattgtttaaattgtgaaagaaacgcaagcaaacattcacacattaaagtttaaacttaaaggcattaaaaaggcaaagttggccatccaaccttgcaattctgtctttataaaaaaaaaagggccaccaggggcaaaccattgtcttggccaaagggccattttctaaaagagaaaggaagataaataaattttttagtctacatgctaggggacttggatagatcttcttcttcttcttcctcgacctggccatcttcttcctccatcctggtgttttcgtaaagagctaaagtttcctcttcctgctcctc

SEQ ID NO: 270761 - DNA, 573 bp, Cannabis indica
ttttatgaatattttatgaataattttatgaagttttatcaaaatttaatgtgctaaataaaatattcaacctatctcaatgtttgaatatttctaaatatatctagtactataaaaggaatttatgtataacatttcaatcatacaaatctaaaattatttttgataaaaataaatttgccaaaataagtacaaattaatacaaataatttatgataattaaatgcaaattcctaaatatgaaattaatggaaattttttcaaaatttattaatttagacaataaattacataaatttggtaatatataattaaatgtacaattatataaattagcacaattattacatgcttaaataaatcatgtaatgaattaccaaattaaaataaattttcactttcaatttatactaaatatcatattaattctaaatatatgtattaaataaatacaaattattgactaaattaaaacaaaataggaaaataattaatattccaaataaataaaaaattataaaaattcgaaatttttcattttttttttttgaaaatgacactgcctaaatgaca

SEQ ID NO: 270762 - DNA, 1193 bp, Cannabis indica
ggcagcaatgccccttgcttggcgtgagcaccagactaggcgcacattcccctttcagggtttgtggctcggttgttgtgggtgggaatgtaatagtccaattcgcccaggtagccatcctggtcgagatcccgcaagcgtgcctcggttaccttggacgcagggctcacacacctgacacccaaagtaccttgccttctatgaggaaccgcagcagtaagttcctcactggcataatccatgccctcaaccagaacgtcgccttcagcatcaattggctccctggcctcattttatcccccatagtttggaggtgcaacctcctcttcttcctccgccttggagggatttctaggaagaacatcgtcctgctcctcaatctcctagacctcagcgtccacttcatgatcctcctcctcctggacagatggatcttgttcggcgctgggtaaggtggcgtgcctggccactggagggtcagatgcgttgagtctacgcattgtcttttttgtgcgagccatcatcctatggctggacagaagacttaagctagattgcctatcactcgaagaagttgggctagaacgaagacgagggtgatcctcgtgcaagagttgaaatagagcatgggcaatttggtgttcgcttccccaaaactcacatgggttcttctacaaaagacaacacgcaagatgagtgtttggtcgagatatcgaacattaaaataggaaaatataccgaccagaactactcaacagattaaagaataagaatatccaacgaaaagtcaaaactcaggaagtttgaaatcttcgcgagttagggaagaaaatttcatgaagcttagaataagcaaaatgaaagacaggaattatgcagttcaaaaagcaagcattacgaacgatgaaatcgcatgaatcgttacaaaggaaaattacagagtttctaaaatttagggtttcctacatatcttctacagcaaagtcgaaggtgcattcagaaagtaaatgtgcaaagtaaacataaaagaaatcgagaacatactcaaggaacgaatatctggattcaagtcatgccaagccaaacgagcaattttgatgaaagcacttcagcagacttgaagccaaaaacctctcttttcgctctgaacttcttagcaaggaaggttggtgaaaatgagtttgtggacaaat

SEQ ID NO: 270763 - DNA, 504 bp, Cannabis indica
gtaaaataatttccaacattggtttcatacattctcaaaatatacaaccatttcttcaaatataacttgttcgtcaaggttttcttcaaatagatttctaccagtctattccacaagcaactagtagtatcctcatgcgaaatttctcaaagaacttcatcccctaggcttaaactactaaaagggaattttttgaccatttaaaatattcaggtaaagttttatcattgggtcctaaaactgacgcctataccaccgacgtaaaatgtgatggaatagtcatcagttccaaacggtcactaaggaggaaaatgtgattatgtgaaagggtcgctaagcaatatgcaactattttcaaaaatcactacccctctacgtattggtttttaactgacacattgaaaaaaatcagttcttggacacatgaggccaaatttgagaaccatcaaaactcaaccattacagctttgaacaaccaccatgacaccaccagccaccgtcatc

SEQ ID NO: 270764 - DNA, 585 bp, Cannabis indica
taaaataataaaatattatttatgtataataaaataataataaaacaaatcctactaatatttgaactgatattaaatattctacaatcacaccctattttttaattttttatttaataaaataataataaaacaaatcctactaatatttgaactgatattaatattctacaatcacaccccatttaaaaagaaaacgtcacttgaatcacctctgccgtcaactaaatcagggttaaaagccatcattgttacaacctcttactacgcacaaaacttttctaaaacaatcgagaaaagtagagcctttttaggcacacaagtcaaagtccttacaatcaaaatcccttgtagcgatgttggattacctgaagggatcgagaaaaaaacactgaaaataattagtttctctgcgatgcggtcaatccaattgatgtcaaaatatattttgtgggaaacttctaaatatattttgataatccaattgatgtcaatcccttcaggtaatccaatattaaagtttctctgcgatgcggtcaatgtttatcatatatacatatctagatacacatacatatatatatg

SEQ ID NO: 270765 - DNA, 757 bp, Cannabis indica
gtattattaggatgttaattacttacattacgttacgttatactacgttgttgcgtaacgttataatgattttttgtgtttttttgttctcaataagtaccaaacacttctttttggatatttagcttaaagctatgactcactactaaataaaataaaaaaataataagtattattatcaaatagctccattaataactaagcctaaagaaatatatataaccaaaataaataaattatatataaaaaaaaaaagaatttacatattgctccttccttgttatgtgtttacaatgtttttcccatacatacaactagtaattttcttctcttcctttaacttcatttgaggtcacttttatcaaattttcatatagaagtgatacattttggagtcaaagatttactttttatatatatgttgaagttattgaataattaaaaaaaatattgatatatgccacactttttttttaaaggttattaacaagactttgttatacagattgtatttttaaaataggcatttatgtctccatgacttctcgctgatattgtttttggaagcccaattaggcctagagatttctcttaacaaaatgccaatgaaagccaagaagcccattgggctaagatttctctttctcaaagggaaatttacaaagatactgaaatttggttaacttttacaaaaatactgtcacacggaaaaattttcaagaatactgtgtttttataaaatactagtaaaacacaa

SEQ ID NO: 270766 - DNA, 648 bp, Cannabis indica
ttaaatttcatataatttcacatatattgaactatataataatataattcctcaattatttataattatctaattagggttttactaatccttttcttacttccgggtatttctttttattcattataatacttatatagaaccggttctattttaattaaaattaatttaaaatattttgtgttatttagttttattcgttaattatgttacataatcgattatatttcaattataactggtttaagttattttacattatttatttttattcattatgttgtagaatcggtcttatttttatttaaggtaaatagcggcataaacctaatgtttatttttagcggcataagtacccaatgtttgtaaaattgtaattttccagtttcgtcagtacaaactctgttttgaatttattaaaagaacatttagaagtaactgatactacatatttctatcttgacccaatgatcaagaatttaagccttatatgtgccctgtttaagacaattgcagagtctgtactgacaaaattagagaaaaattacagtcttacaaacattgggtactcatgccgctaaaaataaacattagccgggtttatgccgcttacaaacataaaactttaagtatttatgccgctattta

SEQ ID NO: 270767 - DNA, 1206 bp, Cannabis indica
atccatgtcttagactaatatgtttagacttcccgttgtatactccactatatgctctagcaatagttgcttggctatcacaatgtatcgatattttagatacatcctctttgataattggaatctcaattaagggatcttttaaccattcggcctctttcccaatcacagctagagttataaactccgcttccattgtggaatgagaaatgcaagtttgtttcttggacccccaaaatactcaacccgttgtggataaattatccccaaggttggctatatatccaacttgcgttagtatatccttcaaaaattgaaggaaattcagagtagtgaagacacagattttttgttttcgttagataacccaaaactctccctattgccttccaatgatccagtcttggattactagttagtactaagttctctcaccgcaaatgatatatcgagccttgtacattgggcaacgtacataaagctccctatagcacttgcatactcaaactgagccaccgctctaccactatttttaactagtggtttctatgatcgaatggtgtgttggcctctttagcctttagatagctaaacttattcaacactttctcaatgtagtgtgctttcatccctatagcaaaacccccactatgccttgtaacattgataccgaaaatagtatccacttctcgaaggactttcactttaaaggttgaagaaagaaacctcttagtttcttctattgctttcatgttatcactaaggattaacatgtcatccacacataggcacataattatcacataacttttacaggtttttgaatacaaacacttgtctccattgttatgcctaaattcatttgaaataatagcattttaaaatggacgtgccattgtttcggagcttgctttaatccatataaggattttttcaacttacacaacttatgttcaatttttggtaggacaaaccctttgagttgttccatatagaccttctcatcgaggtcaccatttagaaatgatgtttttacatccatttgatgaacacacaagttgtgtaatgaagccattgcaaacaacaccccttatggtagttgttctagcaacatgaccaaaagtatcaaaataccctcattttgcctaaaacctttagctactagccttgctttaaaggtttatatagagccatgagtgtgatatt

SEQ ID NO: 270768 - DNA, 703 bp, Cannabis indica
ttacaatataaaaagtagtgttctaataatttataacacacgcgtataaaataatagtaaatcgtgtaaccgactgtttaaattttattttggcgtgttaaatttattcaaaggtttcaaaattttgcgagatatcttagataactacaacgtacatgactatgaaaaaaatggactaatttttttttttcacacgcctaaatagatagggatgcagcagtacatcccttttagaatggtgcattgtaaaattttcctttactattttatctatattattaattttattttattctaaataaaagatatgtgttagtgcacccttatctatttcaccttttggaagaattttatagtttaattttttttcataattgtatatgttataatttttttaacacattctgccaaattttgaaaaatttaaaaaatatacacgtcaaaaataggattcaaacagtttgttgcacgtgtaatttttttattttatacgcgtgtgaaatagactgtttaattatttttctatattgtaaattatttcaaattagttaaaatttgtcgggatgtcttaaataagtatgacgtacatgactacgaaaaaaattagactaaaaaatttgcctagatgccgaaacaaataaaaaatgcatcggtgtacctcttttgaaagatgcattattgaatcacccaaatatattttagt

SEQ ID NO: 270769 - DNA, 582 bp, Cannabis indica
aaatgcattgccacatcacatgacaagaaaaggtgttccattgattcctcccctaaaccacagaaagggcaatcggtattctcaatgtggaatcttcttccaatcacagatctagtagggagtgcattagagaggatgcaccaccaaaggatcttatgcctctccaaaattttgctattccacaacttgttccaaagtgtcggagcaaccgcactttgatgggctctatccaaagcttgagacagatacgccgacttgcaagtaaattgtctttttttctccaaagtccaaacccatctatcatcccctagacccgagggtttaccgcctttgacgattgcagacactgtttctttatcaaaaaggacattaagcttccggatgtcccaatctccattggccagcaaaaggtcagccacacagttatcattggttaagatctcgctccttagtttcgggatgaaacctttaagatgaggaatctagggatccctccaaatattagttgcccttccatttgttacagctttacaagtccctttctttaaaatagttttgactttcacaaatgaacggcacaga

SEQ ID NO: 270770 - DNA, 628 bp, Cannabis indica
tagctagcaaaagaatgtgttacacattaataagttaagctaagaaaataaataattacgatatccatcgatcaattttaagatcatgagttggcaaagaccaaagaccaaagacgtatgctagttactttgctctacgtacgtacacttctcatgaacctatttaaggcttctatactacacattacaacaaaccaaagaaatcccaaattgacattttcttctttaataattattattgaaaaaataataatgtcaataagcaaacgtttgagtatcatttattttgtttttcatcttcttctgctcttgtgttcacatcatgtgttttccgtaaggccaataatattaatggaggtgaataaggcgccggcgaattatgtgtcttttgagcctaataaagaagtaaacagtggtgggcaagggggctttggaaggcggcctgaggtggagagttgcttgcccaaggggtttcgacagacctcggctccaagtcgatatgttaactatgacactcttggctcaactctttgttcttctcctacttcagatcgtaagccatgatatacatattcagatgagatcattgttaagctctgacacagctggtcatatatatatatatata

SEQ ID NO: 270771 - DNA, 1150 bp, Cannabis indica
agtgtagtactagtagtatttactcgtcatgcaagcctctattttactgtcggacccatgagagagtgggtctcatctgctgctctgccttgtgttatttattttattttgtagaaaaaatcctaaacaaaaataaaaataataattataacaaaattacaaagtgccctctcgtcttttattctgtttttgtattttttttctctttaaaatgttgggttttgtgccgttttctttctctctctctctatctctgtttaacattttttttcttctcagaattttgcagagatggccacgacatatagtatggagtatggatcatgacaatataaaaaataaaagtgaaaatgataaatgataattgaaaaccgactgaagagaataagccaaatatggtacgaaagtttggtcaaattttggagatgaaatttggtcttttgaaattttggtgtacttgtgtcatactcataccctagccagggaacacgagagcttgcttcacatgacttaaatgtatatttattttaaggggccatttttgtaattcagtattattgggttatgattaaaaaattgtgtgtttcattgaagaattattttctaaataatttggaaacaaaaattcaaattttgtaaataaaaaattatttttaagaatataatttgttattgtaattgtgggagttaaagagattcttaattagattaaattattattaagagaattgttataaaaaaatattattaatgcttaatatttttttttagtatttattggtataattaaataatggatctcatatagctttcgaaaataacttttaaaaaatatcacaaactataagcatcacctataaatagtgttgggcacatttggtactctataacaatgctctattattaatttgagttgttcatgcaatttgacctactctccaaataatttctttatttaggcttattattttttaatggtaaacatctacttacttctttaaataatgtcttttttatatttttgttaaactgtaatatccagtttaaaatagtatttaatttttcgtttggatattaattgtgcgaggataattaattcatttatttgtattgttagtgagttgatattattgcttagagtagttgtacc

SEQ ID NO: 270772 - DNA, 586 bp, Cannabis indica
aaaccccaaagtcaagcacagttttaacaaattagatgatagtcaagcaacaaactttaactatttattccatcaaaattcaatttttgcatacaaatacgataaaagagacaaaacatacacttatgatcttcattagacccttgaacaaacaactcaatttcataccctgaagcagcaaaacctaaaatttatattcgatgtaacctcctcaagtagagacaacttatatgagcagacagcagagatacaaatttatatccataaacccaaaaatgaaaccataaaacaaattcaaattttgtctttcttaaaaaaaataaaatacaacaacaatcgaatcacttcattagacgtaccgacaatgagttacatagataagacaaatgcatgagaaaaaattatcaaaacccattaacagatttgatccaagttcacaaaaaagcaaaaaaaaaaaacggaaaagttctgatcatgggtcggcacgactcacccacgacactcgatactccagagccaagcgttatagataataaattagggtgttctaaagaggtgggtttaaggagatcagatcgaatcagat

SEQ ID NO: 270773 - DNA, 518 bp, Cannabis indica
aaataatttccaacaattatatccacccggagtgcccttttcgcaataggagtcctgacgttcgggcagatgaccttggaaaggttaaagtcatccaccaaatgattcgcagatatcagcttggccttccgacaattttccgtcgtgaccaagtccccaacattgagggcctccttgttgtaagtagagaaagtcttggcccgctggaggaacagttgagtaggcgtggtcctcaggtagggagggatcctgacccactccgtgagaagctccgggcggcccatggcttggaagccggaggaaaagaagaagcggtggcggtactccttcacatgtttttggaaattataagggaccgggccctcattcaaaggatgggaccgaagtccataaaaaacatctttaaacttgttccccttcttggggatggaaacgagttcataaaagtataaaattttggccggactgggcgaaccacagctccgagcagcgtacaaaataaataagcctgaaagcag

SEQ ID NO: 270774 - DNA, 533 bp, Cannabis indica
tgtagagattaaattgatttgctaatcatgttattttgattagtaatatttctttagacttatcaaattgagcttcgtaatgtgggacgaagctatttgaagatagaactccattgttgaaacagagggataatcatctagtgtattctgagggataatccaattgagctatttgaagatagaactccacaaaattttgactgcttaatgcttcaattttattttttagtgtattctgagttttgtgctctcttcaatatgaatcataagttcgaccttagagggtaactcaaatgagacatgtagtttgctgccataaggtccgaaattcgaatccacaatgataatctagttagtatttaacggtaatgtctaactaactcttcaatttcgcaaaaagtaaataaatataaagaagttttgccacaaagaaaataaaagagtgaagtgtataaaatcaaaatataagggggtttcaccaccaataagctccaaaaaaatgtatatatgtatatgaatcataagtttgtttc

SEQ ID NO: 270775 - DNA, 667 bp, Cannabis indica
gtaagaaacagatatgaaaaacactagaacctaatgaacaactaggttctcacaaaaacaactctgtcttcacaaataagaaaaatgcaaaaaatgaaatcttgaagagttgattcgaatagctgctctctaggttgtatttatagaacatagaaaccctagagacaaccacaaagtcgaatatacagctgtacaaaacttttctaagaaaaaacttgatttgcagcatcagaaatagattctgtcgcaacaaatcagactagaaaaggaaacttgccaaaaaggagtccgatcttgaattgggtcttgatacctgccataaacagtgtgtatgatctgatcttatcaagacacaatcgaacttattaaggaaaataataatagtcaaagtttcctttaaaaacaaactttctataagagaatttcttttcttacaagaagtttccatacaagaaaaagccagctaaaaaatcagtctttcttaagctagaaaagagcaataaaatcgaatattaaaggtgataaaatcggattgaaagcacaaataaatctcaccataaataaaaaatattttagtatctaaattgctaaaaagaactttacaagccatagttgaattatatatataaccctgtaaaccttgatgcaatgactgctccactattat

SEQ ID NO: 270776 - DNA, 805 bp, Cannabis indica
caagttggctagtgagagtacttgccaagatgttctctattctagtattttggtagaagagccaactccaagttctcattgtactcgctaggcttgtatgcacctttattgttatcttgtaacttggtgtggaccttttcagcttgattcaaacatgcttgttataggactttttgttaacaaggaatgttctttagagtactaagtctcttatgaagaactccttctctctgacttgtttgttgaagcacctggcaactttttgctggcagacttgccgctttaagttggcttgatgcttcttctttccctttcattaagagattctgctagcaaggtgtggtttacttctggtcatagcatatcaaaagtacgagagcagactgttggcagatcaggccagccagggtatagaccaggtggccaaccgtgttgagggaacattgcttgaccaattggatgaggttatggtcgaccagcctatggaggtagtggccggccatgttattgattttatggctagccagtctactgaggccatggccaaccctttttaggccaggttaatgctgtagttgatcctatctacactcggttggctttacccctagcatgattggcgtagagcctttatgcactctattcaatagttattcaacttcttttttggtaacacttcttagaagtggtagtgggataccatatctatgtgttatgctgtccagtattagacacccaataactatcctccttacccctacttcttggaaaggtctttgttaggaggtatgatgttgtaggtgta

SEQ ID NO: 270777 - DNA, 509 bp, Cannabis indica
tttgaaattgatggatatttatatatgtgagctgataaaaatgtaggataaatactattttagattttgtgttttgtaaaaattattgattgaactatgtgttttgttaaataataaattggatcctgtattttttaaaattataataaatagtattttgaattttgtcaaaataaaaattaataataacccgatttagaggtgttatgagaaaaatatatgggaaatgctaaaaggtaccagtggtgcctagcaccgtcccatgtgttggtcaaactaagtatcaggtctcatatagtttaatataataatttttaggaagtatcactagccaattgcaagacgacatgtttagaggtgctagacaccactggtacccaataacaatgctcaaaatatatatatatatatatatattctacatctgtttgtactaggggttgtttttaaattgattatataaaaaaaattatccaaaattgaactaaaagtcctatttgtattatttt

SEQ ID NO: 270778 - DNA, 807 bp, Cannabis indica
ctaataacaagcagacaaggcaaagggaaaaagggaaagtttgcaggcaaagccgaacagacccctagagagaatccttccaagtttactgctttctctgtcctaactgacgacctagtgaccatctacatggccaccccgtcagtagttctgtacaagaaacctgctcccatgaaaaggacataagtaaacgggacatgtccaaattttgccgttttcatggagattatggccatgaaaataatgaatgcaacaatctaaagtgggaaattgaaatcttgattagaaaaaataacctgcatgtgcaaaaatatgttaaggttgaccagaatcaaaaggcggcccaggcagacaataaccaagacctgttactgcctccaccagtggacgaacatttacaagtcatcatcgggggcccacatatagctagagattcaggcaaagctcgggagaggtattcccgaaccttacaacacgaataaagggaagtggttctaatcgtagaggaaaggaagccaaaaatgccatgggtaggggaacccactataacattcactgaagaagatgatatcaatgttctctttttgcacaatgacccgttagtcgtggaagtatagatagccaacaaaacagtggcccaaactatgatagacaatggagcctcatcaaatatcctgatcaaaacaccatatgaaaaaatggggctccaactcaaagatctgatcccctgtctccagcccatatatggtttctccggccagagtgttgcacctttagggaaaattcgcctacccctcactgttgcac

SEQ ID NO: 270779 - DNA, 553 bp, Cannabis indica
tctttgaatctcgtttttgtttttattatacatccgtcaaaaaatttgagttaagagcaacagtggactattcacgtgtatattgtcaaatttttggtaattcacttataattttaattattaaaaataatttgaatgtttaaaatttgattgagagaatttttgaggtttagagagagagaaatttctttagttattaatatgagagtattattattaaatatttaaaaatttaaaaattaaaaaaaaaaagaaaattaaatatgattggatttgatccattttttaatatatcgacgtatacatttgtttttgttgcctaatcacgattattcaatgaatttgtatgagaagcagcatattgtgttgataattaaattcaaggacaaaatgagttctcttatgtttctgttcacaatttgcttgaggaccttggctatatatatctcagtttaggatttgtttcatggatattctattaattaattaagtttgatataagagaaccaaatctaatcaaagaatgaaattccaaaaaggagtgagactactt

SEQ ID NO: 270780 - DNA, 640 bp, Cannabis indica
atattaggaattcatatgtaattaccacctagctcatatccaaacacaccttgcattttaaaatatagtgtacactaaattgtgtaattactaccctagtaattaccttatctagtaattacacagttactttcaaacacgtaatctttttattgttattatttatttatttgtttattttattgcgataatactatatataatggtatgttgtctttacttattgtttttaaggaagtctatgcaaatgtaaatgtccaaaagattagttaacaataattgacatgaattataaacaatgtagagatataataatttttagtggggtcattttgtataattgagattaattatacatcataatgttaaatacaatttaaagagcatttatcattaccctaataataaactaataattgtttgagaataatgaataataaaaaggaaagagattgagagaaaaataggaaggatatgtgttatttgtgttttcaaatagttaataaatggaggaaaacttacaaaaatattgtaatttgggttaacttttacaaaaatactgtcacacgaaaaagttttcaaaaaatactgtgtttttataaaaactagaacacaaaacagaacaactcaaaacaacaat

SEQ ID NO: 270781 - DNA, 971 bp, Cannabis indica
cactggaaacaagtcttggcctgacattcacactgatggtgttcgtgcattttggacactcagggtatgatcagaatgaagatctgcagccctgacggccacctctgtttccccgaaactttctgttaccccttgatgtcctgaaagcatcagccttctgtttatcatcagggttaccatcattgatccccttactgaaattaccactagcaggaggattcgataccgtggtggcatcctttacagtcttctcctttattacatgatgctcaacctcctcagcaattaaggctagctcaaccactttcttatacaaattgtcatgggaagtggtaatcttcaagtcccaattgattgtgacattcagtcctctcacatacttctgtttcctggtgaaatctgtaggcaccaaatcaccaacaaatttggacaaccgatcaaatttcagagtgtatttggccacaaacattattccctgagtcagtttcacaaagtcttctatatgagacgtttcacggtgatgttatagaacttttcttcaaacagactcttaactcatcccaagtcgtcacactaacatcttgagtctgccctactatatcccaccagacgagggcatgatcttgtaacataaaggcatcacagtttactctctctgttcccgtcacccccatgttatcaaggatgtgagtgatcgtactcatctactgctcagctttaattatatcagtgcctcccaaaaaagttggaggtcccagcttcacgaaccgctcaaacactaaatctctttgtggcaacataaaccccttgttacccaccattggcacaggagttggtggtaacacttgctctatagagccggttgcctcagccaatgtaattcttcctcttgataaagtatcatacctcgcatttcttgaaacatctgttgccagtcagcaggcggattagcattgccaacctccgcatta

SEQ ID NO: 270782 - DNA, 730 bp, Cannabis indica
gacgaaattgccgcgaacattcactaaaaccagttttttgatgaaggaactagtttcttggtaatttcttccggtgatttttccgacaacaatgtcaattccgacgacttttttggaatttgctgtcagtgttgaaaaagtcataggaatagttgccggtgttagaaaaagtcgccggagttcctgtcggcgtcaaaaaaatcgtcggaattggcattgtcgctaaagaaaccagttttttagtgatttttttggtaacaatgtcaatttcgacgacttttctagcactggcagcaactctgacgacttttccgttaccgacaacgactctaatgattttttcggcgccggcagcaaactccgctaacttttccaataccagcgacaaataaaactgcctaaacaaacataaatattaaatatgggctttgaaaaactaatttatatgacatatcaaataccataaaaatatctaaaagcaaaaaatatcatataaattggtcaaacttaaaagtgtcatatttaagtaaacaacttttaaaatcctacattgaatataattttctcttttgttatatgatagtgtatattattattattggaatattatatgaatttttaaaaattcgtaaataatttatagtatcactaatataatggattgctcttattgaaatattaaaaaaattttgaaaaatccgtaaaaatagaatcagcccaccatgcatta

SEQ ID NO: 270783 - DNA, 720 bp, Cannabis indica
agtgaaaattcataaataagacatagtctaatttaaaattctaattgattaattaaaataaattaaccgagtctacaagtcaatattatcttaactagtacggggaccatggacctatataatcaagcttacaataagtagatctaaaatttaccaagtaaatttcttaacttattaattcctcctaactccactatagattcaaaattatgttgttgattgcatagaacgctctatatgttccaaatatagatacactattaattatccaatgttataattcaaataatcaaagatcctctatagatgatttacatcgagtagggataaagttattgttttacccctcaatgtattttatccttaaaacttttagcttctgataaatgatattttagtaaactaatattattactgaaattagagctgtaccttttatttttgttaaatcaagctcaaaggaaatcatcatgtcacttctatgtcattacaaaagttatacattccgtatctatgattagcattcccactcaattgtactatcatgttcccaagatgtaagtattgggtcgatccatgtaatgaccgctttagcaatttggattagtaaaggcaactagcactaatttttgttattttataattatttatgaatttatttaattgtggaccctaatatttagaaataaatattagagttataatttctcaattccggag

SEQ ID NO: 270784 - DNA, 502 bp, Cannabis indica
tatattatttttttttgttatatggtatataagttttattatatagtataacattttattttagattatattagagatcgagtctcacattgctaatgtgtggaaagataatagaatatataagagaaatgagctactcctcccattgccaattggtttttagataaaacctcattcatcttatcccaaattctaacatggtatgagagcaaaaaaaaactctttaatgactatccgaccccaccaaaaaaaaacctgatcgaagtagagccaaaaaaaagagccactaaaaatccaaaaataattgatccaagagccaaagtcaaaaaaaaccacatgtaattcgggagagagaaaacaaaaaaaaaaaaagaaccaccaatccaaaaagtagagcaaaagacccacttgtgatcagggatagtgagctagaaaaatcgcttatggtcgagttgtccaagatggtaagcaaataaaacagctaccatcttgagggagaata

SEQ ID NO: 270785 - DNA, 1050 bp, Cannabis indica
tatgaacgttcaactgtactgtgtgggacacggggataggtaaacggttgggtgtataggcacctgattgtaacccgggatattattatgttttatgttatgcttttcttactgagtatgtttactcacagttgctaattccatgtgtaggtaagggcaaggctaagcctgagcagccgtgagagcgagcagatggaggttgtacatgtcagggcggttaggcgttgagcatacgatctttgggacatcaggatttttgtgtgtagttgctaggcaacaaacttttgtgcttgtataattaaaattttgtaattgtttttgtaaacgggatcctaaaattttatatgtatgttttttatgtttttgattaaatagtaaaatttaattaatcacgcttttcgataatctcgttgattagtaacgagttgcacaatacgttaaaaatcacgctaacatttctaaattagttagggtgttacattgatgatcgaatgaattatgaaaattatgaagctagtggacaatacatcttaatcgattgtaaatatgatgaactaatacacaagctgaaagaggtcctagaatgcaaccaagaaaacactgtcatgcaattgaaataccaagtggaagaaggatactaaccgttgaggataaaggatgatcaaagcctaaatttctacatacaactaaaactgaaggaacctgacttcacaacatatccattgtgtgtgaacttcatcaacaacacaacaacaaccataaatccatcgttcttggcaaagagtaacacattagttgcacagacaagtgcaatagaagtaaatgaatacaatacaccaacaacagtagaatcaataactcaacaacatataatgcaagggacaatgctggaagatggggaaaagaatattgacttcatggactatgcaaaacttgtggcagaggaaatgttaagcaactagaaaacaacaaagacaaagaggcagaaatcacagattatgacgaactactaatcacggatccacaacatcttaaaatagaagaagcaca

SEQ ID NO: 270786 - DNA, 622 bp, Cannabis indica
ctcgaatgcttgccaaaagaactgccctcttctctttctgaactacacatttcgaattgtccattgctaagaccacgagtggagagggagacaggggaggactggccaattattgctcacatcccaaatatcaccgtcgataacggagaacataggtatgatagtttgactcctcttcttcttcttttttaattttattttatattttgtaattttctgctgtaaattattatttagttatatattttggtagaatatgtaatggtaaagtgatcatattaataagtttgtttgacacaatcaatttttattttaaaattgagatttcattcagagtttcatcctttatattgaacaataacttcaatcactttggttgcttcagcgctcttcgagattcagccagactgcttaattggattctgtgctaaatagattaaagaacaatcatatatggaattaaggtacaaatctattcgcagcttctgtttgtgacggtgttctcttctcttatcagcttagatacttttctttccttttaaatttctaattctcagtcattggcaatggcagtgttgtgattgtaatagtgaaagtcctcttaactaaggcagggtgatgt

SEQ ID NO: 270787 - DNA, 742 bp, Cannabis indica
tattgtgtgacgaaattgatttttttttgttttcataatattcattgttgttgtaagatgaaactggtttcggtttattttttattttttgtttagatagaatttgattcctccagtaagaatgcaacaaaaaatgttgctaaagattcaagtgctgactttgagaagaaactttctctaattaaaattaaaattctaaggaaggttattcacaaaaaaaaaaaaagtaaatctgatccaaattttaaagattcatctttggtatgtatttttttgaagtatattaattttgttttaaaaaaaattatctttttatgtatgttcaattttttagttgtttatactaaataattggttttcatgtttaattgttgttttacgtaattgaggtttaaatttcattcttattttaggaaactggttttaatgtgtcagatttacgtaatttgcttgccttttgtaactggtatttctgtttcattttttaattgattgtttaacataactagtttcagtaatctaaatttatttatatgttaagaattcttttgtgatatgctttaattttttttttttaatttctagtctagtttgtgtttcaatatatctttttattgtatatttaggcttcttatgtttttttttctatattaatgaattattagttttatttaattagctatctaatataactggtttctctattttttaaagaaactagtttttatgtttcaatttatct

SEQ ID NO: 270788 - DNA, 1098 bp, Cannabis indica
ttttttttgtttttatttataatttgttttatattttttatttcttttatttgtcattttttatttttaaattaatttattttaattttaattttttttaaatagatatttacgtggaccaataaaattattctatgtgtacacatgaacagtccaacatggcacttaacacctaaaaatagatggaaaaggctaagtactaacagaacatggatttaggggatttaccactaaaattatagaattgggggttagttgcaataaactaaaaacttatggaggttatgccgtaaataaattattcttttaaaaatgttgatgagttaatatttttataaaataaattacataaaagtagaaaccttaagaaaaaaaacgtaaaaatagaaaaaaaaaattaaaacttgtcgtgtaatgggtaattttctaaaaaaaaaaacaaacaaccagaataattttgaaaaaatgttataacatgtatgaaataataatatatataaatataaatataaagtattaatattataatactataaataaatataacccactccaagaattaccataaataccggtggactattctgccactaaaaaggtcgaaattggccgctaaagctagtattgatgggatttcgctgttattgacccgttggtactaattgatcattatttttaattaatactagcggattgacacacccgcctctattgaaataagtagcagcatattaatagcgacagaacttgtcactacaaatagcattagattaaaatgtgatacacattagcaataggatccgtcgctaataagcttaaaccaaaagaattataatatataatgtaatatttatattataaaaatttaatttatattatattatttataaattaatataattaaaattttgtccacaaatattttatatatataaaaaaaaattatatttataaatcaagcaaatatatataacattaaataaaatacactaagaaaattagtacatttataagatttatttttaaaaaataatataaatttaatatacatagcagaatggttcggttcgaatgttgaagacgatcgacaatggtctt

SEQ ID NO: 270789 - DNA, 1051 bp, Cannabis indica
ttgttcaagactgcttacaaaaagatgggactccaactcaaggatctaaccccatgcctccagcttgtctatggtttctccggtcaaggagttgcacctttaggacaaattcgtctacccctcactgctggacaagctccgacgagcatgactatcatggcacggttcctaacattggatgttccttcagcttttaacgtaatgcttggccggccggccttgtatgacttaaaggctgtcacattaatatttcactcgtgcctgaagttcccaaaaaagaatggggtagggtgtctgagaggaaactagcagtctgtaagggaatcttacaaccttgcagtgcccaaggctaagaaggaattatcctctaggcagagcatagacaagggagaaaacattcccaaggcagggatgaagatgtggatccgagacttggggacccaagcagtaatgttggacttgtagaagaattagaagagatcgaaatcgatccagatatcccgaccagaaagctaaagatcggaaaaggtttgttgctcgaagtaaaatcagaattgataaaatttctgagagcaaacctagaagtttttgcttggtcacatgcggatatggtcggaatcgatccttctatcatttcacatgttctgaatatcgatcccaacttctggccaattcaagaaaaacaaaggctattggacaaagaacgagcagtagccctgaaggatgaagttgaaaagctgcgcaacaacaacttcattattgaagctttttacccgacttgggttgcaaatcccgtactagtgcccaagccgaacaagaaatggcgagtctgtattgatttcacagacctcaacaaggcgtgccctaaagactgttttccacttccaagaatcgatcagcttgtagatgcaacagcagggcacgaaatattaagcttcatggacgcttactcaggctacaatcaaatcaaaatgcatccaccagaccaagaacatacaagtttccgaacagatatgggtctctattgctacaaagtcatgccgtttggtct

SEQ ID NO: 270790 - DNA, 780 bp, Cannabis indica
tattggtgcttagggacctcttcttgttgtgatattttatcttagtctggaacattaagttccttctagactaagtcatcaacacagcattctagtattaatgtaaaatacttgcttaagattaagtaatcattagagataccttaaagcttttcataaggactagagattttgcttaagtcattcgaatagacattgtaaaaatttcctatcttattctcataattctgataagttattactatccatatgaatagttagatttacttccttaattttaaattaaagttcctatcttgaacataacatagtaggctatcactagtatcatccaaataatttactggcatctattacattagtggaaaatactggaatatatataggatcaagaataagttctactagtttgctagttattttattatagtatatccatgtctaatcaaaatatgtgtgacatagagatactgtgatgtattaagtatagtctagagttcaaagagttaaactacatatatcaataacttcttccacccctaagtgttatagagatttcgtagagtttcgaatataatctagagttcaatagatataaaagatatttgaactacatatattgtttcttaacttctcccacccctacaagatcaaaagatctttttattaagcaaaatcttaataattatttaagaaatgacaattattcataaacatcgaatttaaattctaaacgtttatgaggtattatctctttgtagagattaatataccatagat

SEQ ID NO: 270791 - DNA, 1368 bp, Cannabis indica
ggttgttcctactgtgataggtcacaatcttgatgaaaaaaaatgatagtatatatatgcctaatatatacactataaaaaactgttatttttagtgacaatttttttgtcacaacataattgtttttgactaaatgtaattttaagtcacaacaaaatgttctttgtgactaaaacatagtatttagggttacaagttgtcactaatttagttttagtcacaataagtattatgattaaaaatacatttagtcatgataaattgtaatttttgtgaataatatttttacccacggaccatttagtcgcaacataggaatcataatttataattagtcacaatttttttcacttttagtcacaagttttgttgtaactaaaagtaaaatttttcgtagtgatatgtgtgcgatttctttcttcttagtagaatgggtggagtcatctgaaatttatttatatatatatatatatatgagtaatttgttgtataaatatttaagtttaattttcggttgtaaaaaaatatcttaaatttaatttttagctgcaataatacttaagttatatttctgaaattctgtaattatttgattattaaatgttaagtaaattgtcacgtgacaattcctaattggtccaagtcataagtttttaatttataaaaaaaaaataataaaaaaatgacacatggataatgacttaatatttaacatcgagatacctacagagttccaaaaatataacttaagtattattactgccaaaaattaaacttagatatttatttataactgaaagttacacataagtatttataacacaaattactcaatatagattattaaagaatcctaaacaataaataacatacatatgatcatgactttaatttccttttctttttcatgattctcaaaaaaaaaaaaaaaaaaaataatcatcattgagaaatttcatagaaatataacgaccatacacattatttatgtcgcttaatataaagttgataaagccaataatcaacacgtacgctttccactttaccatgtgaaacaataaggagtacacgtactacttttatcttctatcaatctatattattaaaagatatatataataatggaaataattattgaaatttgattttctctctttattgttaaaattatttatatatgtgaaatattatacaagtcatctctcttgagtcaacaacaagaaattaaaggaaaaaaactagctaatttcgtaagttataagagattgatttgttataaatagaatactagccacaagctaaaccgaaacattagtctaataagttaatatctatttgtgatttgtgagaattatatgatgagtatt

SEQ ID NO: 270792 - DNA, 646 bp, Cannabis indica
ttgtataaatgtatttattttgttatttttgtattgtgtttttagttatttttaagtggtttttaaaatattttttttttgttgtacaattactttttagttgttttttgatttatgtgcatttgttatggtgcatatttttattttattcgtgataattttttgttgtatgtgttttgctttgtagatgtggatacatatatttaatttacttttttgacacatttttttttaggaaaatacaatgataagttttccccttttttaatcgacacattgtgtattattatatattgacaaatacatagttatttttttatttaattttgaaattatacattatccattatattatatacatcattttgaaaattgtaaaattttattattaatgtaaccattcatttaatttctaaaaactaaaatagttattttagtctgttactagctcaaaaaagaaggaaaaaaaaaagaaagttcaaagtataaagttgtaataaataaaatagttcgaaaaaaaaaataaaatgtaagtagtacagaaaataaatcaaagttgtcaaaactaaaatacactttgtagtacgaaacaaagcggaggagttgatattgttttgtcatattgtaacgaggttgatgtctgtta

SEQ ID NO: 270793 - DNA, 671 bp, Cannabis indica
aggaaaattcattggaaaaattggcaatctctctgtcgttctaaatttgtggggggttttgggtttcggcctctcattcattttaatcaagctatgcttgctaagcaggcctggcgtatttttacccagcctgattctttattgagtttaactcttaaggctagatattttccaaactcttctattcttgatgctaaagttggtcataacccttcattttcttggcggagtatcttatggggaagggatttgttagcgtctggtctggtgtggaaagtgggtgatggagaggctattgatacccttaaggaccattggattcctaattctagatataagcagaccctttgtgatctggaccctcagcaattgaagctatcttattttattgatcattcggggtcttggaatatgcatagacttcgatcctgctttgatgattctattgttaatgatatcttaagtgttccttttttggggcttgagggtaaggatgagaaaatttgggggagggataactctgggctttttactgtaaaatctgcttatcacttagctcttgaatctggagatatcccttcaacatcttcttcccttgatatgaaacctttctgagctagaatttggcatgcaaatattcctcctaaagtcaaacattttgtgtggagaat

SEQ ID NO: 270794 - DNA, 1021 bp, Cannabis indica
cccaacctgacgttggtcctagtacgccgacagcacgctcgaggagaactcggcgttggagtggtcagaaccctgggacgagggatgaagagctcgatcatggaggtgcccaatttgtgggagaaggaacttatgaaacagaaaactgccgtttggaggaggcgcagcgttgaaatgctgacttagatcgtgatgcagcctcggccagggcagcacaggggaagaatgctcaaaatcaatctgaagaccacggggcagacctcgtggctcacaaaccaggagacgggaaaatgcctgggaagaataacccagggaaaatgagacaccccttgaaaatcaaaacgaacaaccagatgggagacaaccggaaactgatgaacgagaaatccttcatgagaatgaggagaatcttgggactcaaccgggagaatggaggtcacctactagaaatcaccagcgtccttcccaaatccatagagcgaggactcgtacagaccctgatgggggaaatacaacaaaccactctaaggaggaaagacagtacgacaggtgtgctcggaccaaactaggaaggaccatatcaagtggtcaaagttctagaatcaggggcataaaaattgggtaagtatgatgaaagatgcaactcgttctggtaccaaggtattggaacggggaacatttaagaaaatgctaccagtaaaagtaccaggtcggatgaccatatcaagtacgaaataaaagaacattttctcttaagtgaatggccttttgggcggaccacgcccaaaggttcggataaaattttcaaatactcaggtaggatgaccacctttgaaagtacaatttttattttctgcaatttgttttgtttatgttaagctaaagatcagatcagatcaacataatagctttgatgtaagttactacggtaacagacatatttccgaccaataaatgagtaaagatgtttatttaaattcaaattgagtcgagttcattagcatgttataaatttaccatc

SEQ ID NO: 270795 - DNA, 579 bp, Cannabis indica
tagacaagttaagcgcagtcaatgttttggctttaaattttcatatttggataataaattaactattaattctaatgtgtataatatgcataatcattatttttgattgagtcataaattgctctttttaaaatgtttgtgacactacttttttttttgtaaagaactacttgttcattgattaagaaaatagatgggaatcacaaggggattaccctccccttgatacaaaactgctaactcgctagaaactctagcgattttagctgcaccatccgcgaaaacattaaaactacggtttataaagaaaaaaagacaactaagaaacttgttagataaattaactatattataataaacatcagccaccctccaatctggaacacctcttgccaacactgatgataatgcttgaacatctatcttttaatttgagaggatatgaacttcttgccaccctagcttaattgcccttgaaagagcaagaaggatcgctttcaattcagcttctagcaccgagtctgtctggatcttttgtgtcttaacgtgccagcaaccagtggaaatctcaacacttac

SEQ ID NO: 270796 - DNA, 765 bp, Cannabis indica
ctctttcccacataggcaacttgggccacacagtacttgaggtacatgtccttagcgtcgcccaagtaggcgaagttggcctggggattagccttccaaaaatcaaagaagagctcgaggccggcagtctccaaagcattgaccttctccttcaaatggtctgcctcggacacctgagcgtccttatcttcctttacccgaagaaggacctgccgcagagaactcctctcatcctgaagacaatcaactacagcagataaggtctccatagtttcctcaaagcgatcagcagcctcgaggtccttcgttagcatggtgatcttcttctcggcggcaaatagcttcttgttggcctcacccaactcatgacgaacagctgcagtctccgtcctggcctcctcagcttccttcttggccaagtccgcctccgccctcaaggtgtcggacagagccgcactcttggaagtagtagatttagcccgggagtaggtgtaagccaacttcataccgcctgcataaaggaaaaagtcagcatatggagctaagtgtgaaaagttaaaagggaagtatcaaaaaagactaaccctagtgagctccctcaagactccgcccaccaacacatcgagagatgagtcgttgtcagcaccagccaattgctcactgacctcaggaaccagccggttcatgtagtgagccagtacctccttgcctttcctggcctcaggcagcacgcgcacgggtggagttggtgcctgcacccgctga

SEQ ID NO: 270797 - DNA, 733 bp, Cannabis indica
ctagacccagatcggggtccagaccttgacacagacccgaacaaagacttggacccgaactcaaactcccacacctagaatctgaccaaaagctagacccgtacccggacccaaactcgaacccagaccaggatcagaaccaaggactttgacctagaactaaatctagactcagatcgggattggaacttctaatttggacctagacttaaatttggaccggaactaaaactcagaccaagactcgaactccgacccgaactagaacccaaactcgaactcagaatcgcaaatggaactcggaccgaactaggactagggccaagacaaggacatcaacccaatcccaaacccagattaaaacccagacagagacctaaacccgaaccggtacttggactcaaacccgaacttagatcgggacccaaacccaaacaataacttggacctggacccagaataaggatagggacttgggaaacagaactaggaccgggacctagtacccgacccagactcgaactttaacataggacccagctcgtgacccgacaccagaaatggaaccagacagggacccgagattaggatccagatctggacccatggctaggataaaactcgtagttggtgtctcgatttcggacacagccctggacctgaaccttgacaaggaaccgaacccacaccaagacctgaaccaagtcccaaacccaaaagtggacccgaaccc

SEQ ID NO: 270798 - DNA, 588 bp, Cannabis indica
cccaaaatgcgctctaagtaccacggatataatgtaagggattgaccgttgcctaaaaggccacatgttcccccaagatcgtcttaaatttatgaaaaggtcgagcgcatcctaaggagccataagctcccttatacccagcgaataacccataagaggttgagaaagctcagcgagctaacactccttcattacggtgaacacaaacctcaaaaagggccgagataaatcataaagcctacgctcctcacgaagggtaacaaagaggagaagagaagaaaaattaagtcgtaaagatgaagctcaccaaacttagtctacaagaacacttgaaagaattcttatagactaggtgacaagcgctgacccccaaaaattactaagtgtaatattttagactcataagtgttatgcccaaaagtttactaaggggagctccgcgtgcccgcgcatcgtctgctgtgtgcatgcactgttaggttttatgccctaaataaaactccatttcaatgcaatctactttattcaacatcaataaagaaacataagtatttttcattcatttgtgtatgttttggttcactttat

SEQ ID NO: 270799 - DNA, 650 bp, Cannabis indica
agctttttaataattatagagggcatttttgccaaaaatctttcttggaaaaaatgcatcctttgattctggcggttgaacagttttgagggtcatcatgaatcgtctcttcattttctgcccaactcctaaccgttagatttcccaatctttagctttcttgtcactggactttatgtataaaagggcagctcaatcttatcatttttcacaaacctctgtctttttagtgagatccattttcaaaatggatcatctttttcttgctagaatgtcccttctgagttcggaagttcatcctcccaaactcataacaccaagatgcaccaacctttttccatttgttcccaaggacttcaagcctcaattggagccgaaaatgatagattccaaggctgaggagcttccgaccaatccaaactaggggaaccccataacccgtcatgggcgatcctcacaagtgatccttgaaggcatagatcttgtgagcaatcttaaaggtcctcctcaggctgataaagaattccagagaaaagttggcgtgttttcagatgaatatgggaagaaagttggcatggtttctattagagaatccagccaacccaagacccaaacttgcgctagaaaacctttgtgccaacctctttctg

SEQ ID NO: 270800 - DNA, 617 bp, Cannabis indica
tagttcatgatcccattgatgttccattgtcttttgttaaacgatttgagaaccaagcgtcagattggttaacacatttttctggttcttttcttggttatagtattatcgattgcggttatgtccccactagttcgaaagctattgtattagctgattcttatttcttcttattaaaaagaagaaacaaaatttgaaataaattattattaataataattatacaaacataatggagatattgatatatatcttttagcataattattaattattttctacaaaaatttaatatatcattttaattggttaaagataatttacaaatctataagtgtatcaaatatgtgatatttattgttgaatcattcaccccattgcatctttttagtcttttgctcttatatatggcatattgggttcctgctaaaaccaactaacctaataaagttttgataactaggaaaaccactcatcatataccattttacatcaatttatatattatattgtatactctcactctaattaatataaaaaaaatggtttttgatagatttggcattaaaaaaagttttttaagtgtttttttttttttttatttttttatttttaat

SEQ ID NO: 270801 - DNA, 701 bp, Cannabis indica
tttagggcttagtttttacctagaaaaattacgaattatgatatagctatttctacaaaatttatagatctttgaattatctttccaacgccactggaatcacctcaatcgaagttataaaactccagatatggtcgttttagtaaaacagtttctaaacctgcaaatttctctaaacttacgaattttctcacattaattaaataataatattatttaatgccacttatacaattaattaaataaaataaatatattatagataaaccttaatggactttcatatcgggctttaattaaacgattacctacttatgaaaataccataatattttactttcgtagttaatacaactttaactctctttagaaaattggtacaactactctaagcaatagtctctactcactaacaacacaaataaatgagataattatcctcgcaccattaatatctcaaaaaaaaattaaatagtatttgaatctagatattacaggctgcttctcgcaagaattggcgtttgcctttggagatttcttgcaagaaacgcctgtaacgactagcaatattttcttggtgggttctcactacgtgttccctaactctagcatcgttcaactctaatttggaagtgggttttgaaggattgggttcctacgggatggttgattccgtacgaaactcaaattctaaaacttct

SEQ ID NO: 270802 - DNA, 793 bp, Cannabis indica
ctgtctcaccctcaaggggaaataatgtgctacatatacatacctcttttaatatgtaacactacatattgctcctaattaatgtgactgacacacgaatattttaatttcactttttttcctcgcggtatttattattatcatagtaggttttttataaattttttcaaaattttattgaaaataaagttgaaatagttgcacatcacattattatcaagctttttgctcctgaacataccatttcatacctccttaaacttttaaggtcgttaaaattttttctactattaagattgttagatttaaagactttgtctaattttaataaaaaaaaatctaacatagataaaaattcaagaaacatgatttggtacaaagttcgaggggcatgattaggtagatattaaagtctaaggagcataatttagtacataaacaataactgaattagggacaaaaatccttaaattcaataatttcaatagttcaactgagaattttaaatggtaaaaaaaattacagaaagcatgatttggtccatattaaaatttagcgggtgaaaatcttaattagccttataataaatgtcatcacaaaataaaaataaaattaaaatgttccactattagagataatatgtatcggtatatattaatttaattagaggataatggagattttcattaatataagtaaatcggccaaaatttattatatgatgaaatcgttcaaagaatataatcaacaataataggcaaactatgccatttaaaataataataaagaaaat

SEQ ID NO: 270803 - DNA, 546 bp, Cannabis indica
aatctacactgtgatgaccaaatgccagatagggttttcatcaaggatggcctattataaggtctaatagtatggagtttcagaaggagactaatggtagcaggggtggaagaggaagagctagcatcataggtgaaaattgtgctttcatcagagggaaagactaaagtattagaaacggtattgagaaaatcatccatagagaaatacaaaacaaagcagacacacacagaataatatcaagcaaaccaaggaattgaaaaggtgaaagagaagtgccatgatccatacctaagtcttactatatatagaaaaaaccaaaaaccccgtaggcgccttctcgaatcgcccctagtcacatccctagccttcacctggaagacggtataatgatgatgaggctattaaaatcctcataaacccagacctccgcccccattttccaatcttcaagagagaaaagatggctggagatatgctcaggcgataataaatgccaaagatcccaacataaacccccagaaacgaaataaaacaaagaaatag

SEQ ID NO: 270804 - DNA, 514 bp, Cannabis indica
tatttacctttgttagttgtaatgttgtcattaaatattgaatattctaaatttttactatttttctaactctaactgatgatgatgaagatgctgatggatgtatacaatatttttcaattatattttttctttttaatttatcattttctcattgttgttgcttattgtcgttaaggattgattataaaattagtcatttttatcgttgacaaagttaaaacttaacataaaattaatacattaaatgaaagaaattatcatctttaaaactaacgagatatatatatatatatatttaaatatagtgtattgtagtaattacctttgaatgatttcacaaataaatttgttacaagtatgattagtttttcatcgattatgtcagatactttttaggtttcattattgacaaagcaaccccacatttttaaataaattggcttgaaactaaaaattgaaaatattttattaaaaaaattaaaaaatttaaattagtatatatataatataa

SEQ ID NO: 270805 - DNA, 408 bp, Cannabis indica
atgtttgcttaatggagagacaaagagatggaggcattaagggctcaccatgcagagatcgaagatcgtagtcggccagctactgtgctgttatgaagagcctaccggactgtaggccagcaaacgccgagcgtcattcccctaggagaaacggaggatgacccgacgatgaatgcctcccagacaaccaacggtcagccgtccaatccccggtcacgagttccactcgtgggccaagaggtaggcgggcagactttgtccgggaattcatcaggaagagccataccagacggatccaatcagaataatggagccattctgcctatcaaccaagcgaaccaatcgttaaggcaaccaggctcttctatgttcgataggctgggaacgacccatgacctaagggacgat

SEQ ID NO: 270806 - DNA, 759 bp, Cannabis indica
aatgaacttggaacagctcatgatcttagggggtgagctgaatagaaggagaaggttagataaacaatatgttcaaccagtaagtcagcccagggtccacattcaagatgcagctcaaagagatcctaacgtgacactgatcgaccaagaggccaaaaaagtacatccatctgtgcaagcagacttggatgaactgaaaaatatgttccaaggcctggccggtcaaaaactcaatgatctcaagttggatcgagcacgtggatccccattgactccagagatcagtgttctgtaactacccccaagttcaagatgtcgacctaaaagatgtatatagggaaagacgatcccttatcacatctcaagtattttgaaatacaaatggacttataaggggtacgaggagaggtgcgttgcagagtcttccctgccacactttcagaagccgctcaataatggtatttcaagttgacaccatgaaggttcaactctttaaaggccttctcctcagagtttcatgcacaattctcttcttctcgccaactcccactacatttagaagacctggtcaaataaaaaaaaaaaaacaacctagagagcctctccgagcttacataagtagattcgtgatggaggcaacaaaagtagcacaattaaatgaagaagggaagttagccgccatactgggggtatcaagattctaagagagctgtggaaagacatcaagaaaagttgtccactagattctatgagtgattt

SEQ ID NO: 270807 - DNA, 684 bp, Cannabis indica
aaatcactcatagaatctactggaccttttcttgatgtctttccacagctctcctagaatctttatgcctcccaatatgacggctaatttcccctcttcagttaatcgcgccactttttttgcctccgtcatgaacctgcttatataagctcggagaggctctcctggtctttgcttcacttcgaccaggtcttctaaatgtaataggagttaatgagaagaagagaattgtgcatgaaactccaaggagaatgccttccaagagttgaaccttcctggtgtcaacttgaagtaccattgttgagcagctttggagagtgtggcagagaaaattctgcaacacacatctcctcgtaccccttgcaagtctatttgcatttcaaaatacttgagatgtgataagggatcctctttccctgtatacatcttacaggttggcatcttgaacttatggggtagttcttaaacattgatctctggagtaaatggggatccacatgctcggtccaactcaagatcattgagcttttgactagccaggccttggaacatatttttcagttcattcaactgtgcttgcggatggacgaacttgttcgacctcttagcctatcagtgtcacattaggatctctttgagctggatcttgaatgcggaccccgggctgagtggctggttgaacat

SEQ ID NO: 270808 - DNA, 536 bp, Cannabis indica
gtcagaagtatccccgcctctcggctcgcttggttgttctgctccagcgagagggggtttactttctacacaaccatctcgaggccaccctgtgaatttcttttgtgaactattttttcgtgtggataccatggtaatggcaatggtttttgtctttcatcggctctaaatgaaagtaccaaaatttttatcgagattttcaaaaactaaaatattcaagagctaaagacaataaaaatggcagaatataagagaggaagattttttacatggtttgggtgctaacaaaccctagtccacgagtcagtctattggcctcgttgggcaatgttgatgaatatacaaagttatgcaggaaacctaactctttttcattaattttttttttagaagaaaaaaatcaaggatgattttaggggagtttttgctatgtgttttgttggcttgtccctttacatgaaaatggaagggatatttataggcttaagtgatgggtgtggttcgccccacgaaccacctagagtctcatcttaaat

SEQ ID NO: 270809 - DNA, 824 bp, Cannabis indica
gataaatattttactagtatcgatgtaattttttttggattatacttgagctggattgtttgggaactccagttcaacattttgagatctgtcttttatggatctaaaaattgattggaaaattcaaaatccgcttttatggatctaaaaattgattggaaaattcaaaatccgcacttgtgcagattgaatgttgattgacatgtaaaagtagtcgatcaaatacaatccacacatatttataaaaaaatattaaaaattatatatataattaaaattttaatgtaaataaaatagtaatttaaaaatctaatacatatgaaacacatatatttcaaaacttttatagatcaaatgtatattccatttttatatatagtttttacatttctttatttatataattttttcttcttttgaatttgttattttatttattttaatttgttgttagagacataaaatattttattttgttgctaattatgtgaaaaatatatatattttttaataaatattaaataatttaatattgaaaagtaaccaatctaaaataaccgatccaattcgcacttttgcagattggatgcggattggattgaattcaaaatatgaaatctgcatttagtgcggatcggatgtactatgagcaaaatagtgtggatcagatgcactatgagcaaaatagtgcggattggattggatgaacgcccctagttggaattcaaaataatcgtggaacaaccgtgaaaacttaacacagtaaataatataaaacttacacattatttttttaaaaaaatttaccctacactataaaaaaa

SEQ ID NO: 270810 - DNA, 954 bp, Cannabis indica
ggagctaaaacacttaatttacgcaaagctaaaaaatacaccatttaatggccgccagacaacatgtcgcctggaatattttacgaaactctgatttctgtatatattgcatgcattgtccaggcattatgtcgccttgttataggtgacacggaccactgattgtgtttaaatgtcatttttgatattttcaaatgattcaagactttctgggtaatcttatacactttataaggtcattttaaacccagaaaaaaaaaattattaattatattctacattatatccaagttcacaatcatgtgaaattttcaaagatataagacaccttaatgtgcttaatctttttcatagcacttaattaactagggtttgtattgagtttgttagtatataagttttaaggagggttaaaatttgactaaattcacttttcaactagaatttttgaattctcatgaaaaaaataaacaaatttttggaataaaatttgtaccccacacgaatttttaaatcattaactgtcgatcttctattttaaccttttactccacttttgtgttagaaaatacttgtcgaaatattttttttatttttcatagcaatattcgttgtagttttaatatcaaatctatatattttcaaaaaaaatttgaattatttacaatactagtactgacaatactgttcatagggccagtttggcacagctgtgctgtggaaaaaaataactgtagctatgctgtgagaaaaagcagctgtagcaaaactgtaaaaaaaaactgagctgagtgtttggtaaattataaattttaaagtactgtgagttgttaagatctattacaataacgataatattataatctagtttattataatcacaaatatgtaaaaacttattttatataacatttttattttttataatatttttaatttttttttcaaaattat

SEQ ID NO: 270811 - DNA, 664 bp, Cannabis indica
attttcatttataaaatatattacattaatttcatgaaaatatcaattaaaactcaatttattttatcatttaaaataaataaaagcgtatttttaaccactaatcacatgctaaggactttcataattgatacgtgtcgctttctccggtgcctcgctaatcatatttagtgacatatggtttctcgctaatatactaagcgccagtttgtacattaattcctagcctaagactttacagtcagcgggttacgaaatacactctgatacttacgtaattaatgagttattctataaaaaaactattgcatcgattcacattccctttatcttgacacgtgtcctccagccaaatttcaggcataaaaattgccccttaaaaagttcttttttaagtaaaaagagcttttttggattcatgcgattgtacagtttcgagagtcattatgaatcgtctcttcatattctgcacttctcccaatcgttggatttttccatacataactttcttgtcactggactttgtgtataaaagaaaggctcaagcttgtcatttttcataaacctctggctctttagtgagatccattttcagaatggatcatctctttcctgccaaaatgtcccttctaagttcagaagttcatcctcccaaactcataac

SEQ ID NO: 270812 - DNA, 1386 bp, Cannabis indica
acaccgagctcaatgaaacttggaagaagatctacctcgcatacgtacaagaagctatttttggcgagccaatacctatgaaacatgcgaggcacaagagggatccaagtaagcgatgtgaataccatggtgatattgtcataccacaaaagagtgtcgtcggttgaaagatgagatagaaagtctcatatcgcaaggacaccttcatcgatatataaaggggcaagaagatgcctatgatcagttcgatcttcccaataactcgagcgactgaaggttataacccttttccacgagaagaagggacactttggttatctcgagagggagagggtcgcaagagtacaaaaggcagttactccggtaaaagcaaacttgtaaaagaattgcgacctgagtatatactagctcgttatggttgccataactagacgtcaaccagtggcagtcaaagacaaacctaaaaccaggattactctacctcgaaccccggtatatgtcagggatcgaccttgaatattgaaacgattgtgggagaatgttggggattaaccctggaaattaaaacccattttatcaaaaccaaatgttcctggaagattgataaaataaataattgaactggggaagttcttttgagattaatgattgtaaatcacattaatgatggatattttaaattccagttgtgaaaataatcatttctttcaaacaagtaattacaaagcgtaaaatctttaaaattacttgaggggcatatatgtatgaatattaaccggaattgatttggaaatgcatagtacaattcaaacccatagtttcaaattttgaaaaccttataaaagggcctcgaccaaacctttttgacggaagaggggtcgaattgttataactccctgaccaaaccttttcgatagaagaggggtcgaatcgttataacactttgatcaaacctttctgacgagaaagggatcaaaccattgtaatttttgatttataacctattgacgagaaagggaaatcaaaagttacgactagcgcataaaactgaatactaacggttcgcgcttgggggaagtattaaacgagacatccaaatgtcttgaaaaaaatacctaaacccaacacgtgggtagaaatattaactactcatgtaagcaataaaaatatatataatgacaagttcattaaaaatgtatttgaatgtgcttaaaattggatcatttctgatgatcgcgagatggaattgatgacggttcgcagattgaggaatgagcagataagatgctcgcacgtaaagtaggaaattaactacttaacgtcgaaagaaaggacaatcaatggaaacccctaataaactttatgtttgtgatagtttatattgtg

SEQ ID NO: 270813 - DNA, 734 bp, Cannabis indica
aaattcaatgcacataaaatatataggacaatcctaaataattatgtttctaatatgagatgcatgattatcaaaagtaaactctatgggattttatattgacaattaaatgtgcatgtactaataattatcaaataattaattaaacatgagattgtttcaaaagtcattgctaataggcttaaagtggttatgccttctgttatattggatactcaaagtgcgtttcttcaaggttgtttaatatccgataatattatgatttatggaataatgcatcatttgaaaaggaaaagaaggggtcgtgatggtattatggcgctcaagctagacataagtaaggcttacgaccgtcttgaatggggatatcttcgggccatgctcgagaggatgggctttgatggaagatggatcaatttagttatgtcttgtgtgggtaccgtttcttacatgatttcccatgggggtaaggagttagatcctattactgcacaacaagacccccgtcagggtgatcatctgtatcaccgtatctatttatcctctgtactgaggggttctcaagtctgttgcgtagctatgaacaaagtggtttaataacggcctgcaaaattgctagaggagcaccggttatttcacacatgctttatgcagatgatagttacatctactgtaaagctacagaggagaagcgtataatgtgaaagaattatgtacacttatgagatggcttc

SEQ ID NO: 270814 - DNA, 740 bp, Cannabis indica
caaaaacgatttgaaggtgggccctgtctctcaggcccaccagtcaccatgagtattctttcttggaattgccatgggcttgggaacccatggacccaacaattcataaaggatcttgtgatccaaaagaaacccaattacttgtttttatgtgagactttgtcaaagaaggaagttgttgaaaagttgcttgtggctattggttttgatggtgcaatttcagtcgatgctagaggtaaaagtgggggagttgctttactttggcgagttgaggaggaagttacagttatggaatttggtggagattacattgacgtgcgcattaccgatagtgatgttggagatcggcggttgacgggcttgtatggtgaaccaaatcgaagcttgcgcaagaggacatgggagttgttaaagacgcttcgggataagtcaaggcttccttggtgtgttattggggaccttaataatgtaacttctcaagaggacaaacgaggaggtaatccttatccaaactggttaattgatggttttaatgatgctttggttgaatgtggtctttgtgatatggatctttatggctatgcgtatacatgggaaagacatcgtggcacagacgattgggttgaggtgcgtattaatagagctttggcaactcaagcttggttggatttatttcccacggctaaattgtataatctggaagcaaccacttcggaccattgtcctcttcaccttgcaac

SEQ ID NO: 270815 - DNA, 731 bp, Cannabis indica
cttgctgacgtagtacacaggatattggacttttcttcttcccagactaaggctgcgctgacagcgttcttgaagacggccaagtataataataagtcctctccgtgaactggctttgatagaattagaggttttaccatgtgttcttttagttttctgaatgcctccttgcattcttttgtccactcaaatttctgacacttctttaaagtttcacttgtctgttgatcgggaaatgaatcggcttagggcggaaactttttcggtcaacctttgcacatctttgtgcttcttgggggaaggcatgtttagtaaagcttgatttttttaggatttgcgtctattcccctttggctgacgatgaatcccaaaaatttccctgacttgaccccgaaagtgcacttcttcgtgttaagtttcattccatacctccggaccacttcaaagcattctgcgagatcgtctgcatggctcatgcacgcttaagacttgactagcatgtcgtccacgtaaacttccatatttcgtcctagaaggcccttgaacattcggtccaccattctctgatatgttgcaccagcattttttagtccgaagggcatgaccaagtagcagtatacccctttatcggtcctgaagctagtgcatgcttgatccgcaatgtgcatcttaatctggttatagccggagtaggcatccatgaaggacaatagcttgaacccagaggtggc

SEQ ID NO: 270816 - DNA, 931 bp, Cannabis indica
gaaggctaatggcacatagattactacaaattgtgctatcaacgttcttattgtgggattttctctgactatcaaaggtagtcagatgtatccaaagggtgcaatgccttggcctaagaagtcatacattagttgagtggatggtgctaggtctgttagttggagccacatcttttcataagtctatttgaaaagaatgctagaggaggctttgttatccaccatgcacctagccactatcatgttccctatttgtgcagttatgactagatggtcattgtgtgtgaacctgacctaggcagcatcaacctctatgaaggagatgctaggctctccaagcctgagttgcttggagtctttttcctcgatggctaggatgtcactttttggctcgtgatggagagtccaagaatagcgctccctagcccttcttgtctcgcctgttatgtggggtctgcctattatgaccccttaataacctgccactggttgtggcatagggtctccgttctgggtagcttgtgcctaagcttggtcatttttcatataatgatgaaagtggggattgtttttccttatgaggaattcaatctccctctttaagtgttgacactcattggtgtcatggttgaaatcattgtgaaatcaacagaacatcgacatgtccctcttgctaatatccttcttgataggaggaggcttctagtatgggatagtagcctaagtggccatataaattgtcttcaggttttttggttaggagggtaaggcatgtgtacttctcctccttctgcttttggtttcatgacgtggggaagtattctacttccctttcttgcctccgttccagctgaactattatgttgcgcttgcttccagtatcttgctctagagggctggctgcattgatcgtacatgcttcatttttggc

SEQ ID NO: 270817 - DNA, 630 bp, Cannabis indica
aaaaaaaaaaacattaattaattaagagtaaagtttaaaaattattttaagttagaattgtttttagggactttttgaacaaagttagaattattttttaatataagagtgctttattaggtatataattttttgaggtgtgcatgtatctattttcactacaaaagatttttatttttagtgataattttttatcacaacataattttttttcttactaaatgtgagttttagtcataacaaaatgttacttgtgactaaaatataatatttagatataagttgtcactaatttaattttagtcacaacagctattgtgactaaatatacatttagtcacaacattgtaatttttgtgactattagctttagtcacgaactttttaatcacaacataagaatgataatttgtaattaatcacaattttttcacttttaatcacaaattttattgtgactaaaagtaaaattttttgtaatatttatatatgattctatcataaaataatgtttgaaataattgattgattttaattccacagaaccttatgccattggagtgatatatagtgattcaaaaggaaaatctcacacagtgttagttagacacaaaggagaagttatattaa

SEQ ID NO: 270818 - DNA, 664 bp, Cannabis indica
gttcaattactaatgtgtccttccatctaacgtgtttttatggatctccggttgattctcttaagcctcatacgtggaatatcctgaatcgaattggtaggggtaatcctcgggatccgtggcttatcattggggactttaatgcttttctcttttcccatgacatacaagggggaaatcccgataggggcccttcctccgattttagacatttcattgattcttttaatctctcccctcttgacccatctggtccttttctcacgtggaacaataatgtcgcatccccaaaaaacattcaagaacgtttagattggggtattgttaacaaccactggtccgatatctttccggatgccacccttgttcatctggggttctacggttctgatcaccgcgcccttgagcttcacacttccaaccccccgggcactcgtcctatcactaataacaaacgttttcacttcgagaatgtttggcttaaggacccaaattggaaccaagtttttgaccagtcctggcaaggacaaccgagccagcctgagcccatcctcaatttaatcgccactcaagcctcttgtgctaagaaactcaacaattggaaccacaaaaaggatttaattttaaaaagacacattagcaagcttgagaaagagctggaact

SEQ ID NO: 270819 - DNA, 974 bp, Cannabis indica
aagactaaatttattatttttaacaaaaagatttactctattttttatactactaaaacaaaataaataatacaattaaaaaacattttaactttttgaacttaaaaaaacaaaaacattcaactcataatcccatgcaaaacacgtatgaaacgacaacaaactttgaagaatgacaaagttataaaaatttctacattcatgtacaaaacatgctaataattatgtaggccggccttgaaatatagtatgttataggaaaagaaaaatttctagagccctcatttagaaaataattgtcatatcttttaaaattagtaaaaaatacataattttaaaagaatattttattttattttttgccctaagcacaaacttaacctctttgtatttaagatgggacctctaataagtccaaaaatagattttaaaaattagagctaacccaaaacaacatatataaaactgtcaaaactttgatcatcattaaaaacaacaattaaattaccaacaagaactacaataaaaccacggctttaaacatactactattctattataaaaggtagaaaaaatatattttctttcagctttgaacggaatattctattcttggaatatatcattaaacgtaaatattatttttagacgttatattttgtaaatgataaaataaagcttgtattttttaaaattgtacaaatagaatcatgaacttaattttttgtcgaaataaaatttaataataatctaacttaaaggtattatgataaaattagttaaatttttacatctgttcgtgttattattagaaatgtgagatttttactattgcgattaaaatgattattattgcttgagaactactttttctctcaatgtttctaatagaaaagtgatacataaacataatgctcttggcttcgtccctgtgaaatttccctatttttcgagatgtgtagggtgaaatttta

SEQ ID NO: 270820 - DNA, 1203 bp, Cannabis indica
agattatgagtagcgttatccaacattcaacacatgacttggaacttgcagcggtggtgtttgccttaaagatttggccacactacttatatagtggatggtgtgaaagttatactgattacaaaagtctcaagtatttcttcactcaaaaagatataaacatgagacaaaagcggtggttggagttagtgaaagactatggctataaaatggagggataggtcatcttttctagatttggtctttaaaattgtctcatctttgtctttttttctaatgtttccctttatcatgtatctagaaactaaaatattttagctcaaagggctttaaaaaccgataaagagattgtttggaacagatgtatttcaaaacgtttatttctgtgattctcgtaaattgaattctattatataagtttaattattacagatcatttttcaagtaaaaaaagcttttttaattaaaaacaccatataactattttttaatgggtcatatgtaattatatttgtacataaaaattaatatatgatatatttggtacaatatttatcataatgtaactccaatacaaaatttgaaaatttgatacgaaaaaaaattttcattagtattaatttaatatttattgaaaacaatattaaaaaaagtcacgatttatccatattttattggtggtactaccgagtttgacataacatttgcacacactattagatttggagcaatgtaaatttttctaaaaatgagatatattttaagaatgcatcactaattcaaaacacaattgatcgaagatgctctaaattttttatatcatatctattcagtgtaattaatgctctaataataatatttgttcctataattgtatgtaaatataagagaaatattaaaaggcatccgtagtgcctagcaccttgctacgtgtcaatattattattgatcaaactaagtatctcccatataatttaatataatagcttttagggagtatcgctagctaatcgtaatgcgacatatcgagaaagtactaggcaccactagtatctaataacaatgctctaaatataaatatgcatatatcgtgctacaatacaatgtgatatatcgtgctacaatacaatgtgatgtgccaccatgttattcatgcgggaaattggatgataaattgactgatctaacgtctaatatttaaag

SEQ ID NO: 270821 - DNA, 1106 bp, Cannabis indica
attacatgagcgtctttctgagcgaggatttgagtatgagctccgggctacacgatcattgtagtattctgctcgtctgttccccttcttctgtttagatcgtccattaggtcatgggttgttcccagcctatcaaacacagaagagcctggttgccttagctattgattcgcttggttgacaggtacaatgactccattattctaattggatccgtcaggtatggctcctcctgatgaattcccggataaggtctacccgcctacctcttggcccacgagtagaactcgtgactggggattggacggctgaccattggttgtctaggaggcattcatcgtcgggtcatcctctgtttctcccaggggaatgacgttcggcgtttgctggcctacagtctggtaggctctttgtttcagcatagtagcttgccgactacaatcttcgatctctgcatggtgagcccttaatgcctccatctctttgtctctccattcagcaaacatacgcctttgttcatcaaacgcgagatttactgcggcacgtagttcctcctgatcatgattcagagtgttgctatgatcttgcatgagtttcagcgcagcacggagattttgcaattcggttgcgtctccgatggtcgtttgggcggttattcctggtggaatagtcgtgttatgaatgccctgggtatgtgcgtaactgttattcccagtctcttgcacaccaggcgtagtttcagtaacaagaactgtcccaccattcaccatggttcccgtcagtctaggattgatagcgggtggaacccttcaaatccctgggtcctacaatgtcagatttagcgtctgtgaatttgctgggtcatacaggccattacgagtttgcaccatcgtgttgaatgtcgaaaagagcgatctgcaattctcctctcaatgaaagcatcaaaatgttgacttcgcttttagccaacgacaatgagtctttttgataagcgataaacgatatgtcgtaatcagaatatatataagaaagcaataataagacacatgaattttatagaggtttagccccgagcagctcggtaatagcctaatcctcgttacttg

SEQ ID NO: 270822 - DNA, 845 bp, Cannabis indica
ttctggattgccttgaagtcacacttcgcttcttcatgctctgttctttctcccgagagtagtttgtcatagttcccctataagggtatgtacgagtcctcgctctattctttcctccggagagcggttttgatttctagcaggtgatctccgttctctcggtagagtcccaagatcctcctcattttcatgagggatttctcgttcatcatttttcggttgcctcccatctggctgttcatcctgattttcaggggctgtctcattttccccaggttattcttcccaggccttttcctgtctccttgttcgtgagccacgaggtctgcctcgtggtcttctcactccaggttcaggttgattttgagcgttcgtcccctaggccgccctggtagaggctgcttcacgttctaactcagcgtgcctatgctgcgcctcttccagatgacgtctcaggcgacgactttccatttcataagttttttctcccacagactgggcacctccacgattgagctcttcatccctcgtcccgtgattctgacaattcccacgctaagttctcctcgagaatgttgtccgcgtactaggaccaacgtcgggttgagttctctgggaatgtgtggtccgccccctggggccaccctcatgttgagccctcctggaatgggtggtccttctggacagcggattggtagatcttctggagcccatgggctcttctccaaaacgatggttggctttctcatgcggggtgttaacattttttggattttcagccatgtagaaggttgttttcttccaaagaagggagggttttttctgagccttttcacagaggctct

SEQ ID NO: 270823 - DNA, 575 bp, Cannabis indica
ctagtcaatcacaacgcaacatgtcgagaaagtgctaagcactactggtgcctaataacaatgctcttaataaaattacacaagggatgtcgagaaagtgctaagcactactggtgcttaataacaatgctcttaataaaattacacaagggatgggaatctctatcgacgtggattagttatcaatgtgctctaattattattaaagtaatttgtagtacaaatatttaaatttaattactgattgtaagtaaataattaaatttaatttttgacagtaataatacataagttataattctgtaacttctgtaggtacctaattgttaaaatgttaagtaaattgtcacgtaacaaatcttgattgatccacgtcatttaatttttattattttaaaaaaaaattagtttaaatataacaataataaaataacatgtggatataatgacttaacatttaactgttagctacttaccgagttccagaaatataacttaactattattatcgcaaaaattaaacttaaatatttatttattactgaaagttatatttaaatatttatgctataaat

SEQ ID NO: 270824 - DNA, 710 bp, Cannabis indica
gacactaatgaatgcaacaacctaaagtaggaaattgaattcttgataaggaaaaacaacccacacttgcagaagtttgtcaagaccgatcaaggtcagagaaacgaaaataaccaagatttattacctccaccgatagatggacatctgcaagtcatcattggaggtccgcatattgctgaagattcgagcaaagctcaggagaggtatgtctgaacagcgcagcacgaacaaaatgaagttatcctggtcgtggaagaaaggaagcccaaagttccacgaacaggagggtctaccataactttcaacgatgaagatgctgtcaaagttagatttccgcacaacaactcactggtcgtagaagtccaaatagccaataaaatggtggccagaaccatgattgataatggagcctcttccaatatcttgttcaaaactacttatcaaaagatgggactccagctcaaggatctaaccccacgtctcctgcctgtctatggtttctccggtcaaggagtcacacctctaggataaatttgtctacccctcactgttggacaagctccgacgagcatgactatcatggcacagtttctgatattagatgttccttcagcttttaacgtgatgctaggctggccggctttgtatgacttaaaggctgtcacatcaatattccactcatgcctgaagtttccaacaagaatggg

SEQ ID NO: 270825 - DNA, 774 bp, Cannabis indica
taaaaatgaaacatataaatataaagtagttattattttgagaaaagaatatatattatcaataataaataaagaaaaaaaaattggggtaaaaaaatctagttttctctcatccaaatttaattgtacatgttaggttttttttggcaatttagttgtcacaatattttttaattaatgtgcatttttattgagcatttaaattatttttattacattgattttgtgcatttaattattcttttcttctaaggaaagattcattctcagctgatctccttttggtttagcaaacttcttgtaagagaaggaattctcttatggaaaattgtctaactttggaaaacttgactttccctttttctaatggatgatttcggttttgcctttattagaacaaatcaaacaagctttatttggcaggtttgaagtccaaattcgtaattttagttcaatttgaaaagtttcctttctggtcctgctctgctgttgtaaaacccgattctgatgctgcaaattaggattttttttaagaaagttttgtacagctgggaaatcatttttgtggatgtctctatggttgctatgttctataaataggacctagagagcagccaaacactctttatctcttatagtctcatgttttcatatctttcattatgagaagagcatttcatttgtaaagacctagagtgttcaactaggttttcttattatgatctcatactattcatagaatagattgaaaagaagctttgaacaagtgtgggt

SEQ ID NO: 270826 - DNA, 861 bp, Cannabis indica
aaaatcaaaaaaatattttcatggcattcaaaagaagagttaagagataaaccttgattgtgcaggaactattgacgacggtgttggcgaacaatggcgtggatgatcggtgacggagaagactcctgcgaaggtgaggagccgtacggtactacgatgtctctgctgcctctaggttgatttttacgaatgagaaaaaaaccctaagtaaaaggacaattttttaatttgaatgagggtaattgggtcaactaaaaattcattaaactcaaatttcaacttcccgtaaaagctaaaatctagaagttggtgtgggccaactttagctaaaagttataattttaacttaaatttttaaaaaagctattttttttattttgccaaacactttttaagcaataattttctcaaaaagcacttttaacttttttaaaagctacctcaaacagggcctaaaagccctacattaagagagaatattcgacagccaaagtataactgatggtattattaactttaattgtgaaaaagaaaagcaaaaatacctaaaagcctagggcttacacaagggagactaatgtgataggagctgtagaagctttaaaatttttaaaaaactgtatcaataacacgttatattatagtagatgttttaaacttattttttattttaatttttttttaaaatttatcatttatgttttacatttatagaataatatttattattctaaacattttaattaattattttgtattttaataattatttttgcatgaggtcatgtgtatatattaatattatatataaatgactaacaaatttttttaaaaaatagaattttgataatgtattttaaa

SEQ ID NO: 270827 - DNA, 727 bp, Cannabis indica
aatccctccttacaaatagaaatttatccatggttgatcataatcaaaacgatggaaattatcatgaggaaactacacatcgccctgggaaagagccaatgggttctcaaagaccccatacttctggaacaacatgttcaagaagaaattatggtggtggtaatcaaaacccagaaggaaagaatgaagaaactaatacttctgcaggatatgtacctagaaatgaggatgcttatgatccaactaggtatgtaccgttagtggaattagaaaatcgacaactccggcaatgcttagccgagtctaaccaatgaaacactgagttagaaagaaaggttgcaacgactagggcgactcaaggaactaatacacggaatcaacctgattctggggtaagaagaccacgaggcagaccttggggttccagaaccaggagacaggaagtaaatcaaggaaatccccaaaacactcaggaggagcaacctgggggtactagggatgttctagtggatgaacaacaaaataaccaggaacaacatcgagaagttcctcaaagatcctaagaattaacaaatcaagggaatgagtgtaatgatgtaccagaggcctctcgcaggaatgaggacacaaggcaaccccaaactagggaacaggaaatccctcgtaataacgagagaaatcctatgactcaacctaggacaagcgggctaccaccgagacaccccca

SEQ ID NO: 270828 - DNA, 968 bp, Cannabis indica
gttaaggttgtatattgtattataattactataatttgagtttaatggagttgtttttgtatttttttttatagaattaaaattaaaaaagtgagagaattaaggaaaaaagagaaaaataattttagaacaattttatatgaattaaaattaaaaaaataagaaaattaaagagggaaacgaaaaatagctttaaaacaattttagagtaccatgtcaccgttttatgtctctgctttaaaacaatagatatagatttatatatattgattgatatttatgtgtgtatatatcaatctactattgatcatcgttatgatatgaattaggtctttgtagtaaacgacaagttcgataaagacaacttcattcatattggtccttttcatataatctctattatatacaatacttttactttgatgtcatactacatccgtaattcgaattgagattacttgcagcgaagaatgggcatcagtgaaccataatagcaactattaattaaagattcctaaactttaatatgttgctaactgttttattcgtagctaagtgatcttagctctttgtataactataagccataacttcatatatgaataaataatttttagatatttacatataaattgttcaatagaaattactaataatttaatattcaagcatatatcaaaattttcaactcttttattgataactaaaaatagggctgagcataaaatccagaaaaccgttcaaaccgacctaccgaacaccgctagaaccgaaaccgacggaaccgaaaaccgaaaaaaccgccaacggtttaaaccgccaatagtcggtcggttttttttggaccgtaaaccgaccaataaaaccgaaaccgaccgaactaacttatacatatataatttttttaattttttatatgtattattatattgtataatgataatatataatatattattattttatta

SEQ ID NO: 270829 - DNA, 1072 bp, Cannabis indica
taattaattaattctaaaaaatgaatgtttacctattagtaacctgctattacaggtaaaaaaaatgtaaccatgatggttacaataaaaatgtaaccattgaatagtcactcatataatataatatgaagaagaagatatatatatatatatacactgactcacaaccttgagtgtagattatcatgacttgaaaaatgtattatcacctttgtctgaaagcttatttctccctatctctaagtactaagagaactcttatggaaatagctttggaaattatcaagcttttaggggctatttggtatgcggtaatgggagaagtgggaatggaaatttgaaagttttctatgttttgttaggtttttaatattttaatgttagctaagtgaaagtggtgggctttagtttggctggcaaggaaaacccaaagaaaatgtggttttcactttccaatgctattggcaaacataaatttttgcattttaaaattgtttttttttatatatgaatactaatatatatataaatatttaaaatatgaagtattttccttatttttttatatatattttattttataaaatatattatcaatttgtatataaatttactctttataattatttattattgttaattttttataaaattatatgaaaaataataaataaaaattattttgaacacttagaaagaaaaaaatattgaattattagtattttattaaaaaaataattactattgtaaaaaaaaaaaaagttgtcacattccattccaatgtcaaccaaacacggtaatgttgctttcctaagtttatcattcccttcatcacactccaagcaatgttaaacctattcccatgaaatgaaacatgcataccaaacagctccttagggtttctaacaaagtgttttgttgatagaaactaggttgacacaatatgagcatcttagacctctttatataggggtgtgcaacatccaatccaatccaattgaactcaaccgatctaatccaatctaattacaaaaggttagatatccaattacaattggattagattggatgc

SEQ ID NO: 270830 - DNA, 539 bp, Cannabis indica
ccttctctaaatttctcttcttatttctaaataaggcacataaggtagtttcgcaagaagggagaagtatgtattctttggtttgaggggaaatcatattggggtatatcaacccaagtctcacgttgaaagaataggcaagagtagtctttgatgtaagtgttttacctaggcttactccattaatagtatgacactttttcgggaaggtgtccaaaaaacaaaaccgtgagggcagatctaagctcaaagcggacaatatcatactaatgcgagagtcaagataagataggaacatgataaggtgaaagaacgaggcacaacaacttgattactggtataaagattaatgtggacgccgcaatctttgaagaggaaggcccgctgccagtatggccttggttttggggttcgagagggggctgggcgtacgtatggtggtctcacaaactagatgtaaccacaagggacagtgtcacaccagaggctgttggtattaaggaagcattgagttaattagttgaaaactcaatcttttt

SEQ ID NO: 270831 - DNA, 1029 bp, Cannabis indica
agagatagtggattgcttagaatttttctcattaaatagtattttacaaaattctaagaaattatatcatttttagaattttatagatcattatgggctttaggtgtagtccattttgaatgtgacttagaacaaatataattaacaaatataatttgtttgaaccgcattatatggtaagataattaagtggtcaaaatgaataatgacttattacataaataccaatcgtggacaaatatttattttaaaatttagtaatctattagttatatgttcaagtaatggacactttaatgatatatgggaattaagttacatgaacaaatatatgatatgatctatagtatagtaggaattgaatagaaggcgtcatatgttcattttgatatataggatagaatgatattatttaagataaatatatagaagtagttattgtaggaggtatcaagtttggacgtagttttatattttgagagatgcaagatgaataattagacttattaagattaggcatatggagtagaacatgcattcaaagtttagaattttaaatcttaagatttagtggacaccacgtggtagccgtagagagatatgctcacttaaataactaaggagaatatcaatttttagcatagcattcacttgctttagagaaacgattaaaggaatcttaatttatatttaaacattgtacacgtggtggtggacatcgataaaatagtagacttgatcatggtagagtaagataggtgaaggattattagatagtaaatgtattcaaattttaaatttgaaattggtattatgcggttgcatgggaagtggggagctttgttatcacctcgactgattgtgtgaagattatcagaacagttaggatttaaaatgagtattagcatattatttaaaattcaaaccttaactaatggatacgacataagtaagtgggggtggggtatgagaagcctataaatagaaccttaatattcattcatctcaacactcataagacctagactc

SEQ ID NO: 270832 - DNA, 830 bp, Cannabis indica
cgagatgaatctattgagtgctgtcattcttcccattaaagcttgaacttcttttggctttgtcggcgaaagcatcttgagtatcccttttattttgtttggattagcttctattccccttacattcacaatgaaacccaaaaatttccctgaggataccccaaaagaaattttttcaggattcaacttcatatcatactttttaagtatggtaaaacattccgtgagatcctttgtatggtcttcacttttgacagatttcaccaacatgtcatcaacgtaaacctccatgttctgcctgatttggttttcaaacataccattcacaagacgttggtatgtcgccccaacattctttaacccaaatggcataactttgtagcaataaagccccatatttttcacaaagcttgtatgttcttgatctgggatatgcatcttaatctggttgtatccagaatatgcatccatgaaagtcattaactcataccctgttgttgcatctaccaattggtcaatccttagtagtggaaagcagtctttaggacatgctttatttaaatctgagaaatctatgcatctcctccatgtgccatttggttttggtacgagtattggatttgatatccacaagggataaaaggcttcttgtatgaagttatcggttaataacttatcaacctcttctttgagcgcattttttctctcgagtccagtggtcgatgttttgacattttacaggatgattaggatcaatattgaggtgatggaaaatcacattcgagtttatcctgaccatatctgaacggctccaagcaaactgatcttgg

SEQ ID NO: 270833 - DNA, 1006 bp, Cannabis indica
cgtgcgcctcaagtcatcagggtgaagcgtatgcctcaatgacagcagatgaggagtagcctcagatacgttttttcactgcctcgcctcaaggcttcaaaactttgccagcaaataccctccattacaaagcacaaagagatagagaacaagcaataacatatgttagcctctagaagaatcaaacaaagctgaaagttaattcactgcatgttatccattgaagcattttcacaaaacacatggtttgcataacaacagagcactgaagtaaataacaaaaaacaattactcaggggctatttggcattgttctttgttttttgttttaaagttgtgttttaagaaaagagaatagaacccagttttttgtagttttcaaaatctgaaggtgtttggcttatgttctgaaatagtttacgaaaaataaataacaaaaaacatgtttggataatatagttgactaatattacattataattgacaaattcctataatcataataggagtccacaacttgaacaattctgtagcactgaagtaacggtcacacaacttaaaacagtgaaatacattatttatataatacatataaaacaagattaaaacatatatagctagcaaaaagtaaatagttgtgcaaaatatagttactgtttttttagcatcatgaatcaggatgttcaatcaatatccatacatacaaattcttgtgtatggaaactataatagttacaccgcaatacttgctatatgtagaaaagaaaaaaggcttgattcaagataatttattatttgagcagtcaatgcattacattgacaaagtcagagtcagagataggcaatacaatttgagtaggcgtgatcatcaacatgtattaatcaataagtatctccattctgtaattggtctcgaatacatacattgaaataatgaaactagaacctattgtaggaaatggcaaagtgttcatagatccatgaggagaaaaatattggagtcgtc

SEQ ID NO: 270834 - DNA, 635 bp, Cannabis indica
ctgaattttccccaaccggtagaccggttgcccaaccggaattctggttctgagaattcctagaccctcatccggaattccggatgcacaatcggaatttcggttcctcgcaggaactttacaaaaaattacacaatgctcaaatcaactccaaaccataccaaaacttccagacctgttctaaacatcccctagaacatttctaaagcatcaaatccacccagaatgtacagaaatgaaaatcaccattaaagcccaagctttgagttccaaactcaaacttggttaaacctagataacatgcatccaaactagctcaaatcttcctaaacatgcatataataacttcagaaaacaacaacaagcatcaacaaccactgcagcaacagatttcattaattcactttgaaaagcatagtttttgaaccaaaactctaaattagtttcaaaccaacccaacatgcatcaaaacagtttcattcctactcaattaaacaagattaaacctctgaaaacactccataaacacagcagcaacaatgacctaaaactaagcatgcaacacaccaaacttttcttacaactcaagaaaacacaaagagaagttactagagatcaaaccttgacttggatta

SEQ ID NO: 270835 - DNA, 766 bp, Cannabis indica
gggagataaaacggctcagagcagcaacctttccggttaggctctgcacgtccttgtgtttcttcggggatggcatgttcaggagggcctgaattttttctggatttgcctcaatccctctctgactgacaatgaagcccaaaaacttccctgacttaaccccgaaagtgcatttctttgggttgagcttcattccgtatctccggaccacttcaaaacattcctctaagtcgtctgcgtggctattgcatgcctttgacttgaccagcatatcgtccacgtagacctccatgtttcaccccaggaggcctttgaacatccggttaaccattctttgataagttgcgccagcgtttttcagtctgaaaggcatgactaggtagcagtatacccccttattggtcctgaagctagtgcactcttgatctgctacgtgcatttttatttggttataaccggcgtatgcgtccatgaaggacagtagtttgaatccggaggtggcgtctaccatctggtcgatcctgggcagagggaagcagtcctttgggcaagctttgtttagatcagtgaagtctatacaaactcgccaggtcccattaggcttcggcaccaggaccggattagccagccattccgggtagtatacatcccgaatcatgccgctcgttaatagtttgtccacctctttctctaaggcttcggccttcactgagtcgagggggcgtcatttttgctggactggcggcatgtccgggttgacattgag

SEQ ID NO: 270836 - DNA, 574 bp, Cannabis indica
acaacttgatagttactaaaaaatatttttttttgttttatctttagatattacaagattaaattataaataaacttatttttataaaattattttgatagagttataaaataacttgtaaatacaccaaataatatcttgaacatcgtataagttatacttataaaaaacaaaaaaaaacaaaaaatcaaacattaaatttaaacaaaattaaatatactaatcaattccataattactaagaatatatatatatatattatttaataagtaaaagtaactaaattgtagttttcatatacttattttataaaacacttttgatatattttaaaattacttgtaaagaaactagatagtatcttacatttatatttaaaaaaatataaaataaaaaaaaaaaattaaactaatgttgctaataagttatatcataatttattagttttaaatatgtttggaagtaatgtaaagtaactataaacacgattttgtcccgtgatgtactttcacggaatgtattccgtagtacattagatgggtctcagggtacattaaatgagtgtcagggtac

SEQ ID NO: 270837 - DNA, 607 bp, Cannabis indica
tgttaattttagattaacttaaatagggatattttttcaaatttaggcgattagtttaaaatacttaatttgttatttaattaaattttggaaaattatttaagttgaaaattttgttattttagaataacttaaattagatatttttcaataatttatttgattatatattattataattttgaaatttcatatttatttataaatagattttcgaaattattgtttgaaaattaaattaaagttaaaaattaattttaattaattttggaccaacttaaattaatcaattttcattattaaaatatatagatcaaaataaatgatttgttaaaaatacattattttaaataatgagctttaatcaaagagatattcgatctccattgttggtcttacatttgttaattgttttcaatataactttgagatgctagacttcgtcctccttatggatggttattcgttgaaagcactcaataccgtaagatctcgtacgataaatattttgtaagtttttgtttctattagactctcccatacagtgactacttagaaataaacttacaaaatatgaaacaatggtggaagctcataaaatgagaat

SEQ ID NO: 270838 - DNA, 514 bp, Cannabis indica
actccccttctaaccaatttctgaatttttttcctttcattggaaccacctgaagaaagttaggattcccaacttgaaatttaatatctctacacttaggatcagcataactctttcatccattatataagcaatacacaaacttgaatctttaagctgcatcaatatcacattaacaatactctaataattgttattatatgaaaactcatttagaactttccattcagtatccttattggactgatacaccaatctagtttatatcataaaatttccttcgaacaaaatcaaaagtcctttgtcaagcctgtgtcaaacctcttctcgtgcttctaaagtttggagtgactctgcttggccattttatttcttcccaacaaattgaactacaatgtaatattaacaagttctccaatcacgatctcaattcttgctctggttacattttcaataacctttatgttgtgaatctcacggttgttgtgaaaaacccagtggaaatgcttgtctt

SEQ ID NO: 270839 - DNA, 661 bp, Cannabis indica
ggggacacgtgttgagcgtgactgttcgagactcaatgtgaagctgactgggcgtcccttcggttttcagctaataaatgctctgacaatcaatattttgaaatccaatttctctctccagggttgacagttgcactcggttacttttgatttcccgtattcatttttgaggtgggaagctgaggcgtctgaggtttctttgagataattacccctttttcgtgacttgcctataaatacccagagcattggcacataaactcatttcatcacccttctttgctaagtaagcttcagagcgaaaagaaaaatttcttggcttcaaggtcgccgaagtgccttcatacaactgctggttggatagccgttactcgaacccaaacactcgaatcttgagtaattttctgatctcctttatgcttatctttgcatgtatacatttcgaatgcaaatttcactatgctgtagaaaaatgcttaggaaacccaagggttagaaacttctgcgattattctttatcatgtcttcatgtgggtttacagccataaaacttgttagtgaactgcattgcgtccgtctttcatcttgctcattctaagcttcatgagcttttttgccctaactcaagaaaattttctaacttcttgagttttgacttttc

SEQ ID NO: 270840 - DNA, 716 bp, Cannabis indica
tttgcaatgggagtctcgatgactagggggtcatgatgcagaaagcgcactgaccttgcatcttcctcaataaaggtaatgggttgatccatgagcctgggcctttgagccgaaagttgagtaacttcccatatttttttatcatgtttagggccccatcataatgcattagctcatttctagtggttcctccaatatgagaacctctggagatcatagaaactctccgttagtccgaggtggcagtccaggtgcctgctaatcaagcatccctccgggaggtacctgaccctctggcgctatcgcggttcctcactgaggcactgggacttcggtttgagccggattcaagtgcaacaacctatttttaattcactcatacaagtggccaattggattaaaatttcaatttcatcttttaaatttttgcattcgttcgtagtatgaccaatatgttggcttttgtgccctaaataaaacccatttcaatataatcaaatttactaattaatataagatcaaaaatcgcttttatgttacatggttcacatgatttatttcatgattatgtttaatatataaattctattaagtccaaaacatatatatttgtatatgactatagtgtcatcaacacagtggagtataatcaagattatatattcaaaagtttaaattcccatgatttgtcagttcactggatttgggttgacatg

SEQ ID NO: 270841 - DNA, 457 bp, Cannabis indica
aaactaagcggtctttacatcttataagagatctaaaccatacaggtactctcgtcctatatcgaaattatattctatttcacgatagcataattgacactcacttctcagatctcgcatcaaaattatagacagttaattggtgatcaggcaattaaaagtaattaagtacgaatgaaatagaatacatagaaattttgagaaaataaaatcatattaaaactataaaacaatgtgaaacaatctccatctagaccataattaaatttttagctactcatgttcattgtagcaaattcacacatattaatttaagaaagaagaagagaatagagaagaaaagaatgctgaaaaccctgttgaaaaagccttcgcgattgatttttatctctaattttcgtcctccttggttgcttgcttcaaaactattaaagtccacttcttatatagccaaaaa

SEQ ID NO: 270842 - DNA, 1404 bp, Cannabis indica
ataacacagtttgagcattttcgatccaagttaacattgacaagccctagtgtaacttgagggggtgttaggtcttgctctgtcttctcttagagtcagagagtcagttagattatttgtttcatgttttaactaatcttttgtaaaagctgttatgtcaagttctttggttagtttttctaaccaactctagtgtttgtaatctcttcctataaatacaagtctctcacctcagttgagattgagcttttatttattttcttttctgaaattctttttttgcaaacatcaacaaaagttattagagagagcttagactagtttattctaagcatttatatatattacatataactttttttttctttcaaagaaacatataatttttttctcgttttttttttattaaaatataattgtttttcttttagtaacaattataatttgtttgttgatatagtggtattgtgcctttccaattgtagaaactattaaaggcagtcaccacattttttcgtatcttttacccattcgcagcggaaggtacgttatgtgtgtacaatatataaatatttatatataaaaaagagtaatttgtgctgtaaatattcaaatttaactctgagttgctaaataattaagtacttaaatttaaattttttgacggttaataatacttaaattattatttatgtttatgttagtatcttcccgttaagtatcaagttattatgtcattttcttatttatatatatatatatttaaattttataatacataaacaaataaaaatttaatgtacgattgactaattaggaattgtcacgtgaccatttacttgacacttaaatgtcaggtacttacggaagttccaaaaatataacttaggcattattatgttaaaaattaaacttatatatttatctgtaaccgagagttaaatataagtatttatgtcacaaattactctaaaaagaatctataataagttttatatacgtataattattttaattttgttcattaatatttaaaatatatactttttatatatattgtcacgacccgagccctaggctgtggcagatatataatatccataacttgggtggtcaaaggtcacactttgacctttgtaggaacataaagcttataaatgatccttttattaatattacaaaatattaatttaaaagatatggattaactcctatattaataagaaaatattagtaacaaaatcaggaccactgatcagtattaaagaacaataatattcccacagttatgtaatcaccaaatagatagattaaataagtgaataaaataccaaaataatacctagcatccatcattcctcatttctaactagtacatagctaatttaagtcatccagaccatc

SEQ ID NO: 270843 - DNA, 799 bp, Cannabis indica
actcaacagtaggagtctggttaaatgcatgcagaagtgtgtctttaatctcttactattgatacttagggacatcttgttgtgacattttatcttagtatagaaacattaagttccttctaaactaagtcatcaacatagcattcttgtataaacattgatgcaaaatacttgcttaatattgagtaatcattatagaaaccataaaacgtttcataaggaataggaattgtgcttgagtctttcgaataaactttgcataaatttcctatcttatcctcataattttgataagttattactatgcatatgaatggttagattatcttttctttgtttaattttaaaagttcctatcttgaacataacatagtaggctaatcactagtgtcatccaaataataatgggttagaattttaaaatcttcccacgaagataaggtatcgtgattctatgttcatggactttactcgcatctatttactattacaatagtaacatatttattggaacacttacaagatcaagaataagttctaatagtttgctatttcgtttattatattatatccatgtctaatcaaaatatgtgtgtcatagagattctctggtgtattgagtatagtctagagttcaagaagtttgaactacatttatcaataactttttcaacccctaagtgttatagaaattctttggagtttcgaatgtaatctagagttcaatagatataaaagatctttgaactgcatatattaaataacttattccgccgctatcaaatcaaaagatcttttt

SEQ ID NO: 270844 - DNA, 784 bp, Cannabis indica
tataccgactcagatttccaggcttgtctagatgacatgaagtctacatctaggatggtatttactcttggggatggagtaattatttggagaagtcctaaccaaaccgcaataccagactctaccatggaggttgaatacatagctaccgctgaaactgctaaggaactggtctagctaagaaagttcttctcaggacttggtgttgttcttggaatggaaaaaccaccggttttactttgtgacaacactggatctatagccaatagtaaagagccttgaagccacaagagaagtaaacatatagagaggaaataccacaacatcaaggaatatgtggcaagaggggacatactggtggagaaagtggacactgaagacaacttagccgatccattcaccaaagttttgactgtaacaatatttggaaagcacagactgaatttaggattaattaaaatgtattaatagatttatgttagtgtaagtgggagtttgttgggctttgtgccctaaataaaactctatttcaatgtaatcttttctattcaattatcaataaagaaacagatttaatttcattacttatttaatgtgttatttggttcatgtgatcatttatttatttatttgatttataaattcatccaaatccttatcacactgatattcttatttattgtgttgtcaacatagtggaaagtaatcaagattgtgtgattaaatgtattcctatgatttatcagtacacagggtttaactgataggataatctacaatgtag

SEQ ID NO: 270845 - DNA, 686 bp, Cannabis indica
ttgaaatctgacttggaatatcaaaagtaattatagtgatgatgatgatgcacaacatttacataaaaagttgcagccactatatatctagatcgtacccctttttttcgatgtcttgtcaagctattagatttcgcatagatcatcatcatatatagtagtgactatcatatatatatactgtacatgtatatgcatgaaagacagaattatgaatgttatgtatatgtatgtctcatatatatattttgtcaaattcgtcgtgtgtattcttttgactgttataaataaaagttaaaagaaataaaaagaagagaaaatgaagagatacttttttgggccgcaaaaggtacagttcgtactttgtgtgtgtgtcaccgaccaatacacaaaaccatgagtagagtatatatgtattcactacacgtatccaactatagttttttgtacaaggttcgatgtctcttataatatatatattaagaatgtaatttactaatttacatggtaatataaatgctttaatttgtaaatgatgatcgtgatttttcggtggataatgcctattctcaatttgagggagttagcttttgtgagtataataatgagaaataagtttataagaaaaattgttgaaatgtgtgataccatcacttttgtctggtttgtcatttgaaaaacaccta

SEQ ID NO: 270846 - DNA, 894 bp, Cannabis indica
aaatttgtttatttagggcataaaatcccaacaatgtctagttgttgtcccaatgtaagtttgacccttttgcactaagacagtcctaaaaattgaaaccttagttgcaaatgtcaacctcggcgccgagtgaaaccctaggtgcccaagctggcttccatgttgcgggttcgtgtaattttagctcccatggattgcattaggttgctccatgtcttcatggtacataatactgaaagatagtgagttggattcaagttgttaaagttcaaagttctattccgaagttaacttgggcatagggctagggtcccctgccaggttaactgttatgactcgagtctactcaactcgatgatatcatccttcttgccatgtttcaaatattgatgtccacatcaccgagaaaagtttctgagttaaaatttgaccccaaatcaactttacacttgtgtagtgttttgatgacgtgcattgagcctgcttcacttgaaactaccagatgggcatcaattttgatattcttagtcgattgtatctgttcttcaagcatttccaactaaattaggacttcgaaatcttttgcttagtccttgaaaattttgaaaattaattaacaaataaaaagagaaaaaacttatctttaaaccttttctttgatttttttttaatatttttgtcatggaatgaggattaattggattggaatcttaatcctactaagggatgccattcaaaattagagagagaaaaaaaaaagagaaaaaaactttaggtcttttacttatcatttatctttttgttttaattctctaattttccttaatcttaatagtattgggaattattgttaccttttaaatttagattcctattcctatttgcataggaatt

SEQ ID NO: 270847 - DNA, 781 bp, Cannabis indica
agaataaaattacaattttataaacattgggtatttatattactaattttttttttttatactgcttacaaacttaaaactttaagtatttatatctttatttattatttattattattattattattattattattatttacaatgttaaattggtcaacctaatattagactatgtaattgagaagtttgatcacgtatgacttgtttttttacagctaaatattaacgcctagtatcatagctctttagttcttaacttgaatttagcttgttttgcaattttgaagtttaggggctattaggatttgtatgagttggaattcatttttcatgttcaatttaagttggaaataggttcttgctgctggttttgttgtatgttgtggtggatgaccaagttgagtcatcaatggcatgttttgattcaaggtgtttttctagtttctattgattgaaatatattgtggaaggtcattataggtgttttggagagtttggtgggatttggacatgttttgagtaggtttggaattgtttggggaaacttggtgcaaatcggttaacctgttttggcagattccccgaacaattcattttctcgattcgtgtccatttcggagccttagttgggtgattccttgtttcttagggtattgtagttccatttagtaatagcagaaatttaagttggaggtttgggtttcccagattagggttttagcgtgttatttacctagttttattatgtgattagggcatccatctagcatgagacttt

SEQ ID NO: 270848 - DNA, 540 bp, Cannabis indica
tgaagaagatagctcgataggtctgatatagggcccgatagtgggctcgatggtcctcataattttaatttttattgtgacacgataggtctgatatagggcccgatatgtccgatattctcttgttgatattggacctattaggccctatatcagacccactgtttcacaataaaacttaaaattttgaggaccatcgggcctactatcgggccttatatcggacctatcaagctatcttcttcaaccttcaaccttttcaacactaacctatcatcgggccctatatcaggcctacatcggtcctgcatcgggtcaggcaaaaaatcgcaaattctcccccaaaatatagatctgagcctaaaaacctcaaaaatcgcataatctaattgtttgaaccctatatcatgaaaaaaataaaacgattacagttaaaaattcatgaaaaaattagggataacctttgacgaaaacaatgtcggcattgggtggtgtggtcgcggtgctctgtgggtcatgtacgtggtgtggtcgcgaggt

SEQ ID NO: 270849 - DNA, 656 bp, Cannabis indica
cattagaataacattccaatattttaatatacaaccaaacaaagaaatagaatgaagattgtttcatttcctttccatttcatttcattaccgccaataactatttaggtttaacttaatgatactttctactcttattttttcttttcagtatttataaatatagtatatactggtcactggccgatcaaaaatgtgacagcaggtgcattattataatttctttttacatttcattaaagaaaattatctgttataaaagaagttaaaaattgtagagaggtatccgcccaaacaagctcttctacactaataacagaggtagttaatgcatggtcatctagactattactagaagtatttttatttacacgttaaaatgtttatacttctgcaattttatgctttaatagtttttattttgccaaattataatttaatattaatacatgaatggataaagaaaaaatgtccaaccgttgaattttgtgtatgttttaacaatacaaaagaagaaaaaaagattcagacatttaaattgtagtaatgcatgtccatttcaagaagaaaaaaaaaaaaattagtagtaatcatgaagttatcgttggttcttgcataaaggaagtgggccaggaatgatattgggagacggacag

SEQ ID NO: 270850 - DNA, 525 bp, Cannabis indica
ggtgaccttttaattaagattttgaaagtgactaaagagatgcacctaatcactagagaaacaaacctaaggggaaaaccaacatgtttgagaacatccttgacaaagctccactcaactttgtcaagagcattctccatatcgagcttaagcgcggcccaacccaccttgtctttcctcctgcaggtaatggcattaataatttcatttgcaatgaagatattataagtcttctgatagaaaagcactccggttacgaaaaatgaaggtcgatatacgaccatactagggggcatactcccactaagcgacttctggaaagatatatggaggatatccaccaacaacatgaaggagttccttgatagagccaacgactttatcaaacttgaagaagccatacgacaggcccaggtggggcatgtcaataacaggcagtcacgaggcacccaacaaaattatgacccacgaggtgcacaggtagacaacaacaactcctcctagacttctagtggtaaaaacact

SEQ ID NO: 270851 - DNA, 562 bp, Cannabis indica
aatattcctcgtttggagaatttaaagtcaacaattgaaaagtctcacttttgaggaacctttcctttcttgtaaactgtcccatgttgaaattgaatcagctccaagattagagtacttttatttaaggttgtgtcaatttcagcatttcaatggagtcatctaattcgataaatggaaaaattgtaactaatgatgaggagaatcagtcaggctatgacacaaaatgaggtattgttatatatttcttacttcatttaatttgattttatggcgtttattcaagttcatactcttaatctgttatacaatattgtattaatgcttatatgtttttctcaaattttttagaaacattatcgattaatgaaaaagtcatatttataatcacaaaacagatctataaagcttagtaaccacaatacgtgattgaaaaaacagaaaaattataatggatacagcaaaagtaggagatcaagttttgttgaacaacacatagtgtttttcttttgaataaattaacaaaccccatacaacctcgcccacttagccaagcaatcat

SEQ ID NO: 270852 - DNA, 507 bp, Cannabis indica
ctgttttattaaataacaaaatatactctatattttacaaaatcgtaaaaatagaaccctgagtttaatttttgacaactcttttttaatacaaccaacttaaaaaaatatcgaacaaatatagaaaatataaatagttttgtcatagcacctatagatcggattattattaaattttattttgacaaaaaatcagttcatggttctatttgtaccattttagaaaatacaagatccattttgtcatttaacaaaagagaaggtccaattaataatttttacaaaacacaaagtccaaaatattatctaccttcttaaaaaaaacaaatttgctagaaaaatggttttataaagtatttcaattttattttatagttcctcatataaggattttttattttttataattttttttagatttatgaaaagagtaatttgctgcataaatatttatgtttaattttttttttttaggttaaatcaccttagcttgtaatgcattacttc

SEQ ID NO: 270853 - DNA, 1069 bp, Cannabis indica
atatttcggtatctgttagtgattccgtcacgaaagtagtgactctagtacactacccctaactttatttactgccattgtacatcggcaccactaagtggaaccctatttcggtatcagttagtgatttcgtcacgaaactagtgactccggtacactaccgctaacttgattacatactatgtgtcacaggacccctaaccgacagtgatagtgtcactactgccattgtacatcggcaccactaagtggaaccctatttcggtatcggttagtgatttcatcacgaaactagtgactccggtacactacccctaacttgattacatactatgtgtcacgggacccctaaacaccgacagtgatagtgtcactactgcgagtgtacatcggcaccactaactagaaccctatttcgacttcggttagtgatttcgttacgaaagtagtgactcctatacacttcccctaacttgattacatactatgtgtcaggggaccccaaatcaccgacagtaataccctagaattaagaattggattagcaaaacccgaattagataattatgaataaatgagtaattatattatatagttcaatttatgtaaaataatatgatttcaacatgttaagatcttgttggtgaacaaggggcattttagtaattgtgacccgagaagggtaaaatgatgaaattaatttaattacgtgctaaatggaactatattatttaatagtatacctgtgttgtatttttcaggagtgttctgacaggttggcgcggtatagtcacaaccgggtatttcgggccgaaccgggttcgggcctgaaatgcaaattggatttatttatttggcattttatttgatatggaataatctgaatttttatttgaaaatatttgggtatgaaatgacatgtttacccttatgtgtatgtgagatgaatttttggccctaagggcattttggtcatttgacctttaattactatgtttgacaaaattgatttttttgaggaaagataatgaatttttggctgcttttctctctctcacccgacccctct

SEQ ID NO: 270854 - DNA, 694 bp, Cannabis indica
tgcttacattcaatttatgggccagcaagtatccattttgtgtccaggtcatcattataatttttccgaagtacccaaacaatataatgatcaagtgcttaatcgaataagggtgagtgatttttaattattttttgttataattattttatatccttatttattaattaatatcaatctaatatttattttattacatagcattatttaaatattgacgggaatctccatcgagacctacttatggggactttatatacggagatggcggagaggtatagtgagcgaaagaccaacagacacaggtattttaaacaacattacactaaaccagaagattgggagaaagttcttcaattgccccccgaccacttgaatatggagagttggaagcctatttgcgaaatgttcatcagcgaaaaaatttttgaaccgctcaaataaaaaaaaaagtaaataggcaacagatgaaatacccaatgacacaaggcacaagatcgttggcttcgatacgacactgatttgtaagtattaatcctttaattgtaaaatataatttttcttaaaatgtattataaattaatttatttgtttaagttcatatagggggtcctcccggagagcatacatttgatacatggaaggtggtttacatgaaacagtcgtctaacaatttcgttaatgaagttgctgc

SEQ ID NO: 270855 - DNA, 971 bp, Cannabis indica
tacaaacaagagctacgagcaagacaatgtgcagctttgtttacagaacgtttaacaaaattaatagtgactaagggtaaggaagccaacaatgtacgacaagcagacacatgttgaccaaaaggagatggaatgaataccgaacctcgaactgcttgaacaacaaccaaagaatccgtctcaacatcaacccgaccccattggtgtctctttatccaactcagagcctccttaacccccacaacttcagctatgaccgggtccacgcacccctccaagaggaccgtgaaggcttcaatgaaccgcccatcatggtctcgagccacgccagccgctccaaattttctgtcatttgcaaagattgcgccatcaacatttaccttaatctttcccataaccggtttcacccaatgctccaagtctatgttcgaacccgaaggaacaaataaagaccccattctcctttgttgagcatttctccattgattaaggactactcttgccaatagaataacctctgccgctgacaatgatttctcccgccaaactagctcatttcgggcatgccaaattgcccaaatcaccatcaataattcctcctgtgccataggcaaaccatatatgttgatatatataaatataaataaattaaaattttcgtattttttcttaagctatatatcataaaatgaaaattgttctcataagtgtgtaactgacctaattttagccatgtatttatgtagtgtatatttaatacttttcctccattttcaagatcctaagtcatcatactttatattttatatgagggtgttttttttaatttaattccctattactttatttacttataatatattcgatttttaaattttatattttagattcaatttaattaacattataattcaaatccaatctataatagtatttattgtattagatattttgaattaattactttttaa

SEQ ID NO: 270856 - DNA, 584 bp, Cannabis indica
tatgaagcttattaatccaaccaattgtcgcagtagaatcactactaataatggggatattgaaaccaaattgatgcgcaagagtcaatcccagacaaattgcaagcagctccgccacattagcagagaaatcatctaacacacctgatgaccacgccaatcaaatcacaccctctgcatctcgtatcactctccccaatccaacaaagcccctccctggaatcaccgaagcatccatttctagaggaaagaattcaggaggaggtggcatccattgagtagctcgatttacaactgggatcgcaaggcccaatcttaaatgaaggcctcaccgatcatactccttaaactttgccatatggttattggctaagcctaaaataatatccaaatcttgattgcttgtggccaaaaatactgagttcctatcataacacagccaccaaagggttctcatcatcaattcaaaaagcctcacgagatagcatgtcaaaagagaaataggagaaatttcctgcattggtccctatgtcacatcgacggagcactcgaccacactcccaacccgatgccacactcgaatt

SEQ ID NO: 270857 - DNA, 532 bp, Cannabis indica
cccacacacaggaaccaaaccgaaacttgaactggaaccagactgggatcttggaacggtaccgggacctaaacccgaacccgaactcaaaactagacccagcctcggaccctaactgagaccaaaactcagacctgaacctcgccccaaacccaaatcaggacccgaacctagactcgaacaaaaactcaacctgaagccgtacccaggaataggaccaggacctggacttggacctagagccaaaactgtaaccggacctggacccggactcggacatagacccaccccaggattaggtccaaaaccttaacctgaacctaaaccgggactcgggaccaaaagccagacctgaactcagactcgaacattgaacaagactcgggacccagaactgggattgagacctaaaactggaccccagtctcggtcccacacctagacccatacccagagcgggaccttgggcatgaattgaaactcgactgggacccgtgattaggatccagatcttgtcccaggatccgagaac

SEQ ID NO: 270858 - DNA, 551 bp, Cannabis indica
cttattgttaattatttataattttagcccttttgactttataacacttttatttttttagaaatatcatacatttttttaatttattttataaaatattaatagaaaaaatatttaattattaaggtcattgattctttaagaaatataaacactactttttatattttattgtttaaaaaaacaataataaaaatatatttttcttgatatgtggattgggtaaaataataataattgcaaaaaaaatttttagatatgtgaaatgagtttaaatttgaattgcactattaaaaaaatatatagctacatttaatgtaagataaaagataaacaaagatatgtgagtttaaatttgaatagtaacattttaatgataaaaataaaaaagatatttctaatggaaattttttttttttttttgagaaaaagccaatttattaaaaccaaagttataatacaagaggcttaattggagagggtaattccttccaccaagtacatttagtatccaccgagagagcatatttggctaataaatgagccgcatt

SEQ ID NO: 270859 - DNA, 754 bp, Cannabis indica
tgtatttatatgaagatcagtgggagtcattatctttttcttgttctttatgtggaccacattttacttgatagcaataaattgtcattactaaatgagatcaaatttttctgtctaccgactttgatataaaggatcttaaagaaacatcttttattttggagattgagattaatcatgacaagaatcaaaaagttcttggcttatctcaagaaggttgcattaatcgtgtgatcaaaaggttcaacatgaatttgtgtaaagctggttttgttcctattctgaaaggggataaatttactaagcaacattgtcctaagaacgacttggaaagagaagcaatgaagaacatctcatatgcaagtgtaatagggagtttgatatatgcccaggtttgcactcaacttgacattgcttttgtagtcaatgttcttgggatatatattgggttgtagtaaagaaagttctgagatatttataaagaacgaatagttttatgcttgtatataagcatgtcgacaatcttcgagttattggttttctatattcaaattttggtagttgtgtagatgatttaaagtcaacttttggctatatttttactttcgttggtgcaactatttcttgaaaaagtgttaaataaactttaatcacatcatctacaatatatgttgagtttttcgcatgttatgggacatctttgcaagctttatggttaaaaaatttgattttagagatatgactagttgattct

SEQ ID NO: 270860 - DNA, 643 bp, Cannabis indica
ctgctggtgcgtatgaggacacgggtgtctaaatgtgatgcccaagggcgcaagtatagattgcaaaggcctgtattcaccaccccaatcagactgtatagctttgatgtgtgtagtaaattgcaactcaacataagacttaaattgccgaaaaatcagtggtacttcaaatttatttctcattggataaatccaagtaaatttggaaaagtcatcaataaagctaacataatatcgaaatccttccattgaactgtaaaaagatggtccccatacatcggtatgcacaagttgaaaacaggctgtagtttttggaatggaactactgaaatgcatactatgtaatttgccatattgacatgcttgacaaaatggaagagagttacatttagtggatgaatgtagactgttgagaacatttttaactattcttgaggaggcatgacccaaccgatgatgccacacttgagcttctgtaaaagttgcagaggtattttcttgagtgcaactgtatgcagcaggaagaggaagaagtcctttgctgaattttgtagatgtagcactcgactgagaaagatcaaggtgataaaggccatgtttaagatggccccgcagaagtgcttggcccgaaatcttgtccttg

SEQ ID NO: 270861 - DNA, 488 bp, Cannabis indica
tatatatattttttactttttttctaaatatttttgtggtcagaattttttttttattttgtgttttttacatcacaaagtcatcgacacaaaatatatttcataacgttcttccacacaagaaaaataataagtgttagtaattggcaacactaaaaaggatgtcaatttacttttttctttgaaaaggaacgttagtttaaattttgtttaaattagttggtatatcttacattttgtttaaattttaaatttgctcacacttgctaatacattataaaagaaattaaaatgttgattttaatttttggttcatctatgcctataaaaatatatatacttctcacatcttaaattgtccttaaaaattgtttattttttagtccaaccaatatcgatttgaccaaaatttctatttaaaattaagaagtaaaaataaaatattttttaatttttatctttattttttttttaaaaaaaaacgttag

SEQ ID NO: 270862 - DNA, 701 bp, Cannabis indica
cataaaaaattaaacatatacttttttttgttattgttaaacaacttaaaaaaacgaataaacaactcgataacaaccgcactttaacataaaaatagattaggcatcaacacattgcgacattaaaaaacatacaaataatctcaaaaaaataaaacaaacttaaaagtaattacaaattacttgtacatcaactcaaaaatatatgtatctaagaagaactaaacatatactcttttagtacaatttgatttgatattttatattgataatattttttattcacttaaatttctagagattagcaacatggtagtgttcagtatcaaaaatgtgtatttatatgtctaaaattaattctatttataattttaataaaattaatgtgatattttttttctaaaatatttttgtaagaataaataaattcgtagcacatttgaaaaataattagaaaaagaataaatattattttttaaaagtaaaataaagacacatttttaggggaaagagaataaaatctcaaactaaaagtgatgttatcggtgcttgcaaaaaaaaaataataataataatgtcattggttgttgtaacacaagataatattttttattagtaaaaatataaaatttaattttaatatttgctttttaaatattatttaaaaaaaataattaattagtcacaccattgctattttc

SEQ ID NO: 270863 - DNA, 1229 bp, Cannabis indica
cccaaaaagcaaacacataggctcacacaggtcaaactgatttgaatgggccctatcatctttctaagtttatcatagatgaaagaaattacaaaatttacttgttaaaaaattatttatatgatctattaataattggactatgactaaaatcagatcatcggatctgtcaacaagttaatcatagcaatttagatcaaataaataataggtttgttaaaaaaatttaataaacaaacaataccatgttaggttttgtgccctaaataaaacgcatttcaatataatcagatttactaattaataaaagctcagaaatcgcttttatgttgcatggttcacatgatttatttcaggattatgtttaacgtatattaactaaagaacatatatataaatatgtatatagttgttcatgattatagtgtcgccagcacagtgaagtataatcaagattatatgttcaagagtttaattccaataatttatcagttcgctggatttatactggcatgataatcagtgataaggtatacttatacaccttggataagtgttatgtcctttccagggtattggcaaagtcaatatcaatggttgatcgtaggtctatggatcttaatcctgatatggttaggttcaacttagttgtattatttatgttcttcaatttgtttgttaaagtcgaccaattagatcttctcgtgacatacagattaaggaaatggtagttcaattgagtgggaatgctgatcatagatatggaatctataacttctataagtatttagaagtgaaacgataatttactttgagcttggctgaatagagatatttataggttgctaagtgttttaagaataaaatacattgaagggtagaatgataaatttgtccctattcagtgtagatcatctatagaggatccttgactattaggattgtaacaatgaataatcatcacgtatcaatattgtggtacatataaagcgttctatataattgagagtgctattgaattccaaatctatagtggcacaagtgggaattaataagttgagaatttacttggtaaattctagattacttattgaaagctcggttatgtaggcccatggtccccttactagttcagataatactacttgcatactcagttaattgattttagttaatcaattatcattctataattagaatatatggcttatttataaattttcactaag

SEQ ID NO: 270864 - DNA, 760 bp, Cannabis indica
gaaaatacgtaaaacaaagactttaaaatcaacaaaatttttcaggtacgaaaaacttttcaagaaaactttgagatttttgttttttcaaagtggattttcatgcttagaacaatctatattaatatatgaatgtattgatacatatacaatgcatatataaacatatatacatatatatactaaaaaatatatattataccgtacataatatatataaatgaaatgtatatatgtatatatatgtatttagcatttatatatgtaaacaataatattaaatgatgaatatgaatataaacaaatgtaatgaaaatgtatatatgtataacgatatatataaaactatatataaccgaaaatctgatcgaaaacgcatatatataaatacatgaataaatatatatatatatatatgtataaaatatatatatcatcgtgaatgaactgaatgtatataagtatatacgcatgaaaaatgcatatatataatatgaatgtatatacgaacacgaaaacaaatatataatatatatatgtatataaaactcaagcaaaatcaaggcagagataaaaactgctctgataccaactgttagactataatatagtatatgaaatatcgcatatatataaacgatatgtaatgcggaaaaactataaacatatcgataatatatatacaatgaaggatcgatatacctccagcaattaatctttgagcttcaatccctgcgatagcttcggtattggagttcgg

SEQ ID NO: 270865 - DNA, 551 bp, Cannabis indica
taggtcataaatgtaaatttttttcattttcagtttattatagaaaaaatcccaaaacaattagctaggaaatttttgttaagggaattttcacattccttaaataaatcaactagataaattatgtttgcaaataaataaaataatagtagtttacacttgttttatggtctaaaatcaggtttagaattatttcaatcaatgtctaataaaactaactttgttatatatctctattaatacagcttttataaatcttttgagttggattggggatatcaaacatctaaaataatttaattgagatattagcgacaaaaatacatatattttaaattttttaacaattaaccatgataaaaatacgtactcaagccttctttgtgttagctatttttctttcgtctaaaagactatgttaagtgtcacgatcgacatattacagtgtacacaagtgtacatgtagcaaacttttagtggttcacgtaatattaattattaaataataattttaaaatatttaaaaaagtttaaaataaaaaaaaaattaa

SEQ ID NO: 270866 - DNA, 1129 bp, Cannabis indica
ctctccaaagcattttttatcatctaattgttattgaaagttgacttactccacaacttgatgatttctttaaccatcttcaatttacacatgagcttggtccccgaccatcccaacgccactgcatttttccaccaaacctcaaaaaaattggaggagctgtgatcgaaccactagttatcaaaccgaaaatgcgcggggctccatttaggaaaattggagtccaggattattgggctgtgatcagagactaatctcaccatcatttcttgtctgacaaaaggaaacatgaccttccatttattactgaataagaatcgatccaatctccaaatgggtaccgatttgaagttcgaccaagtgaacctttcgttgtttacttttggatccataagcctcaactcttgaactaactcatcaaacattctcatacttttagtactagaggtactattctttttttcttcaactcttctgaccacattaaaaccccccccccctaaacaccatgattcgccacatattgaactcaatcccgccaattcatcccaaaaatcagctctaatcttataagaacaaggcccatagacccctcaaaaccaccaagggtctttgccatcaacttgaatcaaagttgaaatcgaaaaatcacctaccatcgagtctaaaatcgtgatgcttctagtgtcccacactatcaaagtaccacccgagctccctatagctgggataagaatccaagctttgaaacgagacctccaaatactcccaataaagcttctgtccactgcttctctttttacttgtaaaataattaaatccggctcttcgtttctctctatccccactgcccctaatatccatgtaagaatcttaattgtaatctttttttggaaccctggacttcttctgacttttatcatagtttatgttaaaattcaaatttttaattccctgcttttctttttcacttccttctcattaccctcctccactacctctgcttcctcattagatactattgtcattcccatgtttgtcaaagttgccactattatgccaagagaacttgctcaatttagattccccttatcaactccatcatttcttctatctatctttataggca

SEQ ID NO: 270867 - DNA, 636 bp, Cannabis indica
tcactcaattgaactaccatgtttccaagatgtagtatgggttggtcgatctttaacgaacaaactcaaaagaacataaataaacacaaattgagatcgaaatctaaaccataattaagattaagatctgttgaccaaagatcaactaggtaatattgacttagatagatataacgataagtttatgatatcttatccaatgtcaatatcggtccgatccgatgtatactctatatatctgatactagcatactttgccaatgccctgaaaaggacataacacttatccaaggtgtaagcaaactttattgctaattatcatgtcagtgtaaatctagtgtactcacaaatcatgggatataaacttttgaaacatataatcatgattatattctactttattgacaacactataatcatgaataactatatgttctagatttaatagaatttatacattaaacatataatcgtgaaagcaatcatgtgagccatgcaacataaattgatttctgatcttttattaattagtaaatctggttatattaaaataaattttatttagggaataaaatcccaacatatataacataatgaatgtgtattttttcgggtagataaggtatgggtgtaatt

SEQ ID NO: 270868 - DNA, 450 bp, Cannabis indica
tttctatcttgctatatatatatatatatatttctacaacactttctttaactagtggaattgtctcatttcacagtatttcctttttctagtctaaaacctggacaatatggttttcccatataataaatttgtctgaactttaagatcttcacagctcaaaatatgggtagagtctcatatatattttctcagcatggagacatgaaacacattatctactcatgacaacacaggagttaaggctagctaataggctacctggcctacatactccagtgaacaggtatctaatatttctcttataccacacttattaaggtacctaaccagtggtacatttgcttatcacttttagacaaacactttgtcagggaaagagattattctaagataatataacctttatcaaatatacccatgacatgtttctaatattccattgatctt

SEQ ID NO: 270869 - DNA, 547 bp, Cannabis indica
attatagggaaatgtgtaaattgtgtttggttagagtaatatgtaattatattttttttttattaaatgaaattatttggttgagtacaaaatttttatatattattttaaaaaattaataagatgaaaaatattttttattatagttatttaattgttttttttttgaaataattatagttatttaatgttagttatacattagaaataaaataattattcattaaaaaaatatatttatcaattaataaatattaaattttattgtattttttaagggaattactctatatactattttttttaacttttttttctttttttcaaatttaggtttgagttttaaagtggttgcagcactagttgtaataggggtttctatacgattttttgttgcaatttaggctgcagcgctagttgtaatagaggtttctacgtagaattttataaaaataacaaaaaaaaaaaaaaaattgttttcaaatgtaaaaatgaaaaggtccctatttttaagggaaatttttattagtatacgtaatatacatac

SEQ ID NO: 270870 - DNA, 548 bp, Cannabis indica
ttgttcattacacttatcggaattgtttctacaatcaatttgtcacctattttatttgctccagcgtttctatcatctaaggtaagtgttttttattattattattattcatgttcggttaattcgttcgttgtaaaaagattagaaaaacatatatatattacacattatgcatttaattcgttgtatatatacacatatacgtgtatatatatttacatatatttttaatagcttaagattacaataataaaacataggtaaaaaaatataggtaaaagtcggtggctttttgtataaatttggttcttactaattagagaacgacgatctcttccttccactttgaactcaaataattctctgtcactattgatttcccaaaaattgaattggaattggaatacagagaagttgagtcatcgctctttagttaataaatactagcaaaaagctacgtgcgaggcacgtatactaaatttatcacaaattaattaatcttataatcttaacttaatcaaacagggttctagatatatgaacaataa

SEQ ID NO: 270871 - DNA, 828 bp, Cannabis indica
aaaaccttctcctcctatattcatatttttttcaattttcaacctgatttctagcaatctaagctccagtagtagcaagtagaaaatccttgaagagggagaacttaagggccgagatcattggggatagttctccacttgggttggccgaaatgtatgaacttgaattaaaggtaagaaaagtatattgtactgcaaagtacgttgtatataatacaattagtattgttatgaattgattaatattgagatatagttaatattgttatataatgaaaagattgattggtggagtatcgataatgtgatgatattatgcatgtgatacatgggctcacctgattaggtgataaaaatttcctagcgacgcactgggcataagtacgggcgtcattgatatataatgagtaccaaacataggtacaggcttacctgattaggtgatgcgattttcctggcgacgtactaggcgtaagtacgagcgtcagcgatatataatgagtatcgagcgtaagtacgggctcacctgattaggtgatgcgattactcctggcgacgtgtagatacggcgtcagtgatatgaaaattgaccaggttatggcataaaatgaaactgttgtagggttttctcctggccacgtgtagatacggacgtccgtgacatgataagtaccggggcataggtacgggctcgtctgattaggtaatgcgatatattggtgccaagttgtggcacgagctcacctgattaagtgatgcaattatatgatatatgggtgcaggtttttggcacgggctcacctgattaggtgatgcagttatgcaata

SEQ ID NO: 270872 - DNA, 820 bp, Cannabis indica
gtagcgaatttcaccaaaatcaacactgaaaggccttaaaaactgcctcaaagcccaattttatagtagtgattcacgaatgaccctcggaggtgtttcgatacacttttggagtattataaactttaatgaccaatgataacataaccgttgcctctaagaaagctcatgaatctatagcattacttggaatatggctacgagactcaaattacttttataagggaaaatactactttataagtcttccaagtgataggcccaaccactttagtcctagacttggtgccaagtgccttctaattcaaaaaaaaaaaaaaacgccaagatgcaaaatggccctaaatctaacaattaagttaataaatatccctttttataaaaaattaataaaatgtctattcagttgaaaatttgatgaattacaattataatcttgaataattaagtgtttggtatagttattttgcaaaatagtatattatttttatgtgcaatagtatattaaaaacaactgaaaggtagtatattagtttaagattgttgtatatattttaatatgctatggtatagaatgaacgaaagacggatattaaaaaaatgtggaatattagcttaagtttgaggtatagttatatttcactaaaaaatattatcttttatgttcattagtatattttgaaggaaagaaaaaagaaaaaaaaaatcaatgtggaatattaaatgtagttttagtatatatatgtttccactatactggtgttatattaatttttcactatagtatctatgtcttatgtattgcaaaaattatagtttt

SEQ ID NO: 270873 - DNA, 585 bp, Cannabis indica
gattgaccgtcatttgtgtgaacaattgattttggaaactgatagccaaattacgttgtcatccttttttggtctattagttcatgatgttcgtactcttctcttaattttaaataatgttgagttgtgttttgtcaaacgatctgcaaacaagttcatgttttagccagggattcttgtttctctctaggtcgtgtgcttcaattggagaattattccaacgaagtgcattctattgttattaacgattgctagttaataaagttgctaagtttattaaaaaaaaatgctctaaccaaatcgaattacttttggttcaaaactatactttgtatttcgttacatatataatatatatatatatatatattttaagtaattagttattttataattaaattttttaaagtttataaaacatatatagatatatttggcaaaagtcaatattaatattttgtttagcaacataataatattgtatccgaaaaaaatatgtctgagtatatatcaaggtcgatcttaagttgaaatagacctttacaccacatactaaaatttttaattttttacttttatactgtg

SEQ ID NO: 270874 - DNA, 627 bp, Cannabis indica
cagcccgaacccgaaccctaaccctaacctcgaacctcggacctcgaacccaaacccagggctaggtttgagtttagggtttgggttcaggtctgggggtccgtgttcgggtttgggctagggttagggttagggccaagttccgtgtctaggtacgggtcggggtcggggtcgtggttgaggtctgagtttggagtctgggtccaggtcagagtttaggtttgggtccaggttcgagattggatatgggtcggggtccagttttgaagtccagtttcggagtccgagtctgagtttaggtctgactatgtgagaaaaaatgtaaaatataatatgttagacaaaaaatatttgcaaaaataaaaaataacattttaatgttttttgttttctagttttttaaaacttagttttcaaaaaattgtttttaaaaaatttggccaaacgcctattagattttaaaagctgttaagactgaaaaataattgttaaattatgaagtcaaacaatttctaaattattcatttgtttaaaacattataaaaaaattgagataataacttgtcaaagtgccaaaaacataagtgaatacatgaataatttttgatacggaagaattttgtaaaa

SEQ ID NO: 270875 - DNA, 677 bp, Cannabis indica
tgaaatcaatgcatactcgccttttttttgtgggcttaggtaccagtacggggttagctacccaaagcagttagaaagcttcaatgatgaacttattatcacatagattttctacctcctcttttaatgcatgtgctcgttctttatccaatagtcttctttttttgttgaacgggacagaagtttggatcaatgtttagggcgtgagatattacagaaggatcgataccgaccatatcctcatgtgaccaggcaaaactgtctaggtttgctcttagaaactttattaaggctaattttacttcgagaaacaaacctttgccaattttgagtttccttatcgggatatttgggtcaatttctatctcttctggttcttccactggccctacatttgtattcggctccccaagtcggggattcgcatccttatctctgccttgggcgacttcttcttgggcaatacttttccccttgcccgaactctagccggaggtattttccttttttaccttcgctagggcaaggttatatcattcctgtgcaattttttgatttcctttgaggcatcctatcccattctttgttgaaaacttgatgcataaatgaaaaactgatgtgacaactttcaagtcatataggggtggtcggcctaacatgccgttgaacgctgatgg

SEQ ID NO: 270876 - DNA, 1099 bp, Cannabis indica
gtaaaaaaagctataatgacagaattggctctccaagaaggagagtaccctctcaaatacttgggagtccctttaagaccaactaaatggaaagcggaggattgtagcgtgattatcaagaaaatcaagcaaaggcttcacacttgggctactaggcatctatcgtttgccggtagagctcaactcattcactctgtcctacttgggctaagaaactattggatgagtatatttattcttcctcatagtgtcacaagagaggttgagaaactttgtcgcgggttcctttggggttggaatgggagtagaagtaaacttcatgtggcttcttgggagaaagtgtgccttccaaaaaattatggtggtcttggcttcaaggatggtatcaagtggaatcaagctattcttgctaaatatgtttgggccatttcttccaaaagggatattctttgggtgaaatgggtcaataatattttttaaaaaagcaagaattagtgggattatgaactcaagagtgacactagttggtattggaggaaattatgtcatttaagggacaaattcaactcaggaagacatcatcaaagcaggggcaggtacaaagagttaaaactgctctgttgtataacagtagcatttcacaaaaaacccttcgaatacagcaaatttaactggtgttccattaacatgccgaagcacagattcatctttttggcaagctatcgaactctcaattgctatctcgtgataagtttgagcagtttcacatcaagcttgacaatgttctttgcccggtttgtgaggctgcaccagaaagcaatgctcaccttttttttgattgctggttttcacaacaggtggtggagatggtgtgcgtctggctgggagttaaaatttggccgactggtttccacagctagaacagtggctggtgcagaatgatagggcaaaaagcatgggttcatgtagcaaccatggcagccatgatttatttcatttggagcaataggacaactgccctttaacaattttcgagtacagcttcaaagattatacaagtatatcaaaaaaacaatgtattatagattacatataggct

SEQ ID NO: 270877 - DNA, 960 bp, Cannabis indica
ccttgcagaatgtataagccattcttcttttcaccctttcatgatggtaacgagacccctttgcaattctcatctgaccattgcaagatttataactgtagccttcatcttcaagggttccaagtgataacaagtttctcctcaactctggcatgtgtctcacttcatgcagcattcaaaaagtgccatcatagtgcttgatagcaacatttccaatgccaattaccctgcaagaattgtcattccccattagtacactaccagcattcactttcctataatcaataaaagtttcaagaatatgacacatatggtatgtgcatccagaatcaagaatccattcactagtgattctttgatctgaaaccatgtacaagtcaccatttgaggagcaatgatctgagtcttctacatttgaagcagaatcatgcttctttttcctatcttctttgagtttattcttaaactcaatacataacctcttgatgtggcctacttttctacaaaaataacattttctgtccttgtgatattttcccatggactttgatcttgactgagatctgtgttggcctttgaaatgatccttcttgtagtgatctctacccctgttattgtctcttcctctggccagataagcttcatccttgacattgtctttttctttggccatttcctgttctttggatttcaaggctccaagaacatcatcaagggtgagagtattccttccgtatttgatcacagccttgaattactggtatgcagctggcagtgatctgaggagaatgacagcttggctttcttcatcaatagtgtacttgaagttagccaatcctataataatttgattggaagcatcaaggttatcatctagagataagtgagaagccatttttaaaaccatataaagattctaaaaagattgatctattagttagagagggtttcatgtaaatc

SEQ ID NO: 270878 - DNA, 659 bp, Cannabis indica
tgaagcttgcctacaacaaactcaacgctagccctgaccatgtcctctgctaactgaggtgagatttgaatcatgctagctacctgcccgggaccctttctacttaaagcattagccactacataggctttcccaggatggtaaaggatttcacaatcgtaatccttaaccaactctaaccaacgcctctgtctcatattcaaatctttttgagaagaaatatttgagacttttatggtcggtatatcgttgctcataatcttttagctaacgggaggcataagtaataacccgatcgacctacatcagaacgcaccccagaccctgtctggatgcatcacaataaacaacaaatttctctttatcagaaggcagagctaacactggagctgaattaacctctgcttcagctccagaaagcttgattcacacttatctgtccatataaaatgctgattcttttttggtgagcttggttaagggtgttgaaatttagaaaacccttcaacgaactgatgatagtagccagccagacccaagaaacgtctaacttctgtcactgttttcggtcttggccaatctctgacggattcaatctttcccggatccacattgatcccttctttactaacaatgtgtccaagaaaagacacctgtga

SEQ ID NO: 270879 - DNA, 555 bp, Cannabis indica
tggcgtgggggatcttgaacctcgaggtcctttttctacattattttataaaaattaaatgagtacaattacattttgaagcacattgttagaaattattgattacttacctcatcttcccttactttcaccattccactccgaccacttcaatgtctggattggatttttgctgaacgttccctttgcaccatactcaattcttacaatgccaaaaaaatatgttagctaccagtacttatatttaaaagtttatcttagtaaaaatataactagtacctaaaatttagagttagtcaactttgaacaaatttcaaccaatccgtaaagtcaattttaagatgtttttcaggaacgtatgccaatcgttccaaatcattttcttttaatgcgggcatgattatatcttttgtcattctcttcttgaagtctttcattagcttctcagcaaggatcatgcaatcatgtttgaaatcatctcgcaccacaaaacccatctagttttaagaaaaacaaacatgattagagttaacatctaaattaatcaagcacaga

SEQ ID NO: 270880 - DNA, 827 bp, Cannabis indica
aatcatctcatgattagcttaagtaggattataatcttactctaatacccacataatcacatatttaataaaatatttccaattaaaatatcaatatatttttcgggatattacagtctcaccaagtcctgacaaatcataatgttatgcccaatatatcttcctttaataaaaccaccttgggaaggagagattatttcaggcaagatatttttgattctagaactcaagagcttagttgcaattttataaataacattacaacaagcaattggtctaaaatcattaatagtgtttggacatttcaccttaggcaccaaggtaattattgtagaattgatttcttttaaaatgttacctgagccaaggaaagataagactgcattggtgacctcctccccaatgatctccaagttatcctggaaaaatagctcgagaatccatttggacaaggagattttgccccagcaatgctgaaaaatagctgccttcacatcatctttagtaaattctttactcagcatctctttatgttcagcagataaataagggcaaatagaaagcactcttgtattaatcttccttctattgtcaatcttagtggcaagcagctccttgtagtactcaaggaaggctgttgttatttggttaggctcatgagttctgctcctgtccctttgttcaatagacagaattcgattagctcttattctctgcttgatactcgactgaaagaaagcagtgttccaatccccatcttgtaaccaagcaattttagctttttgttggaggaaggatgaataatttttctgagccacaaccagttt

SEQ ID NO: 270881 - DNA, 629 bp, Cannabis indica
cactcttatatccacatatttgtcttttttcttgttcatcttgctttagaaggacaacacccacatgtttgtcactggcgtctgtttgaagaaatgtttttcgtcagagggaatcttaaaggtggtagattctgcatgatttctttcacctttctaattgccatagttttgtcatgtgaccattctggattattctttttgagaatattgctgagtggcacttatcagcatagacagtcagggaataaagtttcgcaaataattgatgatgcccaagaattgttgcagttgaacttttgtgagatttttatctgggaatttgagtagttcatgggctatgtggtttggcttcatattttcctttggataatttcatcccaagtaattctatttgcttcagtccaataatcattttctttttagataacataataccatgggctttagtgatagtggcaaactgggcaattaatgattgatgggcttttgcatcaggagaaaagagcaaaatatcgtcaatatagatgagagcgttttccaatatcgggccatatatcttggtcagagccttttggaaggggcagttttgaactcaaaaagtaggagggtccattggaaatgatgatttg

SEQ ID NO: 270882 - DNA, 372 bp, Cannabis indica
ttaccacagtcttactcactatgattgagtacttgacttgctatgtgttggcatggcactctttcactaagggttcgaatatgatgaaaaacactgtaggcggtgaaatcactgtagaaggaactctctcatctactaggttttatttggttgaaggcaacaagtgggtgagtgagagcatcgtgttccatttatagtgtttcaactagggcttagggttaaattatatggatttaaaaagaataaaatattaggcaaaaatcacttctaaggttggccaaacaaaggaccaatctctagttacaattttgccactttatttcaactagttattcttctttcaataataccatattttccaattcaatccta

SEQ ID NO: 270883 - DNA, 565 bp, Cannabis indica
acgaagttactatccaatacatttcaatagattgtaaatatgaagaaccagtacacaagctgaaacaagtgctccaatgcaaccaaaaaagcactcaactgtaagtaaaataccaagtgaaagaagaatatcaaccgttgaggattaaggtcgatccaagctattcttctacatacaattaaaattgaaagaaccttacttcaaaaggtattcattgtgtgtgaacatagtcaacgacacaacaacaaccaacaacacctctttctttgcaatgagtaactcattagtttcataacaattattttaaggttgtacgccatatccaaaatataaagagtaacataaagtattatcaacatcatatcggcacattaatgtgaatttttaaaactttccttattacattgactattttgttaaatcttcaaaaattgtccaactgttgattgatagttgtaaaaaatgtgttatacataacacaataatttaaagattcaaataattctgcaactattttccttcgtttactaattagacaagttgcttaaaagttgtttctattggg

SEQ ID NO: 270884 - DNA, 592 bp, Cannabis indica
taaaacgtttatgctagatcatcccatttgttcaaaatagattataccatgtggtcagagtaaagtatatagaaaaaatcaatgcaagaagtgttatagatagtgagtattggaaagtaaactcagctaaatttagtatgagttccttttcaacaccaagcactactacaacattgaactttaaaagttattttttcagctgaataataaaaaaaaggcagctaaagtatgttttactagttttggattccgaaaattttggtaagacagttattttataaaattcgtaactataaaatacccaaatttctatggcaattgttttttttttttgagtaatttgcggcataaatacctaagttttatgccgagtaacagataaatacctaagtcttatttttggcggtaaaaataccttctgctagagtcctggaacttccgtaggtacctggacgttaagtgccaggtcaggatccacgtgtcactcgttaattggtccatgtcattaatttttttatttattatttaaataattatttaaatgtttaaaaattataaaaattaataaaaaaactaaatataattcattttt

SEQ ID NO: 270885 - DNA, 441 bp, Cannabis indica
actagaaccgaactaggactaggaccaggactaggacataaacccaaatccgaacacagatcaaaaccaagatagagaccttaacccgaaatgatactaggactcgaacccgaacctagaatgggacttaaacccacacaataacgggggcctggaccaggaatcaggataagcatctgggaaacaaaactaggacatgaacctagtacccgacccagacccgtacttgaacctaggacccagatcgtgtcccggtatcagaaatggaaccagactgggacccgagattgggatccgaatctggacctaggggttcgacaaaacccgtagtcagtgtcttgatttgggacatagacatggacccgaaccctgacaaggacctgaacccacacccggacctgaacccagtcccaaacctaaaagtggacccgaacccataca

SEQ ID NO: 270886 - DNA, 510 bp, Cannabis indica
atgtagtatcagttacttccaaatattattttaataaattcaaaacagtgtctgtactgacgaaactaaaagaaactaattaatatactaaataagatgtaaaataagtttcaatagtaattacagtgttactacactgtaaatcttgatcgttccatgtattcatactaccacatatagcctaggtgattcatgatcgaaccaatcctcatcatcatgctcatcctccttcgggtcaacatgattcaacacttgatcatcattatcaacacttgtcgacgaagatggtgggtgatgtacttcaggatcagcctgagcggggagagaggcggtaacaggcgttaaacgattaagtactttttcccatgcctgagcgatacgtagatcaagcaaaaccttgttagggatcattatcctgttgtccagagtcaaggtgatagagacatgacgacggtgacgagggcggtgtacgtgaaggagagtactgacgagggtgaggggcaacgagac

SEQ ID NO: 270887 - DNA, 999 bp, Cannabis indica
cctcaattccttgctaaaatcttgaaaaactgctaagattggactggtttcctctggttcttgctagggctgtgtaacaccctactagtttaggcgtgttaacgtgatttttaatttaattgtacagctcgttgctaatcaacgcgtttattgaaaatcgtgaataattaaaactttatttaactaattataaataccaagataagttacttatattaaaccaagatccattacaaaatatttacaaaagttttacagtgcataatacaaaagtttgtcgcccagggactatacaaaatatgcccagctgtcccaaagaccgtacgctccaagcctaaccgccccgacatgtacaatcctcatctgctcgctctcatggctgctcaaccttagctttgcccttacctacacatgcaaataatatttgtgagtcgacagactcggtaagaaaagcataatcaataacatagcaataacccagattatagtcaggcgcccatacacccaaccataaccctatcctcgtgtttgacacggtaccgagtcatactcagcctatactcagtacactagtcatactctagccatactgatgtgatagcgtcgattaatatctgagccaaacatacatctattagtatctaatataactctacgtatattgataccgctatcgatataatctaacaggcgtaataaacatgtatgttaaacatgtaaacacatatgcatatcattatactgatcttatcttgtttctgaattcaggtgtgccagccaacctgagtggaacagttgctcgacgaattacaggcccctaaatcacataatttgtaaaatagataagggacacgctaaatcacttattgaggacttaaacttgaaactaaaagttttcctatcgatgaataacatggaaataacctaaatattgcaaaaataggaaaaactagggtttcctaaattgccccaaccagtagaccggttccccaactagaa

SEQ ID NO: 270888 - DNA, 4121 bp, Cannabis indica
taatttagttttagtcacaacgtatatattcacaatgaaatgtaatttgtgttactaatatttttagctactaacttttttaataacataagtttaatgagatattttagtcacaatttttttctaacttattttgactataagtaactttctttgaagtgggttctatgccatactcttcaattttcttattctcctaaatttatcacaatctatgtgttttttcccctaaaaacattgttgttattgctaggtgggcatgccaagacattgatgtttgtacatataaatcctgaagttaatgctcttggggaaacaattagtactcttaaatttgcagagagagttgcttgtatagaactcggggcagctaaatcgaacaaagaaaccggcgaaatcaaagaattaaaagatgaggttcacttcttcattacattttcttcctaatttcttgttgtctaacaaatcatgcactaattatacatccatacaggtctcaaacctcaaacaagcattagagaaaaaggaagccgagctagaacaatacaaaaacgggactctaaaacccgccatggattctcaaaaagcaagagctgtttctccttttcgccttccaagatatggcctcaacaataacactaatttgaaaaccgaaatctctcaaagaccctttgatgagactaagatctctgaggtaagtgttataatagaagtgttatgttttcttgttggaatattgaactatctattttccttttaacacttatgtcaaatcatttttaattcttagactagaagctgttcttcgggtaagcaaaggcgatcgaggttccctctcgggttcacagaaaaggagagtttagtacctaagatgtcatacttaggtgaagaaatcagagtaacaagcaatgggaagcaaagatcatcgccttctccacccgttagaagatccatttcaacagatagaggatcggttatcaaaactcgagttaagccagatacaatcgaaaaccaaccaatttcaagagtaccatttccagctagagtgcctagtaacaagtctcttgcaactgataacaactcaagagtaccgatcatcaacaaatcgcttatgacaccaacaccaacaccaacatatcaaagttcacaacaagagtacatttctgaagctttgtactcatttcagaagttgaatttcaagaaagtacaacaagaacacgatgatcacgagcaatacaaacaagctctcaacattagacaaggcgggattagaaaaagcaagactgaagttaaggctgctaagacaaaacaattcatcccaacaagatttcataggcctgaggctatgacaacattgttttctgacttagaaatcagtagtggtggcgataagacagaggacgaaactcgcaagagtgacttctctgagccagaaaatgagcttgtttatggtggttcacctcttcatagtgttttggacatgaaaaaacctcgaaaaaacctctcaagacacttacaaaaccatgaaccaaggtagattaattgtacttttactcaattggaataaaatttggtgtttttgttaaaaaatgttttaattcttaaaatgttatgcagaggagggcttgtgcctgtggtcgaaaacaagttaccatatggggcgactcgtaatcagaaggagagcagcaacacgagtaatgtgtctgaatttcgaaggagtaggtctacacctcgcgggaagtttttcgtggtgccttgaggaagaagttattgaaaaatagtaccacaatgtttatttggtttatttaatttgtttctttgtgtatagtgacttgttttatgctggttattatgaactgcatacattttcatttggatcaagagtcttgttgagagaggtggtttttctttaatatatatcaatataatataggacatttttttttgtaacttaactataaattatctgtttttgtatagccaaaaatactaagtacagtaattgtgtttatggggtttgtttgttatgttggtagaattaaataattgttataaattatttttaccaattaaaatgtcacactaattaagatattgattttttttttttttaattttgagttaaaaaaaataatttttttatcaccctttaatagaaatgaaaatctttacaatttctaaaattactcgaggcttaacttttttttttttttgctttttatgtgatcatctaatttttggttttttttttttttttgttttttttgtttttttataatgaccaattaaaaaaactaatttaatttaaattgtacccaacagttgcagctgttttccatgcaaatttgagttaattattagttcatattaaaaagaaaaaaaaattaagtttgttcaaatttaaacaaaaactaagaaaaaggccaattttgatgtgttgtttgaactaaaataggcctcaattaatggcagactatttttgtaataagttaaccaatgtcaaagctttgaacttttttcttaaacttctaagatcagaaacaataaactatttatagataagaaaagaaaagtaaataattatagctaaaaaaacacatcatttacaacacatattattctaaggcataaaattctcaaagcttcaatcttttttgcaccatttctaccccaaatggtctaacattttcattctctttctctctttttgtaggttttttttatgaacctacaatttgtgatattttaccatattgattgagatttgatttttctaatttttcatatatcttgatgagaaattagaaaaatcaaaatcaaaatcaaaactttttctttccattcaacttaagatgaggcctaaaatcttgagtttcaaagatttgttgattaatgaagttatgtatttcctctcttgagtttttttctactgggtttttctcgaggggtttcaccaaggtatcgctctagccttttttaaggaaaaaaaatgcaagatctttctcataaacatatttgtagcctcaacccaatgcacaaatcgacgcctcagagcgctacaacctttgtctaccaagcgaaattggcaaaaattctttgcaatgtgtgtttgacatggtgtaaaagagtcaccaatcatgaccttaccataaaaatagacaagccttcaaaagaaaaccattacacatgcaagattgatttgacaaacacacaatgttggggtaaaaaaggcctaaaatcctttgacatagtagaaggaacacgctgtagatatcttttgggattttcgccaggcaaaattctctacctcttcctcttcctcctcctcacccgaaccatgctcggattactatgttgccttggtacatgataatgaggcggtattgttgctaggcgatttgaagaatgatgcatacaagagaactaggtcaaggccttgtttggatgaagctaccttgctacacaagaaagagaatgtttgtggtaaaagattgttttgcactaaagctatgttgaaatatggagacaaaataagaggagaacatgacattgttattgagaactctctttcagggcctggtgatcctgagatgtggatcagtgtcgaagggacggttgtgattcgggttatgaacttgaattggagatttagagggaatgagactataatggtgaatagtgtaccattggagatcttttgggatgttcatgattggttgtttagtagccctaaaactggccatggaattggtttgttcattttcaaacttggtacattggaacaagaagccaattccaatgtcattactgattttgattcaagatacttttgttgcaatggaagtaaacatgatcatgttgactcacctaaaagtacctctgagttttgtcattttctgtatgcatggaaagttgagtaagaatatttcttgtcaagattaatgtatcaatttaattaaaattcaattcccaattattatttattgtagtaaatgtaatacatatagtactttagtaatgtaattcagtatgatttttttactaattaaaaataatttttgatattttctggttagaggaaaagattaactatcttttgacacaagtatctctttagcaat

SEQ ID NO: 270889 - DNA, 824 bp, Cannabis indica
aggattactcctgaccagttcagacccagtcgttggtggtccagaccccttggacttggcagttttgggggtagaggagtttgcagcagtcagctcctcgaaaagatgaataacctcctcagaaggtctcctttcctgtgaagaggacccctcaccgcccttagacttcttggccggaggcgaggcactagagcttccgcccattctcttcctcagaccgtcgatcatctgccgagacatgtctgtacagaacaaaaacagtatggttagaaaatagccatcagaaacacaaggcatgaaaatcaagaagctcaagaacaagataaagtaaaagcaacgtgaccgcccgcacaagactcagaagtccatcatcacctgacatcgatcttatctcagacatgacagcttacccttttccaagcacgggaggggatgactgagcaggtgaaatgggctccctatgcgaattgcatgttcaataggcatgagcgaggccggaagtttcttcttcctctttagtggagtcacctgctcttcctcagcctcctcttcagtgaagtttcttacccatctggcgcccaaggcaccctgccgttgtaagaggaaccgctgcgacaagctcctcactgacgtagtccacgccctcgaccaggacatctccgtcagcatcaactggcttcccagcctcattgtacccccccataatttgggggttcaacctcttcctctccctccgcatcggagggacttccaagacgcacatcgtctagctccttgacctcttagacttctgttaggtatttttagtattaattttagattaa

SEQ ID NO: 270890 - DNA, 552 bp, Cannabis indica
acactttgtgggattttttagatctgaaataacttcttctaattcctcaattggttttaatagattttgtttatcttgaatccgaagatcaagatcctcatcctgcttctcgccttcttcagtcgtgactgccattagctgatgactgatctttctattctgcagctctatgcggtagcattcgcgagctaacagttggtcacctcgcacaactcctacacctgttggtgtctgaaacttcaaggataggtgcttaattgaactaattgcccctagtccaattaacgtcggtcgacccagcagtatgttgtaagctgatggtaggtcgataactaaaaaatcttgcattatggtagtggataaaggtgctttgccaatggttaatgggagctcaattattccttggccggtgacactatcacttgtaaatccacatagatttaccatgcaaggttttaattttgctctttccagtcccattttcttcagtgtatccttataaaggatatttactgaacttccgttatcaaccagcaccctttttatcctttt

SEQ ID NO: 270891 - DNA, 797 bp, Cannabis indica
taggatcttggcaattccactgtcaagaatttacaaaaagattctcaagagactcccaagcctcgtcctctctaaattgcaaaatttttttagtgtgcattgattgtaccatattaggagataatccaccataaaagtattttcccaatctctatttttaaaaaccattgtgtggacattttagcaataaatctttaaatctttcccaaaattcataaaattcttcttgatctttataataaaattcaaagatttatctcctaatattatctattttagacatgagaaaaaatttggacaaaaatttattaactaattcatcccaagtagaaatggatcgggctgggagtgaatttaaccaagttttagacttatcttttagtgagaatggaaaaagtctaagcctaacagtttcattagaaaaattttgaaatctaaagtagaacaaatttctaaaaaatctttcacatgcatgtatggatcctctttacctaacccataaaaagatgacaaaagttgaattatagaaggcttcagctcaaaatgtgtagcatttgtttcaggaaaaataatgcatgatggaagattagcagaaatgggagaaaaatgatcaataaaagttttctcttccacatttacttgatttggttccatgatgtcagaattttactttgaattttaacccacaataattttctttttaccaaacgatttttagaatttcgttcattatgaattatagggatatgattttgtcctgtgacgtactttcacggaatgtattccgtggtacatta

SEQ ID NO: 270892 - DNA, 623 bp, Cannabis indica
acttaaatagaattcatactttatatatataatcatgaaataaatcatgtgaaccatgcaacgtaaaatgttatttctgatctttattaataagtaaatctaattatatgaaatgggttttatttagggcacaaaacccaagagttagtagagttaaaattaatgcattgtgggacagacttgaggtattttgtaataaattttttaatttttaatttactatattcttattatattttaattaatgtattaatgtgaatgtgtaattttttgcagaccaagtttgtcctcccatgagataaccttacattcataggagagtaggagatgttaaagggtttacgtgactgaaggtcagattgtaagaaaaagtagatacaaaacattgaggagcttggactagagagggccgacatgttaactcctaacgaagtaactcaggaggtgtggagtgactacactacttactggagcacattcaaacaaaaggtatttaataaaatttctaattttagtaaggtttcatgttatatagtcaataataaataattaattgttagaaaaattattcatttgaggagagcagcaaaaaataaagagagtcagggtaagatgaaacttca

SEQ ID NO: 270893 - DNA, 813 bp, Cannabis indica
ttaaagaccagatcggacaaaacatggaagtgtatgtggatgaaatgctcgtcaaatccaggaaggctggggggcacatagatgacctggacgaatgcttcaaagtcctcaggaagtacaacatgaaactaaatcccttaaagtgctcctttagagtcagcttgggaaagtttctaggcttcattgttaatgcccaaggaattgaagccaatccggagaagattcaagccctcctagatatgaagtcgccaacaagaaccaaggaagtgcaaagtttgactggtcggatcgctgcactcaacagatttgtttcaaaatcaatagacaagtgtgctccattctttaacatctagtgaggaaataagcaattcgagtggacagaggaatgtgaaaaagctttttaggagctaacaacgcaacttgcaaagcctcttgtactctcaaaacctctggacaaagaagaactcgggatatacttggctgtcacggaacatgatgtggtgtcgtgctcatcagagaagaaaacaacatacaacacccgatctgttacatcagaagagactcattgaggccgaaggccggtagagaaactcacttcctgcttgattctagcaacaagaaagttaaggccctattttcaagctcatcctgtttgggtatacactgatcaaccattatgccaaatattgcaaaaactagatgcttctgggcagttactcaagtgggcagtggagttgggtcagtacaaaattaccttccaacccgaacagcaatcaaaggcgaagccctagtagactttgtggtagaatgcac

SEQ ID NO: 270894 - DNA, 795 bp, Cannabis indica
tgatattatgtttcacaaggataccaagtactatagtaacttttagtatttctcttattgttgttgttatataaggattaatattattttaaaccttaagttttacaaaaattactgattacactttctgttttataaaataaattaaattttatattttctataatagtaaaaatagtacattaagtttaattttagattattttttttttaatataactaacttgaagataatgtctaacataaacagatacaaaaaatgtatattcagtttcgtcgttaaggacaaggtactattttgtatcattttaaaaatgcagagtctaatttgttatttaaaaaaatagagagtctaaataataatttttataaaatacaatattcaaaataatatttacccgttatataattattattttttaaataaattataatattttattaataaaaatcaaataaaatgatagtatgtaatctaattttattaattagtattaataattattaaatattaataaaattataatttccgtctcaaacattattacatgatttaaatttataattagatttaatttttgaattattgaaaattttagaaataagtgatattatatatttttttccaaattaatgatttagaatctttacatacaaagatagagctacatgctccatatggggtcttggccactccaaatatttctttttcaattttttaagttataattttgtaatttctttattttacattaaaaatttatttattggttcaattttcttacacttaggttt

SEQ ID NO: 270895 - DNA, 522 bp, Cannabis indica
tgagggttccttgtcatccctacattgaatcaatttgtttattagacaattttgtttatcttaaaagtattaagaactaacaaagaggttgtaaatcaaaatcagtcaataatagtcttggataaatctgtaatacacccctaaaagagtgtttcggtacatttttattatttttgacctctagtagaatttttagtgtaattttttccgagctaaaaactctcttagataccgaaacaaataggaatgtaccaaaaagtctatttaggagaagagaattgctaaaaggtactattggtgtctaacaccctcctcagtgtcatactgctattggtgtaattaagtattggatctcatataacttaatgaaatagcttttagagaatatcgataatcaatcgtgagatgctacctatagaaggtgctacacatcactactgatagttcaataagaatacttttaggagtaatgttattatagagctgattctaactcaaatacaattgacataatacactatc

SEQ ID NO: 270896 - DNA, 5281 bp, Cannabis indica
gacagagctatgacaagaaaacagaaaattactattgaaagaagattcatcagttacatcatagaccagcagaattcccatggctcctcgatagtaagctgaaaatgaaagaaaacatacataaatatggtttaccaattaattctgattgaaccatgaaattagacataataagaattgcagcagcaaaatccacaaacaaaagagagtaggatggaatcaactcaaggctatagaatccaacttctccattccaacaaaagagtacgtcaccaagcttccaatacaagcttaacttaaggatgacactactgtttgagtaatagtatctgaactatttttcatgaaagatccaatacttgagtcctataatagcatcatggaaaccgttaattttctttctaaaatatgctaccaagtaacaagccagccaccgaagaatgtccaggaatcaaaccagctgccagtagtgaaaaagctacttaccctacttaccaagtaacaaagccctgtgcgtttcagcaaaacgtaaaattgaaggaccctatacctctagggcatctgtagaccaatgcgcaaattagtgcagtcaactttgttatctttgcaatccagaaccatagacattcaaaatgaagactctcggtaccacttttcggtttctctggataacttgttcaatttactgacctttctgatgtcatttttcattttatttggcttccaagtaccattgatttggtcataagttaccaccatcaaggtcatgaaatcctctcatatctccacatccatcccacaagaaatctctatctactgtttcctataaaaaccatttactcactaaactcctcttctttggatgtataaaacaaaattaatatcataattaaaaaatctccaagttcaacaacaattcctccttattacgtcctgaaacattgtaataagcaactagtatccatccatctttaagaagacaaaagtcaaatcatcaaataataatactaacatagcacaaaattttaccagttgtgatagtacggaaccgctcttgaccagctgtatcccaaatttggagcttaatccgtttcccatcaagctcaatggtccttatcttgaaatcaatgctacataagaaagaaaggaagaattaaatcacatattcataatatactttcataaagaataaaactgatcagttaactgaaaaactttggaaatatatacccaatagttgtgatgaaacttgtggtgaaggatccatctgagaaacgcaaaaggaggcaactcttaccgacacctgcaagatagacaattttataaaggacaacattaattcagaattttaaattaatacacacacaccaaccaaccgtaccaatttgatgatacagaagctctcgtttcacaaagcttataatacatgcaaaaaaagtctagactgaaccttaaactttttttcttgaaaaagagaaagagaccacttgtcttagaccggcctccccccgatataaattgagagcctcacttatgggggaggaaaaccatggtaaacagatcaagaaaacataaaattaatcaacaatttgtaacagcaggcacaaaaactcctaggaaaattacgtcaacacaccctaaaccctacttaagtctagaaaagagaaatcctcaaaatgtttagttttgaaaatccaattgactgtcgagaatttgattcttttcccaaacaacctccgctgacctttccaaaccttcaaaaattctgctatttctctcagcccacactgcccatatcagtgccaggattgcagtcctccacattataactctcctcttgccccctaccggtttgcttattaggacggaagaaaccaaaccaggtagaacccagtccaagcaaaactctttgtataatagtgaccagatttatgagtgtatgtacattctaacaacaaatgttcaatcgttccatatctagacttgcaacaaacacactagccccgatagagtgccatgtatcatcttctcttttgcataacctcctcatgcacacttactttccttaaaaacaccaaccaaccaaacacttttacttttactggtgcacaacttttccacaagagcttgaatttatgtttggattttgaactcaaacaacatagatagctggttaggaggatggagatggatgttttcgaaaaaatattgcaagaaacagaagctctcgtttctaaaagcttataatacatgcaaaataagtctaaactgaaccttgaactttgagacaaaagcttgattttatgtttggatttgaaactcaaacaacatagattgctggttaggagagtggagatggatgttttcgaaatattattgcaagatacaaaaaaacaaattctacataagtacaaaatcgccaaaaaaacagaatacatacaagtcaaacgtacattttcaaactgttaaagttaattaactttcaaaagttacatagtactgttgtctgatcataaaacctttacttcttcattataaactaccggttgaccactcaacccaaatctattgggtttatgacctttccgttaagcacaaaacgtttgttagtctataatctaaagtgattgtaataaataactgtgaaagacacaacataagaataagatgcacactatattactccatttacatctatgtgaaacccaatttaatataaaataaataaatagaactttgacattgcacaaagtaccgtaaattagtctagcaacttatccatggaagatcaatttacaatagcagaattctaaagtaataagtaagaaacaattgggtgttttaactatacctaaaccattcgtaaaaataataataattatcacctaaataaatcacataaaagagatctaatttatctctttacaatatatatttatgtatatatagatagatacatatatatattgtaaagggatagataaatagatagaaaaagggtaggaagagaaagagggaccattatccccagaatcatgaatagaaactcttccaccgctatagagattttgtttttgttacattaatatttaatttattgagcaaaaatgcaagagggcatcctttattcaagccaatcatactctgctaaactcgaacatcatgttatatacatgcgtgttacaggtcaacaattcttttcctggaaaaaaggtaaataagccgaaaaagaaataccaaaaaggaaagaaaaaaaagcgtactataagcaattcttctgacggaccccactaccagtctaccaaagcatatcatagctatatcaacatagctcattgatgttataacttataatactcgtccacaataatagaggtttagctagtacatcaaatacccagtcacagtcaacacatgcattgcgaaaaacttattccttgaaataataataacagcaataatatttgattcccgatgccgtcatctacaggttacagcatttccttataattaatgataattctattatcaccacactacaattatttatttaaatagaaaaaaagttaagaatctttagaaacagttattgaccctaatttgataggtaaaacagattattgcgcagagaagaagaaacaagattagtagagcctcagttataagagactaaaccagctattttcaacccattattgtaaatctttacttagtgttgatcatccaaacaccgagacaaaatcataacgtaacttcgacaaaatctcgtctgaaattaaaagtaacaagaagcaatcttcttctcgtgatcgaaaacaaaaatgccgtgattttagctaataagaagtctgaaaacgtaacatacacaaatgaaggcctgtttctttctagagaaactgaacaaaaacaaatcaatacaatacatataaatgatatataaaaatacatagggagtacataccgctgtcgccgatcaacaaaagcttaataaggtaatcataatcagctcgagccctagctggtggagcagccattactcaaatcgaaattctctcaattaatttccctcaaataagagtatatacctttctgcatatccatgaaaaattaaaaacatttataaatcaaatctaaaattcatagaacaaacattataaataaacaagtaccagatcggtgaccaagagagagaaaggatgacttctagagagagaaaatatacacagagatttagaaagaacgttcacagaaattaaaaaatcaaaaaaccttgaacgattgataacacagacgcctacaaaaggtcctccgactacgatgcgcagtgcactcgttcgaatctttccttttcacttgccgtgctccgatctcttccacctgcgcactctagcaactccaccaaaaccagggagagagaagatagccaaaagagacaactattgggagagagagaggctactgcaccaaatcaaagttccctatttctaaccaaaaaagaatcaaatttaaaccaataggaagaggccacctggtaaatcttctaaatgagtgaaaatggaagcggatgtagatgatcgcagctctggtgactgagctggcaccctaaatcatcgttgaaggggtctctctgtcaaaaagcctcattaaggaacaactgtcatctgagtatgggtcctatggagctccgtatggaagcaaaggcagaagaaaataatgagggtttctaatgcatgattggctacacaatcaaataaaataaagaaagaaattagaatttgaaaaaattataagagtttaccatctataaataagtaagattttttttttattattatttatatgagcttatttttatgtcatatttaagagtttagttttttttatagtataaataaataatactataggttacggatttttttattttttttacatttatatgaacttttttatatcatatttttgtaaaataaagatgaaaatttcatatttataaaacaataataagtttggctgaaaaaatcaccggtaccgaaaaaatcgctagaaaattcgtcggtgctggaaaagttattgccgccaaaaatttgccagtaaagttgccgaaaagtcaccgtcactggaaaaattaccagaagtagatgtctaagatataaataaaaatagtttaggttttataacataatgaataaaaacaaataacataaaataactaaaaccggttataataattataaccggttttgtaacataatgaataaaaataaataacacaaaataa

SEQ ID NO: 270897 - DNA, 709 bp, Cannabis indica
tatgtgattttagtgtgaaggggcaaaatggtcattttgccccattgttagtttgtctttttatgatttattaattgcattttatatgtttaataatgctttatgttggctgaaataagtgggttaggtggcttttctctcttttttcaaaacttagaaaaaatagaaaattttcaaaggaaaactctctctcttttcctctctcttttcggccctttgagtagcaagaaaaagggaattttctcttgggattctagtgattttctcttgagttttcaaagtgaatttgtgtgaattcttgctgtagttgttgcatgagttaggttttagtttctgtagtttttatatgcttgattatgagtttgaatcatggtttggatgcatgttagttgatattaaccaagtttgagttttggaactcaaagcttgggctttaatggcactttttgtttttgtgctttctgggtgagtttgatgctttaaaaatgttttttgggccctgtagaacaggtctggaaggtttgaggttgtttggatgagatttgagcattgtatgaaattttgaatttctgcttgcgaggaaccggaattccggttctgcatccagaattccggatgggtttcgaaaattcccagaaccggaattccggttgggcaaccggtctaccggttgggaaaaattcagaaaccctagtttttctcgttttat

SEQ ID NO: 270898 - DNA, 664 bp, Cannabis indica
gaagccacatcaaattagaaaaatgaaaagaaaaaatgaagctaagagatgttaagaaagagagtgatatattttacacatcaggaaaaaaaaattaaagtgatgcaaacttggttaacggtggtgtggtgttcactaacagtaggtaaaaaaatgagtgatgattaacaaaaacatcaactgtgagataggtatatatatacacaaaaataacaataatgtgagagtttaagagacttcttaaaatgagtttgagacaataagaatggttaattactttctaacgtccaatttaattatatgttaaacaaccatattataatactattaatattccccatatatatggactgtttaaatttagtaaaaattaatgcagtcattatttttatttttattattataacgtatacattttttttcgtaatggaccaatccatataggttgttaccttgttcttttattaattattaattaattaaaataaatatattttttcttgtactaataaataaaattataaaaactcagaaaatagaaaaattaaaattctaaatagttaggccgccacatcatctggtttaacaacaggataagtatatagataaattatatggcttacttatatatttattttttttattttgtatgcaattagatgag

SEQ ID NO: 270899 - DNA, 509 bp, Cannabis indica
atataaagaaaatatatgaataaataatgtagcagtctaaaattgttttatttagttttatctgttttctttttaattttctcgttttctcatttttttaatttttttatttgataaaattacttaatttgcttctatttattttttccctacttctctcatgtttatttttaattttttatttgattaaaattaaatttctctatatctattttcttattttttaaaccacatatataatatttacttggggaattaccccatatactatttttttttaacttttttttttaaatttacggtttgggtttctattgtggttgcagcactaattgcaataggggtttctatacgatttttttgttacaatttaagttgcagcgctagttgcaatatggatttctatgtagaatttcgtaaaaaaatcaaaaaaaaaaaaaaaattaattttaaaagtgtaaaaaaatgaaaaaaaggccttaatttactttttaaaaaatttgcacatc

SEQ ID NO: 270900 - DNA, 1068 bp, Cannabis indica
atgtgcagaaccaccaacctccgactggtagaggacaatgtcacgacagggattaggcaatgcagacgcgactgtaggaggcactgtaggatcatcagtcgactccacggatggaacaaccatagcaacaggggttactgcaatgggtgtgatattctccatgatagagaggaaagaatttggatgaggcagagcttagggtttcggagaggaaagtgaagaagtgagactgatcactttccgtaggccttaagtataggcaccctgacacaactgaccaggcaaaaaaaatgatgatgatttttttttaaaatttgatttttgccaaagaaaccgtacgcgcccaaattgaatatttactaccacatcatacggcacactaaacgaaacaaaccaacgtcatcaggcaatgagtgtatcaaagaaaccagaattgtgacaaatataccaacaatatttgcatttagcccacacttagacaaaacagaaaaaaataaaaaacttcgagatactcaaattttaagacaaaaaaaaatatcagctgatcaatgaaaagtgtttctgagaacacacgtactgcacatcttgagcaacagatcattccccttccccagcgacaatgatacttacgagagcactacacattgaatctccattcgtgtgtgaacagtgatctcatgtggtccaagaagagtgaaattcagctggaccactctctcaactaagcaacaactgatagtaggaaaataacgatttttgtattgtttttttttatatgaagcctttttttattatatcactctggcttttgctttagtacccagacatggctttcactctcttccagagatgtagccgtcctctttgagtaccaagaactaatagagaaggagcatactacttattagaacaaggtgtatgagagctcttcccattgcatctggaagaggtagcctttttgactggggaagattcaagtgtagtaacaatcaaagtagtatatagtagatggggaaggacagaagaaccattgctgaagaactgtgacatacacgcatactcataggc

SEQ ID NO: 270901 - DNA, 409 bp, Cannabis indica
aaaatcttttgtttagaagtgatctagcgttaccaaaggtgaggcaatttatgagcattgtctgggagcctagatgaattgaaggcaccgattgtgtagtaattttgagattatgtaggcatgggactacctatgttagcaagaagcatcttgttttggtagctcaccatgacagaactctatggttaagtctccttgacttgggttggtttcatttaggaaatttgcccatgaagcgtgcgagtcaaagcaaagcacgttagaaatacttagattggtccgtgggaccaatcatcagtccaggaaacaagctagagtgatgcactcatatataagaagccatcattctgtgggcgtaagggcccgaactggaggcgttgaagtagtggacattacatgtgtaacgtat

SEQ ID NO: 270902 - DNA, 651 bp, Cannabis indica
atcaccttctacttaagtctagaatataatttacattaacttaaatgacataatgggaatatcatctataaaagttagtatatcttaaagaatatagaaacgaaagtaaaaattaaaacatgtataataaagtgggtatacaaaataatttactgtataactaatacttaactttaatttttaattataaataaatatttagtttatatttttagaactcttatttaattattaaatgaaattattattcatgtttcatttttttattagtatatttacaccattttttttaattaaaatttaataacttagactaatcaagaattaccacgtgacaatgtacttacagaaatttcaaaattataacttaggtattattactataaaaaaattaaatttaagtatttatttacaatcaaaaattaaatttaaatattcatattgcaaattacttaaataaatataaagaagatattttattcaattagtcctcaattatgccatttaattataatttagttcgcttttttttttttttttaccttttttgtaaaattttataattttagtctttaaattttcaacttttaattcaatatagatttgaaattttattaaaaaactaaaaaataaaaattcttaaatttttaa

SEQ ID NO: 270903 - DNA, 306 bp, Cannabis indica
ttttaatgggttttcttgaccattgaatcacatataatagttgatatttataatcattaattaaatattaaaaaattaacatttcctattttgccacttctttctttgattttgttattctctatattcctaaagtagataaaacaattaatagaaataaaaaatttatatatggaaatgttatttaagaagtaaaacactgtaatatcctgataagcctaatgataaataattagagtttatatttatactattggttaatcaggtaattagtgggattatgatcttactgttggaaattatttt

SEQ ID NO: 270904 - DNA, 1443 bp, Cannabis indica
ctttatgcctctattgtgatagacacgacctggcgggtccgaaatgataaggtacataaccagaggattgataatgtgaatcaatgtattccctatttctcactcctatgcggtctacagagattctctcatcccacctcctgcaccaaaccaactcgttgtctgggagcctccccctcaggacttgattaaaataaacagtgatgttagagtgggtgggggagcattcatgtagcagtcatcaccagaaaccatctgagtaaggtgatttgggtgtacacggcaaaactggacttttcggacactctttgtggtgaagatgctgcagtttgtttggcgcttgaagtggcaaaggacaaaggacataattttatcctagttgaaagcgattctaaggtagtgatcgattcgctcaatggcttcgaccctagatcggaaattaagaagtattccttattttgtaatagaatcatttcatcttttgttagctgttcactatgtattactgtcagattctgtaattttatgactcacaatgtagccagatgggcgttttcccataaccgctttgggtactttgatgtggcatctatccctatgaatattttatgtaatgacctcgaggtctaactttatgattaatgaacgttaattttcaaaaaaaaaaaaaaatacgttttggcaagtttatctttaaattttattttggaatttttttatttttatattttaaaatattttttttttcatttgtagggaattttacatagaaactcgtattgcaactaacagagcaacttaaattataactaaaattcgtatagcaacatacatagaaaccatcaaagaaaccacctaagaaatccaaaccgtaaatttaaaaaaaaagttaaaaaatagtatatgagataattttccttttattttttagtaaatttaatgtttttattattttttaatgtattttactttaatttcttttttgttaaatttaattaatttcatatttttattttaatactttgattaaataattatattaatatattttattttttacatattcatataatatttaattttttattaaaatatttcaaatatattttattcatagatattatttaaattttatatgaacgatagtaaagtataagttaaaaataaattttataatataatttatttaatagtttataaaataatatatatgtattatttttattttactacatatataaatagattttatattaagttgtttcatatatttaagaatgattcttttctaatggtaggaaaaataatttgagaattttaaaacttttattgatttatatatggtagttttttaagtgcatacacatcaactatttgataagaaagaatatttgcttgaagtgcagaggaattattctatagcggaaatattttgtgtaagtg

SEQ ID NO: 270905 - DNA, 1200 bp, Cannabis indica
agcaatacataaatatgagtttgtaaatatgaagaagtttgaatctattttgcttaagtaaacatacaattttaggaaaaacttaaatgttcggagaatgtttttggattttcaatactactaataataaataataattaatacaaaattaattttaaaaaaatgataaaaatggacataggtaaacagattatttgaactttatttttggcatactaagttattttgaatttattgaaaatttacaagaagttttaaaaaactacaatatatataaaaaaaaattaatattaaaactatctaaatattgaaaatacaaaaagagtgtttggtatacttaatttttagagagtggaacatagaatttctctaaattaattatagtgttattttattataaatttagtagaatgaggatatactataatattttttttatctaagtaataattatttaccaataatattattatgtaaaaaaacaatcacataataaacttgttttatgttcttaaaaaaaattaatgttttatgtattttttataatatattatttagtagaaaactctttaataacatatatgatgagagagaaagatactaacttttactcaaaatagtttaagggctattttgttaaagtactttgttggagtaactaaaatttttgccacttttattatagactggtggagtctcacgtgctccacatgtgtggctacctaaaaatatttaagcacaacctatttaaaaaaaaataattaatattttatctatgaaatttataacactatcaaattgtatcctctaaaatatacatcattgtgacaaaattttgtgaactcttttatttacaaataatatagtacttttgttctttttatcgtttcacagttcatgtgtcgttgtaaattaattacttttctcataaatattgaccactactaaattatgcatcttcttaaaaaaaattaattaaatattaatctaacctaaaatatattattattgatatagataaaaaaaattgcactttcatttcttatgttttgagaatagcaatttagtatgtaaagaatatgaatatgattggtaaatatgaagaaatttaaatctgatttgtttaagtgaacttaatcttttaaagaaagaattttaaatactttttttttaagtatttattggattttcaataaaaaa

SEQ ID NO: 270906 - DNA, 997 bp, Cannabis indica
cggcacgccatgtcagggcatggggcccacgctgtcgtgccacctgtgcagcaatacatattctcgcccttacgcaacgggcatttttcaaacccaaaggggcacgactttttggtgtccattgggacacatgtcgtgcccacatgcctccaaatttttctttaaaaaaaattaaatatggggggcacgacaatagtagtgccgtgccaagatataccaaaaaaggggcaccaccctgccctagttggacgtgccaatatcccattattgtggtagtggatacaggtatccagcatgatcgtgagggacagttcatgcatcggagggagttcgatccttgaaaatcgagcgggatgcttgattaatgatgtccaagaactgtttagaagatttttgtacaagatcttttgttataaaagcaatttgtgggaactctttgattggttagtagaatctttatcccaaactgaaaatttccaaggaatatataacttaccagaatttatttccagttgcagttaaccttgtaaatttaagtgttctttaatttctgttatgattgatcagtggaagagattgagccttgaaaagttccaaggctcttcacgctatattcaatgctatttcgactaaccagatgaaagtagtaacaaatatggtacgttggaatatagcgtgaagagccttgaaattatagttagttttagcttgctaaatctctttcactgaccaatcaaccattttcttgatagattcaaccacatcaactatcttaaagagaaccttccaaccttcaactacggccatccagattatctcatcatgtgcttttaaaaacactctcatttttatcttctagtatggataattagccccttcgaccataggggatcttgtagtggaacccctccttccttgaatatatccattgacatgataacaagaaaaaaaaaatacactctcagagattgaactaaaagaaagtgaaattagtctc

SEQ ID NO: 270907 - DNA, 438 bp, Cannabis indica
tttcactatgttatggcttgattgtgaagaaatagtattttagggttaatttattaattaagggactttgtggagtctaattaataaatattataaatgaaaattttatttgatgattattttaacttttaaataaatagattttggcatttatagggttgaaagtgaaaaaagtggtatttgtggaaaatagataaaatagttaagaaaaatggcaaaaaccaaacttgtgtggggcccattaagtggccggccactatgtgcctattttactctattttcatcaattttttattcaaataattcaaccctaaccatatttgaaattagtctaaaagcaaggctatggtctcattatccaactaatgccttcaaagttaaaaacttagttttctctctaggttgatgatataacgccccgatttcccgagacgtcac

SEQ ID NO: 270908 - DNA, 606 bp, Cannabis indica
cgtaagataatttaggattttttatccaaccccgtggtatacatacactaaaataaaacttataatttggctctaaaacatacaccatatcgtagagctcgtcgcaagatttgaaacattatatagaacgcctaaaacggacactcgagtgaaaagttatgacaaaaatacgatttctgatttccaatgaatttcaaaaaattatgaaacacgaaaatcttaattttcccactcactgaaatacaaccaaaacttatccaaatcactccaaacttcacagggcacatatataccatgaatactaccatccttacataacagaaattaaaatcgagcccttaaatagaaaacgtcattaatgcttagactaagctttaaaaagttccaaactcgatttctaacccaaaatcaccttagtttcagcaagcaaatatcgaaactagtcccatgactacccaagaacaatcctataaggtcagaacatggaatccatcattttcggctccggttgaaacttgaagtctgtaggaacaaatggaaaatggttggtgcatctgggtattatgaatctggaaggataaatttctgaactcagaagagacattt

SEQ ID NO: 270909 - DNA, 1371 bp, Cannabis indica
aatccaagaaccatataaagcatcagtaggagagggttttggaagcgtaccatcaagaaaaggggttttgttgcgagctccgatggagagtttaaaatctcgagtccatggctggaagttcctatctgtcaagaccggagtaacaagagcgattccgggatgatctgcggtgctgaggtagtaagggctgcgtacatcctcataggccggtcgatctccattgacatgattagatgatgcaactggaattggaacacgagatgagggatctgcaaaattttgggatgctggaggaacgtgattcggaagtgcatcgtccacgggatgatcagtggaagtagcagtcgaatttgctctcgtgcgcaccattgttgaaggcagaggaagctgagttggtttagggttcttggattagaacatctgataccataatagtgggcaaagactaaagactaataacagagaaagcagagaaaaataagagtagtatttattgagaatcaaattcattgaatgaatacagtaaagaaatagctatatatagctaagtttgttacaataggaccgtcttacatagtaacggtattaaccgaatgactaaccaactaaattaatatctaatacacgacggtgtttgttatacttacaacatcatcttcataaatttttgaaaaattttaaatagtttacagtgtcgaaaatacatttgaagttttttgaacacatgtggtaaattaaaatatcgaaaactctatttttggtacggtaaattatttgaaattttaaaataatatttggacatgtgatttgaacataaaagttaactaaaagattattatgtaaggttgtaattaacactcctcaaatttatatatttattgtatttaaagttcacgagattagttgttatttatttatttttttttaaaggaaagattagttagttaatttttaaccaaactaacacttaataatttcaaccatttattaaacattataataaacattataatgagtttaattagttaaatgtcaattttattttatttatttatttaaagggtgtcaaataccattcgaatatttcaattatttatttattaaaaaaaagagtcaaataattcggggttgaataattttgggtacgtgttaagttgttaatgatacagttattaaggaacatatattaaggttctccgtttcatggaaacctaagatgccacatggggagtcagctgaattattaggccaaccacgttaccaaatgccgattaataaggctgtaaatttttttttaaatataatcaattaataaggctggtttgaggggtgccgccgccaattgtaaattgctgttttgttaatcatgtg

SEQ ID NO: 270910 - DNA, 1181 bp, Cannabis indica
ttcctcccaaagagtgactaacctgcaattttcctcccgaagagtaactaacctgcaatcttcctccctaagagtgtctaacttgcaatcttcctctagaagactcacttacttgcattgttcctcccaaagagtgactaacctgcaatattcctcccaaagagtgactaacctgcaattttcctcccgaagagtgactaacctgcaattttcctcccgaagagtgactaacttgcaatcttcctcctgaagagtgactcacatgcactttttcctcccgaaaaggtgactcgcgatgggatctaatggaactaagccatccttgctaagtacatatggtctatctcatctaaaagagatattctttgggtgaaattgatcaatattatatatttgaaaagtagatccatttggtcttacaagcttaggcaagattcaagttggtattagagaaaattgtgtcactttagagacaaattttcaagcacagatatcatgaaagcatgagctgttggaaaattttgaacgaactggttatacaacaacactttgcctcaaattcaattcgagttcggcaagggtatttggagttcattaacatgcctaagcatcgtttcatcctttggcaagttgtaaatgcccagctgttaacctgagataagttgatgcaatttcatattgctttggaaaaatctcgaactgtcctatatgtggaatgacagcagaaactcatcaatacacattttttaaatgtcctctttcttgttgagttgtggagctgatcattgaatggctggggtcaagaacttggcccctcatttatcatgactgaagaaactgattagcattgaaagttacaaacatgaaatagaggatcaacattatagtgatggcagcagtgatctatggcttatgcatcaacaaaaatagatgcatctttaataattactcaaaaactgtttttctattgtagatgatataaagaaaatggtttattacaggttacaaataataaaagtagatgtctcaaaagccatgagaggatatatatgaataggatttgttgtaactagggttgctgtcgtggctcttctggtattggttgtgtattggttttttatttatttgtgattaatgaagctcattctcttgataaaaaaaaataacaataaataagcctt

SEQ ID NO: 270911 - DNA, 1009 bp, Cannabis indica
ctctaatttggtttactttttcaagatgtctgtaatttgcttttagttttttcatatattgagttgtgttttgttaaacgatctgcaaacaagttggctcattgtttggcaaaagactcttgtttctctacaggttgtgtgctttaattagaggattgttccgccgaagcacgttttattgttttgaacgagattcttaattaataaagtttttgaattttagtaaaaaaaaaaaaaatgattcacgtttagtaattagacattaatttccatgagaattttttttctgagttatattgttaaggacctacttttttaagcaatatatatacacttactcttatatgtaaataaggctaatgttgttgtgacttcctttgatactttctagttcatagaatcattgattaaagtagtaacaatgataattaaaagactataaaagtaaaataaaatgtctatccattgttattatatgtttgtttgtttggttgtttttttttttctaatgaagattctttttctatgagtgatttgtgattgaaatacaaaaatatatgagtatgtatattgaaaaatttaagtgtgtttttactattttggataaagttggaaattgcaatacttcttcgataattttttaatttttttaaataattttgaatggtgaaaatataatgatctaaactgtttaattttgcttgttccaaaaaatattacataaaaagaaatatttgatttattaatttaagtaggttaaatatatcataaaaatcacaagaccttaaaatgagatcaaatattcataagaaaaaaaaaagacatcaaatataaatattaaaatttagatatatatatatatataaaatacttcttaatgggtaatactcattaatgggtaataaataaatttaattataaatattaatttaaaatattaaaccattagatattagtcagataacgaataataaaagagaaatttaaatttctatgcttaatttagcta

SEQ ID NO: 270912 - DNA, 709 bp, Cannabis indica
ttccacggccaggatgacttctttttgctcgtactgagctgtgcgggcatatcgttcctgagctttgcccgtgtctccagcgatgtgcgggcctccaatgatgacttgcaagtgtccatctattggtggaggcatcagatcctggttgttctgaccttggttggccttgacatacttctgtaggtgcgggttgttcttcttgatcagaagttctatttcccgcttcaggttgtagcattcgttggtgtcgtggccgtagtctccatggaaccgacaaaattttgtcatgtcccttttgctggtatctttcttcatgggcccgggcttcttgtacggaattagcgactgagtcgctatatacacactttctatatcctcagttaggatagtgaatgcagtgtgtttggcgcgatcacggggagtctgtccgggtttttcggcaaactttcccttcttcccgttcccttgcttgtggttgttgcctgaacgcttgccacttgaattgctggaatattggggaagctgggcggacgttccattagaaggagcctttgttttgttcggcttttgctcaccttctgctcgctgaatggcttcttcgagcttgatgaaaccttcggcccggtcaaggaaatcactcattgagtcgaccggtccgtttttccttatgtccttccatagttcgcctaggacttcaatgccccccagt

SEQ ID NO: 270913 - DNA, 861 bp, Cannabis indica
cgaagattgaacgaagcccgagccaaaaaagcgatttattggaagcaagggctaggatatcgtggcttaaggatggtgataaatgctctaaatttttcttcctttctgctgctataagaggaagaaggaatgccattgactgcattctcaataaaaacaatgaatggattaatgaccaaacgctgattggccaggaattcttggacttttttaatagtattttttctggttctgatagtaatcggctgatggattgtggtcatctatttcgagagaacatttccattgagaatcaagctgatgttgtttgttgcccttcccgtgaagagattagaagaacactatttgccatgagtaaccacaaggcccctggccctgatggaatgtcagtgcttttcttcaaacactactgggagtctgttggagatgacttttgcgatgctgttgaagatttttttgtcaatggtcgaatgcacaagggggttaattcgacgaatgtcgttctcattcctaaaatgcagaacccgaagaaaccaaaccatttcagacctatctctctctgcaatgtgctgtataaggttatttcgaagattattgcaaatagattaaaacctattcttccttctctaatttgccctactcaagctgcgtttgttccaggaaggaatatccaggataacaatgttatggtgcaagaaattattcactccttcaataggaagaaaggtaaagagggattctttgcgatcaagattgaccttgttaaagcttatgatagagtgagttggaaatttattgatcacgttcttcggaatttcggattccctcaacaattctatagttgggtttctcaatgtatta

SEQ ID NO: 270914 - DNA, 506 bp, Cannabis indica
aacgatctcgacgtatttgaattcctaaaataaaaaaggcgtcaccaagatctttcatctcaaattgcttagatagaaatctcttcgtttcgtgcaataagcctatatcattaatggcaagtaatatgtcatcgacatatagaaccagaaatatgtatttactcccactgaacttgtgatatacacaatcatcaataatattcatctcaaaaccaaatgagataattacttgatgaaacttgtgataccactgacgagaagcttgcttgagtccatagatggatttctttaatttgcaaaccatattctttgggtcaccaaccacaaagttttctggttgctccatataaattgtctcatcaatgtcgccattgagaaacgctgttttaacatccatctgatgtaactcaaggtcaaaatgagcaacaagtgccaatattatcctaaaagagtctttcgatgaaaccggagagaaagtctctgtataatcaatgccttgtttctga

SEQ ID NO: 270915 - DNA, 507 bp, Cannabis indica
aattcctacaatgccaaaaaaatacatcagatactagtacttgtatttaagagtttatctaagtacaaatataattagcacctgaaatttaggagttagtcaactttcaacaaatttcaaccaatcagtaaggtcaactttcggatgcttttcagggacttgtgccaatcggtgcacatctttttcttctaatgcaagcattataacatcttttgtcatactgttcttgaagtctttccttaacttcgcagcaagggtcagacaatcatgtttgaaatcatctcgcactataaaatccgtctagtttgaaggaaaacaaacacgattagagttaacatctgaattaatcaaaaacatatcaaaattctcacaaataactgcttacctatatatctttccaaactttattttttagtatagggttgacttctctaagttctaaagtcgatactagcttggagtattttttgccacagtattgtccttgtcattcacttcgagtgccac

SEQ ID NO: 270916 - DNA, 668 bp, Cannabis indica
agagtgttttgctgctcctcccgtaagattctcttcagggcctctacttctgcgtgcccccgactgtactcgtcaaaggcgtagttatgcttggccacgcagagattctgcctctcctcatccgcagagaccggggtcaacactctgccatgcggcacagtgtattcctccgccttggaaggaattccggagtcatggctcggttccggggccggagtgtcccccctccgggtccgcttggaaggctccgcttccaccatctttccctttcgcttacgctcaagggcggtcgggtcctccacttcaccttcttcgacttcttcttcctcgtccaccaggacaatggtgcctgaaggagcgctggaggaggacctcacgggagtagttaactgggagacagtcggaggtataaaagcgtccggactgtaggcctcagcaagggttgccaggagattgtccatgggcctggctgctgcaacaagaaaataagtcaagtgttagaacattcatgagaacagtatacacttagcaaaaaagcaataaagctagtcctactccgactctctaattcggccctagcaaagtcccgaatcatagcactggcttcatcatcccccgagaaagtctgtcccgaggggtagaaaccagctggaagataaatgggctga

SEQ ID NO: 270917 - DNA, 840 bp, Cannabis indica
gtcttaacattgttagtagttttttatagttgttgtgttatctgtacgtgatattattatgttatgttagttattatgtaaatttattctttggagttgtacaaaatttaatgagtttgaacatgatctctcttctaagtattcgagttgtagataagttctatcttttttatttatctattacattattattattattattattattattattattattattattattattattattattattattattattattattattattattattattattattttttattggtataatatgttctaattattattattattattttttctttggtttttgtagagaggttcacagattagctgaagctaaacttatatagctttagtggttgcactggattgatctcttgccccaaacaagtatataaaatgttgggaaattttcatgaggcacctaaatttggaaattatttacaaaaataactttgtttttgtgagtagaatggatttttacatatcatacctgtttttctatcttaatatcaaatataccttactcaatctaataagctatttctttgccttttatacatatttaataacatttttttttcatatgtagtatttaaaatctcacctacctcatatatatctttattgattttttattttctttctatatatgtatttttttaaatgactatagtagttgttagtggccatttaattcacaaaaatatataaatatacccacaagtaacaatttaattcacaaaaatatataagcatatacaaaattcattgccaataaattattaggctctgtttcaaaaaaaaaaaaaa

SEQ ID NO: 270918 - DNA, 826 bp, Cannabis indica
aattagatttgaaatatgaaaaataaaatctaaaaacaaaattacacaaaaaattttaaattaattctatgaaaaagcatgaaaaaatgaaataattggagaaaaattggaaaaaaaaaattgaattttgtgttgatggtatacattgcataccatctgtgcgcacatcaaagaggggctggccgagaaacctcagccaaggaggcttccagcagggtgtcccgcgcgcgcatggcccaaattcagacaaatcagccctttctgaccgagaaaactcagacaggagccttgtctgaagcgcgtgcacccgagaaatatgggcatcggcgcgcgcatggagctgacacacctcctgattttttccgattttcaaaaattcataagtaactcaaataaaatcaaaattaagttctgtaaaaaaaaaatgaattgctgaattttttgtatactatccagcaaaaataattccaaaataaaattccaattatttttcgtaaaaaaaattgtaaacatcaaacaatcatcaaatacacatagatcaacatgaatcacatccaaataatacatacatcgttttaagtccaaatttcctgaaagtaaatcaattactatgactctgagaccagttgttggaatatattttatcaggatctagatttactaatacataaaagttatgagaaaccttacattggttgcagcgcaattaaatgactccttctgctcagatctttaacctttgtatcctttctgtagtagagtatcaccaagatctgagcccaaaactccttcttgttgtttggattcttcacagtcttacacacta

SEQ ID NO: 270919 - DNA, 540 bp, Cannabis indica
acccacacaataaccgggacctggaccagaatcaggatagggacctgggaaacagaactaggaccgagacctagtacccgactagatccgaacttgaacctaggacccagctcgtgacccgacactagaaatggaaccagactgcgacacgagattcggatttggatctggacccagggcttggacaaaactcgtagtcggtgtctggattcgggacacagccctagacccgaaccctgataaggaccccaacccacacacgaacctgaacccaatcgaaaacccaaaagtggacacgaacccttaccttgtgacccaaaattgcaaccaaaacgggaagttgaccgggacttgaactaggacttggacttggaatcataagagaaattggacctagatcaagaaccgtagccggaccaggacccggacttaaaatcagacctagaatcgaatggggagccggacccacatcccaacccaaacctggactcaggacttaaactcagacaaaaacatggaaccagactagggacacagaac

SEQ ID NO: 270920 - DNA, 818 bp, Cannabis indica
tactgaaaataaaagagaaacgacattaccgaaagaaatttttaggtagagtcgcggactaagtcgctctctttaagaagttcgtgagcattagccaagtttgtgcaagaagtcagaattttcattcgtctctagaataaaacaacccaatcgtcgtacactatatcggaacaccactgcactacaacaaatcgtcaaatacactctctttatatgatattgtagagggagtttttagagaaaattgtatttttgtttttttcaatatgaaaaagatataatttttccatctgttcaatcgcattatatagataaatggattagaaaaaaataaaacgagaagaataacattttctaaatcgtggagttattgtttgaacgtgtcacataaaactgatacgactaagtattcagttctaattaaacactatttttcaaataaataaaataataattattttattaaataaattttctaataaaaaaaataaagtgtcacaccacaccaatcagctacctcagctcgaatcgatcggatggacaacgcgagcgcattggatcaagtgtctgtcttcacccatttgcacaaaattgggtaccccttgaggccctatcccctagtgtcataattgcatcttgtatacccttggtaaataagggctcatatcccatgtgggactctctctatatcacacacacacacacacacacacgcgcacgcacgcacgcgcacgcacgcacgcacgcgcacgcacgcacgcacgcgcacgcacgcacgcacgcgcacgcacgcacgcacgcacgcgcacgcacgcacg

SEQ ID NO: 270921 - DNA, 1559 bp, Cannabis indica
cctggataccaccaggttagttgattaaattggttggagaacaatatgaatgcatgcattatattttatagcgatttaatctttagcaagaaaattttttttagtgatttaatggatttttattttgaatacttagttgatgatttatatccttgatttgatggaaacatgtaattctacttatgacatgcactctagagatacagtatggcatattgaaatggtgctttaaatggtcacttccatgtaaagactattaacgtaggtttaatatgtacattacaatgtgagaacctgctgtcttcagcaacccactaacctttattgtagaattatggacactatggatgcaattatataatgcaattcaaaaggggtgcttacatagcaactattatagttttttgttcctcttgtaggcttaggtgcggtgcagagattcgaagtaataatattaataatgcattttaaattggaggcttatgtttgtatgtattatataccctgtgcagtataagttttttgttgatggagaatggcgacatgatgagcaccaaccttatgtgagtggcgagtatggtgtagtgaacactatcctgttggctacagaccctagtttcctacctaatccagtaatatctcctggacctaatatggatgtggatactgaagccttccagaatttggtaagaactaatgattattaatttgctattagatactattgataactaacttttcttctttctgtttgtttcacacttttgagtttttttttcttttatgtatagatgtatagactgtttctggttttcttttgtactatagtctctagtcagtaatgtatgcggtaagtggcgtttctttgctgtatgttgtttctagcgcatggtgcattcctctgggcagtagttattggagattatggactattgattttgctgtgttactgttattttgtctggttttgtgacaacacaggttcgaattacagatggttccttgactgaagcagtgccaaggatatcagaggctgatttgcagggctcccgacaccgcatttcactatttttgtcaacacgcactgtatatgagctactacccgagtcaggcaaggtttggatgcttttccatttgcccctttttgcgtgtcctgtttttgttgcttttttccattttgactatctttggataggttctgttttaataactgtctagctttcaggttgttgcgttggatgttaatttgcctgtgaagcaagcattccatatattgtatgagcaggtatctttttttttttttttcaataatttgcttttagaatcattcaaggttttttgtaatgtttgagattttacctatgattgtcaccacaaatgttgtgaatttaggggaacaattgaggaaggtctaattatttatatggctgtggatttcacctaagactaaatccacttttaactagacaaatagcctacattggtgttgctgtttgagtttcactctgttgtttttaaacattttctagtatttatttgctgctgatcacgtacttggt

SEQ ID NO: 270922 - DNA, 499 bp, Cannabis indica
tttaaaagaatattgttattagacattaatagtacttttagtgatatattttaaaagtgaggagtgctaccgttaacctcctgttacaatattttagtcaatctctacgctcgaaaatatatgtcagaatatttttttcatttttttttttcacggggtgttcgttatgcttacaacatcatccttgtaaattttgaaaaatttcgaatagtttaccgtgtaaaaaatacatttgaagttttttgaacgcgcgtggtaaactggaatatcaggaactctgttttcggtactgtaaactattcggaatttttgaaaaaatttacaggagtgatactgtaactattataaaaagaaaatttaaaaatatttcaacatgtgatttcagacatggaaattaattaaaaagttataataggaggttgtaattagtatttttttttaaaaaaaattattttcttaaattatacgtcaccctagatgctatccaattagattacat

SEQ ID NO: 270923 - DNA, 845 bp, Cannabis indica
aagttactagatctagttgcagactcggtggttcccggtggaggtgagttgcaacaaattcagtaaaatcggggggagattgcatctctgatggtatactgggcaaaaaacaaagagacatattactcatatttgttaaattgtaattaaattgtttaaaattattaacatttattttggtttgatgtttaataaattttaaatgttactttttaaatttttaatttaattatattttattattttaaacaattatgatatggacaaatggttacacaacacatgacattttttttttcggagttaactctattaaatcgggtatctataagtgtgttagttttagagatttatgtattaatgccgcaattttttgaatatgggtacttattagcaacattacaaattaaatgagaatttatgctgcaaatttccctataaaaaaattgacaactataaatatttattaaagtaaataagaaaaaaaaaagtattaaattaaaccattttttaaaaatacatttggattgaggctattggaactctaagttataatatcatttattaaaatttggacttacaaatgtaggagctttcacattctttcattaaaaaaaaatgagtttctttgagctggtaggcctaagacagtggcccttactatatgaccgttcttaattggtccacattattaaatttttatttttatttaaaaattcatttaaatatattaataaaaaaatggcacatgaatattaatttaacaaatttttatttttttttcttaattagacagtttatacttaaattttagtaatttcatctaactgcttttgttttaatat

SEQ ID NO: 270924 - DNA, 854 bp, Cannabis indica
tgaggatagtcacatccaaatgaaaattttattgcataatctaatatactgacatatttactaataaataataaaaattaatgatacggtagttattccttatatctgtttactttattaaaattaagggtgtatttaaaagtaactgtgtaattactagggtagtaattacactatattttaaaatgcaagatgtgtttggatatgaggtagtaattacgtatgaattcctaatatcttgtttggcaaaatagttagtaattacatgggaaaataatatttttaatagctaatgtttaatatgaaaagtttttagtaattacacacagtgtaattacattcaattctcatggggggccatgagaattggagactgtaattggaacccctcaattactttcaattacgcagttacagtgtaattacatggtcagacaaacatgtcaaattgtgtaagtacctctaattacacacaaatccaattacactgtggctttccaaacacaccttaaaaaaaaaaaaaagagaagttgattaaataagggaaaaaagaaaaagaatactttccctattaaaactttaaagaatgtcattaagagtaataatttatttatttgtattttattttttaatattaaatatataatgacaattttggtatttaaaaggacaatttaatcaatttaagcattctaattacactttgtgataaagtaaacaagataaattattgttattcttcaatttccaaacagttttagtaaacaatatattaaaaatattgattctgattattctttatttattttgttacattttttcattaatttattctgattctgaatactgtatag

SEQ ID NO: 270925 - DNA, 957 bp, Cannabis indica
tcccaccctgctggatgggataaataataccagacaaatgaggttaactggattagttatccagacttctaacatgcccaaacattggatttgacaaattagcctgtctaatccaatccagtcctgcgtaccaaacgggccctaagggtatagtgggaacatgacatgtaaaagtggttatataggaaaaaagggtaaaaattaaaatcggtaaaagaaagaggtatagactgcaatttttcctaaaaacatttattttacatttttacagacctattttttttatttacatttttactatttcttcttttttacaaattttcacttagaaaaatattgctttcacattgttttcttgttatttaataacaacatcaaaacaatattattttgaaacaacaaaaaaataacatcataatgttataaaaatgaacatgttattttcccataacaacaacttaaaagcaatattttttttttaaaaaacacactttttgtaaaaagaaaaatcagtagaaaaaaattggtattttttttttcatatttcatttttttaatatttatcaaataatttttcttgtaacatcaacgttaaaataatatattttttttttaaaacaacgcactatttttgtaaaaagagaaacccattaaaaaaaaacacatattagtaaaaaggataattacacaagacactatttttataaaaaaaatttatatttttatgtttatagaattttttttttatatttttacggttttccatagaaacaacacgaaaacaataaaagaactacatacaagtaacatgaaataacatcaaaacaacaaacaaaaaataacatacagataacaaaactcaacaacaaattaacaagagtacaacataagaagaccgtatttttataaataaaatcgtaaaaatatttaaaaattccgtaaaatcgtaatttttgt

SEQ ID NO: 270926 - DNA, 1040 bp, Cannabis indica
tttttctaaatctcaaaccctcaaaccctatattgctattgattattgcctcatctattctctttgatctttcagcttctatgctgtgattcatggcctctctgttgcgattcctcactttttgttgatttgggtgtaatattcagtgttctattagcgagttatcctttgttgctcaagtaattatttatttgagtaagtcttctattcccttgctatattgctttacttttaaacagctttgggatatgcgaaatataatgtcatccgttagagagtttgttgggcacaccaaaagtaacaagatatcattttcaatttataatccttgaatttttgatgatgctcattttgaaaggctaggtgtaattgtaatgtcggagtagctagatttttcccagaagataaaactcacatcagcaccgccattgctggcacccattctaacgaatactattcttctaagctcatatctaacacacaatcctatgggaacaacataaagttggattgaaccaagatgagataaacatttttaagtgtattaccttttaatataatagaaaatacctagcataaaatttagtatacgtgcctcgcacgtaactttttactagtatatatatatatatatgtggaaactgccccataattagctacgcaaaaaaatgttttattaaagttagttttttttttcctaaacttcagaaaaatataatgctaaattaatttcttttgtttgattttcacttaatttcttaagttaggtataaattattattttatttgaattccaattttaattaatatcatcttgaaagatgtcctatatatatattattcatgtatgtatattttatttttgaccattagatcaaatatctaatggttgatatttataaccattaattaaatattaaaaaattaatatttcctattttgctacttctttctttaattttgttattctctatattcctaaaatagataaaactattaatagaaataaaaattttatacatagaattattatttaaaaa

SEQ ID NO: 270927 - DNA, 831 bp, Cannabis indica
gtttttcaataggtttttgataagttctcaaacccaatctttatcgatatgatatcgacgatatatcgacagttttattgagtgtctcaattgcctcaatgtcatgacgttatatcgataggatatcgacactttgtcatgatattattattcgaaagatacgtggaggaatacttacgatgataccattaatcttgctagtgacgaggatgattgggttctcccgaaaaatataaagaacatgaaagttggggtaactgtggagaaaaaaccaacaggtcatccaaggaaaagcaaggctgaaagaagataagagaatcatttcccgtctggtgataaaaaagtcacgatacctcgaaactacagcctctgtggcggttcaggccacaacagagcaacatgcaaagcctgtatttgagacatagtctactattagttgtaataatatgttttttgaactggatttgctatataaaacttcttagatgaccaatgttgtgattcttggatgttgatatcttgaattttttagatgttaaagtttacatttgaaattcttgtatcttgaattttgtcgacatattatcgaaatattgtcgatatttattgatgtaatggccaatgttttgtgattcttgcatgttgagatctgtcgatattatgtcgacattttgttgatatgatgtcaattttaagatatttaagattcatacatcttgagatttttgtcgacataatattatcaacatattatcgatactttatcgtacacctatcgattacatcacacatacttaataaagtaaatcaatcgatataatgaaccatcac

SEQ ID NO: 270928 - DNA, 1065 bp, Cannabis indica
attctctctacaccatagccacatccattccaccttaatcaccaatcaagagcacaaacattttttaatgagaaattatgggccaattgggccgacatgctcaatatgagagaattaattatcttgcttcaaaagactgaccaaagacgttttagagtgtgttcatagccccgagtgtgagtacattatgtccatcccattatagcctaatgataataccataaattaccgattatataattattattatatacgagtacctgagttagtaacacttaattatattagtccacataaaatattctagcacccccatccaaagcatagtgcatcaccattgatccacaccatttgcaagaaaatcctcacacagactaggatcacataccagagaagcctcgtgcatgagatagaagaagcccgccatttccgagtaggagatgccatgggagatagaagcaccacttgcaaacacatagaccctcccggccgaagccgtgtcgaagcctagaggcaagccaacagaaataataacatattacttccaattttataaaataattaagattctcacccatttcatatccagttcttaaaccaattagtaaggtaaaaaaaaattcatccctcgtaattgcagattgcgaatatggtataaaaacatcaaataaatttcacagcagaagtttatcctataaatattttgtattcatgccagtctgaaatacaaatagtactatgatacattgtgtaaaaatggaaactttgcccacatttatgtacttgtgtcattttgaaccaccgtaattgcttcttctatagcttggatgaaagtagcaatcttataagtgaaaaacccaaccaacatgggtatcaattccaagtgcatgaagccatattccggaacaagaatcctacacaacaaacacaaattgttgaagagaaaaacaagagtaataacttgctccattttgatatcacaacaaaatgtatggaaccaattggcgaaataatggttataaaccatgaaccaactgccaatgaaaagcatgtaaatcgaagata

SEQ ID NO: 270929 - DNA, 1600 bp, Cannabis indica
ttgtttgccactatttataattgcatagtggtagttaattacaaggctgaaaaaaatgtaattacaattattatcccttcaatcatgggatctgattacatattatgaaatgtaaatgcagtgtatgattttgaaaatcatttagctgtgattttcccgcttttactggatcagaaatatcatatattaaacacatctttaattgttgaatctggagatgtctcgacagaaacttgattgcagtgatcccaatggcaagctggagtcatccttctttctgaggtcgacttgacatcttttacgttgattgagggtatatggaaatattctgacttgttagggttatgagcctcgctcctgttggttggatggaactatagggagcttcctcgtagcgagatggtcatctcgcattcttgttcttcgagccgattcgaattttacacttagtttgcttattgcaagctgggtatgtgtaacttttctccggtgcctcgctattctcctttagcgatatatggtttctcgttatacattaagtccagttcgtacattaattcctcgcctaagaccttacagtcaaatgggttacaaatatactctgatacttacgcaattaatgagttattccataaaaaaatatgccaccgattcacattctctttaccttgacacgtgtcctccagccaaatttcgagtataacaattgccccttaaaaagttgtttaggtttgtagtaaaaagagctttttaataattacggagggatttttttgccaaaatattttcttggaaaggatgcctcctttgattctggcggttgtatggtttcgaagatcattatgaatcgcctattcatattctgcacgattcccagccgttagatttctcaatctttggctttcttatcactgtacttcgtgtataaaagggtgactcatgcttgtcatttttcacaaaccttttggctctttagtaaaatccatttttagaatggatcacttccttactgccaaaatgtgtcttctgagtttagaagtttatcctcacagacctataatatcagatgcaccaacaaatttccattcattcttgaagacttcaagcctcaaccagagctagaaatgatggattcaatggctgaggagctttcgaccaatctaaaccaggggaaccccgtgaccgaccatggccaatcctcacaagtgatcccaaagggtatagatcgtgtgagcgatctcaaagatcctccttcgctagtgatgaattctagaggaagattggcatcgtttcaagtggatttgggaaggaagttggcgtggtttctatcagagaaactgccaactcaagccctaacttgtgtcggaagatctttgtgtcagcctctctctagtgttgagaaatttcctgaggctgggaaatgatctcggcttcaggaaatggtatgtgatgatgaggagaaggtggtctgtgcagagattaaggctctctgcatgcagaaggttttttctcgtctatgtgtagccgtatcttttgtccaagctatgtgtagacggtctttctctctcattctctacttaggagaattacttaatggttt

SEQ ID NO: 270930 - DNA, 542 bp, Cannabis indica
tataaataataaacatatttgaaaatatgtaatttaaagaggttgtataccgaaatggtacgttttacatttatcaacttgcaagcgcacgaatctttattatagtatagagattgtgaagaacaaggtcgaacccatgggaattgcgtgagatcgaagaaaatcctaagttaatctaagttattacaactctaacctagttctgaaaatggtgagattttcggtaataacataaaataaaatatttaaacaataaaaatgacagtaacagatattttcagtgatatttagggatattattaagggttcagaatccacttaagtatatataaaaatatttatgtttatattgattctcataatttaaccagtaatcaaaccaattattttataataaaaaatagattttccttctctttaaaattataacttctaagcattaaatgtcaaacaatttaatgaaaatattaaaaatcaaagaatattatttttaataaaatgtagaaccaagcattaataatttataactaacaaaaatacgt

SEQ ID NO: 270931 - DNA, 536 bp, Cannabis indica
tgagttgagtcgcggattaggtcgctctttaagatgtttgtagcactgtccagaattgtgcaaacagactattagcctcgtcgtccccaagataaaatagcccagtcgaaaatacggtatcagagctctattacacgatagagaaccgtcgaaataccacattcaataactgtactactacctgaaatacatatttaatataatcatatatattgtatattttttttgtgtaatagatgtatttcttatatcatatttatgtattatataggcaatgcacagaatgtagtaacaagaggagagaaacgttagaatatgagatcgtgggagcaatgctgaaaattagggcgagaatttttttttaatttactaattaattaaacacgtttaaaaattgttttaataaattaattaaataataataatttaaaataatatttttttgaaaaatttaactcacactcttcacttctcattttgtaaatttcacaaagttccaatagtatttatctcccaaattaaacttagatatttac

SEQ ID NO: 270932 - DNA, 679 bp, Cannabis indica
taattttcttaaaggtatttttgtaaataaaattattttcatgtataatattaaaaaaacccctttgttatttgtagatatataatatatgagaatgaaaaatattatagaaacaaaggaaactctgtccaatttttaattatatttattggtagttgtttattatattttttatttattgatataggtacttataaaattaaaaaatataatagaaaaaaaaaactctgtccaatttttaattgtgtttattgtgtgttatttatcgtgtttgttatttgttgatatatgtgttaggatttataaaacactcaagaaatatataaatcacagatctaaacatattcctaaaagttctttaatatagaaaaccctaaatcataaatctatagaacctttgctaaattaaagaaaaagatgatgataaaagatgagcggaagcactaacctcaagccattgttggagattgcagagaaagttttgatcttccaagaatatattattttctaaagtattttctctgatggggaaggagagaatacagaaactctagtgtttcttagggaccactactgataactctaagattagagttattttcacatctttaagcttgaatttaatgtgaattgtggagcaattaatgtctatattgtgtaattgtgtttagtttgttgt

SEQ ID NO: 270933 - DNA, 685 bp, Cannabis indica
atattcatttaatcatataaataatatatatatatattacctcataaagtaaccatcttcataatatcacgttgcctaatcaggcaagtcgatgcgttaatatgatattcctgcattgcattgcctaatcaggtaagcctgtgccatagcctgacacccatatatcacataactacatcacctaatcaggtgagcttgtaccagaaacctgcacccatttatcatataattgcatcacctaatcaagtgagctcgtaccataatctggcacctatatcgcatcgtctaatcagacgagcctgtacctacgcctggtacttatcatatgtcattgacgcccgtacctaacccgatacgtcgctaggaaaatcgcatcacctaattaggtgagctcgtacctatgctcagtactcatcatatatcactgacgcccgtacttatgctaagtacgtctccgagaaaattgcatcacctaatcaggtgagctcatacctatgctcggtactcatcatatatcactgacacccgtacttacgcccagtacctcgtcaggaaaattgcatcacctaatcaggtgagctcatatatcatatgcataatcacatcacattatcaatattcaaccaatcagtgttttcattatataacaataataactatatctcaatattaatcaattcataac

SEQ ID NO: 270934 - DNA, 830 bp, Cannabis indica
gaggcatctacctcgctgtatgtaaagaggcattgatgagggtgaagtaattcttagagcacttagcgaatatacattataataacttgaaggacatgattgtccagtctagaaggtcttatggtcaaagagcagttacttaaatttcttagtacactggtgctcatgccattgctagaatgaaagcaaacaaactaagtcattcacttatgtactaggtgagacgcctcagcgaggtacatttggtagcatgtcctaatccatgttagcactgacttgcttacaaacggcttaaatcacagttgtgtgattttgctaatattaattgcacgtatttaagtggagcgtaattaaagcccacaattttggagaatattattatggagtttgaacttaaatgtaattaattgctaacctatattactataaataggggcaaattatacaaaaaaaatggggacgaaaaatcttaagaaaaaagggagtaaactgattgtgaaacctgatttaagatagacttatgaactatgcagagtaaactgcaaaaccacgtaaaaattttaggtgtcatcgttattattttcttaatatctatgcttgatttattacaaaataggctcataattgttagcaaaaaaactgcgttaacatatatttagttatatagttaatttataattttaattatatgaaattaatatttagtttaaataaattaataaaataaacaaaaaaatgtgtgaaaaattgttgtcgagtgaatttcgcaacaccaaattatataatattattagtaacaagaagaaatttatgtggaaagacaaatgcga

SEQ ID NO: 270935 - DNA, 628 bp, Cannabis indica
acacgtgggaagggaatgcctaaagtctcacaatccaacagttatccataaccacacctgcacgaactccgaaaagttttaatgacgtggcaccccaaatagattaaaagtaataattacaagtgtcttttcaaaacccttgattagacaaccaaaagtcaccatctcgtgataacctttcgcctgcctctcgcttatagtttccctcatgacacagttgtcaatcgcaaaactaggggcatgtgttatagtgagaacttttcacctagaaactcgagaccaggctcccataaaaatgacacgtggactcactttcctcgaggaaggctgaaatgtcagaaggagacctcttgagtgtaaacctcgcctgaactagactcagctggatgatgtgaccttgacagggtctagtcgcattattatgcctcgcatgatgcaggaccgaagatcagatttaagactcgcatataccgagatatatgcgataactataaagatcttcccgcgagatagtaaagatctattctttactcagcgagctggtccggatgacccaacgaactcggtaacccgataaggactcgcatgtcctaagttatcgatcttttacaagatatccatatatgcg

SEQ ID NO: 270936 - DNA, 512 bp, Cannabis indica
tgaatattaatattatcatatattacaagaaaacaaaaacaaccctcactcggtctttcgcaaaactcatatcaggctaagataagatccaactttatatacctttggaacaattcaaaacctattaatgtccctatctatcttcttaatttgttgtgtaaaagtcatcaatgtagtcagaccctacactctgtaactctcattatacatttctaaccacattcacaagtccttttggaattgcttccacagaactactacccacccactatatgccatgcccatgcgtatacattatacatataacatttatgattatttaaacatataattttattctttcaaaaaaaacatatatatatatatatataggaacacgattttgtccgtgatgtcacagaatgtattctgtggtacattagatgcgtcttagggtatattaaatgagtgtcagggtacgtttctattttttaaccctagttacccctagatcaatctcagccgtcagatca

SEQ ID NO: 270937 - DNA, 6852 bp, Cannabis indica
gtttccatataatcatattcttagctttaatattcttattaatcagattattttgaactcctcataccaaacgtccccttatagttttctctccatttaagataacttgggttttttcatctcttttacagcctagtggaaactccacagttgggaaggtccttctagatcaaagaggccttttcaaggaagaatattggtattggatttgtattggagcactcattggattttctcttctattcaatggactctttattgcagcattgacctatttaagccgtaagaagatcatcactttttttttttatttccaaatgattatttcaaatcattcaacttttgacatacttgttttcttttgattcaattccagcttttggtgatactaaaactctcattattgatgatgaatccgaaaagaaaacaaggcgaaaatcgacatccaatgcagaaggttagctaactaaactcgaaattctattgtacttctatacaaagttatttttcataactgattttcaataaaaacttataggtattgatatgcaagtgaggaacaatcatggtattgaaaatgctgcaaataatcgagtcaatcggggaatggttttacctttccaacctctttcacttgctttcaaccatgtcaactactatgttgacatgcctaatgtaagccaaaatttccttaagattactttttaacaaaaatacactcaatgcaatcttacttaatgtacaatctttttgtcattatcaggaaatgaagactcaaggaattgaagagagtcgcctgcaattgctacgagatgttagtggtgctttcaggcctggtgttttaacagccttagtcggtgtcagcggtgctggtaagactacattgatggatgtcttagcaggaagaaagaccggtggatacatcgaaggaagcataagcatttctggttatccaaagaaccaaacaacatttgctcgagtcagcggttactgtgagcaaaatgacattcactcacctcatgtcactgtctacgagtccctcttgtactctgcttggcttcgtctttcttctgatatcagtaaagaaaaacgaaaggcatgtcacttcaactgttgacaacatagaaaacagttagaacattatgcatagttttgtttaactatagttttttgtttcttatagatgtttgttgaagaagttatggatttggttgaactcaatccattaaggaatgctttagtaggacttccaggagtagatggactctcaactgagcagagaaagaggctcactattgctgtagagttggttgctaatccctcaatcatcttcatggacgagcctacttcgggtcttgatgctagagcagctgctattgtcatgcgtacggtgagaaacactgtggacacaggaagaactgttgtatgcacaattcaccaaccgagcatagacatctttgaagctttcgatgaggtataattcgaattctaattgcttccatctttaccatatttcgttatgattgttgtgacaagttaaatttgacattgctttactttgtagcttttcttgatgaaaagaggaggacaagttatttatgctggagaacttggtcgccattcacataaacttgttgaatattttgaggtttgttaccattctaccacaagattgattccacttcagtacattattaaacaattagtttgactctaaatccaacaatggaaattttgcaggctataccgggtgtttctaagatcaaagatggttacaatcccgctacctggatgttggatgttacctccactacggctgagactcaacttaacgtcgactttgcagaactttatgccaactctaatctctataggtaagtacaatgcaactttcatcattttcatcaccaattttcgtttcatgtatacttaatattaggagtagacacgatcgaaaaccaatccagtccaatccaagttatagaaacttcgatatccaattacaattggactatattggatttgaatagttggatacactttcaaaatttaattaaaaaccaatccaatccagttacatatttaaatttcatttttattgttgcatgtattcatagtatcatcattccttttgtgaattttaggcgaaatcaaagacttatcaaggagctaagtaccccacaaccgggcaccaaagacctctattttcccacccaatactcaaccaactttttcactcaatgcaaggcttgtttttggaaacaacattggtcatattggaggaactctaaattcaatgccataagattctttatgacagttatgattggtaccttatttggagtaatcttctgggacaaaggcaccaagttgtaagtaccttactagctattacaactacattttatatgttttctacggcttaaccttatattgcaaactatatttgcttgttaacagaggtacacaaaaggacttgatcaatcttttgggagctacatattctgcaattcttttccttggagcaagcaatgcctctgctgtacaacctgttgtttcggttgagagaacagtcttttaccgcgaaagagcagctgggatgtactcagaattgccatatgcatttgctcaagtaaggcattgaaattatataaacatatttatctacaaaatcttaatgcacttccttctatatctgatgttgattcctataaaatctgtggtgcaggtagctattgaaacaatatatgttctaatccaaaccttcatatacagcatgattctgtactccatgattggttatgattggacatttgtgaagtttttctacttctactacttcatcttcatgtgttttacatacttttccatgtacggtatgatggttgtcgccttgacccccggtcatcaaatcgctgcaattgttatgtctttcttccttagcttctggaacttgttctctggtttcatgattcccagaccggtatgtgatccaaacccaagtttcttttcatctcttgtcaatattcatttgataccctgtgttttctcgaagaacaaatttggtacccttaaaagtgaaatttgatcatatcaatttaagtatatgtaattaaataattaaatttgaatttaaaactcgtataattgaagatttgattgtattagtaaatttgtttgatcaaatctgaattcaaagtacctaacatgtatgctttcaaaatactaagtatcagatgagcatcattggaaacatacaggataccaaacttatatttagataaaactcgggataccaaacgagtacacacccatatttatttttaagtgacatgataatcaatcaagtaacattggcattgagtttcttatgatcaattctctttagtggctgtatttttcactaaaaactcattttcaatctttgctttgcagctcatcccggtgtggtggagatggtactactggggctctccggttgcttggacaatctatggaattttcgcatcacaagttggtgatgtcaccacaaatgttgaactttcaggtggtaaagtgatgagggtgaatgattttctcaaagataacttgggctatgatcatgacttccttatccctgtggtggttgctcatgtcggttgggttcttctcttcttcttcgtcttcgcctatggtatcaagtaccttaacttccaaaggaggtgatcaaacttcattgttgtttaaagcacatagagataggatagttgagagcaaaatactatacatataacatatgtagtccaaaagggcaacagaaatttgttgccaagtttgttgtttttctttctttttcttatatagcttgtcaattgtttatttgtaagtgttttctttaacttgatctttgtttatactttcatacctttgtatagtttaatgtttttatctttccataaaaaggttatgtattaattttttttttgacattggagtaggggtatgtgaacttaggacctcctaacaaagaggagaagtgtgaaaccattaggctatatctatgtattgttaaacattcaattatatggaagaaaagtaaaagtgttgctttaggcatatgtgcacctaattatcaatagttaatgagcattgttgtgaggcaccaaggtgcttagcactactataaagtgacgttttataatcggttagtggttttttataatcttattaaagtaaaatatgtgagacctgatatcgaattacatcaataacgatattacacatcacaaggatactaagcaccataggtgccctttagcatttctcatagataatatgatgttatttttctcaagagctctttttgctgtaaacaaaaaggcctcctaaaaatcaaagtgatctattcaatctccatgattcaatttcatttagaattctactactacaaatcttaaaaaggatgaatatcttaagaaaataagcaaattttatcacgaaatgtaatgtctgaactcaatcagtgataagtgttatttcgcgttatgtttaggttgcattttaggtttattttaattgtttttatgtcatttagcgtatttttacactcgagtttgcttattttttaggtcataataaataatgaagaattagaacaaattgaaaaaaagtacttgaaaatagaagaaaaatataagtttcggtgtctcaaaagtagagtcttgaagaattttgtaaaactctaacgaattttcgaagctaaaatttaaaagtatgaaagaaagtaatagggtctcaaatgcggtttgtagcaagatattttggagtgttttagtctcacatggactatgaatgaattttgaccattcactaaacgagatataatgatctttatctttctaaaggtacaccaaacaagatttttaacttttaagtatagcatgatcttttattgatgaaatttccacgttttccatagtttattggattctgatcttgttgttgaacattaactaattgaaattgacctttaattttggcttgtcttatacacttaggacatgacttctttcttgggtgttaggaattctttagtgtcatcatcaaaatggggaggaacacaaggatagtttatctctattgtacttatatggaatatatcaacattaaattcagaattcccatcatatctaaacatgagggtgtagcctccttttagattatatgaaactattacaaaacaaaaaaataaaacgaaagaaggagaagaagaacagagagaatttcttattatctgaacagtggatacaaagcacaatgagtgagctttatatatagctcaggctcaagaaagatacaaggcagaagtcgcttatacagttaggacaactaactaatataactaactttaactaacaactagacctaaaaccaaaaaaaaataaaaattttaaagattggtaaggagtgtggataaattaattcaatcgttacttttaaatattcaattagataagattggttgttggatgagatatctaaaaattttatacaattcatttgaattgattaatatcgtcttattcaattatttaagtatatatgaaaattatgattaaaatttgattttttttaccgtatccataaattcagatctaaaatagtgaataaatatgaatcattctaataaaaataaccaattcattccaaatttgattggtttaaatgattgatattaataagacaaattagttatgaattcaaaatttaatattggatgtggtttaatgagcactttttttttataaaatattgaatgtgtttttttttttttgaaacgaaaatcttcattagtaacaaacgttatacaggattcgtcgcatcaagcaaaaccgcttgatgagcacaaggaggtacaaccccaatccatatggcactagccttgtgaaccaaaacataattggctaattcatgagcaacacagttggcctcgcgaaatacaaatgagataccaacaaaattttcatgaagcattaaatttctaatttgagttagcaaaccatcgatgtcgcgacaaccatcctccttctttcagactaattggacagcctgtagacaatcagattcaatgcttaaccgttgatacctttgttggatacccgactgaagacccctgcgaatcgccatcaattctaactgcaatggtggaagttcttgacgcaccgcaactgctgcagcatgaagaaccacaccagcagagtctcggttaacccagcctaaactcgaacctcctcctccctgcttcacacccgcatcaacatttatttttacaagattcggctgaggaatccattgttgagctgctcgctgaaccttcctgctgctgctgctggtatctccttggaattcaacaatataggtgccgcaccactccaccatatcctctggtttcggactacacccaccatgaaccaccgagttcctaacattccaagtattccacaacagaaccagaaaaaaagcaaacttatctttgtcccattctctagctagacgcatgagaaaggacagattatcctccctccccactcgcttcatctccttagcttgaccactcacccgccagaagcttttattggccgtgcactcccataaagcatgggcaatggtctcatcagaccgactgttacaacgagcacaggttgtgcccgaatgaccccctcgtttatatgtggtttgatgagcacatttttttttgaaatttttacaccaaaaatacaaattacacactttattacatataaacctacacacggttaaagcaacttttttaccttttctctatattttattacacatataccacatacacat

SEQ ID NO: 270938 - DNA, 251 bp, Cannabis indica
gggttgattttgagagggaaagagtgtttagatgagaggaataatggtttggcttgatcagcttgatcgtcgcacagctagacgttgacggagttcttcatagtggcgccagaatcatggcggacttggcttgatcaaattgacctcccatgttgctaatttcagagttttgcacaagagtaagttcactttcagaattaccacacatcaatcttttccaacgccgccgaatcgttcgaagtcgctcttta

SEQ ID NO: 270939 - DNA, 424 bp, Cannabis indica
actattttctgattatattttggaaaacgtcaaaacataaaaattttagatctcttttttatctttccaacgcattttatcagctcatttggagtttgtatgaaaaagttatgcatattttactgagagagctcgaagtagaaaaaaaatggatctagtggccgcggcgaggcttttggccgccgcggcgagggactatagaaagccctttttttttacttttctacagccgtcgcggcgaggacattggccaccgcggccccgacttcgtacaggtcaaggataactttgtcttttctcgtttttgggctgaaaaattctatttaatgaaagggggtcacgaattatagaggggaaaccatatgcaaccctagaaagacaagaagaaggctcttggagcaagcatgggcaatccgcgacaatc

SEQ ID NO: 270940 - DNA, 521 bp, Cannabis indica
ttttcctaaaaaaaaaaaaataataataatgacgtcattgaaaatgaacaaagtcacagaaatccaagcttccttacaaatttttgcttcaaattagagaatttttaattttttcaatgaataccaatacgagtaacattcaatccctaccaaaatttactcatcacttttcaatttgatcaataagttttttcgtaatttaaacaacatttatttaataattagattgaattaatttagttgagttaaatttattagatttaatctaataaacaccttcatatcttaatgaaaatgtagtttttttcttttttttgggttgaagggaagatatagttatagataagtacatgctgtacgtgtattatggaaccacaaaaataatgagataattatatttccgagtaagatcatataacttatccaattcatgtgtggacgttagaaaactatttttattataaatatcttctttcccaatggtacgtgtactgaataaaacaatattagtagtcctgtca

SEQ ID NO: 270941 - DNA, 484 bp, Cannabis indica
attccattccgatgattaacatctttcatcacctgtattttgttggattgaaacatcaagaaaactttgggtcttatcagttgtaaagtatttgtttgtggtttaatctcttctttgtcattaaaaggcatagaaaaacatgtttcacattactaacaatgatgattttattggaattggattgcgaaactgcccttttcattttaatgcctaacaattaatttttccattgttttgagacagagaaaattgatgtagtttgtttttgattagcaggtgactaatttggtgtgaagataaaatgggcaaagcaaagaacacttgggtttttttaactacatacatagccctttggtttcttttttactttctttgtttctattttgatttattcagacttggttggtcatacacaccataccacagtgtttctgtttgggcttttgtcttgtaatgtgcagactatgctgttctagattttctt

SEQ ID NO: 270942 - DNA, 1237 bp, Cannabis indica
ccccatcggggtgcccatcggaccccatcgggtcatcgtcttccccaaactgcaattttcccaaatcccagatctgaacttacaatcgaacctaaatctaacaaaactcatggtgcccacataaacacatacattatacattatacattataaccctaaaatcaatacctatcaatactccaaaacatatatcacacacaaaaaaaaaataacaaaaaaaaaggggggcggcggtgggagatcggttttggtttgggaggggaccgacgttatggacggtggtgaggggccagcgttgtggacggtgttgagggggggttcgggttgtggacggtggtgagggggggtttgggttgtggttcggtttgggttgtagacgagcagagagagatgaggttgagttatgagaggggttatttttaggttttagataaagtagtcatatattttcaatggtgttatgtatgagtttagggataaaatattaggtatatttaagtataaaatcaaatttccctatgaaaattgggtttttagaaaaaacaggctgaatcgggtcaagccgcccgaatgtacacagttagtccaacccattatgacaaattttagtagaaactaattcgttcaagcccttcatccaatgaaagctactgatttgtgatttgtaaaaccatttgtatcaacttcacaactcattattgatgtcttgaagcattggatgagttggattattatggcttggtgatggcattgcaaccatgcttgtacttgcacatgaatcatatagcataggatcagttgtcccttgttcaatctggctcattaaggtgttggcatcgttgaatttccaatcaaccaagtaaccaggcctcgaaacttcagtgccccctgcatcagtgtctcctgtaagcattgccaccactttggacattgatggacgagctgcaggtgatgcttgagtgcataagaaagctactcttatggttctcctcacttcttccctgttgaatttttttgatattttcgagtcaacaagctctatttcgcggtcttcttcatgtagatcccaagcctatatgatgtgaaaattttgttattgaacttttggtaatagaagtttatttagaaaggaatctagttttagtacccattcaagaagataagtcttttcttcacccaagcttgagtctgaatttggtctgccagtaacgatttctaatgccacaactccaaaagc

SEQ ID NO: 270943 - DNA, 597 bp, Cannabis indica
aactaatactgaccgctttcgagcgtttttctctgaaattttttctgtttgaaattctgaaactataactgaattctaaaaacttaagtttctatttatagaagggtaaaatgactaatgcacaattaaaataacttaatttggagctgccacgtgtcactctcactaattgcatgtggacacgtggcaagagagggaaagccacgtggaaagtggcttttggctgatggggcgcggagagaaggaagcaccactctcggggctggcgagtggaggaaacacacagaccaggagggtccgtgcgattcacgcgcgtgtgaggcgtgtgaggggacaagggagctgctgctcctgctttccttctagcacgcgaatcacagcccgccacgtggcgaggttgtctcttggtgaagagaaagtgggccggttgggctgcgggctgggctcctttgtcgggctgaattacattctaaaaatgccatttttctatgctttggaccacattttttactacttttcttttctttttacaaatgttattttcttaatcaaacacaaacaaaattaaatccatataaaatattatcaacacaaaat

SEQ ID NO: 270944 - DNA, 955 bp, Cannabis indica
atccattcccagtataatatcaaaattcgctaaattcatttctattaggtctgcacttaactctctatcttcaactctgattggcatatacctaatccaccttttggagatgactaactctccaccaggcaatatggttccaaaccctattttataactatcatgcgatctatccaatttactaaaaattatggctgccacatacgaatgagtggccccatagtcaaacaacatagagaaacaagagttgttgaccgagagctgacctgttaccactaaggggatggcttctgcatcagcctgagttattgcaaacacccttgctggagtgggttttgctacagtctttggtgcttcagtcatgagttggggacaatctcttttataatcccggacataccacactgaaaacacccctgccctttacactccccgagattatgatttttacaactggggcactttgggtaagtgtatcgagtttcggtgccactctggcgattgcctctaccctggttttgttggaatatgtgttttagcaggatctatatttactaaaaagtatgttatttaacatcctaaatatgaatctctaaaacaatgtaaattaaacacatataaagtttgagaaaccttacaatgggtgcagcagaattaaatgactccatccactcagatctctaacccttgtatcctttctgtcgcagagtatcaccaagaactgagcctaaaactccttccttgaatttggactcttcacagttttacatactatgattgaggaccaacttgatgtgtgtgggcacttactcaatcactaaggcttgaaaatatttgtgaagataggctatagtgtttcgaaattaaagaggaagaagaaggaagagctctcatcaaaaagctaggtttttagctttggaggtattagttggataatgagaccatagccttcctt

SEQ ID NO: 270945 - DNA, 516 bp, Cannabis indica
gaccaataaatgaataaaaatattaaccatcattcttattgtgtcaaatatttttctttctataggaagttatgaatttacgataaaaatgtgtacaaagggtctgctcgaactcaatatccaaacagatgaaaaccgaacttgtgcagtacaagtgaccaagagttataagtctgctcggtcacttgggggcaactatacccgtacaaagcataggtaaataacaagctcaaaaaacacaatagtttgcatgtgcaattattaaaactttaagggaaaatattcatttcaaaagataacaaagcacgataaaaccaagactaaaggttgcctggtgagctagttgtcttagaataaaatgaagtattaccaagtttaaaggtcgcttggtcggccacattgtaataaaaaagacccatgggccaaactgaaataaatataaaaaaaagaaaagaaagaaaaacttgaacacggctagagtccttagctcttgtacaggtcagctatatcctcagt

SEQ ID NO: 270946 - DNA, 562 bp, Cannabis indica
ttaatggttttcttcatttttttaaaaaaaaaataaagccctcctcctttctttctagatccgccgcctacaactgttgaagacgtccggccagctactcaaaccagcccgaccaccgtgaaggacgccgacgatccttcatgcctcattcttaccaccgcgccgcccctcctcgacctctctctcattgtggattaatgggtaagttctttttttttaaaaacatttgttaaataattgtaaaagtatagcatatttcggtagatctatggtgttgttcgtataattttcatcaaaatcgcgagatttattatttcagagtagtctgggttttgtatttttctcgactgattatcgattagttctcgaaaacttctcgacgcagatgttccaaggtcagggatgacctttctcgaatacttttcaatagattttcgataggttctcgaagccaatatttatcgataggactcttttgggtttgtatttttctcgactggttatcgattagttctcgaagcaggtattgcaaggttagggatgacctttctcgaatgctatt

SEQ ID NO: 270947 - DNA, 949 bp, Cannabis indica
aaaatatatatacataatatatatgagtatttttttttttccagttttgacaaaatttattgaacaggaaaaactaatttaaaaagatcactttgccggctatattttgagacaaaaactgtccaaagttttatgatacctaagacaatctatccaattttttctctctatagaaaaactaccatgtttactaataagtaatgaaaattaatagtaaattaattattttttttacatttatttacttactttattaaaattaaaatatagagaacttgattaaataaggaattaaaaaaaaaaatacttctccaccaatttttttaaggaatgccatatgtaataacttttatttatttttattttattttttaatattaattatataatgaaaattttgtttttataaaataactaccatatattatagtttaactcaaaagaataatttaatcaatttaaacattccgattacgtttcctcataaagtaaataagataaatcattattattttatttccaaacaattttaataaacaacatattacaaatattgattctgattattcttcacttattccgttacatttctcttttagtttattccaattttaaatattgtgtagtaaatagataagagaaattttgtttacactccacaaaatgataagtacaccctaatatctaaaaaaagtaaacttaaaataattttaaaaatcacttaatatattttcttaattttttttctcagtatattgtattaatttcaatacttattttatttttattttcataatttttttctaataaaattttatattattcttttattttaattattttgttataatatttgaaatataatttacttttgtttgataggtatatagtttaagaatatgaattggaaaaaaataattaaaaaaattaagggaaattatcccatata

SEQ ID NO: 270948 - DNA, 1198 bp, Cannabis indica
aataaaaaatattataaattttggaataattttgtataattttttaaataataatactagatataataatataaatatatcatgtatataaaagtatacatataaatagtctatgttattataaaaaataccaaaatttaaatttgaaatatttagtacaaataaaatagtaattatatttatgggaaggttacgtctttattattgtgaaatgaataataaagacaactccactttactacatatggtgttaataactacgtacgcatatatcattatcaaaaaaaatgtacgtatattaatacgtacacacacttttctttttctaatttttagggttgaaaaaaatgtacgtatattaatacgtaccctaatttagaagcaaaattatttatgtgaagatcgatcaagccaagtgctttcataatatcatgaataaactctcatttcattctaacaaagagaattatagtataggaacaactcaacacaaagaaattagataacaatactaccatataaaaaacagtacaaatatcatgtatatgtataaataaatactagatagatgttacgtgtcaagtcacgtatgttaattttattagaaacaaaaattattattatactttatgttgaccgagattttcggcaactaataaaatattataaaattattgagctgtaagaaagtgagagaaggatttttacgtggttggggcgttaatgagccttagtccacgagtctttgttatttatggatgtatttaatacagagaatatacttgggagaatttcacccttataaatacagagaatgttcttggtgagtatttactctacttgctcatatgcagcccaagattctcgatcccatttaatgagctttgagggggtatttatagtgtttttggtggggtaatccctagaattgtccttacaagtgtatctgtaagtatccataaagttgggtattcccaatgaatataccatgggtaatgcatggtcaaatccctaggtgctgtagggtttttatgtggaatgtccttattgccttttgattgacgtgactcttcacagtgtagccgtcgctagacttaaatgatcattactgtggcgctgctggttggaggttgtgccgtcagactttattgcgtgtagcagtcccaacacgcttcctcccatgcggcatttaatgcga

SEQ ID NO: 270949 - DNA, 251 bp, Cannabis indica
acgaaggtccgatggtggtccgatggtagcccgatgatatggtccgatagggtccgatagtgggccaaagctttcctaacgagattataaatgaatggagcttaacatatataaatgcagatatggtccaatagtggtctgataatggtccgatggtcacctgatgatactattttatgtacaaaaacataaaaaaaaaatgggtagcaacgggccactatcggaccccatcagaccaccatcagtataga

SEQ ID NO: 270950 - DNA, 555 bp, Cannabis indica
cagtgatagtgtcagtactgcgattgtacatcgacacactagtagacctattcggtatcggtagtgatttcgttacaaactggtgactccgatacactacacctaacttgattacatactttgtgtcacgggacccctaaacaactacagtgatagtgtcactactgcgagtgtacatcggcaccactaagtataatcctatttcgtcggttaataatttcgttacgaaattaatgactccgatacactacacataacttgattacatactttttgtcatgagacccctaagaatcttcagtgatagtgtcactattgcgacattacattggcaccactatgttgaaccctatttcgggatcagttggcgggtgactcttatacactacacctaacttgattacagactttgtgtcacaggacccgtaaacacctatagtgatagtgtcactactgcaattgtacatcagcaccactaagtagaaccctatttcgttatcggttagtgattttgttgcgaaactggtgaattcaatatcctacacctaacttgat

SEQ ID NO: 270951 - DNA, 525 bp, Cannabis indica
cttaaggattgaaaattcaacttcaggggaagaccgtcttttcaaagattgatctccgtgattgctatcatcagttgagaatctgagaggaggacattcgaaagacggctttccgcactaggtatggacattatgaatttgtggttatgtcttttggaatgaccaatgctctcgtagctttcatggatctgatgattagggtatttaaggatttccttgatatttgtgttattgtatttatcgacgacatccttttgtactctcaatcagaagaggagcttgagtaacatcttcggatggttttgcaacgaattcaagaacataagttatatgccaagttcaagaagtgcaaatttcggctatctcaggtgtcctttcttgggcacattgttaacaaatatgggatcaaggtggatccaggaaaaatagaatccgtcaacgattcgccgaaaccaaaaaaagtgacagaagttagaagcttcttgggtctggctgattattgtcgtcagttcgttgaagggtttt

SEQ ID NO: 270952 - DNA, 881 bp, Cannabis indica
tctttttaaatatttgattgccttaatagaatggtcaacaattatataatatactgtgtgatataaaaaaaaatatagtactggagctatgggttttttaaggatttatggtttaaaagttccccctaaagtcagcaaccttttatggagggcggcttcaggctggttaccaacttgtgtccaattggaaaaaagacacgttccatttaacctaacatgccccttgtgtctcactacagctgaaactatttttcatgcgttagttgggtgtgttcatgctcgtgcttgctggaacagaaagtgtggatgttggcagcaatatggatgatgatttcagcaattggctgctggtgctgcaatgccgaggaagagaaggcgagttggaggaggcggctatggtcagctgggccatttggcgtgctaggaatgactttgtttggcagcaaaaaagttggactgctgcaaatgtggttacatcagcaagaatgctacttgatcagtttaaagacgctcaaaaaagaaagggtttctctttgtcttcattgttcgacggaggtcgtttggttgagcattggagtgcaccttcttcaggtaagatcaaggttaatgttgatggcgctttatttgagcatgaaggcaggtttgggtggggttgtgtggctcgtgactgccatggtattaatgtcgtggaggttttcaatcggggtcatatagggagagttcaacctgaagttgttgagatggttggcatcaaagaagcattaagttggattgatcgtcaaaattgacaagtaattttggaatcagacagcttggtatgcataagctattcaaagtaaaatctctatatcatcttcttttggtcttttagtgcatgatgt

SEQ ID NO: 270953 - DNA, 519 bp, Cannabis indica
gggcacaaaacccaacagaaccctcttcattttcttcttcgactgtgcaacaatggcttaaggaagggaagaacagggggaggtcactgtgtcgacaatggcgcaaagaagggggatgagtcgtgcaggaggtgattttattttagggtttttaattttgtttttttttgggtatatttctgctttttatttaatttaggattttaatttaatttttgagttaagttttaatttttgtttaggagggtggtttatttaatgccaaggtggcatgagttgttgacgtggatcgtgccacgtaagccaatttcgctcttaaacggagcctgagtgacggaatagtgctgagcaaaacggaactgggattcaggtagtttagccgctaaaaattggtttttgtggttaactataacaaacacaaaagtttgggtggtttagccgccaacatcccttttgataataaggaatttttacatggtatactgtattttagcattttattacttttatactgccaca

SEQ ID NO: 270954 - DNA, 486 bp, Cannabis indica
gagttgtaatatatcttgattttcttccattgtaataatatctctaacatcctttaactgtttgtgtttgttaggtgttacagttagttagttggtcaatataatttattagttagtcaatatcagctctcttaagttcttgtatataaattgtactacttctctttcattcaataacatagatcatttttttcgtagtatcatccttattaatttttgaatagcttacaatgttaaaaatagagtttttgatatttcagtttaccacgcgcatttaaaaaacttcaaacgtattttcagcattgtaaattattcgaaaatcttcaaaaatttgcagggatgatgttgtaaatataacgaacactgtagtaaaaaaaattaaaaaaaaaatattttggtatatattttttagacacaaagattgattaaaaaattttaataagaggttgcattcctccatttcgaatgaataaaatatattaacac

SEQ ID NO: 270955 - DNA, 368 bp, Cannabis indica
tgctctgcgcgcatggtgctcgacactcatgcattcaatggacccagattttcaaacggccataactccttcgtttttcatcggaattgagttctgtaaaaataaaaattgcttaatttttcacacggaatccaaataaaatattttcaaaaacaaaaataaatattttttatggaaaaatttcgtacaacacatacattcatcgcataagcacataaaccaatatgaaaccatccaaatgaacatatatcatcgttttaatccatattacatgaaagtaaatcattaccatggcccagaggcctgttgttggaaatattttaccatgatctagatttactaacaagtatatttcattaacatcctaa

SEQ ID NO: 270956 - DNA, 582 bp, Cannabis indica
ttggtagttatgggactagttttaaggtttacttgttgaatttgaggtgattttgagttagaaattatgtttggaacttcttcaagcttaagtttgagctttaatggtgttttctgtttaagggctcgcttttaatttcgttacgttgggactgtagtatatatggtatatataagtactttgaagtttggagtgatttggataggtttcggtagtgttttggagagtacaaaattggatttttcgagttagtaagtagtctgtccattttcggaaattcctgggagattagaaatcttatttttatcattatttttcactcgggtgtctgttttggacgttctatatactgtatcaaagcttgcaatgagctctacactatggtgtggtgtatgtattagagccaaaatataagttttattttagtgtatttataccacagggtttggtaggaacccctaagttgtcctttacaagtattaagctatgttatgggatagacacttattggtttactattgttatgacatagggcccgggatcattgatcattctctaggaaggtcggccaacatacctgaa

SEQ ID NO: 270957 - DNA, 619 bp, Cannabis indica
cattttaatctatataaccaaaaccaacccatttttattgaaaaatgttccaaatttaaaataacttccacacataaaatatatgttttcgtacataaaaaaattatattgtgataacattagaagaatgtaaattaaccaaaacacatcactaacatgtagtctatagttaccctactacttctaccaacaagcctaatgtgagaatcaatctttttttttttttggaagaaaagcgaagcaatatatattaataaggataaaagttagacctcgcggtcattacataacaggtccccccgtatagaggaaaccagaataacaccaaatgtcttatgggtgaatgcccacttggccacgttatgggccgcgaaattacaggttctactaacataagaaaagacacaacttgaaaataaaggaacagatctattacaaaatgagatgtagttctcaagcgcccattgagactccttcccaataagagcattgataaccacactcgaatcattctcctcaataataaagttggccttaagatccagagccgtctcagccgccaagcagcaagccgccgcttcgccacactgcgtatcaacaaagtctagcctagccgttg

SEQ ID NO: 270958 - DNA, 725 bp, Cannabis indica
aagtgtcactaaacatgcttaaattaagccaacaaaatatcattgtcattaagtaattacatttaaaacatactttcaattcaattattcttgagaatataataaagcataactgaaagcataaacatccaataataaaataaattattggcccacaaagtagttcataacatcaacaagtaaattacatataaatgtaatctcaaatgatagaataagaaactcccactaaccaaaggtgcaaaagattataaaatgctcatatcaactaacacgtttgttaaacaacatagcacttaatcctttggttagaggatctgtaaacatcaacttggtcttacaatattctatcacaatgtctcatttcttgaccatttattagcggcggactattagcgggaattatcccgcccatttattagcggcggactattagcggcgggctccgccgctaatactaatagcggcggaccaatagcggcgggcccgccgctaatagtattagcggcggagcaattgccgcggactgcccgccgctaatagtcttcagaaaaaaaaaataccccattattagcggcggaccccactctccgccgctaatacccctgttattagcggcggagagtgcccgccgctaataattccgccgcaataacataaattgttgtagtgcaagtctctaatactgagatactctattttcatatgttttgaagcactactaa

SEQ ID NO: 270959 - DNA, 594 bp, Cannabis indica
cgtttgttttctgagaaaatgcgagggaaaattagcatttaaaaaaatcggatcggataggttaaattttgtgatgtaaagtttggtctcttacttataaactagcttaacgagctcaagtactttactgattctttttcatgtaaagattttaaaagatgtgtattcgttatgaatatatgttagttatatgatttacatggtcgagtaacagtttgatcgatcataaaaatgtttagaccatacattaatggaaattcattccaaatatttaagttcctctggttctgttatcttagattggatctggttctataattataactgacatttattttttaatgttaaaattccatatatttttttattactactaagtctgagctcctatcttttgtgatctggtttttaataattttagcttttttaattaagtgaaggatttttaattattttgaataatctttatgatttaagcatagttagaagtgggtttgcattcactttagtccaattttcaactaataaaattttgttagaataaattaatggctaattaatcatgttatacttctgcatgagcagtgtgttttg

SEQ ID NO: 270960 - DNA, 916 bp, Cannabis indica
ataccatgtaaatttccctaatactaattagtggagatttttgctgatgaatcactgaaaagtcttaaattaataagtttgggttaattaatgtctttttttttttttgtcattttcaattcacatgaatacgcaactacttatacgacagatttctttaactgatacacttgaaaatcaacattccaaattcatgtttttagtatggatcgtgaatcaagatgatggtcaatcaaatgagctaattcttatttaacaccaaaagttaagttattttagtaaacattcaaagagatgcgccatgcacataactcaaaataccgcattatattgaaatccttgtatctcaaacgatcatatattcattaaaaattactaattacatatgatcaaagttatcttttccccaattatatactttaattaggaattacatgcaaaaatcaatttgtgaaaatccatccaaacttattatagtcacttaaaaaattacgttcggacaatatatgcaaagcttctggactttgttttttcttcttgatctttctcttggtgtatctataaagcatgcaaagtgtattattcagtatttactagaaaaaaaagactttccttagaagcataagctaaaaaatgaacagaaacaaataatatatatgtaaagaattattgagactttacgtcatcaaattaatatactacgaaagaagaatattacaataactaaacatataaaaagtaaatggtctgatgtataggagaactgtctctgtcttttttagtgaacctaaactaacaaacactcacctactctaccatcagactccaaaactctcttaacatatctccatatttcagcttataaattactctcaattttcttattacgtttctccacaacacctccctctctctc

SEQ ID NO: 270961 - DNA, 670 bp, Cannabis indica
gccttttttcatagattatgttaaaagtaattaattagggggtcaacacatttatatttagtcatgtatagtaggggtaataataaaatactataattatatattcaaaaaaaaattaaaatgtaaatccactataattattcattgtttaggatcatttatagtaagaattatttcacaaatacacaaaatacaaaaatacggttgtacgaaattttaaatatttttacgattattatgattttatttataaaaaatacagttttttatgttatactcttattaattttttgttatttaatgttgttgttttgatgttatttttaaataattttcttgttgttttggtgttgttttatagaatactataaaaaatataaaaaaattatttaaacgtaaaaatatacaatatttacaaaaagtagtaaattatatatataattaatcccattctaaagtaagaactagcactccttaattacttactactaattttgtaaaattaacctttataataactcttaatatagccttttacttttcgtatcatataaatatattagtgagcagggctggttttgagttaatttggaccctagaaaaaataatttttaggctttttttataaaataaatagtatttttaaaaattattaagaaaatatgtatat

SEQ ID NO: 270962 - DNA, 514 bp, Cannabis indica
tgagatactccatcagtatctgcgccgcattaattgtcataatattttgacaatcaaatcaggtaatgaatatagaaatctgaccatatatagaatattacataattgattttgtccagattcaatgaatataaaatattcatttatcagaaaatcaattatttatttatttccttaaatagaaatttatttctttaaatagaaatatatttccttaaataaaatattcttatattctcccacttggtcagcatttaaactaaaacattcaaacccaaacgttcctcattatataataaacatacgaatcatagcgacatgtcctcattataagtcgagtattatcttccatgtattacgatatatttattatataacaatgtactttatgtggcaatgtacttaagtgaataaaccctaacccttatgtttattcaggtcctcttacgataattttctcagatgaaattaaggtgcacataaatatgagaaaatatcgaaattagagtttcat

SEQ ID NO: 270963 - DNA, 654 bp, Cannabis indica
gttgtactgaattttagttttgtacccattgctcgttgcaaactctgccaaaactttgaggtgaactttggtacccaggaagccttactatttctttaacatacaactctggcaactgatccactgaatagtttgttttaactggcaggaattgagcagacttcgtgaatcgatccaccacaacccaaatagaatgggtcaaacctgtggttctaggtaattcaaccacaaaatccatcgcgatgtcctcccacttccattaaggtatggttaaaggatataacaaccctactggtctctggtgttcagccttaatttgctgaccggttaggcatctagacacaaattctatcaaattcttcttcataccgctccaccagaagtaaggtttaagatcgtgatacatcttggtggtgccgggatgcaaggaatatggtgtagtatgagcctcttcaaagatttcatttctaagttccatactattaagaacacaaaccctaactttaaacaatagcatcccattgtctgacactgaaaaatctttgggttggccagctgaaaccgcttctctaatttctactatcttcggatcagtcatttgagcaaccttaattctttctaacagatcagattgcagcgtcaagttgtgaagct

SEQ ID NO: 270964 - DNA, 709 bp, Cannabis indica
gagccattgttagatttttattgcgtagtttcttatcgatgtgataagatcatatgatcatagatttataaaatttgtaaatttatgtatttaattattcacatatgactcattcttaaaaatgaaataatttcataacaatcgaacttgaacttgaagtttattgaacctgaagttcaatgtcatatagtatatatgggtttaaacaaatattgattcattgtgatatattaaaatccttacaagtgtattaatattattagatatcataatttttaaaaattctctcgatcatgaggagaaaagcagttgggattggtgatgatttttgaaaaatgataattgcacaaagtatataagaacgatatagtttaaaatgatatatgccaactgtaaattaatattattcaaagttgagttagaatgaattgaaaatacctaaaccgtaaatgaacaatgcagaaaattattaataaatattcatttgatttgtcctggagttgttaaatctagaggtactcatagagatagcataatgttataacgtgttgataattaaaatgataactgtgatgaaaacggtattctaaaagagactccctagagaagttagacataatacatttgattataattgaactcttggagtggttctatataggtacctataaaatgataaacatatttaaaaatatatatatatatatgt

SEQ ID NO: 270965 - DNA, 1154 bp, Cannabis indica
ggccttccaacttaggaccaaccactctttgcacccctggacacttcactctcttgcacccccagggccaaattttgttgccttgttatcagtggctactggtggtaatttatcatgttctgtctccccccagcagtcatccaatccagtcccggggttcatcttccccatcttctagccagcttcaagcccccttaatgatatccacttccactgcccaactggacccgattcctgtgggtcacatggctgacattccctcaactctggcgtttgctattggcagcaatgatgtgccaccccgtcggccaccccagaagaagaaccaatccactccctcgagtggtttcaaaaggcagctggctacggtggggaatgagcagagggagatgctgaagagacacagacctcactcaggacaggatgttgtggaggttgtttcaagtgatgaggcaggccctgtgaactcacaggcctgccaggaggaatgagtctcatcagttggaatgcccgggggcttgggagtgaccgagcattccgaaatctctcccttcttgttagattgtataagccctctttactttttgttattgaaactaaattgtgtaagaactctattgatcgttttaaggttaagctaggttttgattttggttttgaagtcccccgtgttggtctaagtggggactttttcttttgtggacttcggatttggatgtaactataattaactattctcttaatcatattcactgttttatctcgtctgatagtttttctagttttaatcttactggctttttatggtgctcctaatcctgctaataggtcccagacttgggagttattatccagaattgggctctcatgcatttctgttccttggtgcgtgttaggcgattttaatgactttttaacttgggaggacaaatctagcagaaatttaggcaatggcccctccctctttttcgcacttttataaacaaatttgattttcaagtcttgcaacctgctggtccgcccctaacttggaccaacaacagccaaggcaatcgaagaaccttggaacgtcttgattgggctgttggcaatagcttctggcactgccagtttccaaatagcaccttacatcaccttgatttcttcggttctga

SEQ ID NO: 270966 - DNA, 740 bp, Cannabis indica
ttatttattaaataaaaaaatatgctaaactattttattatatatttatgatatagatttaattatataggatacattattttatttaattttataatttaatttttttttctgtgaatcatatattttttatttgtttattattgtatattttaaaattaatttaatattatatattttcattttaatttaagttttttttctaaaaggaaataaatgaaatagtccagtctattcttgaatcaaacacaggattactttcagcataatccaatcttgtccagtttagtccaatctttttcagtccaatcctgcgtaccataaatattgactaataggttgtaattaatattcctcttattctcatacttcatgccgaaaatacttaaattattgctattaaatttgtactttgtatcagtaattaggatcaatttagcacaattgtgctgtaggagaatgctgttaaaaaaaaaactagctgtagcataaatattgaaaaaagttgagcgagagtttaataaagggattatttcataaatacacaaaaacaataaaaaaaaattacaaaaatatagtttcacagaattttaaatattttgaagattttttttttatttttatttacagaaaatacagtcttttatgttatactcttgttaatttattgttgattttttttattgttattttgtatattatttagatgttattttcatgttacttttattataattttc

SEQ ID NO: 270967 - DNA, 479 bp, Cannabis indica
cttctccaaagattcagaaagatattgtaaatgcatgtgctgttgaaacaatcaacattattattaaagacatggaagatattgtgttttctattttagttgatgaatctcgtgatgtatctataaaagagcaaatggttgtaatatttcgttatgtggacaagaaagggtatgtgattgaacgattcataggcatcgaacatgttgaaagtacaacagcaatctcacttaaagtagcaattgataagctatttttaaagcatgggttgagcatatctagattgcgaaaccagggatatgatgaagctagtaacatgagtggagaatttaatggtttgcagagtattattatgaaggagaatgaatgtgttttttatgtccatttgctcatcaactacaattagctagcatttataggggtggcaaaaaaacatgatataatatgaatttttttgttgctcattattatatatatatat

SEQ ID NO: 270968 - DNA, 1002 bp, Cannabis indica
gggaattttgtccaaaaaaacaaaaatgtgagagggggaggtggctgtaaaaaaatgagagttttgtcaaatataattaggtttaggtttaattagaatgatttagaattatacatatatttacatagatatttaaaaatatatatatttattttttgaaagcataaatttaaaataaatcaatacatatagagagttaattagttaattatataatattacattacatgtatagataattatgttaaatatttttataataaatgtattaaaataatagtaaattttcaatttatagatttatgctttaataaaatattaataataagagagaagaaaggagagaagaaaaaaataagtttgtaacgattttagacagtcacgtcactgtctcatacttctcatttatatgtatctatatatatatttgtactatatattcttatattatttaattttactaatttgtgatgtttttctattttatgaaaaaagtcttatagttttattttaatttaaaaaaatctaaaaaaatttcatgtatgtaaatataatttataaatcaaattaaaaaaataatagtaatttaaataaaattcatctataaaattctataataggataccacttttgttaaaactttaaaaattcttttattcttttaacaaataaaatactttattaattttttaacatttaagttttttaaaattatatatatttttttcatttataaaatatttaaaattgttatgtatgcaaaaataaattataaatcaaattaaaaaaataattaaaataagtatttaaaaaattctatagttgcctctacaagttcgcctctctatctttaatatttatagaaattataattctatatctaactctatattttaatttatagcatatattttaattttatttaaattttatattatataaaataatataaatattatagtaacaaaaatgtatacatattatatttataaaatataaaat

SEQ ID NO: 270969 - DNA, 554 bp, Cannabis indica
gatgctagtctgttagtggtgacaggtcagctgtcaattaaagttattcttatttagtattatttgattcagaagctactcactcttatgtgtcgagtagagtaataaaaagttttcataaactatgtgatttgtatacttcaaggtttggtaccctattaccctcggaacacctaattgtatctactcagtggattaggtccttatctttttggattgacggttatgaataaactgccaacctaattgagttacaattgtctaatttttatataatcttgggaatggatttcttgtcaaaatacggggcaacaattgactgtaagcagaagatggtggagtttgaacctgacagtgccaacccagcagtgtttgtgggtaatgtacaaggatcgcgcatacctagaataacactcctaaaagctaaagatctgttgcgcagatgttgtctaggattcctagtcactgcaatggatattagtcagcctatgccatttggacctgaaaacacgagactagtgtgcaaatttctagatgtatttctagaggactta

SEQ ID NO: 270970 - DNA, 532 bp, Cannabis indica
aaagagttttatttaggacataaaacccaacatagatatgtatcaaatattttattccattgtcttgggaactgttcaaaccatataaggaatttttcagcttgcaaactaattcaattcctttcccttccacctgaaacgcaggtggttgcttcatatagatctcttcattcaagaatctattcaaaaggaaatattaacatcaatttgtttaactttaaactccatttatgtttccaaagacaacatcaatcttatcatcttatactttaccataggtgagaagatttcagtatagtcaattccttccacatgagtaaaacccttagccactaacccgactttgaacaatactgattcattctcattgaggccctctcttaccttgagaatccatttgcactccacaatctttttgatctccagcttcgatacaactagccaagtcctattcttttggagtgaatccatctcctcatccatggcacgtagccattttgacttgttttcacttgaaattgcctcttcatag

SEQ ID NO: 270971 - DNA, 248 bp, Cannabis indica
aaacaactcattgcatatgtaggaatagattggactaccgctttgagaagtacttctttacctcctgctgaattttttttttcattccaagtatgcatgagcttccaaatcttctccttaatcccactgaacatttcctttttattctctcccggagtatgatgaaagccccaagtatttttcatggcattcacaaataggcatggacagatgcctatgaaaaaaagacttgagcagctagcgttagt

SEQ ID NO: 270972 - DNA, 681 bp, Cannabis indica
tcacaactgcatgtacaaaaatttcaaactgtatttcttacacgacatagtacggtgtgggcaagtttgtgcaatgtagactagtttgatagaactaaccctaacaataaaaaaaaaaactctactaaatataagtaactctttagttttttgctaaatattttaatagtattttaattaaaattactattactttttcattattttaatttatatttaataaattcaaactataaaatattattaaaataatcaaatattataattaaaataacaacaataaaataactctttatgtttcttttattttgacttaaaaaaaaaaagaaaaataaagagttttacaatatattagtctttttttagtactttttacaatatattactaatgtaagaaatggtcatattatgtagaagaaacggtcaacattcaaatatttgataaaggtcaaatggtgctccaatggcgatagaagaagaaaagtacacaccttcaacaaagaaaaccaaaagaaaaattgttgcaatatctcattcttctcactattactggttatcatctgatgccgtgacctactcgccacacatgctttgaattcttctgtaattgtacatatatatatatatatatatataagtattcattcacctattttgtagtcaaactcttcttcttcttct

SEQ ID NO: 270973 - DNA, 506 bp, Cannabis indica
aactcagtttcaaacaaaaattaacatctgacgaactgataacggaattgaatactttaataatattcttgaaaattttttgacagaaaaatgtattttgcatcagtccatttgtcaagatacatctgaacagaatagtgtagctgaacgaaaaaatagatatttgttagaaacaactcttgctgtgatgttttatatgcaaattcctaaatatttatggggtgatgctattcttactgcatcttatttgataagtaggatgcctacaaaatttttgaattatattactccgttgcaatgtttcaaaaaattcttttcagattctaggattcactctgatttacctttgaatttttttttattatcctgcttatgtccacattcctaaaaagtctaggtctaagttagatactagagttgagaaatgtgtttttaggggtatcctcctaataaaaaaggatataaatgctttaatcctattactaaatgtgtttatataactatgg

SEQ ID NO: 270974 - DNA, 539 bp, Cannabis indica
tgggcataagcggtggttaggtacacctagcaaagtcctatcctacgaagctaaacaacacgggggcattctcaacagtgccttctcatgccaagcattgtcgaagggtctgttccatctaggctacactcttggcaatcctggccaagtatattgtaacgccctaactcttaggcacgctacccaagatgataaaagaaccctaatgccctaaattcagatctctaataaaacaagcgcgggaaattaaactttaaacgaaaatagagtgaaaataaacttgtaataattttaactttacaaacaaaatttacatgtttcgggatcccaaaaatatttgacaaaatattacaagtatttacactagccggcctatgcggcaaaacagagtaacaacagttcaacactagtagaccccaacccgcttggtctagtgtggcccgaacatgtacatacatcgtccaactcccgcactcatgggtgatcaaagacagatttacctttcctgcacagtagagcacccgtgagccaagcccagc

SEQ ID NO: 270975 - DNA, 654 bp, Cannabis indica
aaaaattgtataaatttgaaaaataattatgacttttttttaaaaaagaaataagtactaaaattaacacaaaataatgtgagaaaaataatttaaaaaatattaagagtgatttttaaaaattattttaagtttatttttttataaaatattagagtgtacttatactacaagaaatgtcccttttaccagcacaattctctactgcgctggtaaactggtaaaagtaacttttaccagcggatttcgcaaactatgctggcaaaaaaggttaaaattttaccagcgcatatttgcagtgactaaaatctaactttttccagcgcatttacgcactgaaaaaaagccatttttgccagcacttttcattttgtgctggcaaaagttcttatgccaacgttgatttgccaacccctttcaccaacacatcaaaagtaaattttattttaccaacgcaataccaaactttttccagcacaaaaatgtgctggcaaaagtgacatttcttgtggttaatttttcgagtgcaaataaattttttcatatatttaggtgccgtttggaaacacttttttaatcagttttgtgtttttaaaattgaaaaagtgaaaatatttttcaaaaacatgtacataaaactgtttttacttttca

SEQ ID NO: 270976 - DNA, 1739 bp, Cannabis indica
tttgatttccaacgcattgagatggatctcttggttcaaatccatcactagaaagataaaaagagaagaaaggccaatcaattaaacacccattatctaaatgaaaatgggtattggggaaggcctcccctaaaatttcttggtaaggtccttaccggacccatcgcttccagaaatctgtttttccagacaactcgaagtgataggtcgagaacctagggaaaagttaccagaataaattttaaagcataaatccaaaaattacagccccttggagtcctaacaactccaaatgggtgtgaagagaatacataggcctaatattcaattaaaaattcatcttgcctagtttttccctaattccagaatcctctaagcatgtaaatgtctacggaagtgcaaacaatcatacttaaactattcatacaaaatcaacacttctagggcacacaaaattttcacataattttaccctagaaataaaactctatgggcaacattttaccactaaaatatgcgagacatcctagatcaagcttgaactttgcatttctatctcatatacaaaattgcatatagtcaacagagcgtcaggatgcatacttgttgtatttgtcataaagtttttcgttgaaatctggccaagaatgctgaacttagttgattacatgattgtagcaggcctgagcgtcgatgtttttattggtctgggagtggaaggatttgaggtacaacggctctgcttctagaaaagggtctgaatgtaggtttagaaaaatttgaatcaagtagttgaagacttcttgcattcactgttggagacgacggtgggaaataagttttctggaaaataggatgttcttgcttgaaaattcaaaaatgaggagtttgaaaatctaaggtgatgaaaaagaagaaatcacttgggcaaatctatttatacttcagtcaagatctttgtgatgtgaaatggacggtccagatttcttcttccaaaaagcacattttgatttgatggatgggaaattaaaaagacggcagttaagactcaccctggcgtttattattcatcatcgcacaccttgagtactgtacgcattaaaggagggatcattttaatcgttcttccatcattgccattcctcctaagaaacattcctccaatgtgcgcgtgttgtcagcaattacattaaaggcaccagatgcatgcccaacctgtggtaccttcactttatggccatctacttggtgacaactcacgagatccatttgcgatcccaacggttaccgcatgtcagaaacttatccctaggaaatggaagaataatgcaagctctcggatctcagagagtcccaaaagggtggggataaatgttatccatgtttctgagcatgtggcacgtggaatttaaagaaaggaattagcctcataattcccctaattaaaatcttccactacgatcttatcacggaaaagcctcatagtactgggaataagtcaagactataggatatatagaagtccacttgacccggccttagtttcctatacgcaaaaggagtgttacgcgaccatatttaaaggtgaaagctttgcacgatatgcagtagactcaactttttaaggttaaacctttgagcgatgcgtgtccatatagtacaaatggtccctaattgtccagctatagcaaacacgagaacaattgttctaagggacccaatgttggaaattattttac

SEQ ID NO: 270977 - DNA, 507 bp, Cannabis indica
ggtttttgtggaagacaatggtccgatgggacccccaatgggatccgatgctatggtccgatgctatctggttcttttttagaaaatttggggtcgagcccgatgggacccccccgatgggtctgatgctatgtgttttttttatttctatttttgtttttttgttaatgtccgatgggtccgatgcaatgtggctttggattttttttttttgttttttgttaatgtccgatgggacccccgatgggcttgatgctatgtattttgggtttttttttctatttttttggtttatgtccggtgggacccccgatgggttcgatgctatgtgattttggaattagtttttttttttaatgtccgatggacccgtatcgggtccaatgcaatgtggttttggaatttttttttgttttttagtttgatgtccaataggcccgattatgcgtccgatgggtccccgattgtttgtataggttttattttatttatttttatttttttatt

SEQ ID NO: 270978 - DNA, 586 bp, Cannabis indica
aaaaatgcggtttgaaattctatgcggtgcgatcgcgatttaaatttttctaaactgtgtggtgcggtgcaatttgcagttttgaattgttaatatgcggttcaaactgcaacacaccgcatattataaaaacactaatttttatatttatttaggtctaatatgtgaaggtccagcccaaagctcactaattattgtattattgtattattgaaacttgaaactttttttcatatttattttcaagccttacggtatttttgacaggcgttgctcaagttttgttgtatttgtgatagtttaattatttggtgatagtccaaaccgcagaaaccgcaccgcactattttttgcggtacggtttttacagtttttaagtttcgcggtgcgagtgcagtttggaaaattgaaaaaatcgcatttgcgagttggtttgaaaaattggtacgaaaccgcaccacccaccgcgaacacccctattatatagaagtaaatatatgatttttaaagttttttatccacctagcgacgattggtcacagcaaaactcaacaaagatcctttattaagaaactagttttttttt

SEQ ID NO: 270979 - DNA, 545 bp, Cannabis indica
agattattcctttgtatgaattccatatccttatttattgtataaattatctatactgatagacaacatattaactcggtatctccaaccgttactattcagtcaaaatcataaggtcccagaatacctaattcataattatgtatttctattccttctatgggatctcctaagctgatctattgacttaacttagtaataagttaagtattcgtttttgatagatattcaattagagcattccttatttccacccactaatatatacctatctcaataccttgtaaatttctgcttattaacacatccctacttcttgataatatctagaacgactactgattttgcatcttaatatgaatctttctagcacactttgtcctcactcatacgttttccgagataactccttggaagatttcccatcttgagattaccccaagttaagtatgcttaactgcaaggtaagctcatggtgggttattagaaagtagatggttttttttttgtcgttcttaattgtattcttgctttcattctttcat

SEQ ID NO: 270980 - DNA, 542 bp, Cannabis indica
cttgcttcacatttgtctgaccttatgaatcgctgattcttttagttaactcggttatggcatagagatcttagagaatccttcaacaaaacgtcgataataccttgctaaactgagaaaacttcgaacttccgtcatagactttggcctcgaccaattcttcactgattcaatcttactcgggtcaaccataattccatcttttccgacaatatgctcaagaatagatacctctgacaaccagaattcacacttcttgaacttttcatacaacttatgatccctgagtcgttgtaatactattcgatgatgatgctcatgctcctcttctgactgagagtatatgaggatgtcatcaataaacactatgacgcagttatcgaggaaatctttgaacactttattcatgagatccataaaggacataggagcattagtcaatccaaatgagattaccagaaactcatagtgcccatatctagttcgaaacgtagtctttggtatatctgttgggttttaggccctaaataaaactcatttca

SEQ ID NO: 270981 - DNA, 676 bp, Cannabis indica
ttcccagattagggtttcggcgcatcgtttacccagttatattatgtgattagggtttccatcccgtacaaggtttttcgttcagattagccaacacacttgaattcagaaacgaggtaagaatagcgtagaacatatgatatatatatctgaatgtatgtatgtgtgatatatatgcatgatatgtttatgatatatatgtttgggtgatatcatagcgacacaaccattgtgtcggctcagcagtacaggcattgtactggttaagagtgatatcatggccaattatacttttgggtgctattgatgttgtcataacggcatgaacatagtgtcaatttcgcagtgcaatcatagtgatgatagtggatgatattatggtcagtagcaccaattgttaagaacgttcttactcatttgttatgtcttgtgaataggtgtatgggcacctagatacaagtcaatattatatgatttgttatatgtttttcttactgagtctatcgactcagagttgctatttcaatgtgtaggtaaaggaaaggaaaaggctgaacaggaatgagcttcgagctaggatggtgtttgtacatgtcatggcgacacaacctggagtgttcggtctcgggacatcgggggttttattttgtagtcgttgtgcgaccaaactaaatat

SEQ ID NO: 270982 - DNA, 578 bp, Cannabis indica
attcaaatgttaagatcttttggtccacgtgtccctgcccggttggtccacgtatattgggcaaaatcaggggcaacaagtagtatttaaaaaaataactaacaaattttctcgcgaggtgcaaatcttgaatcaaatcaagtacactatactgagaaaatgttttcataataagattatgtatttcaatatgtatttgagttaatcttaaagttagcattaagcatgaaaaaaataatgtgagagtgatggttcaactacattgtgcgtagaagatattttgtctagacatatgatgtgagaaagaaaaatactcaataatctttaaataaataaataaattcaaagtaatatcatttcaaactttgtaaattatgatgaattgaaaacttgacaagtctttcaaactgtaaaagatttagtaagaataacatctagctagggagataagactaaagtaccaaatagattaaccattaatgataaattagacaatgaatgtatgtattaagtttataaagagaaaaaaaggagatgtgagaaaattaaaattagatcgatatatagatatatagata

SEQ ID NO: 270983 - DNA, 519 bp, Cannabis indica
aacaaaatgttgttttctgttttaaaaaccaaatcacttttggtgaatattgtttttaaaaaacactgaccaaacatgacttgtttttaaaaacttcaaaaactattttttgttctcatttctaaaaataattttttgaaaacaaaaaacagaaaacaataccaaacatgctcttaattttttaattttttttaaatttaaaaaaaaataaaaaaagaaaaaaattactgattttttaatttttttaattatttataattatttttaaaaattaatattacgtggaccactaaaaacttgtcacatgtacacactggacagtccaccgtgcacttaccaaaattttaatttttgtggttaaaatgttacaaaccgtaaagttcatttgttttaggcgctaatatccaaaaaaaaaaaaaaaaatacagtattaaaactactcatttttaatgattagatttactttggtatgactgttgtaataatatctttttaccttttattagtgtagactcaaaa

SEQ ID NO: 270984 - DNA, 541 bp, Cannabis indica
cattgctcgactttcatcacgtcgggacctcttgggaaaactagaggtgcttgcttacggaacctttcatacaagggttccatccgattaatagcaaacacaggttcagcctccacagcagaggcaggagctactggtatttctagagcagggaccgcaggagcaccctgctgtcttaactgctgaaccacttcctcttgttcgttgtatctaggttgcatttctgcaaacctgttttcccattcttaggcagcttaggcagcctatggcgggttagcatcaccctgaccacgtgccctacctcggccacggatattaaggggaatttgagctccctgaccaccacttgatccaaccgaattcccttggctcctggtgtttcgcctagcgtccatagtaatctaaacagcctgtgtagccaagaggtcatctagtcagatcatgatcaaagaaaaactcactaatgccgcttatttgaaaattaaaaacatgcgcctattcttctatcaggctaatatcatgtttcctaacaggcttttct

SEQ ID NO: 270985 - DNA, 491 bp, Cannabis indica
tgattttcaagcctcttcattgtcttcatactagagcttataatgatagagtgccatacccacacatagcaagtaaagtactcaatcatagtaggtaagacggtggtaaccaacccaaaggagagagagagatccagactcaaatcttgataatactctgcgacagaaaggaacaagagttagagatctgagtggaaggagtcattatatttcgatgcaatcaatgtaaggttttctaaattcttattgtttttaattttattagttttagagatattcatatttaggatgttaatcaacatacttgttcgtaaatctagatcctggtaaaatattcccaatgacagcagctatgttcatgaaaacattgaaattccaagtgaaaattctagtagtgatttagctgaacaagataatgattgtagtgatcagcaagatcagaatcagaataatgaccaatctggagcgcctttggcttcaattcatcctat

SEQ ID NO: 270986 - DNA, 636 bp, Cannabis indica
atcggttattttagattggttactttcaatattaaattatttaatattattataaaatatttttttccacataattaacaacaaaataaaataaactattgttgttttatgtctataaattaaaataaataaaataacaatttcaaaagaagaaaaaaattgtacgcagaaaaaattatttaattttgtttaaattgtatgtcgacaaaaaaattatatataaaaatggaatatacatttaatttattaagctttgaaatatatttgtattatatgtattatattttcaaattactaatttttttacattaaaatagtagttgtatatataaatttttaaatttaatataaatatgtgtgaattagattggatcgaaaaattttacatgtcaatcaagatccaatccaatctgcacaagtgtggatattcgcactttgcagattgaattggattggatcatgcaaattgaattggattgactattttatgaacacccctactccccaccagggacggacccattaagagtaatgtgggggctatagcccccacgaacaaaaatattgctttctaaaaaattaaatgtaaattttttaatttaataattataggccaaaatagtagaaaagccccca

SEQ ID NO: 270987 - DNA, 820 bp, Cannabis indica
cctagatctggaccgagatcctgacacatacccaaactttcacccgcactcgggacccaaacttggacctggacacgaacctagacccagatcgaggtccagacttggacacaaaccaaaacacagacgtggaccaaaactcaaacacccacaccttgaatcagacccaaagctagacccgaagccggacccaaactcgaacccagaccaggatcagaacaaaggtcttagacccagtgaatgcagaataagatcgggattggaacttgggacacggaaccaacctagaccaagacccaggaggcgaacccacattcggagcctgatctggacctagacttaaatttgaacccgaaaccaaactccgacgacgactcgaactccgacccgaactcaaacccaaactcgaactaagaatcgcaaatggaactagaaccaaactagaactaggaccacgacaaggacctaaacccaaacacgaacccagatcaaaacccaaacagagacctaaaacccgaaccaagactaggactcgaacccgaacctaggcccgaacccaaacccacacaagaacagggacctggacccaaaatcaggatagggacctgggaaacagaactaggacctggacctagtatccgacccagacccgaacttgaacatggaaccaggctgggacctgaaagtgggatccggatgttgaccgagggcttggaaaaaactcgtagtcggtgtttggatttgggacccagccctgtacccgaaccctaacaaggacccgaacccacacccgaacctgaacccagtcccaaacccaaaa

SEQ ID NO: 270988 - DNA, 673 bp, Cannabis indica
agatctatactgaccacaaaagtctactttttcactcagaaggatctgaatatgagacaaaggagatggttagagctagtgaaagactatgactgtgaaatcatatatcatcctagaaaagaaaatgttgtggtagatgccttaagccgaaaaggacctgatcagatttccaatatggtaatgatttctcctcagttagctttggaaatgtctagggcaaacattgaacttgtaattgagagataacataatctgacacttcagtcaaacttgttagaaagaattaaagtggtacaactagaagatcctgaactgcttaagactcgagatgatgtcttagtaggcaaagcaaaggacttttcaatctctgacagtggaatgctattgtttaaagcacgagtgtgtgtgcccgataacactgaacttaagaaagagattatggaggaagctcatactaccccttactcattgcatccaggaaccaccaagacgtatcaagatctaaactcatatttctggtggtatgggatgaagagggatgtggtagactatgtcactaagagcttaacctgccagcagattaaagcagaacatcaacgacctgcaggattacttcagccattaacacttccagaatggaaatgggaagtcattgcgatggattttgtggtgg

SEQ ID NO: 270989 - DNA, 860 bp, Cannabis indica
cgactccttactcagttcatccagggtcaataaaggtgtaccaagacctgaaagccatgttttggttgccaggcatgaaaaatgacatccctgagtatgttgctaagtgtcttatctgtcagcaagtgaaggctgaccattagaggccctcagggttgctgcagccattgaacataccagagtggaaatgggaagacattgctatggacttcgtggtaggtttgcctagaaccacaagatagtttgactctatgtgggtcatagtggacaggtttacaaagttagtgcactttttacctgttcggacgaatttctccattgacccgtatcctgagttatatgtcagagaaatcgtacgtcttcatggtgtcccaaagtccattatttcggatagagatctaaagtttacatcgagattctgggaaagcctcgatcgagctatgggtactcaattaaagttcagcacagcattttatcctcaaacggatgggcaatccaagaggactatacagatattagaagacatgctacgggcatgtgtgcttgaatttgaaggatcatggctaaagtaccttcccctgatcgagttctcttataataatagctatcaggcaacaatcgggatggcccctatcgagcttttatatggaagaaaatgcatatcacctattcactaggatgaagtaggtgaaagaaagttcttgggtcccaaggctgttcaaagaacgagtgaggcagctgacaagattaaagcgtgaatgctcacggctcagagtagacagaaaagttatgctgatccaaagcatcgggatattgattttcaaatcggggacaaggtgtttctctgtatatcatcgatg

SEQ ID NO: 270990 - DNA, 630 bp, Cannabis indica
gagaaaatctagggtttctaaaaatcacccaaccgacagaccagttgcccaaccggaattccggttctgggaaatttcagaaccccatccggaattccggatgcacaaccagaattccggttcctcgcagaattcaaccgaaaaaaccataacttggatcaaatccaaaccaattcaaacaaaaccttccagacctgctatttagaccctaaggaaccattctaaagcataaaaaccaagtttcatgcaaacaaaccaaaataaccattaaagcttcaagctttgagttccaaactcaaacttgattaaacaacaccaacatgcattcaatttagcacaaacctacttaaacatgcataatttaacctctgaaaaccacaacaaacaacagcaacagatttcaacacttctctttgaaaaccatagcttttgagccaaaatttcatatctcaataaaatcaagtaatcgccaatcctaaaatgcttgaatcaacattttaaattataaataaacctctgaaatcaacatcaaaacacagcagcaagaacaactcaaacaagcatgcaaacattatcttttcatcaaaaattcaagaaactaaaagaagagaagctagacaaggattacct

SEQ ID NO: 270991 - DNA, 978 bp, Cannabis indica
gcaagctgacagagtcatagcctatgcctcttgtcaactgaaagattatgagcagcgctatccaactcatgacctagagctcgctgctgtggtttttgctctgaagatatggcgacattatctttatggtgagaagtacgagatttatactgatcataagagtctcaaatactttttcacccaaaaggatttgaacatgaggcagaggaagtggctggagttggttaaagattatgattgtgagaatttgtatcaccccgggaaggccaatgttgtagctgatgctttgagtagaaagggtcctggggaagtttgttctacggttctgatagcccctcaattagcctctgacatggttagagcagggattgaattcgtagttggaaagttgcataacttaacacttcaatctgatctgttagagagaatcaaaaaggcacaattagaagatcccgagctaattaaggttcaagatgaggttttggctggtcggcctaaagacttttcaatctcgaatagtggaatgttattgtacaagactcgagtttgtgttcctgatgttgatgagcttaagaaagagatacttgatgaggctcacaccacaccttattcactgcatccaggaaccaccaaaatatattagaatttaaaaccctacttctggtggtactggatgaaaagagatgtggtggactacgtgtccaagtgcttaacctgctagcaaatcaaggctgaacatcaaaggtcggcagggttattgcaacctttgggccttcctgagtggaagtgggaggacattgcgatggattttgtaaatggagtgcctagaactacgggaatgtatgattcggtatgggtcatagtggacagattcacaaaatcagttcactttttgccagtgaaagttacctattcagtggatcagtatgctgaactatatgtaaaggagatagttcgtctccatggagcccctaaatc

SEQ ID NO: 270992 - DNA, 734 bp, Cannabis indica
ataacaatacaaacctcgatctgtaatgaacgaggtatgttcctgatctggttcatacatcggcatctgattatatcccgagtatgcatccatgaaactgagaagctcatgactagcagtggcatcgacaagttggtcaatgctaggaagtgggaaactgtccttgggacaagctttattcaaatcagtgaaatcgacgcatgtgcgccatgagccgttaggcttgggcacgagtacaggatttgctaaccagtttgggtagaacgactcccttatgaagccgcatgccaaaaggcagtctacttcttccttcagcgcttggtacctcgcagggtccattttgcggcgcttctgtcggacacctcgcacttcggggtcaatgttcaatcgatgacacatgacctgcggagatattccgaccatgtctgaatgtttcctggcaaaaacatccaggttttgcttgagaaaagtgacaagcttttctcgctgttgaaaagttagtttagaaccaattttcaaaactttattattatctattggatcaataggtacctcgatagtgtcttccgcagcctgggcggttgcggtgtagtcgaggatcctagggtccaaatctggctcgtctttatgcggtacttcttctattttgaatacctcctaacgaggaggcggggcctctagcaagtaaatgatgttaactgacttcttttctgcgagttttactgctatgttgt

SEQ ID NO: 270993 - DNA, 1063 bp, Cannabis indica
ccgctactccggcgacttttttccggcacgcacaattgcaaaaataataattaaaagcctactttaaatattaaatcctaattatctgctaattctcaaaataaagctaactgatcatcaaaatttctctccaattttgtgaattccaacccaagaggtgaaatcccttcactcctctccaattgtatgtatatctagtctagaggtgacatctcttatcactcttttccaattttgcatttccaaagcgcaatgccaaacaagcaagtttaagacagggataacaatcccaacgattgtgggacattttcctatgtataagggatattttcataaatctttatttattcattattttagagaaagagacgggatgtgaagtgaggtaccccaaatagtgggggatcctaacaaagtctaggcctatataaagacaatgatagactagggtttaaggagaacgacggcaacttaattaatcattccttgagaccttctctcttcacttttttcttgagttcttcttactagtacgacaccaagccttcatacaatcaccattgatatacacatttaccaagaaggagagaccatcctctatttcttgtgtctattggtttattattctaaagaacattacaaccaccatccttatcaggtttatgaatgttgggtctcatgtgagtcttgtgttcataagtctcaatacagatttcacctaaagatctcttttgtacagttatccacacacttttgagaacataactctggtgtatcagatccaattaatacaaataaagtagacatagtaccattaccatcgcgacatggggtgtgactactataaatccctggtgtctttttctatttattgcagttttatttagccaaatgagttcatcacatccctcttattttatacgatatttttagatcaaccgatgaaaaaccgcatcaacaatattacaaagttttcaccacaaaaaaaaaaccacctttagtaacaatcttttagtcacaacataaatttttagttgacttgtgacttttagttcacaacaaa

SEQ ID NO: 270994 - DNA, 566 bp, Cannabis indica
agtaaaagtttacaatgttactgtcacatgaattttttgcaaaaatattatctttttataaaacaactgtaaaataacataacagagcaattaaaaataatagtagaacaactaaaaaaataacagtgaaaatttaatataaaacttatacagtatttttaaaaaaagtctgtcaaaaaagtctgtccaaaataaaaaaaaaataaataaaataaaaatgtcagtatatagtgtaaaattttctttaaaaaaaagggataaaaatgagatgaactaccataaaataacttttaggtcgttttttatttgtattatatatattaaaaaataatactatcacaatacaagctgctcataaaaacagatgattatccaacatcatgatgacacgtgttaatcataaaaaactaacctacagaaataggacacatgctacccatgatgacggttggattttctaaaccacaactccagtttggctgaacttcttaaactgatttttgaaaataaaacgaacattcacaaacatctataatgaaaaaaaaaaaaaaaacaaaaaaaagaaa

SEQ ID NO: 270995 - DNA, 649 bp, Cannabis indica
ataaaagagagagaaattctttttctgtagaattttgtattgaatttttgaatggattgtacagtgtgtacaacagatatatatagtacaatgaccctaaagaatatcaggaataacaaggtatattctttcctattctaattggctacagaaaagagaatccaatgtaattggtaattctagaatgacctaatatcacctactgcgagctcataattacaaagtgataaacatgtgacaattcaatatttccaacaatatcactattggtccaactaaatatcaggtctcatatagtttaatataataacttttaaagagtatcaaaattcactagtcaattacaaagtgatatatctagaaggtactaagcaccactaatactcaataaaaatgctcttgtataatatatgctcaaagatacaaatttcccaaggttctactccaaggtcattctcttttgaaacaattatttcaactatgtactcaattatgacaatttccaaaagtaaagggaacctaacatataaattatctataattaaaacacaccctccaaaaagaaaaagaaaacgataaataaatgcaatttttgtgaaatttaggaaagaaaatgtggaaaaagtatgctttactattttattttatt

SEQ ID NO: 270996 - DNA, 1430 bp, Cannabis indica
acgagcagtagccctgaaagacgaagttgagaagctgtgcaacaacaacttcatcattgaagccttctacccggcttgggttgcgaatcccatactcatgcctaagccgaacaagaaatggcgagtctttattgacttcccagacctcaacaaagcgtgccctaaagtctgtttcccacttccaagaatcgatcagctcgtcgatgcaacagccgggcacgaaatattaagcttcatggatgcttattcgggctacaatcaaatcaagatgcatccgccagaccaagaacatacaagtttccagacagatatgggtctctactgctacaaagtcatgccatttggtcttaaaaacgccggagctacataccaaagactggtcaacaaaatgtttaaagatcagatcggcagaaatatggaagtgtacgtggatgatatgctcgtcaaatccagaaaggctggggggcacatagacgacctggacgaatgtttcaaagtcctcagaaaatacaacatgaaactgaatcccctaaaatgctccttcggagtcagctcgggaaagtttctaggcttcatcgtcaacgctcgaggaattgaagccaatccagaaaaaatccaagccctcctggatatgaactcgccaacaaaaaccaaagaggtacaaagcctaactggtcgaatcgccgcacttagcagattcgtgtcaaaatcaacggataaatgtgtcccattcttcaacatcctgcgaggaaacaaaaagtttgaatggacagaagaatgtgaaagagcttttcaagacctaaaggcacagctcgcaaaacctcccgtcctctctaaacctctggacggtgaggaactggggatatacctggcagtaacggagcatgccataagcgccgtactaatcagagaagaagatggcgtgcagcatccagtctattacatcagtaaaagactcgtcgaggccgaaggccgatatccgttgatagaaaagctcgcctactgcctcatcttagcaacaagaaagctaagaccttactttcaagctcatcctgttcgggtgtacaccgaccaaccactacggcaaatactgcaaaaaccagatgcctctgggcgattactcaagtgggcggtggaattggggcagtacgaaatcaacttccaaccccgaacagctatcaaaggccaagccttggccgactttgtgggggaatgcacaggaaaaactaaaagcatcctagaaagcgatcccgagccaacaccacagccgaccagcactgaaagcaagccgacctggaagcttcacgtggattgatcggccacagatcagctatcccgcacaggaattgcccttgtcacacctggggggcaacacctacattgtaaagcccgcttagttaatttggaaattagcagttatttatgttaat

SEQ ID NO: 270997 - DNA, 619 bp, Cannabis indica
gagttccagtctcagtttgggtctgaggctaggtctgtgtttggttcaaggtcaaggttcgagttttggtcacggtcctagtcttattctagggtccctgtttggcgattcttgttcacgttctaattttggatcccaggtctacgtatgggttcgtgtttggttcttcgtcttggtttcggtcgtagtctaagtcccagatctagaaaccgactactggtttgttccagggcccgttaccaaaatctcgagtgaagatcttgatcactgtcacgggtctaggtatggttcttgttcagggcccaggacctattcgtgagtttgggttcgggatcgagataggggtgcggttctaggtcccgaccttgcttctgtgtccctagtctggttccatgtttgagtctgagttcaaggtcgggttcgggtcctgagtgaacccgggtccggctccaaattcgggtctaggtcagatttggaatctgggtcctggtccagttatggtcctggatcgatgtccaatttccgttatgattccaagtccaagtcctagttccagtctcggtcaacttctcgttttggttcaaattttaggtcacagggtacgggttcgggtccactt

SEQ ID NO: 270998 - DNA, 1575 bp, Cannabis indica
tggaaatcgtgattaattaaaattttgttatttaattaaaacttatatatattacatacaaaatattttgggatcccgattacaaaacactttacaaaagtttactagtcctttaaaaaaatatttgtcgcccagcgactaactacaaaagcactgttgtcccgaggatcgtacgctccaggcctaatcgccccgacatgtacaatcttcattggctcgtcctcacggttcctcagctttggccttgcccttacctacacataaacatagcactgtgagtcgacagactcagtaagaaaagcataatataataaaacatactaaatcctgggttataatcaagcgcccatacacctgaccataaccctaactgaatcagggacgtccatgacaacgtatgattaactgcgaatccagcctatactcggtactctagtcgtaccgatgtggtagcagataatccatactaactgatagcctagcatatatctgttggcatctcggtgcaactctatgtacacctcactgttgccctgatatgctaatctgacggctatataaaatttgcctaacatatatctaatatgttaatctgatggcaactgacatgtacgctaaacatgtataagcatatgcaagacattatactaatcttacctcgattctgaattcaggtgtgtcggtcaacctgagtggaacgaactgctcggcaaattacaggctcctaaaccataataatcacaacactgataagtgacacgctaaatcacttcccggggacttaaactagaaactaaaagtttccctatcgataaaaagcatggcaataccctaaacaacacaaaaatgggaagaactagggttcccaaaattgtcctaaccggtagaccgattcctcaaccgaaatttcggttctggaaaaattcctggaagccccaaccggtgaccggttcctaatggcctccctgaatcggaattccggttcagtgcaggaattttttcaaaattcgataactcgaccaaatcaaccccaaaccaattcaaactttccaggcctgctctaaataccccaaataacatttcgaaatcaataaaataacccagcatgcacaaaataaaaaaccaccattaatgagccaagcttgagttcaaaactccaaagcttgctcaaacaacaaaacaacaaccaaatcaagcatagatcaacataataactcataattaaccctctgtaaacaacatccaacaactttagcaactacagcaactaaaatctcaattcaacattaaagctccaagctttgagttcaaaaactcaaacttggttaaatctaactaacatgcatcaaacctgctttaattcattcaatttaaacatatataaactacagaaaacatcccataaacccagcagcaacaacatcaaattaggaagcatgcaactatcaaatttttcttaaaatttaagaaacttagaagaaagctataagaatcttaccaacaacttcagatcactaaatcttgagaaaatagcttgaattaccaaagaaaacaccaagattcttgctgctcaaa

SEQ ID NO: 270999 - DNA, 759 bp, Cannabis indica
ctatgtggcatagacctacgtgttgctctcacacgtctatttacaataagcccttagtaaggtttatcttggttataattatcgagtctaacctggttatgccttgctcgcataaccctattcatctgtatttatgtaatccatagattacgttctctcagtggtttatcctgataatatataccaggtctaaccaagttatgtcttatacacataactcttgatatatatacatacattccatatacactatagcatataaaatcttagggtaataaccctaattcatgctctcacttgattagcaatattattgtacatcatcgctttcttaccttcacttaaattctagggtaataaccctatttcacattactatcaaactcaaggtactaacttaccgagtctaacttaattatgccttatgcacataattctttattacaatatatttagcatggcatagcatttacacattaataattactagggtaataaccctaggccattaaaccgctcactttagggtaataaccctaatctcggtttctaattatcaccaatataatattcaatataagcaccaccgtgcatatctctacgtgcaactactgtcttacctgttgtcccgcaaaggcagagattccaaatccccgggtgctcctgaccaggtgccggtaatcctagtcacacacaatcaaggattttcacaaatagggttaacccctgatttcacattcataaaataaattcatggca

SEQ ID NO: 271000 - DNA, 881 bp, Cannabis indica
ggtgtaaaatatcagctaattgtttctcagtatcaacatattctaattgcaaagatttattttcaacaagttccctgataaaatgatgccttatatcaatatattttgttctagaatattgaacaaggtatttttggaaatatttatggcactagagttatcacaaaaaatagttaaaacacccaattaaaatccatagtcaatcaacatttgtttcaaccataacaattgagtacaacaactaccagcagcaatgtactcagcctcggctgtggacaaggaaatagaagtttgtttcttactgtgccaagaaaccaaattgtttctaagaaagaaacaacctccacttgtactttttcgatcatcagcattgcctgcccaatctgcatcactaaaacaagctaagttagaattattatctttagaataccagattccgaaattgagagtactattaacatatcgaataatcctttttacagcaaatacatgagattccatagaattactttgatatctagcacaaactcccacgctataactaatatcaggacgactagcaatcaaatacaatagactaccaatcatactacgataaagagtagtgtcaaccttccctttattctcatcttttgttaatttcaaagtggtgctcataggagtacttacatgtttagccgactcaaggccaaactttttgacaaggttcttggcatacttactttgtgatacaaatgtacctctttccatttgtctgacttgaagaccaaaaaagaaagtaagctcaccaaccatgctcatttcaaactcattttttatttgatcaataaatacctacacatcaacataaatttgagcaatgataaaatcagattttctat

SEQ ID NO: 271001 - DNA, 499 bp, Cannabis indica
attttgtttttatcaaaaaatgtgaatttgtttaagtaaacataactttttttaatttaatttataattttttttttccaaaaaattatttttttattgaattgttaattatttttctttatttgttaagatgtgagtttataaatataaataagtttgattttttcttcaaaaaattttaatttatttaaattatttattagattctcaataattttggtttgattttttaagatatgtgtttattaaaaaaagtaaaatttgaaaatattttttataaataatttaagtttttttaagtaaaattaatatttttattttttatttttgaattaatagaatattataattacttttaaaaaatagaatattataattttaaaaattaatctttttgataaaagaggataaaaatttttattgatcaaagttcatggagtaaaatgctaatttttaacggtaaaaaaaaaacagaacctaacagaatgggcataattat

SEQ ID NO: 271002 - DNA, 621 bp, Cannabis indica
ataaataaataatatcatgggttttttttttttttttacatttatgtggacttttttatgatatatttttgtaaaaaaagatggaaatcccatatttgtaaaacaataataagttttgccgaaaaagttatcgaaaaagttattatcgccgaaaaagttaccgtcgctgaaaaagttatcgaaaaagtcgtcgaaaaagttactgtcaccggaaaaatcactgaaaaagtcatctgaagtagatgtctcagatataaataaaaatagaatcgattctataacataatgaataaaaacaaataacacgaaataactcaaaccggttataattgaaatataacttgttctgtaacataatgaacaaaaataaataacacaaaataactcaaactaattataattaaagcagaatcgattttataacagtattacaatgaataaaaacaaataacacgaaataactcataccagttataactaaaataaaatcgattatatatgatgattccacatttgtacactcattcttagtcaattattagatgaattagtatttatttttgtatagatttgatgtgttttctccaagtgtgtaggtttgtgctgaaaagacattttgtg

SEQ ID NO: 271003 - DNA, 687 bp, Cannabis indica
tttggctagcttttgaggcgtgcaatgtggccgacgatgtgtacaagctaaaggttgtgtgcatttgttgaaggtgtgctactgtcaagggctgagggtgtttatatatggacggatatgctgaagttagtagaaaacgcagaaaagttctttgagtatccatggggccttctttcttatcagaagttgttgtcatccacagccaaaaaaagtatgactgacctgaggaagaactacattgataaaatctctactaaggataagacgaagaagaaagggaagaaggagaaaaaaattactcaaccagaggcaaagtataatgtctatggatatgcactggcgctacaatactgggccttcgaggtgatgcaagatttggggaagaagtacgggctgtgcagagggactagattccctcgaatgttgaattggagcaccccaaacacggttacgaaaaatgatgtgaagcaacctgatgtggctacactatttgagaaaagggtatgtcaatcttactttctttgttgttttggtatttattttgctaaactgttagtttcaacgattttatgcgatttcaatgcgatgtttgtgcgattttaacatgtttttcatttgcctctgttttattttgcgattttgtgcgattttaacatttttttcatttgcctctgttttattctgcga

SEQ ID NO: 271004 - DNA, 526 bp, Cannabis indica
ctatgttgcttgcatcaagtagatatgttggctagagatttattgaaatttcgtaatcaatattgaattataaaaatatcatatttttagaatttataatagcttagctgtacaatctttaagttttttcttgtatatgatattgttgccacagctagttcattttcattcttactcttatattagctaaatttctaatgtgaagtccacatgaataatatcaatatattatattgtcattgcagatacgagtaagtcaatgtggataaatttgccaatgtcaattcttttggtttgcgcattaaggattctttttaacgagctacttcaaataatatcaagttatgaaagttaggagtaggagaatcttttctaatcacacatatggaggataagcttgtgtattgtaagtgtaaatttttactaagttatgaaggttgggcttgtatatttaaagtattgttaaaatatttgttttatagacactttatgtaatattacttatgtaattgtcttaatttaaatt

SEQ ID NO: 271005 - DNA, 536 bp, Cannabis indica
tttgtacttgttgaaaaactcaccctacaattattctcttaccctcccaaagcttaaggtttcggcagatccacagttggtaaatcagtgcagcagagcagctgcgtacacacctctcttgagcttttctcatcctagctcttccaagccacaacacagcctttttcaacagtttgcacactagtcttccatcccaaccagtttttaaccaaatcaaagcattctcgggtgaaagagcaagcaaaaaaagaggtgatcaacactctcttctgcattattgctgcataaactggtagctgctgtcaatctcaggtctataatcttcactctattctttgtcttcaatctttgtagcatggagagccataaaataaaactatatatatgcttaggacaattcaatcggctccacaccacaatgaaggaggtgaaatctctttagaaggaactctctcatctaggttgaaggcaatagttaaattgtcaaaaaggtagatgagcgagggcatcatgttccttttatagtgtttcaacta

SEQ ID NO: 271006 - DNA, 939 bp, Cannabis indica
ttagggttttctagcaaagtgctttcttgatagaaaacttgacatctcttactcccaaatgagcaccatagacctcctttatatagtgtttaggatatcaccatttgaaattcaaaattcataagtcataacctccatggatgttatggactcaataaagagatgtaactcatgcacaccataactcctatagagatgtaactcatgcacaccataactcctataccattaagaatttcaaataaagatgtgtaacaccttttacactcttaaagttggtgataatggtggaagttactcatagtaacaactcctccaaatattacaaaatgatgacacataatatataatgtcatatgttacatattagtttgttacatgtatttaatctacacattatattattgataaataatataacacttagtactactccaatttaaaagcaatgcccactacaagaatgattagttttacaggcgctttacaattgatgcgcctgcaaaagattaccaataaaggcgctgaacagtggaaaagcgttcataaaagtagccatacttttgtgggggctttcagctggtcgataaaagtttcaaaaataacacagacacttttaaagcatctataaatgtgtaaacacttttacggacgggctttttgataaaaatgaaaacagtctagcccagttactcttttattcaattttcagctcagcccagcccagttactattttcatctcaattcaatttttattacacgcagtcaaaagataaccctagccttccacgttgttgttgtcgctgccgcaatgccgccacctctccgtcgacgtcgccgttgttgttggttctagttcttcgccgttgtggaggttcttcattgccattttcgctgcctccattggttctctcctcttgtatctgaggtaatattac

SEQ ID NO: 271007 - DNA, 539 bp, Cannabis indica
atctatatagtcctctcggattgcccatccgtctgaggatgaaatgctgttctgaactttaactgagtacccatagctcgatgtagactctcctagaatcttgatgtaaacttcggatctctatccgaaataatggactttgggacaccatgaagacgaacaatttctctgacatataactcagcatactggtcaatggagaaattcgtccgaaaaaataagaagtacgctcactttgtaaacctgtccactatgacccacacggagtcaacctgtctcgtgcttctaagcaaacctaccatgaagtccatagcaatatcttgccatttccactctggtatgttcaatggctgcagcaaccctgcaggcctctgatgttcagcctttacttgctgacaggtaagacacctggcaacatactcaacaatgtcattcttcatgcctggccaccagaatatggcctttaggtcatgatacatcttcgttgaccctggatgaacagaataaggtgtcgtagagactcatccataatctccttt

SEQ ID NO: 271008 - DNA, 546 bp, Cannabis indica
aaaaagctaaattaagaccttgcatggtgattctttgcggatttactggcgacagtgtcgccagtcaaggaataatcgagcttgcattaaatttgggcaaagcacctttatccaccataataatgcaagactttttggttgtcgacctgccatcggcttacaatatactgttgggtcgtccattattaatcggacgaggggcagttagttcgatcaagcacttatccctgaagtttcagacaccagtgggtgtgggagtagtgcgaggtcatcagatgttggctcgcgaatgctaccgcatagagctacaacataaaaaagtcggtcaccaccagtcttgacagaagaaggcgagaagaaggatgaagatgttgatcctcaaattcaaggtgaaagaaacttattgaaagcaattgaagaattggaagaagttgttctggaccaaggaaatcccacaaagtgtgtttacattgggaggaacctggatgaacaattgaaatagcaactacatttggcagctcgcactgatctaacccggcagtctcg

SEQ ID NO: 271009 - DNA, 538 bp, Cannabis indica
ttttccttccaccctttatgggaagtctctaagtcagtcaacaaggaacgacttttcctaggacgaaggtgctagcgccccggctctttttccatcagaaaatagaagtggatgacgtcggatacttcccactgaacgcccaccttatcccctaatacaatcagacccaaaagaatagcccacacattaggaagtaactgggcaggagcaagtgaataatgtatcagaaattccttaataagtctaggaatgggtaacctcagcctaatcttcgactcaaagcagtatgagtgtaggcatacccactcattttgagaggaattcgccctctcatgctgtttaggaagcctaacttcgacccccgacggaaaaccacgcgacaaaactaaggagtcgagttcacgctgcgtgacgaccgacggacaactcgacctaacatccagaaaagaactacccagagcatgtttttctttttggccttcttcaacgggggaattgctagagtaaccccttcggacggggctgcctggccactaac

SEQ ID NO: 271010 - DNA, 1030 bp, Cannabis indica
cccttgtcacgcctgggggccaacacctgcatgatgcaatcaagtttggatttaaagcatcaaataacgaagtcgagtatgaagctctaattactggcctaaaactagcccgagagatgaaagccgaacacattgaaatctacagtgattcacaactgttggtaaatcatgtatgcggagaatacgaggctcggggagaaaagatgatagcatatctgaaaaaaatacatgatctctcgcacaattcaaaagctacgatctcaaacaaatcccaagggaagaaaacacaactgcggacgcgttagctcgattggcaagcagcaatgtaagtgacaaggcgaacttggttcctatccagttcctcaaagagcctagcatcattggcacggaagaaatcgaaaggattgatacttccccaaactggagacacaaatagcagcctacctcgactttaggaaactgccagataaacgaaataaagctcaaaaaatgagaaggaaagctgcacggtatatcatagtagagggaattatgtatagaagaggattctcaatgtcgttgctcagatgtgttactccaaaagaagctgaacgactcctatctgaagtgcacgacagattctgtgaaaatcacgccgccgggcaaagcttatttaagaaaattctaaggcaacgttccttcaggccaacgatgattgaagattcaaaagcctatgttaagaaatgtgaagaatgccagatattttcaaagatacctcgagcgccacctaacgagttaactcagatgcagagtccgtggccctttgccatttggggaattgatctaatcggacaattacccaaaggaaaaggaggagtgcagtattcagtggcagcagttgattacttcactaaatggacggaagccaaaccactcgcaaccattacatcaaagaaagttcaagactttatgtgaagaacataatctgccggttcggactgccgtacaaaatagttttagataatggcaagcagtttgacagccaatcctt

SEQ ID NO: 271011 - DNA, 753 bp, Cannabis indica
cgggtcccaatctggttccatttctggtgctggtaacgagctgggtcctaagtttaagtttgggtctgggtcgggtactatgtcctggtcctagttttgttttcccaggtccctatccttattctggatccaggtcccggttattgcgtgggttttggtcctggtatatgttcgggttagattcctagtttgagtttggatcagagttcgagtccttgacttattttaggttcaggtccgaatttcagtctaggtccagatcaggctgcgggtgtgggttcgcttcctgggtcttggtctagattgtgtccgagtcacaagttccaatcccgatctaagtctggattcagttttgggtctaagtccttggttctgatcctggtccgggtccgggtcttgcttatggtctaattcaaggtgtgggattgagttctagtcttagtctgtgtttgggtttgtgtcctcgagtgcgggtccaagttttggtcttggtcaggatctcgatccagatttaggtccagcattacgatcccagtctgggtctctgtctgagtaaaggttcgtatccggatccctatataaatccaagtctgtgttcgggatcgggtccaagatttaggtccaggtccgggtctcagttccgctcttgttagacaaccgtgtctaggcccgagttccagtctcagtttgggtatgaggctaggtatgtgttcggtactaggtctgggtctgggtcctggtcacggtccttgt

SEQ ID NO: 271012 - DNA, 752 bp, Cannabis indica
tgtatgaaaggttccggaagcaagcacctcaagtttttctgggaggtccggatgtcatgaaagccgaacagtggctaacggtgatcatcaagatactgaactttatgggtgtcaccggaaatgacagggtggtgtgtgacaccttccagttccaagaagacgctctagtcttgtgggacatggtgtctcagattcatgatgtcaccaccatgacctgggaaaggttccgggaactcttcaacgcgaagtattataacgaggcagttagaagtgccaagaggaaagagttcacccacctaacccagcgggaaaatatgagcgtgactgagtataccaccaagttcaatcggttggcgaggttggccccgggaatagtgccaactgatttcagcaagaaggaaaagtatctggacggattaaatccaaaggttcgacatgaccttatgatcaccaccgaagacaagaccacctatgctgagatggtggagaaggcactgcgagctgagggcgcagttggatgtatgtcggagtcggctagtactccaggtagttgcagggctcctacccctcctgcatcacgatttagcaggggaggtagtggttcggcgatggaccaaaagaagagaacatccactgcatccggtggctcagggtagaacaagaggttccgggggaaccagagtagaggtagccgtcagggtggtgctgagacccggttttcgtacccagagtgccccagttgtaaaaggcac

SEQ ID NO: 271013 - DNA, 1162 bp, Cannabis indica
cccccattcccctttttgacattagggtttggttcggggcctgactactggattttttcaatctttttcagaaccaaaatgtctgcatccggttccaaatcttcaaagaaaggggggaagcgcctggctaccctggaggaagttatgaagggtccggtggcccaagaagggcacaagtcccgtgccaacgggtgggaagcggctgagcttcactctaccttgacttgccctcaccagctggaacatatcatggtggtggcaggtatcaagcctgcggctccgggacctaccaccggccgccctgggatgcggagactcccaaccataactacgggggcttcggagccgggagccagacgcacttgatggtcgggggcatgcttccccttcaagactactttattaatttcttgtatttttcggccttgtgccataccaactcattcctcaagcttaccgcctgatttcaggcttatttattttttactctgcccggagctggggctctcccagtttggcagagattttgtatctttacgagctcgtttttatccctaaaaagggggttaagtttaaggacggtttttacggtcttcgggcccatcctttgaatgagggtccggtcccttttaatcatcagaagcatgtgaaggaataccgtcaccgcttcttcttctcctccgagttccaggctgtggagcattcggagcttctcacggagtgggttaggatccctccttatatgcggaccgagccgactcaacttttcctccaacgagccaagatctttgccacgtatgacaaggaggaccttgatgtcggggagttggtcacgacggagcactgtcggaaggccaagctgattttggggcatcagtcggtggatgactccaacctttccaaggtcgcctgcccgaatgtgagggcttcggctgcagagaatgtattccgggacgatatcatcgccacggcggaggataagtaccaaaagtacctcttcaagaaggaacaggagcgggcttataataaggcctaggtgaccgccggaagagccctttgcattgaggctccggcggagcggaggacccccaaaccaaatcctacgaccccagtaccgaatacgggggcgtcccaatgctagcacttcgagttctggtaagtc

SEQ ID NO: 271014 - DNA, 710 bp, Cannabis indica
aaggcgcaggatccgcgaaaggtctgctcagatttcccgaaagggaaaggtccacagaggggcaaactccaaaaagggaggggaccgaaagagcgtttccgtgcaccaagagcccgaagggagaggaagaaggggctagaaaggccctcccatcgatctgagaaatcagattaatgagaaccatggtgatcttcgggatcacctggaccaaaagaagtatggacccgcggtctctacaggaatgttaaacgaaagaatcatggcagaacttaccatactccgaaagaacatcgcccgagtctcccagagacagaaaggcgacgactccgactctgattgtgaggaccgggagccgtgtgccaaacacattctggaagcagagctccccaaatattttaagatgccctaaatggcagcttacaccgggaactcggatccaagtgatcacctgtcacgatttaatcgagtcatgacagtcatgagggtcagcaatgacgccaagtgtttgtgcttctcgcttaccctgagcagatccgtagaagagtggttcaagaaatttgaaccaggatccgtggattgctggaataagttgcaaactagcttctggagacaatttctcgccgcaaggaaagtcaatctggaggtcagcgccttgactaacatcaagcagctgcctacagatacattgaagaatttcataaagaggttta

SEQ ID NO: 271015 - DNA, 935 bp, Cannabis indica
gtaagggcaaggccaaagctgaggaaccgtgaggacgagcagatgaagattgtacatgtcggggcggttaggcgtggagcgtacgatcctcgggacatcagggcttttgttgttagtcgatggacgacaaatattttgtaaatgactagtagacttttataaagtattttgtaaatgtgatcccgaaatattttgtatggattattataagttttaattaaatagaaaaattttaattaatcacgatgttcattaacctcgttgattagcaacgaactgcagagtacgttcaaaatcacatcaacacgcatatcctagttagggtgttagatgcaatttttgaaagggtatgaatgcaaggattctaatcaggtttgtctacttaagaaatctctctatggtttaaaacaagcacctaggcaatggaacttaagatttgatgaatatatgaagaaaatagggtatgtgaaaagcaactatgatccatgcatctatcacaataatcagatttatctactgttatatgttgatgatattttgatatttggtaaagaaaaatcagacataaataagctcaagatgaaactcagtcaagaatttgaaatgaaggatctaggtaatgctaagaaaatacttggaattgacactcaaagaccctcatcaaatgttataaacttgtctcaaaagagttatctacagaaagtgttaaacaagtttgcaatggacagctccaaagtagtttcaactcctctagctcagcgttttaagctgtctaactcacagtcaccagttacagatgcaaagaaagagaaaatgattaaaattccctatgctagttgtgtagggagtttgatgtactcaatggtgtgtacaagacctgatttagctcatgcaatgagcatgaaaagcaagtttgttgccaatctagggaatgc

SEQ ID NO: 271016 - DNA, 531 bp, Cannabis indica
cattgaaatagtttgtgtttcttctaatttgtattatctttattcagcaaaatttcaccaaacataaccccacttataaataataacatttcttaactgttatttgagttttgacattgatctgcacaaatgaagcgtataagagtgacttcttaccaagtgtttttattagttgtcactctacaatgtaaagatgccaacttgttttggttttatgaaactccatacacctttatagttcttttttctttttttgataatggacacctttataattcttaagattgaacaaaaagttaacttttatagtgtgcttgggggttgggattgtttattttagtgtgctttgcataaaattggggtatgttaatgttattatatagactaagtaaggctcttaatatttaggactgctcgtaattctaagtcccacactacatgctctttctcaatatgtactatataaattcattaaccaagtaaatatgtatgatcagaatatcagaactacttttctacaaattaaccata

SEQ ID NO: 271017 - DNA, 470 bp, Cannabis indica
tatattgaaatgagttttacttagggcataaaacccaacaggtgctcctgcagtgccggtgccggaagctcctgtggcacctgcccttgtttctcactccgagatagtggtagcggcaaacagaatggaacccttatatgaaaggttccggaagcaggcacctccggttattctgggaggtccggacgtcatgaaagccgagcagtgggtgacagtgataacaaagatagtgaactttatgggtgtcaccgggaatgacagggtggtgtgtgccaccttccagtttcaagaagacgccttagtcttgtgggacatggtgtctcaaatttatgatgtcactcctatgacctgggaaaggatctaggaactcttcaacgcgaaatactataatgaggccgttagaagtgccaggagaaaagagttcacccaccagacccagagggagaatatgagtgtgacagagtacacca

SEQ ID NO: 271018 - DNA, 507 bp, Cannabis indica
cagtggtggttccttctattttccttactcattttgttgttttaattactcttgcttcattattaggagcattaattgctctgaaccctattctcatttcaaacaatcccatctcatttattgccaagttactatctctctccaatttccttcttattccttgcgtttcttctcccctgaggttttatttgaagatcttttgcatttaatactgtctgttcatatctatttccatcatttcactcttggagattggaaaatgggggcggaggcttctttggctgacgatatctactcccatttcatcaagcgcctcttcaaatggaggctagggatgtgaccagagattattcgagaaagcatctacgggggctttggtttttcctttatatagtaaaattgaggtatggtccttttcatcttcctctttctttgctttttttctgggttgagttatttttctctgtgtttgtctggtttgttctgtctattaccatggatgagttt

SEQ ID NO: 271019 - DNA, 520 bp, Cannabis indica
ttggatatttagtttttccttttcaatgactatagggataacttacagctgctaaggcaacaatattactatgcaacttggaaagccgatgggacacgatatatgatgttaataaacgttgatggatgctacttgattgatagaagtttcaactttagaagggttcagatgagatttccttgcaactctaccagcgaagtatgctttctaatttttaagataaagttattcttggaccttattttctgaatttgagaagtctttgattattgattaagtacaaggttactactttttttgttatagtatattttatgattgttgctattaacttttgcattatataattagtttatagttagtttttacgatacatggaatataaattttaggatcgtttctattaacaactttggtattatgtaattagttaataaaactaattactaattttatataagttttataaacgttattttaattttttttgtatcatatattcactattatataaaatcgt

SEQ ID NO: 271020 - DNA, 765 bp, Cannabis indica
acttcttggccggaggagaagcactagagcatccgctcatcctcttccttaaggcgtccatcatctgccgagacatgtctgcacaagagcaaaaacaacatggttagcaaaaaccaacaaaaaatacaaagtatggaagccaagaagctgaaaaagaagtaaagcacagagtgactgtccacccagaaagtcagaagtccatcatcacctgatatctcagccataacgaccttcccttttccagcataaggatgggatggccgaacaggtgaaatgggctcccttatgcgaatggcatgttcaacgagcctaggcgtggctgggagtttcttcttcctcctcaaaggagtcacctgctcagcctcagcctcagcctcagcctcggcctcatcttcaggattcatagactcctgagcatactgctttgcccgggcacctcccttcaaattagcttcacgcttaagttgaatcagctcatcctttgaatgagcttgttcaggccgagcagcagcagacttcctcttcttccccatcacggacttagaagaaaagtccacagggtaaagcccgtaccgcaccagatttgcatcggaggtcaactggataatatccctgtcttccgccggcaaccagacaagcttctgagccctatccctaagggtaagagtgaggggaggacggtgatatgtcggaatagtttgctgatggccttgttgtccgtcccgctcaaccacttgaagcctggctgagagaagtgaaaatacc

SEQ ID NO: 271021 - DNA, 525 bp, Cannabis indica
ttttttttttttttcagatttttgggattgaagacttattcttcctcatcttaagaaaacacattttttgtaaccctactatcaactccagaatattcctattaagcttcctcttcttcaagaggtacacggtggaaggaagttttagtccattgtatctctacttgtataaacagttattgaccgatgagcctaataaaatagagtcatggactaaggatagttaacgcctaaaccatttaaaaatctcttatttgctatcttactatttattcaatcattactttctaaagctctaaaaaatacttagtttccaaaaaactcgataaacacctatccattccaccataaaattttaaagagaaaagccttgtcagattaccttaatttctactacaattattcttcaaatattggcttctaaatccgaaacatatcaagaaaattgtagagaaggcactaattttttcttgttcatgctccacttgagagaaagaaagggaggagagagataaatctattttg

SEQ ID NO: 271022 - DNA, 1307 bp, Cannabis indica
atttaagttggaaattttttcaatttcagatcaacttaaattagaataattttcaaaatatattttaatttattttaataattattttcccatataatttcgaattgtatttatttattttaaatgcagatctttcgaaattttttaattttgaaaattagattaaagttgaaaattaatttattaattaattttagatcaacttaaatcaaataattttcatttatgatttaattaaaataaatagattacaatatattattttaattagaaaattagtaattagcttatgaattatctagatagatattttctaggtagactttttggtatttttcaagatatatttaattaaataagaaaattaatatttaagttgattttattcaagacacttaaatatttgatatttttcttaagatatttaattaaataggaaaattaatttatttaattttagaccaacataaattagaataatttttccaactttattttattttattttatatgaatttcgaaaatgtatctttatacattatatttcaaaatttagttatatatttattgaaaattaaatttcagttgaaaattaattatttaattttggaccaacttaaattaagtaattttcataatatttattggaaaataatttatttttattttttagatcttcttaaagtataattttataaatattaaattaaaattttatttagagttatctaaattagtaatttcaattaaataaatagatttaaataagtatcaaatgaaaatacaactctttaaaataattggctttagttataaggatattcgactcccatttttggcccttaaaggttaattttttttctaatataacctcaagacgctagacttcgtccccccaaatggattgttattcgttgaagcatttaacaccgtaacgatctcttatgataagtattttgtaatttttcgtcttagcttattcatttcgaatttgcttacagagtatatcattggatgaatggtttatagatcatctgcttatgatgtcattctatatgaaattaaatggcacagatgacaatatacccgacattctatcctgaaatgatataaatcctcgatcttagaaatcccctacttgtatatgcttactttatgcaaattaaacttagagttagattagtagtggcggtccaagctagaatcattactcattgtatatttggtataaatttaagtcttcgacttcaaattttagattcccaaactaaaaatttaaaattttgtttccagaatacaatacagtt

SEQ ID NO: 271023 - DNA, 928 bp, Cannabis indica
aatttattcttttgacaatattgccgatggtaaaatcgtgattgatggagaagttgttgggttcgcggtggtcattgagtctgtgggtccttgagtttgtagtcatggtagtcgtggagagaaaggactaagattgtgggcggtgggttgtgggtcgattatgtgctcctttgtgtgcgtgtttacacaaagagagagagataaaatggagttttaggaaaaaaatgacatattctacggatatttaataatttagattttaaaaaaaaaattagtctaataaatacataattagtcaaatttttctttacaattttatatatattataataataataaacttaaaaagaaaacctaacctaaattttgctccgcctctcagctctcacactctcatctcgctcagctctctctgccgtcgtcccatcttatcttcttctcagttctcactctcattccgctggcgcgaatctccggaatacactctacaccaccctcctctatatctctcgttccgtcgactccagctccggcctccatctccattgttctcggcgacacggcagcggtatgactctccaacatttattgagcttgttctctatctcggtcaatatttctatttgtttaagtttcaaagctgaactttagccaaataaataaataaataaattcagtatgtgaatagttaggactttaagactttatcttatgcttgaatgtttgagcgaagtttctacaactttatttattcaagcttgaagagttgtgattgtttgagtgattttgaagcttgaatgtttgctaaggaagtatcagcattgagtattgagtatgagatggattgttaaactaaggtgttaacatcaaattttataatcagtttgtttgtggctaaaatcattggatcagtttggttaatattatt

SEQ ID NO: 271024 - DNA, 521 bp, Cannabis indica
tttatttttttcttttttttttctttttgtttgtgttataaggattatgaagtaagaacaacaattgatattaaatcttctcatgttagtttattgattttattccttacacactattgtttgaatgtgttattattgaaattatttcttttcatgttgtcacttacaatatattaataactttcaatttttcaggataaagtaacaagtataggaaagtgaggaaaaaaagatagctcatgggaggaatattgtgcattttctttatttttgtaacttggaagatttatagtattaattatgtgttgatgtttgtatatataaaattatagtggtatgaatgtatatgaaaaatattttaattaccatttataaagaatttcgttgaggcaataaattttatttgctttcaaaaaaaaactgtatatatatgtgaaatatacatattatataggcagtattaatatacatataatataggcagaatatgtatgtattaaaaataacactttttatagcgg

SEQ ID NO: 271025 - DNA, 1121 bp, Cannabis indica
taagctttggacttcctttgttttgttggcgatttcatatccaggagggcttgtattttctctggattagcttctattccccgagcattgacaatgaaaccaagaaacttacctgagctgaccccgaaggaacactttaagggattgagtttcatgttgtattttttgaagattttgaagcattcatctagatcctttatgtgcccccaaccttcctggatttgacgagtatatcatccacgtgtacctccatatttcgtccgatctgatctttaaacattttatttattagcctctggtaggcagctccagcattttttagaccgaatgacataaccttgtaacagtacatacccatatctgttcagaaacttgtatgttcttggtctgtggatgcattctgatttgattatacccaaaataggcatccatgaagctcatgatttcaagcccgactgttgcatccacgagctgatcagttcttggaagtggaaaacagtccttggagcacgccttgttgcggtctctaaaatcaatacatgcttgccattttttgttgagcttgggtaccagtacggggttagctacccaggctgagtagaaagcttcaatgatgaactcgttttcacgcagtttttctacctcttccccagtgcttgtgcccattctttgtccaatagtcttcttttttactggacaggacgaaagtttgggtcaatgtttagggcgtgaaatattataatgggatcaatattgaccatatcctcatgtgaccaggcaaaaacatccaggtgtgctctcagaaattttattaaagctaattttatttcgagcaacaaacccttacaaattttgagttttatggtcaagatatttgggtccatttccacttcttctagttcttttaccgaccctacatttgtgtttgattccccaagtcgaggatccatgtcttcgtccccgccttgggcgactccctattgggcaatgctgttccccttacccgaactctggccagaggtagtatccttcttaaccttagttagagcaaggttgtaaaattcccatgcaattctttggtgccctctgatacaccccaccccattcttcgttgggaactt

SEQ ID NO: 271026 - DNA, 812 bp, Cannabis indica
tggggaaaatcgggtaaccgtttacaagtacctgtaaaaccggttaactgatttttgctgctgggattcccgaaaaaagtcagcttgttaattcgcattagtttcaggtttctagttggttaattccgtgctagtttagggtattgccatattaagttgcagtagttaaggttttggtttaatcctaagtcccagttgtgatttagcgagtcacttattcgtgttgttatcgatgtgatttaggagcctataattcgacgagcagttgttccactcaggttgaccggcacacctgaattcggaattgaggtaagattggtataatcttatgcatatgttattacatgtttagcatacatgtggtttatgcctgttagattacattgatagtagtaatagtatacttagagttgtacagattactgataaatgtatgttggctaaatactaatcgatgttgtcacatcaatatgcctagagtatgactagcatattgagtataggctgacattatggtcgatggtattgtcgtatgaacgttctagactcagtactgtgtgggacacggggattagggttatgatcaggtgtatgggggccaggttataacccatgatatttgtatgttttacgttatgcttttattactgagtctgttgactcacagtgctattttcatgtgtaggtaagggcaaggctaaagctaaggagtcgtgagaacgagcaggtgaagattgtacatgtcgggttggttaggcctggagcgtacgatctttgggacattaaggtttttgctgattagtcgctaggcg

SEQ ID NO: 271027 - DNA, 561 bp, Cannabis indica
ttgtttaaactctcttcatgctttcagatactggggctaggtgatttgaagaaatttattctttgcaagttttattcgttggctcttcctggactcaacaactttttgtactttctattgaagctgcagcagtcaaaagcactttgtgaggaggagttgccattttccgagacctgctgcggttgcttcccattaagaatttcttggtgatttttgttggttttaagaatttcagaagatgcagaagaaaaaatatgtgaaataccctttggtatacaactcttttttaagacatctgacacaggtaccataactaatcagttctaactgactcattgtatgaaataagaaagttcactacaaatgcaaatatatatttttataaagctctattggtatgtgctggtggcttttgtatcattatttattccaatatatcactatgataatagctctattgttaaatttgactattctttagttactacaactgtgtccatttaaataattgtattacttaaatcgcatcaattagttaattgtaacctattttattcagtt

SEQ ID NO: 271028 - DNA, 832 bp, Cannabis indica
gaaagttcttatttaggatgttaataaacatacttgtgactagatctaagatcctagtaaaataatttccaacagtttttgggatatcttcctctcgaattctcaactaatgatagcttgagcgaagatcaatcttggagaagaccgtcttcccctttagttgatcaacagattgttaatttgaggtaaagatacttgttcttgatggtaagcttgttcaactcccgataatcaatacatattcacagagacccatctttgtttttcacaaacaatactgaagcaccccaaggtgagtagctcggtctaatgaatcccagattcagtaactcttatagttgtacctttaattctttcaattccgctagagccatccgatacgttgcttttgatagtgggtctgctcccgaaaccaactcaataacaaatttaatctcccgagtaggtggcaatcccagtaaatcttctagaaagacgtcaaggaactcgcacaccaatcttgtattctcaggtccagatgtcacaggttggctggtatccactacagtgactatgaatcccaaacaacctctgctcatcaggtccttagctttcaaaagtgttattcttggtatgcgtgtcccttgaactttacccacgaacaccgatgggtcagcactatcgggctcaaacaccaccatcttccgcttgatgtcgattgtttccccatactttgacagaaaatccattcccaggattatatcaaaattagatagttgtaactctattagattggcggttaattcacaaccgtcaatctaaaaggacaaggaccgaatccacctagtggata

SEQ ID NO: 271029 - DNA, 1138 bp, Cannabis indica
aatattgccttatgtaattattctgccaaagactagcagcccatatatcaatgtaaatggactaattgtttagttttcttttttttctttctctctttttatttattaactatgaaacataaaaatattcatagttttctttaatattaaaaagaaattctcttctttttctcttctaagaaaaagtttaagatatttttttaatcacactagtaattatttgagcttaaaaattataccatcattatctatttttcaagaagatctttttttttttttgtaataaaagggaaatttttattaatcaacttgaaaagctatcatcccttacaatcgaaagtaaatcagatggagcagaaagctcatcataaatacaatctgacataaaacaagaccgcctcgcaatacagtgggccgccctatttgcatatcgtttgacaaaagaaacaaaaacattatttaattctgagatcaagctttgacaatcttgtataagaaggccaaactgagatggcatttgaactgagccattaatagcctgaacaactactaaagagtcagtttcaatttccacgtcagataagtccttttgctttatccagctcaaagcctccttcacaccaatcacctcagcaacctcaggagagaccttccctattttactcttcgaaaaagcttcaaccattttggcttctccatctcggattataacaccaattccaaatcgattttcagcatcaaaaagagccccgtcaacattgatcttgaacttagttaaaagtggtttcacccaatgctctcttccattgctgaaattgacattcaacaacggggtaaacacccttgtttgagcatttttccatgtgtcaagattagttctagccgaacggacaacttctaaaactgtagtcgacttcttattccacaacatgtcattcctcgcaaaccaaatccgccacaatatcatagcagattcctctgctatctgtctgcttccttgctgcagaatatcacagaaccacgtgaagaactcaccttcagttacaccagcagcagcagctgctgcaatattccaacaggagtgagcaaactcacaaccaaaaagaacatgcgaaatcgattcaggagctttattgca

SEQ ID NO: 271030 - DNA, 494 bp, Cannabis indica
gctgagtgcattgtagaattttccagtcttttatattttgatttagatatagatttaattttaattttttttatatgacaaatgtacattgagctgactttagaccaagagagtaggagtgttcattggatcacatccaatggattttggacccatccaatccaatccaattgaattgagtcatccgatccgatccaatccaatggatgtattcgattggatcggttccatccattggatgctttaaccggttttttattggattggattggacccatccaatggatccaatggatgaatccaatccattttagccactatttaggctgatttcattaaaaagaaaaatataatttaaaaccaataatccaataataaacaataatttaatccaaatccaacctaatttcatgatcccataataaaatataacacaaatctaacttataagcaaaaagtcttaataaacaagtccaatacatcaaatgcaaata

SEQ ID NO: 271031 - DNA, 860 bp, Cannabis indica
ccttattatgccatatgcttttagttaagtttcgagggaatgaagtttgttgagtgggtaatatttggaagtaagaggttagaaaaaaaattatgggaagtgtcttaccatctataagaaaagaaaaaagaaaaagaaagaaagaaaaaaaaacaaaagtaataaatttgataattcttcttgaaaaaaaaaaaaaaaacaaaacaaagaaaagggaaaatggtggtaggcacatatatatatatatatatttatataaaaagaggaagtttgcaatctcttaccaatttctttgggataaaaaaaaatatggataattgagggtacttgattggtatgttctgcttatggtataatgtagcctaaataactttttatctacctttttacctaagccgccacatttcaactgaaaaagaccttttgattctgagcaagggttgttgacattagtggagagaggtgtgtcatacaagcatattgaacattggttggcagaatgttggacaaagtagattggttgtgatatgagtttccaaagaggtgttttgtatctatatgaattgattgcttctaacttgtgcatccaagttaattcttagagtgattgagttgaaattctggttattcaattgattgaagttgcacaggtggtagtggtagttaaactatttggaggcttagttatctgttgcgtcattttgctgttatttcagttttagttttagttttactcaagggcgagtaaagattcagtttgggagaattttttaggctatttttagcctatgtatcgggtcacaattaaagtcgtttttcaatgtttttggacagaattacgcttgttttctatgttttca

SEQ ID NO: 271032 - DNA, 478 bp, Cannabis indica
ttaattttttttctggttgaccctatggcgtcggttcctatgaaggaaccgacgccatagggtcgacctttgcacatatacaccagcttcgtcttcctccttcacttcactcaaaacccaacaaaccagagacaaagaaacccagaaaataccctcgccgaaccctctttgagcaaccatatatctcccatttctaaaccatttgagcccatttttttttaaaatcctcaattttcgatacttaataacatacacctaaaaacttttcattttttaccctgtttgagtgtcatccgaacccaaatagaaaagtttggtttaaaatccggccacccatttttcttgagaaatccttgaatctcaacctcgtttaaggtataaatattgtttctattcatttttattatgtacattgttttatttttggtttttgtaaattattatttgagtttttttattttattagtaatattattgt

SEQ ID NO: 271033 - DNA, 877 bp, Cannabis indica
cagatatcgaggaaatccttgaataccctattcatcaaatccatgaatgtcgcaggcgcattggttactccaaacgacataaccaaaaattcataatgtccatacctagtacggaaagtcgtcttaggaatgtcctcctctcggattctcaactgatgatagcccgatcggagatcaatctttgaaaagaccgtcttcccctaaagttgatcaaaaggatcatcgatcctaggtaaaggatatttattcttgattattagcttattcaattcgcgatagtcggtgcacattcgtaatgacccatctttcttcttgacaaataatactggagctccccagggtgacacactaggccgagaaaaccctatgtcaagcaacctctggagttgaattttcaattctttaagctcagctggagccattctataaggggctttagaaaccggttctgctccaggtgccaaatcaattacaaatcaatttttcgttgaggtggcaaacctggaagttcatcaggataaacatctaaaaattcccgaaccaccttgatgtcttctcgccgaacagagtcaggacgtgtggtatccaataccacggccagaaaccctagacatccatcacacaaaaattctttggctgttaaaactgaaattatcgggatccgcgatccctgaaccgaaccgacaaaaacagacggttcttcaccttctggttagaagattaccatcttccggttacagtcaatactggctgaatacttggacaagaaatcctttcccagtataatatcaaaatctgctaaactcatttctattaggtcagcacttaactccctaccgtcaatcctgatcggcatagacctaatccaccttttgga

SEQ ID NO: 271034 - DNA, 1118 bp, Cannabis indica
acacctttcaatcttgctattcacattaccaaaaaaaaaaaacaattttgtattaagacaaaatttttcacaaactgaaattatcataccaacggaaagatctcactggtcttaccaaacatttcaccaccatactggtttattaaaaacaaaacaaaccatattggcttacataaaattgcaaccgtactggtcgtaactaatgaagcacccaaatgtgtaaaccacaaaaaaccaacatagcacaataattttggaaaaacaccatgaaccaaaagagaagaagccacatatccgttaaaaagttcatcagtggaaaaaaatatcaccataagcaaattccatcaacaaaattctgggatttaatttctataattcggaacaaccaatgcatacttcaaaaagtgaaacgaaagcaaattctgggttccaaaaaagaatcaaccattcacaaataaaacagcatccatccatttcaacggagaaaaaagactcgtgatctaaaaaaccgggatatcaaattaatcaaaattgaaaacatatacatgaaaattaaattacaaattcaaaaagaaaactaactcaaaataaagttatacatcaaaacatttccaaaagaaaaaaaataaaaaaaaaaaaaacgacattaagaaaaacctaaccttctcccacatagatagtgacctaaactctttcaacacatcccaattccttctgagaatcggctgaagaaagagtgaccccgatttccatcccccaaggccagccgaggtctacatctctgattgccaccatcctaagccgaccccaaacatcccaaatccctcaccaaacaaacaaaaacctatattattaaataaaaaaaacgtgaaaactacaaagttaggtgataaattaaacacattcttaaaagaacttatgccataataaatgaataaccctaattgtccgaaactcttacaaaacccaaatatagaagaaattgggcgagaataaagaggatcgctgtctcaaaacgcttcggcattgaccgatttcatccaagaccgacaatcgtttgacagaccaaaatctattgggatatatgattggattctcgatcaactccacaaaagatt

SEQ ID NO: 271035 - DNA, 883 bp, Cannabis indica
actccacttccctcgaagagcgtgaatgagcgcgattgtctcttctatcatcatatcttcctctcgatgtactcctaccataacttgattctgaccttatcacaagagcttgatcaatatgagacacaccacttggttgcttgatactatctgtctctaaaagagcagttgacacctcatctacagttaaagtagtctttccaaccaaacgtgtagtcactaatgtctcacatgattttggtaaagaggccaacaaaataatagcttgatcctcttcatcaattttgacatctacacttaacaattgagttatgcacttattaatctatatatatgatccctaacatcttctccttcaaccattttctactcatataattgtttcttcaaatataatctatttgttagggattttgacatataaagcttttctaactttttccataactcagacggacatgtttcattcaatacactatactttaattcaagggccaaacttaaacgaatagtgcttactgctttagcttgcaactcctcccaatcttcatcattcacaccttcaggcttctttccatgcagtacttttagaagcccttgttgtaccaacacatctttcaccgtgctctgccataaactgaaattattcttcccatcaaaatgctcgatctcatactttgtggaagacaccatctttgaaattttctgtgttgatctgaaccttgtctcttataccacttgttggaaaaaatgataaacttcaagtgcagcgaaataataaagaaacgaagcaaagaaatttattcaatttggtaaaactaccaaacccacaaagagagatatatttcacttatcacttcaaaattacatatactctctattt

SEQ ID NO: 271036 - DNA, 541 bp, Cannabis indica
atttctatattatgacttcaaattatttttatactatcttacttatattccaatataattttctagtgcgcattggacgctagtggtggttatgccaaagaaaattatccatttagaccctgtacgtggccgcccaattcccgaagaaattactcaaatgatcggaaggtaataatttaatgacttcttatgtaacaaatttaaattaactaatgaattgaaatgctaatataatttttcaaaacagtgcattcagatatataggggacgcacatgagtatcttggcccgtggcaaggaatttcacaagcaaattgtccaagacaacctaaaagccaagaatgtggtttttatgtcttgaaatatatcactgacatcgtcgcacgtgcaaaccccaaccgttacatacaagatcaaaaagctgtaagttttaattattgattatagtatttattataataacaaatatataatatacatatatataaactaattaatataaattttaatttttttaacagttttggggtaagaagcaatac

SEQ ID NO: 271037 - DNA, 746 bp, Cannabis indica
catatactttttttttttttaaatttacggtttaggtttccaaagaaagaactaacatacttaaaaaatattacttaaaaattaggagaattaccccatattacttttttaaatttttttttttaaatttacggtttagaattctaaagtgcttgcagcgctagttgtaataggggtttctatatgatttttcgttacaatttaagttgcaacactagttgcaataggagtatctatgtagaattttcgtaaaaaaaaataaattattttaccttttgtaaaaatgaaaaagcctgtaaatattattaggtcaaaccaaactttttaaaaaaatttacggcaactttccatcattaaccaaattacttttattttttgagagaatgaaccaaattacttcgtatcatatttattatttggaaggactataataggtgtcaatattcaaccaatcacaaatgatggcttgggagtcacgatcaaaaaggcttatactcgattttattttagtgtttctcataattcaatctttctttcttcctcttattattacagaaagagtgagttggcaaaatagcctttgtgaaaacttttattagaaaaatggtttttcaaatattttaattagcaaaatagtctttttttttaattgatataataattgatataataaatacaattaatattaatttttctttataattaaaaaaaatagatttggttggactcccatcacctcttttcat

SEQ ID NO: 271038 - DNA, 583 bp, Cannabis indica
tctatattgtaaattattccgaaattctcaaaattttgtaggatatcttaaatagttataacgtacatgaatatgaaaaaaaatatactaaatttttctgaatgccaaaataagttaagggtgcatcaatacatcccttttaagggggtgcattgtaaaatcacccaatagttttaaccgtaatttatatttttataactttataggtacctgacatttaaatgttaagtcattgtacctacagaaatttcagaattataacttaggtgttattactgtcaaaaattaaacttaattatttatttgcaactaggagttaaacttacgtatttatgtcggaatttttttttaataataataataaataaaaatgagttttcaatgagttttcttttttaataatttgcgacataaatatttaagtttattttttagttataaataaatatttaaatttaattttttaccgtgattatacttaaagttatatttttagaactttagtaggtacgtgattggtccaaatcattaattttttatttttatttaaaagttaatatataagaaaatgacatgtggataa

SEQ ID NO: 271039 - DNA, 627 bp, Cannabis indica
caaaccctagaaccagagatccttctcaatcaaccagatcgatcttcccagaaaccttcccagaaaaccacaaacacaaacacacacatatcataaccaaaacagtaaagagagattaaaacaaacacaagagttatagaggttcgccctaaatcaggggtacgtcctctttcgagctcgccatgaagaacaatctcagatctgcattattgattttctctcgatttttctttttctgtgttttcttttgattctcactaactctctttctcttttctttgcatgtacacctggaacaacaactatgagagctcctctctcaaatctgggtcttcggctttctggtatctctcaacacgagagattggtaagtctcttccctccttttatagctcctgatttagttgtaaggtgtgtaaccgaatttctgtttaaattcagttacaccaagttgttaagtctttgtgtctggtgagtgggtaaagccacgagccaatttaattgtatttccttcttctggtaaaactgtaaacaagtggtccaggggagatctaatttaacagttcatttctatattatgactttaaattatttttatactatcttacttatattccaatataattt

SEQ ID NO: 271040 - DNA, 613 bp, Cannabis indica
gtgttcgggtcttgagtcctggtctgagtccaggtcttggtttgcgtttgggtcccactcccagtgtgggtctgagtttcagatccctggtccgagtctggttcttaggtcctgggtccagccccagtttttgggtctgggtctggctctgggtcccagtctgggtccaggtcgcggtctttatttaggtcccaagtaacatgtcccgatccgggtccaagtctcggtatgggttctagtctgagtttttgtttaggtttgggtcctgctacttcccaggtctgcgttctagtctttgacctggtccgattcctattctaattcagagatcgggtttggatcccggtctgggtctaggtccgggtctggatacggatccgggtctggatcttggattcaaacacttactacgggttaggtcgaagcctaaagtccagattcggatctcgatcttattccattttatgtccgaggtcttgggctgcgtcctatcaatgtgtttgtgtccaggttcggggttgtgtccctgtagtcaggtcttcggcttcgggtacaaggttgtgtcccgtgtctcaagtatggggtcgagttttgggtctcggtcccagttctg

SEQ ID NO: 271041 - DNA, 542 bp, Cannabis indica
ttccattgttgatactgagggttggagacaccattaacaagatgctgaggaggaggaactcctgtaaacagagtatcatcaaggtcatgcccaatgaccgtaggaacaacctgagatttccaagcaagaaaattggtacgatctaatttgacagtaagagaggcagaaagagaattggagaaaggactccatgtagacgaagagatttgttgagtagtagcagcggtagcagtagagtttgaaggatcggtgttggttccagtggaagccattaatgacagaggtcaatggctctgataccatgtagaagcttattaatggcagaaaacaaaaacaaagaagagaagacaaagcagagcataaaggcagagccaaagaatgaaaatgccaaaaaaagcttaaccaactggttagctttgagacctctttattatatataaagatgatacaaagtacacgtgctgaataggaaaataacaaccaaaactgaacttaactaatattaactaactaacagaaagtaacagaatgcttagctaaca

SEQ ID NO: 271042 - DNA, 783 bp, Cannabis indica
atttattattacaatagtttaatttattttaaaaagataatacttaaggtctagtcgtattgagtccttttaataaatgaaaaataattacacaaagaggaaattacacttagtatgagattttaaaagttcttatgataaatatagcacatttaagtttggcaaatttatatggtatttttttgcttttaggtttttttaagtatttgatataccatatatatgtaattaggtttctaaatcccatatttaatatttttatttgtttaggaagttttatttgtcattaatgccgaaaaagtcgctggagtttgctgctggtgccggaaaagtcgctggagtagcagtcggtgccggaatagtcgccggagcagcggtcggtgccggaaaagtcgtcggagttgctgccggtgccggaaaattcgtcgaaattggcattgtcgccggaaaaatcactgaaaaatcaccaagaaaccggtttcttgaagtctaagaaactggtttcttggtgatttttccattaacaatgccgattctgacgcaagcagttactacgacgactttttcggcaccgacagtaaacttcagaaaattcatcagaattggcatagtcgctggaaaaattaccaagaaactggtttctgattccttgatgagaaactagttttttggtaatttttccggtaattttctctacgacaatggcaattctgacgattttctagcgttggtgcaactctgacggctagtcaccggcagctactccggtgactttttctagtc

SEQ ID NO: 271043 - DNA, 766 bp, Cannabis indica
ggtttcctaagcatttttctacaacacagtgaaagttgcattcgaaatgtaaacatgcaaagataagcataaaggaaatgagaaacttactcaagattcgagtgtctgggttcgagcaacgtctatccaaccagcagttgtatgaaggcacttcggcgactttgaagccaagaaatttttcttttcgctctggagcttacttagcaaagaagggtgataaaatgagtttatgtgccaatgctgtggatatttataggcgagtaacaaaaagaggaaattgtctcaaagaaacctcagacgcctcagcttcctgccttaaaaatgaatatgggaaatcaaaagtaatcgagtacaaccgtcagccgtgaagagagaaaattggatttcgaaatattaattgtcaaagcatttattagccgaaaactaaagggacacccagttagcttcacatcgagtctcgaacagtcacgctcgccacgtgtccccatccaaaggcagaaccagctcggatgaagtctacacgcaacctcagaggtcccgtacagacttggggggaaaatgttatcccaaattttgcactctgatgtggcgtgacgggaatggtgacacgtggcctccacttggaacatgtgctcgggaagataggccaagcaagatgcctcgttggcatgtccagattaagatatttagcgatccgtgcagagcaatcaacacttagcgaattcagcttttgcatcatgagtcatcagctcaatccctataactc

SEQ ID NO: 271044 - DNA, 1249 bp, Cannabis indica
ggtccccaagtcgaggatccacatcttcatcctcgccttgggaagtttcctacttgggaatgttttttcccttgtctgggctctggctggaggatatttccttcttagccttggccactacaaggttgtaacattcccgagcagattgctgattccctctaagacaccctaccccatttttggttgggaacttcaggcacgagtgaaatattgatgtgacagcttttaagtcatacaaggctggtcggccaagcattacgttaaaggctgaaggaacatccaatattaggaactgtgccatgatagttatgctcgtcggagcttgtccaactgtgaggggtagccggatttgtcctagaggtgcaactccttgaccggagaaaccatagacaggctggaggcatggagttagatccttgagctggagccccatcttctcgtaagcagtcttgaacaaaatgtttgaagaagctccattatcgatcatggttctagccacattttgtttgctatctggacttccacgaccagcgggtcgttgtgcgggaatctgatctggacagcatcttcatcgttgaaagttatggttggctctcctgctcgtggaactttgggcttcctctcttccacggccaggatgacttcttcttgctcgtactgagctgttcgggcatatctctctcgagctttgcccgtatctccagcgatgtgtgggcctccaataatgacttgcaagtgtccatctatcggtggaggtaacagatcctggttgttttgaccttggttggccttgacatacttctgtaagtgcgggttgtttttcttgatcagatattctatttcccgcttcaggttgtaacattcattggtgtcgtggtcgtagtctccgtggaaccgacaaaattttgtcatgtcccttttgttggtatctttcttcatgggcccgggcttcttgtacggaattaacgactgagttgccatatacacactctctatatcttcagttagaatagtgaatgcagtgtgtttggcatgatcacggggagtctgtccggatttctcggtgaactttcctttcttcccgtttccttgcttgtggttattgcttgaacgcttgccacttgaattgctggaataattgggaaattgggcagatgttccagtggaaggagccttctttttgcctggcttttgctcaccttctgctcgttgatggcttcttcgagcttgatgaagccttcggctcagt

SEQ ID NO: 271045 - DNA, 1273 bp, Cannabis indica
tttctaatatatagttttattatataagaaagggactagctagctagttggacttttttatttttcgaattaagttttgggtttggtgtggagggttgtgatgaggagtgacgggatttaatatgaatttaaatccattgtttgacatcttcatggtattgttttgtccccctaagttgaggtttcttgtatatatggtacttaatttggtttgtcgattccctgcatatgccaatattattctaagtgcttacttgtacggatattattgccgtttcctttctttgctttaggttttggttggaataataatatgggttaatattatgttggactatgtaatttataaaaattatagattcgaccttttattttattaaatgataaaaataattttgtatattctaaaatagtacaaagaggatcctgaacttaattttttgataattttttttaatataactaacttcaatataatttttaacacaaacagatatagaatatgtaaccaattttgtcataacacctctatattgagttattattaagttttattttgacaaaaaatcgattcaaggtactctttcagaaagggattattacataaaaatataaattgacattttatttacaaaaatacctcaataaggtaaagacaacatttatactttttatgtgattttaattaccaaaatactacttacactatcatcacttacaaaattagacgattgttgcagggtggttgctgcatggttgcgcggtggttgcatcagacgaatgtttcaatcagacgaaagtttctgggtggttgctgggtggttggctgaaggctacatcagatgaaggtttcaatcagacgaaataactattagcaaaatgtttaggcaactgtaatgcaactgttgtgaaacattaaaaatcagaacaatgtttccatgtttaactacatgtcttttaataatttaatatgaataaattcactattagaaatttggaaaacaacaaaaacacaccaggataaatattttactatagtattgatgtaattttttttagattatacttgagttggattgtttgggaactccaattcaactttttgagatctgtctttcatggatctaaaaattgaagtcaagacattagttttatgtaaattaaactggatttccagttaaattttagtttcgtagtagtttttctacactttttttatgaattcgaagcaacccctgttttgattgattctagtcgtcttctcaggtgaagt

SEQ ID NO: 271046 - DNA, 553 bp, Cannabis indica
aaatcaatacatacccatttctttttcggcttgggtaccaatatgggattagcaacccaagccgggtagaaagcttcaattatgaaattattgttgcccagcttttctaccttttcttttagcgttagggctcgctctttatccaacaatcttcttttttgttgaacaggccagaaaataggatcaatatttaagacgtgtaaaattatagaaggatcgattctgaccatatcctcatgcgaccatgcaaaaatgtctaggtttgctcttagaacttttgtcaatgttgattttacttcgagcaacaaaccttttccaattttgagtttcctggtcgaaacatttcggttgattccgatctcttctaattcttccactagaccaacattggtatttggttccccaagtcaggatccacatcttcatccctgccttgggtggttccgtaaacttaaggcatgaatgaaatatcgacgtgacaacctttaggtcatataaggctagtcggcccaacatgacattaaaggctgatggcacgtccaatatcaaaaat

SEQ ID NO: 271047 - DNA, 677 bp, Cannabis indica
aaaatatcagcagcatatttttcctcccattttggctttctacttccatctcaaaacactcaaatgggaaaaataatgtacagaattttcacctcaaaaactgttaaaaatagcatttaagtcacatgtttctaatgctcaattgggttagtagcatagcattctttttacctacttttagttgaatcctttatttctgccaataaaagtaattggcacatgtgaatatttgttagataatagttctcttcgagacaagacaaatctccgaaattgcactcttcgagtcagtgccaaactccacttgaaccaaagttctatttactcattccatatctcataatagctacacaattacatatttatagtgattcacactaataagcccctacactatttcatagtgtaacactttcccacccttcaaaatcaccttgtcctcaaggtggtaaaaatgaaaaaataaactaaaaacaagtacaaatataagaaactaaaaaaactaattgcagcccaatcattattatcttggtgtagtagacttttcaacaaagcccaagcccaaaatacctagggcaatcaacgttcttcctcttctcgatccaagctgccagcttcttcaattaattttttttttttagtcaattacccaaccatcgtgatctctctcatccttt

SEQ ID NO: 271048 - DNA, 850 bp, Cannabis indica
ccgagccctaggctatgagatatgtaatatccataacttttggaggtcaaaggtcaccctttgacccttgtagaaagataattcttattaatgatcctttaattcatatcacaaaatactaacttaaaagtaatggatgaactcctatattaataagaaaataatagtaacaaaatcaggaccactcttcaatataaaagaaaaataatatccccacagttatgtaatcaccaaatagatagatttaataagtcagtaaaataccaaaataatacctagcatccatcattcctcatttctaactagtacatagctaatttaagtcatccagaccatccattttagcttaattacaaaatcagtttcattaaaagatttaagagtagaataagactaaacaaatgacgacttcctttcccaacggtaccatcctcatccactagcatcaaactgagttcctagaatggggcgtgagcttataaagcccagtaggaaaacactaatatcaaaggagccttggtttaataaaattcctgcatggttggctttacaaaattaaagtatctcatcaccagtatcaaaatgtataaagaaagtagagagaccacaaagaatcacaaaatcaagcatcaaatgcatatcttaccgtccactagacccctagctctcaataccaatcatagaaaacgacatccaaaactgggtagtcgcatctgatatccaccataaataccggggctcaaatttaactcactccctgtacaaattttaggtctttcacctacagatgagtgcacaccttatctacctatgatgacacagagactaggtcgtgaaacaacaatatgca

SEQ ID NO: 271049 - DNA, 603 bp, Cannabis indica
agtgtttccctcgtcctaatggtggagatggtgtgtagtagtatttttggaagaaggaaagtgggttttttgtataaatatggccttctgaaaatgaatttaagggggaaaccaaatttttttgaatttaaacttggggagcatatttgttgctgcctttaaatactttctttcaaagtctttggtgcactatacttatatacaacaagtattgtcaatcacaaccagtccaatcaacttaaaataatattttattttacaatctatgaaaagttaaaagtacaacaagtaaacatgtgtccccaaatgaataaccacacataccgccggtttggtttcatgtaattatagttagaatggagtgaactttatttttttttattttatctccaaataaacatgtgggccgaaattaataaacacactatacattagtttttctctcttcattgatttcttaatttgtatgtttatttcttttaatcatatgacaacagttattattaaaataattattattcatattaataattacatgtcattatttttatgtattttagttaattattaatttagttaagtaattatgtgttttaataatga

SEQ ID NO: 271050 - DNA, 739 bp, Cannabis indica
ttaacttcaagtgaattgttgagtttgtgagtgaattgcttggctttggagctttgaattggaagaattttaggcttcgaatagaggtattctctagctgaagtgatttagaaattgttgttgtaattcttgttggttttaattgttgaaaagcatgtttggaatttagagttgcatgttcttgatgtgggttgaattttggtgattcttggtgtagaatggcatgattttagttgttaagcatggattttaattataggttattttcttctgctgaagcatgtgtttatgagttgttttcttggctggaagttatttaaattgtaggagattgaagctcttattcaagagctttatgttgccatgaacatgtttgaattctatgattttttatgcaatctaaattgagggtttaattgctggattttaatacttgataaggtgttttaaatccttagctagcaactctggtttatgatttgggagttttaattatgaattcgtatgagtttggttgagctttgggctgaaaattcgagttgagcttgctggttttttgggttctgcacccagatgccgcggcatgctctggagcatgcctcggcccgctgctcagagtggacctgggaattggtcccaggtgccgcggcatggtctgggcatgccgcggcctgccctcgtgtttttgggcagttttgagttgattttcgaaagttcgtaacttttaattccgaactcc

SEQ ID NO: 271051 - DNA, 1023 bp, Cannabis indica
tggctctttctgcatctatttttggtgactgagatgcagacaacttgaagtattgagcaagtggtgttgcaactggtttgcacttgaccatgccaaacttattcaatactttctgtaggtaggaagcttgagaaagtattaccaagccaggctttggtctttttatgtctatcttaagaattctctttgctttgctcagatctttcatctcaaactcatcactgcatttccttttcagcttgtcaatatctaactttgctttgctaaagatcagcatatcatcaacatagagtagcaaaaaggtttgattattgaaatacacacacgagtcatacttgcttttagtgtatccaatattctgcatataagtgtcaacctcaagttccattgcctaggtgcctgcttgaggccataaagagactttttgagtaagcatacctcatctggattcccattgtcaaagccctcaggatgttgcatatagatttcctcttctaattcaccatgcaagaaagtttttcttacatctatctgttcaatttctaggttcatgcttgctgcctttgccatcatggctctgattgaagcttgcttaaccattggagagaaaatctcattataatcgatgccttctttctaagtgaaccccttgtaggacattgtttggagcttagcttgaaatggcctacaagtgaagaactaactgctttagctttgctcatgttaaatctttcaagaactttttcaacataagcttcttgagataaccaaagtttcccattcttcctgtcacgggaaatccacattccaagtatctgtttcgccgatcctaagtctttcatagcaaaagactttctcaactctcctttagctttcaatcttctaacatcatggccaataattaacatatcatcaacatacagtaaaagaataataaaatcatcaattgaaaaacttccttgtaaacacgcaatgatcagaagtagttctggtatatccatggctcgacatgaaggaatcaaa

SEQ ID NO: 271052 - DNA, 757 bp, Cannabis indica
aacgacacataattcaaacttaagagtcacaacgccaaattgtacttgttaatcgccgataatagaaaaaaaaacaaccgttaaaatgtttagtcataattacaaaattgcacatgagttcgttcaaaggatttattaattatcatgtcaaatttaataaatcacaaaactctattataagtcgtttttttttctaaaaaaagcacaataatttttaagaaaaaaaaaacgcaaattatttaaggtcataagaatgaccatcttaccttttctaattttctttttccaacttttcaaggttttttttttttttttagataaatccaactttcaaggttgttatatgagtattattgtttatttatttgtttaatcgggctaagatagactaggcctgcgctcagaacttatctagtccaaagcccataaaagaagtttttgttatcaaaatacacatattatttaactgatttttaaaaataccatctaaatttaaataagagcccaataaagaaatcctagtccaatatattttagtgattttttaaaaaaataatataattattggagttttttttcttattttttcccttaatttcatactcattcttgaaagaaaaaactatttttaaaaattttgaaattacaaaaatattaacatattgttggagaattggttacaaaagctatcctggaagtgcttaacgaaggtggggatccttcttgtttcaataacaccttaataactttgattcct

SEQ ID NO: 271053 - DNA, 719 bp, Cannabis indica
ggcataaaacccaacagagttaccctactcacgatctagaactcgcagtagtggtatttgcgctaaagatttggtggcattacctatatggcgagaaatgtgagatatacactgatcacaagagtctaaaatacttctttacccagagagatttgaatatgagacagagacgctagctggagttggtgaaggattatgactgtgagatcctttatcaccctggtaaatccaacgtgtttgctaatgcgttgagtagaaaagggtcagagttagttgaacattgtgaaacgaatctcccagcagctagcaaatgagattacccgagctaagattgagttagttgtggggcaattggctaatattaccctgcaatccactcttttagagcgaatgaaagaagtacaaatgcaagatctagagttggtaaaaacccgagatagggtttcggctgggaaggctagtgatttctcagtggatgtaacgagaatgttacgatttgaagatcgtgtttctgtgcctatggatgatggtattaaaagggagatcatggatgagtctcatacgactccttattcggttcatccagggtcaacgaagatgtaccaagacccggaagccatgttctggtggttaggcatgaagaatgacattgttgagtatgttgctaagtgtcttacctgtcagcaagtaaaagctgagcatcagcgacctgcagggtt

SEQ ID NO: 271054 - DNA, 647 bp, Cannabis indica
atgaatttttagattttttaaataaaaaataaaaaagttaatgacatggaccaatgaatgagtgacacatgtacactaacctggcacataacggagaggtacctacggaagttccagaagtgtgacggaaggtatttttaccgccaaaaatacgacttgggtatttatctgctactcgggaaaaaacttaagtatttttgccgcaaattactctacctattaatattaaaagtcaactaacacaaacttcaatgtgtagtagtactattcatctaaaaccaaactttcttctttagttcattacaaaataaaaattaaggaagaaaaaaaaaagtcagaagtcatcatattgtaatcattaccatatcttctaaaacaaaaaggtttcttttaagctttaattacacgaaaaagaagaatattagtaagaagagaattctaaaaaaaatattattagtatttagtatttttttcggtattatattattattagtgtaattaaatatgtatttcatataatttaataaaataatttttagaaaatatggctaataaattatgagacatcacttataaaaagtgttgagaatcactgatacctaataacaatactcttgtaagaacattaattattaatttttaatttt

SEQ ID NO: 271055 - DNA, 1147 bp, Cannabis indica
gatatatgccaaatcgtatcctctgcacttttattcatgtctttgttagtaaaatttgatgaagattcttcaatttaacaatcttaatacgtttgaaaaaaaaaataattaacaacctcagaaaattcaaaaaatacaatttaatgtataaagtgtgggatgcaaaaatcctaattagttaataattaattatatattcaaagtaaataaaattatacactgattttacattgtttatatgtaaccaaagcatcctatataatagttattatacttatttctattcattggatcacaatttaattatgttagcttacttttttttgcttaattgttgccttacttatttaaactatatagggctcatttggtatgccgtataagggtggtattgtattaaataataaataacattatttttggattcaacaatgtattgtattaattattacgactaaattttttaatacaatgtatgttgtattatttaatacataataaatgatcagtattagcttgtattatgatatttacaaagaatatggggacaacaccaacctccgacccagacccgaacccctgacctggacccggacctaggaccccggcccggaccccggacctgggaccccggcccggaccccggacccagaccccgtaccccggacccagacctcagacccggacccggacctagaccccgaaggagatcaaggtacttcaggccaaggtggaaaaacttgatgaactccatcaaacggatatccagaatgcagtcagcatgtctgtggagctcaagcagctttgtgattttcaggagaagaccaaccaggaagccacaaagctactaagaaggctcttgcagccccagtcacttgtgactagtgtgtgaagcattttaagcatggtgtcttcatgtgctggaggtctaattaacaaatttgagactaaacttcatttcttacccaaacctgaagctgttctgacccgtttctgggagaaaaacaaaaaactggatgtcaatcttgttgagacttaggtcctcgccttcctcgaatagctgattgattttgttatttatctggaatttttttcaatgttttaatttttcttgtatgctacggagacttttttattagcctgttcg

SEQ ID NO: 271056 - DNA, 592 bp, Cannabis indica
gcaatacaagtgtcgaggacaactagacaatgtatagtgtggatattacttcatgaagattattaaaagcttaatgactcagcacaatcctgcaacttttttgaagaatgaggtaattaaacatatatgatgtttatttgataattagtttttatttcaaatacatttaatattatttatctctggttgtacagttcaaagatgacaagactgacggcaatcaggagataaacgaaatacgggatgaatgtggcagttttgtgaagtcttatatattgaaagaatgaatacaggatttttttacattttgttatgatacgtgtaggatataaaaattttagctatatgatcgtttcttttggtgatacttagttttattgatatagttcatattttatatcaattttttatggctaattaggaatttttccccctgaactttgacatgtaccaaatcatgccccctgaacttttttggtcgtcaaaaattccccctaaactattgatattgctagatttaaggacttttgtcaaagttcgagggaaaaaatttctaattagccattttttattatgacatgtaggatacaat

SEQ ID NO: 271057 - DNA, 550 bp, Cannabis indica
ataacatatgcatgatattatactaatcttaccttaattctgaattcaggtgtgccgatcaacctgagtggaacaactgctcagcgaattataagctcctaaatcacatcgattccaaaacaattaagtgatccgctaaatcacaaccgggacaaatgttttaaaactaaacttaacctactgcaacataatacaaaaatatcccaaactagcagggaataaactgcctgaaaacctgaaattaacacaaaacgaccagctgaaaaaactggtttccaccccctgctgcaaattccgggtaaccagttttacaagcagtgtaaaaccatttagccggttttacctagaaatccaacaaaaatcaaacccctaatcaaaacgtttccaaactcaaccaaactttccagacctgcatattataccccaataaatattttctaagcaacaaaataacattcaaagcttagaatcaaaattcaccattgatgagtcaagcttgagttcaaaaactcaaagcttgctcatctaattaactagctataaaaatctg

SEQ ID NO: 271058 - DNA, 1122 bp, Cannabis indica
aataaaatttatatattttgttgcacacacaattatatttcttatacgcgtggtaagtaactattcaaatatttttttcgtaactgtaaactattcagaattttctaaaaattcacaagtagtcttaaataactagaacgtatgcaatcatgcaaaaaaaactgaaaagttctcctcagtgtcaaaacagataagaagtctaccagaataaccctttaaagggatctactacaaaaatttcctacaatttatgtgcctggttttgtattctttcttaataaaatattcctccttttaaaaaaatcaatagaaagagaaaatgagaaaagtagctcaagcctcaagtatgggggccaatacatatttttatttttaattattttgtacatgtaatttaaaaatatttaaagaaaatagggggtcggtacatcattcttcaattcctcttagctccgtcattaaaagagaaggtcgatgttcaaattttatttagaaaatttttcaatatttgttttgttaggctaaatttaagttgttctaaataattatttagtagtaatttgtatgttatgtgaacttaacaaaaaaaaaatgttaaatgtaatttaattcttatttagttatgttttaaaagtctcacattagtaaacattgtgtttaggtattattatagtacttagtaccaccataagttgatgatatcctataaataattagcgaattattttgtaaatattattaaaataaaataagtaaaaatctgatcttaaattatactaacatttcaaactttgacatctctctaattagttattaattagtatcaattttgaacaaaatacttgtgtttgcaaaaaaaaaaaaaaaggacaaaatacttgcaaatcatcaaacaatcaaccatatatcaatctgtttacaaataattcttaaggttctaacaagcctcggaaataatcagtcaattaccaatttgataatttaattagccattgaaaaattccaacttattattatgaattgaaatagtgtaaattgataaataaataaataattaacaaaaaaatcattgccacctgccccttcattgttttaagggataatttcaaatatatatatata

SEQ ID NO: 271059 - DNA, 625 bp, Cannabis indica
ataatagtgatataaataaaaataaaaattactattatgcttagtaattaaaaaaaaaaattattgttcgttctaaatttatcttcggaattaatgaaaatgctcatttggttaaactatcaaaacattcaatttaatttaaaataatatttaaaatttaactaattctaaatatcaaaatttgaaaataatttttaataaaaaaataaacaatatgaacaaatttattattaattgcaacactggtggattaattatttgttattttttttattttaaaaaaaaaatacaccaaataatttttcatgaccaaaaattctactatataaccacatttttatatacaatagatataatataattgcagtatatatgtatatttattaaaattaaattaggtgaaaccaagtataataacgttaaatgtacaaatagtaactttttaaaaaaataacaaatataaagtctcataatttatcattagctcactatctatacatacatttttctacctaataagtttttaactatttacactacatattaacctaaaatccgtgctttaaaaaacaaaacaaaatataaaaagagtacatttgtaattatttttataattagaagattt

SEQ ID NO: 271060 - DNA, 515 bp, Cannabis indica
ttttttttcactttcacttataccatcaccaccaccaccctccacaacccaccatcacccatcacccaccataagcgcaacaacggacccacgaacccgtccatccccatcatcaaacaacacacccacgaacccataccatccccgtcgaaccacaaacccacaaacctatccccatccctttcgagccacaaaccccatcgtcctcctcgtccaacctgcataagaaaatacatagagaaagagagagggaaaataaaagggatgatttttgggaggacctgatttttgggggcgtagatctcgatttcatggtccaaacgcattgtcgtagtgcatctccaccaccaccgataacttttttgtgagtgcatctccaccagaaaatgagagagaggggcgaatatagagtttttgggggacaaaaatttttattttgttgtttatttcgacaattggtcgtcggagtttggggtttactccaggttgatcccatcgagagagagagagagaga

SEQ ID NO: 271061 - DNA, 561 bp, Cannabis indica
tatgcttttctttctgagtctgttgactcacagttttgctaccatgtgtaggtaaaggaaaggcgaaagctggacaggagtgaacctgagctaggatgaggttgtacatgtcgaggtagcgcgacctgaagtgttcggtctcaggacatctggggttttattttgtagtcgctgtgcgacctgaataatatgtattttggaaaattatgttttaaaagtttgtaaacgggatcccggtacttgtaaataatttcataaattataaattttaataatcaatatgaaaattttaatttgacacgtttttcaagaaaattctttgattagcaaagactgcactgtaattggaaaaagcactgtagcgtgccttagcattagggcgttacagtaatccttggagttcttcaaatgtgagttttatttgatccatatggaagcgctgaggcagttgagtggaatgtgttggcttgtaaaagtgccagagggcgtaagtcacacaaaggcctcgatagagatgcgaagttatggaatgaatgcatcaaagaagatagtgttgggttt

SEQ ID NO: 271062 - DNA, 861 bp, Cannabis indica
tcacgttaaacatatttttgttggattatataggattgaatatatataactgttactggtttactttgttattgttttattattattttactgttgttttatttcatttatttatcatatttttcaaatattattgtactactctatttttaatagtaataaaaaaataatgaaatttgtatgtaagttattttctttagtatcatatgctctaatatatgtttagttttcctccgttgttccactgttattttttagttgttctacttcttttcatttttgatgccttctcctgcatgttctcttgttgtgtcccagctcctcacatttgttgcatttgttatgttgtttcttttcccacccagcttctatcctctttcttttggtcttccagatttcacccttttaatggaaggtaagattattacatctttcacattttgtactacatcccactcactttggtgtcctattgggtacaccgtttcttcataagttgctagccaatttttcttggtgtagtaatttgaacagagcttgtgtagtaacctatagcacgtgcatgttctctctttgaggtctactgtccatgattctctcattctggttacctcaaataaatatccagtagttggtttaacctgtgcaatttgaaaccaacatttgttaaacatacgaaacaatagtggaacaaaccaaaaacaacattagaaaaattatgacagcctcaatattaatgattttaatatttctgcttcatcatgtcagaaataatggttattttccaagtgttctggtgttgctgtggtggttctgtccatgggtgtggaggacagaggccttgctttttatttatatttt

SEQ ID NO: 271063 - DNA, 909 bp, Cannabis indica
accctgccaaaaccgactagccagtttttcatgtacgtgtaataccggttacccggtttgcaccagttcacccaagaaatttcatttcttgctcaatcctccaccaaatgcaaccaaactttccagagtacctaattagggtatacacaacatattccagccaatataccatagaaaaactcacagaataaaaacatgccattagagatcaaagttaaggtttctatgctcaaacttgcacaaaacctaaatcaaccaaccaaaccagctgctcgcactcttaatcaactcaaattaagcttagaattcaaaccctaagcatacctaaacctaacagtcactaattctcaaaatcactatataaaactaactcaaaacttgaaaatacacaaactgaagggttctagggtttaccttagcttgattttccttgaaatcttggtagaaatcacaaacttcagtaagaaatcccctggttcttagctggttcgaagagagagaggtgaaggaaagagtgttcttcaatctttttaattttcctttgagttttcctattttcttcaaatgtgagaaatgcatttcctatgcattgattcaaccaacaaagagggcagctgtcacaccctcacacagccacacaatcctcaaaaaggaaaagactaaaatgcccctaatgtaaaattctaggttattttcaacttaggggtaaaatggtcaaattccataaccccgctaatctcggtattttattttctctcaaatatttcccactcagaaataaggttctaaacttacccatgtgatcaaactagccatccattgcatttttccgttgtggccgagtaaaaattacaaaaataacatattttacatataagtcaaattatacccctagagtttaataaaatc

SEQ ID NO: 271064 - DNA, 983 bp, Cannabis indica
tggtaccttttagcaatgctctttgtaaaaacaaggaaacttcatagatataacgttcaaattaatttccagaaacaaaatgactgcctatatatatgaacatctttgaaatgtacagaaaaacctgttaggtcatacacgtagtactaattttgattttgttaatagaacaaacctcacaaatgtttcaccaaaatatagtgtatacaacacacatttacataatgttgatattttttagatttcatattattatgaccgatttacatttattattaaaaagtcttgaataaaaaatacaaaattgtagtataataccgaccaaatcccaccaccatgtgaatcaagacaataaacaagaaagtagaaaatcaaatgccaaacatatttaataatcctttattcccgagattctaagtgaatattcaccatagtaatgtctttttttattattttttgagaattgttaattggattgtcaaaatttattattttcaaagcctaagtagaaaaattcaaaattaaaaaagttaatgaaaatcatagaccataataaataacgtagtttacttttattattattaaacttcggggcattaggctacacaacatggaagtagcccattttcctttttctcataaacaaacataattaaagaactactaattagcacaccaccaacacaaattatcctatatttacacacattggtagtgcgtgtgtgtacgattcaaatgtgctccgttgagataatgtgtctaggctcccacaatggccgctttgagtctcctcttcaattcagtcctattaaaaaagaaaaaagaaaaaaacaagtagttaagattatatttaatactaaccaagtaggctagaagggttaaaggattttcgcaccaccaaatgacctagctaggtgggtcactctctcagattcttcgccaataagcctcaaagaagacttgattgagtgaagtgaatggtc

SEQ ID NO: 271065 - DNA, 532 bp, Cannabis indica
caatctaattacaatcgatcgattcaattataattgaccgtcaaatattgaatatccaattgtgatcgaatcgaattagatgttatttttaaatatccaattagaccgaatcggatgttggatagggtgttaaaaaatattatacatctaacataaaataaaactaattagtatttttatttagtttaaatgagtagctagatttttattagtatacagatatatctattctatataaagtgtgtctatataactaaattcttggtttatgagaaatttcatgagtgactttttatttatatttaataaaataataaaatattatttatatataataaaataaaaaataaaacaaatctcattaatatttgaactgatatttgatgatatttgaactgatatcagatatttatatatctatatacatgacgtggcactctcaaatcactctaaaattatttttctctactctttaattctctcatttttaatattttattatatcataaatctataaattatattttactat

SEQ ID NO: 271066 - DNA, 834 bp, Cannabis indica
tgttgttgttcgagtgctacttcatctaccggtgctaccgatgctccttgtctacctcccataccgctttggcctccacatcggcctccgcgtctaccatcacctcggcctccgccccttgcgggtgctggagctacatccacgtggatgtttctattgccgttgattcgaactgatcttcttggagacattatttcctaatgttccttgtttgtttctaagaatctctaaaagaagataaacttaaataagatactattttcaaaaaaaaaaaaatgcccatacttatataactagttcacaaataatttctatttattcaaagataaaataaataatcacataataaaatacacattttttttattacttaaagaaaatttctatgattttctttttttttttcttttttttttttcaagaggcatatggtgctaactaaaatcaagttctaaaattttacccaaaaattttattttaaactaacttgaaatatatttaaacgtatatattagaagaaaaaaattatttcatatgggcagtacctaaacttggatattggtactaaggtttttttttttttgaagtaaaatgcaaatttagaaattacacaaatacacataaaatgcaagcatatataatgagacttacttggtggcaagcggaaactttttggctgatgtgtgtaactcgtgagaacgttcgggaccgatataactgtggctctgataccaaactgtaacgcccgtacttttataaaaatattaattttatttacaagcgttaaacgcgaaaaaccataatgtcgcatttttatttaatacttgaaaatat

SEQ ID NO: 271067 - DNA, 558 bp, Cannabis indica
aaccatttaatagtaatccaatggcttaaaaaaatgtaaccatgatggttacaataaaaatgtaaccattgaaacctcttccttatactaaattagtaataaaaaaaaaaaagtgcaacagccagcagcagccttcaatttttcttttagttgagaaattagccttcatctatttaagccacgataatttaacaagagcttagatgtaaaattgtcttaaatttaaaaatgaagttagtaaatatcttatttttaaaaaaattaaaaaactagccaaatataataaattagctaataaaaattataaaaatacatttattatatattattttttaaaaatataaaataatattaaattgagttatataatttttttaatattgcacatattattatattataacaaaaataaataaatattaaattattaaatatatacggtaatatttgatctatcgtatcactgaaaagtaatatatcgtaataataaattatatgacagactatgatagggactttttttaaactcttgattttagatcatgcagttattatgat

SEQ ID NO: 271068 - DNA, 803 bp, Cannabis indica
tgccctagatttataggacctttcgagatctcgaaaaggttggacaagtggcatatcggttagctttgcctccagctctttcagcagttcacaacgtattccatgtctctatgctgagaagatacgtttcagaccctgctcatgtacttagctatgaaaatcttgagctgtagccagacatgtcatatgaagaacaactggtatagatccttgacaaaaaggataaagtcctccgaaataagaccatagctttggtcaaggtaatctggaggaatagcaaggtggaggaagccacgtgggagctagaatcaaacatgagagctcaatatccaaagttgttcaggttagatttcgaggacgaaatccttttaagggagggataattgtgaagaccgcttagctataatgtgcaaattagcagataattagggtttaattatgaaaattatttattaattctaaattattaatttatagtgatttatttgaattcataatgaattttatatgtcatatatagaaattttataattttgcatgttcagtgcccgacaacattggaacgcggtgtttggctattagaatcacatcctagtattttaagtataggggggcagtttaattagacattgggaatgtcgagaatagtcggaaatttagaatttcccaaataccctttagtgtctttaaaccctttctgtgtgggaggggcgaaatggtcattttgccccatatgcttttgtccttagtcggccactagaacccaaggtgaaaagctggtttctttctcttctagtagatca

SEQ ID NO: 271069 - DNA, 743 bp, Cannabis indica
agagcccatttgagagaaaaaaattcagacaccatagatttcttgttgctcttccttcgccgttgccagttcaccctatatcgtccaccgacgccgacccccagctctcaactttcatgtaagttctctggacactccatgctttttatcgtctgtttgcatgttagggtagaacttcttggttgtgttttggttttctgggaaataactttgactgagtctgttgtgtaatgtgtagaatcttctttatttgtgtttttgttattttcctccatttttctttagaattgacccttctgttcgaaacactgtttagggcatggggcaatttttgctcccacattctgcgtttttcatttttcgtccactttcgttccttttgggatttttgtactcgatgtttgctaaggaaagccctttgggtttctatttttggcaaacatccgaagggggtcctctttccagcggtttagggggatccccactcccttttttaatattagggtttggtttggggtctaactgctggattctttctttttcagaaccaaaatgtctacccctgcgtccagaactaagtcttccaagaaggggcgtcgctctggccaccctagaggaggttatgaagggcccggtggcccaagagaactacacatgccgttctaacggctgggaagcagatgaactacactccatcctgatttgtgctcatcaattggagaagatcgtgacggtggctggga

SEQ ID NO: 271070 - DNA, 505 bp, Cannabis indica
aaaagtaatctaatatcgatatagattttggcaaatatttcctgaagtaaatgttttatatttataaaaaaaatattgtatttatgtgaacacaactaaagaatcattaaaataattattattgatgcaattttatattgggttttgaatacccaaaaagaatgttaagaacattgtattgaaacatcaaagtataataagaataacaatgaacatggctaatgttatttaaatacacaagatatgtatttattgtttatcatttcctgcagagaatgataagaattgaattcaattaattttaaagagtgtttgtattctatatattagtcatgttactatacattgttattacttgcaatgttatattagaaattattgcatgtgacatatattaaagatcaaattttgcatacatcttggagattatgcaaaaattgtattcatatattctttgaaatattgttaaagaaattgttgagtaatttctttttatatatgaaca

SEQ ID NO: 271071 - DNA, 480 bp, Cannabis indica
ctatctttagccgccacttccctcttcttttcttcttcaaaatttcgaaattcttagtgtgagtagtgcccacacacatggtaaaataatttcctacactaccatgttcccgaaatgtgcatatcacctacaccaaaaagtaggcttaactaacaaactgaagaacatgaataatactcttgagatcgaacctaaccttgtcaggattaagattatatacttaatcacataatcttaatgtgataagggtttggattaatttataaatcaaataaacatgtaaatgataacatgaaccaaatgacacattaaataagtgatgaaaatacttctgtctctttattgatatttaaatgatagagattacattaaaatagagttttatttagggcataaagcccaacatatccataatcacagggttcatttaccattgacaaatgttgtgcgctgccaaattcatacaataaatgttggagg

SEQ ID NO: 271072 - DNA, 612 bp, Cannabis indica
ttttaaaaaaaaaaaattaaagacgtagttgacgtggctaacacatagcaatgaataatgatttacacaatttataatatagaaatatatatataaaaatataaatataaaaagggaaattttatttacaccttaaaaatttttaaagacaccttattttaacaatttttattttatataaaatttataggggttttcttatttttaaacttcaaaatagatattttttttttttttttttgtcattttaacggaattctacatagaaacccctattgcaactagcgctgcaacttaaattgcaacaaaaaatcgtatagaaacccttattacaactagcgttgcaaccactttagaaacccaaactgtaaatttgaaagaaaaaaaaaaaggttaaaaaaacagtatatgaggtagttcctcaaatttatatctttaatcatactaaattttttaacttttttcttccaatttatattcttaaaaaatataactatcaaataaacataaattatattttaaatattatgacaaaaaattaaaataaaaaattatatgaattttttaaaatacatatatatacatgagttagaaagaattataaaaataaaa

SEQ ID NO: 271073 - DNA, 556 bp, Cannabis indica
aaaagagtaacatttattgtaggttaaatttaatacaatactgtatcttgtgtcaaatttgatccaacatttagtatgtgctaaatagtggcggaacacagaacaaagagaggccaaataaaatatattttcactttatttttttttttttttagaaatgtagtattttataaattaatataaaaagataattaagtttatacaatgtatattagataaaaaaaaaaatgctaagaagcaccttatagtgccaagtactattggtgtaaaataatattcaatcccaaatattttaatttaataaataataaatgaaactactaactacttgtaagacgtcatatcaatatggtattggacatcataaaaacacatatataaagacacaaagaaatatatatcacacaaacatactctttagaaataaattatattataattttttttgtcattttttaccaaaaatagataataatttaaatgggctattgggtttgagttttctttgtcaattttaactttacaatttattattaggcttactaataagaaaatt

SEQ ID NO: 271074 - DNA, 821 bp, Cannabis indica
cagtcccaacacgtttcctcccatgctgcattaaatgcgacatgactgctcaggggaagcctgacacctcgcggagatgctttaatgttacttaggcatccgggtgcatagggggctcctctgggaggcacgtcccggatgctgccttctttcataaagacttagcgaataattcaagtgttaagatgttttgatccacgtgtccctgtccggttggtccacgtaaattgggcaaaattaggggcaacatttaccccctaagccttgcttatttgaaaaataaaacaaggcttgtttaagtgcttcaggttgactcctcagtttcctggcacgtgctttgggcgcgtgaaggtgcatttaatgatcaccattaatgtagtgattcactttttacagacgtcgattcgtttcatgcccattgatcgatacagcgcattaatggtgtcagacgaatactcaaacgtttccaccaccttaattacgaaccaatccaaccgttgatttttgggaattcgaatcatgcgccttcccagccgttcgattggtaggtgatagcgcctgttcctcatgcagtttggcctataaaagccaccacctttccttcatttggttactttcctttttttttcgccaactttcttcgagttttccagagagaaagaattcctcaaacctaaacaccttcaaacactttacacatttctttgctaaccttcgctcattactgtcagtctacatttctttgtttgatcaacagcaaactcccagttctaacacttcattgtaagtttctcgcatccctcactttactgtttgtgttt

SEQ ID NO: 271075 - DNA, 629 bp, Cannabis indica
aaaaatcatattaacttcaaaaaactatttcaacaacataaaaaaaataaaataatggaacaaaaaataacttaaaaaacggtgccaacatttaaaactagtttaatcaacaacaaattaaactaattcttcaattttatttttttttaaaaaagaacagtttcttaaaaaacataaagaaaaaatacaatacaaaaagaaaaattaatcaaaaaatagtaacaacttaaaaaaaaaaaaaacaagtttcaatgtgataatcaattatactaaagaataattacatataaaaattaaaagaaactaataatttcgttaatataaacaataataaacgatttacctctctatcagaagcaccaaacaaatcggctgtgtccatcttttcatgatttttggagttcatcttttcaatcatcccactcaacttagccaaatccccagaaaactcatctctcaagattgccatctcattacaaatgcatacttgagaatctttaataaatgataaacttctgcaaatattctcaaacttctcctcaaaatcctacaaaagacacaaaaaatattaaaaaagagaatatgaaatgttagcaaaacaatttgtaaaaaaaatgtttgaaaactgg

SEQ ID NO: 271076 - DNA, 564 bp, Cannabis indica
tgtgtctgctgtattttgaattgtattttgaactgttgttgtatatcatcttttggataaatcttttataacagggatttccggaactcctttttactgccgttataatgtccgtttttagtattttattttagtcaagtttttattatcctcacagtttttaataattaattactatattagtattaaactagttttataaattcacacacgtggcgttcctatagattagggcgttacactcttagtgagcattagaacttggaaagggatcattcgtccacttgccatttttctttacaaacttggctctggtaccactttgttggaaaataagaactttggagagaatacttgaattgaagaagctatattttatatctcaacttgtgtgatgtgtgacttggtacaaaatgataggattacatatctatttataggactctatagacaaatctaaaaacattattaaatgtctagcttctgcgttgttctacatagttctctctaactaacacaagtgaaagataattctagaaaattcaagagtactcaaacaaacaa

SEQ ID NO: 271077 - DNA, 657 bp, Cannabis indica
aactcgaacaccagaaaagaggaatctagcgtgttacacagaaacgcgaaacagaaatttccagaaaactcaaacatcaaacccagaaaaagtagatgaacagtaaagcatgcaatgtacacaaacaataaactaaagtacaagaggcgaagaacttacataaagcttgagaactgggcgttggtgttgatcgacgctaaagagttgattggcagcgacgaaggaaaagaagtaagaaatctatggtgtttgaaggtttctgtttctctctagaaaacttgagaaagtttggcaaaattctgaaagtaaccaaatgaaatgagaagggtggcttttataggccaaaacacatgtgaaacagctctgatcagctaccatcgaacggctgggaaggcacacgattcgaattcccaagatccaacggttggattgaatcgtcatcaaggcggtggaaacgcacgagtgtccgcctgacacccattaatgcgccgtatcaataaatggacaagaaacgaatcgacgcctgcaaaaagtgaaccgctgcagtaatggtgatcattaaatacaccctcacgcgcccaaagcacgtgccagaaaaccgagaagccgaaccggaggcatccaagcagcctgtcactcacataaacaggcttgggg

SEQ ID NO: 271078 - DNA, 494 bp, Cannabis indica
cgtaggtacggctcacctgattaggtgatgcaattttcttagcgacgtactggacgtaagtacgggcgtcagtgatatatgatgagtaccgagcgtaggtacgggctcacctgattaaatgatgcaattttccttgcgacgtacttggcgtaagtacgagcgtcagtgatttatgatgagtaccgagtgtaggtacgggctcacctgattaggtgatgtgatttagcttggcgacatactggacgtaagtacggtcgttagtgacatatgataagtacaacacattgttgatgcgccaggattcaacaagaaagaaatgacattcaggtaccttggaattcctatatgttctaaaaggatatcaagcaaggagtgtttgatattaattagctgagaaaatgactactagaatcaaagcttaaagttctaggaatttatcttttgtgggacgaattgttcttattaattcgatatgctttctattcatttttatt

SEQ ID NO: 271079 - DNA, 1343 bp, Cannabis indica
gatagtgttgaattttaagttgggggagagttaccatattttgtttatattgccattattatatttgtattgttagttattcaaaaacaaaagaaaaagaaaagagtgtttaaaattaagtttagggtgtgccaccccttgcaaagaaatattttgtgtttaaaattaagtttggggtgtgacgtcccttgtaagaaaaagagcaagattttttttagaggctggaagtcccagttgttatagcattgcttcaacattctgtagcagagacgcgaaaaaaaaaatgctatgctaagacattgctataactcttgggagcacgttattttagaaaattttgggacaataaataataaaaatattaatactcaaaatttttgtgggatattctttgaggaagtaagtgtgtggtctcactttggtcttaaaaaaaattaaggtgctttttggtgatttgagccaaaaaatgacttcttttaaccatcttcacctaagtcttacattgaaaaaagtccttttgatctttagttttgtgtttgtctacattagtggagagagagatgaaaaaacaacctatgagactttgtcattttagagattttgtaattcatatttgcataaatttatctaaattacaagtaatatattgagaaaatgcatttaacacacacttggagtaatcaaaattagaatgaaactttttcttgaatttctcacaatcattggacaatctttaattttttttctctaagctatgttcattaatcaatctttaaggaaaatttaaaaatcgccaactttagtgtcatattgtctcttgctttattttgtttatttttctttttgcttgaggccaagcaaagttttaagtttggggtgtgataactctatgcaaatagagttatttagctctttttgtccattaaattagctttgttctcaaaaaattttagtttattttagtagtctttttatttagttttgcataaatattaattttagtatttttagattaattttaattaattttataatattttatcaacttaatttagttttcaattttataattgttaatctcaatgctgtgtatttttgtaaaaagattacatgtacattttggacttattatctaaattgaaagaaatgatgttaaagtccataaactcactaaagcccaaatattctacacttagttcactaattgatttgttatgtttattggccttactttactagttgaaaagtaaaaaaaaaaagggaataagttgaggattaccttttttttaatccattaatcaaaaataccctcatattatatttcattaaaatttacccacttt

SEQ ID NO: 271080 - DNA, 680 bp, Cannabis indica
gatggaagcttctcgtggaggaggagcgcaaacccaaagatgcatgtgttgaaatggtggttgacgccaatgagaacagtaagaggcttattgtactcatttttcatgtaggttgtgtcaaaccctagtacatccccaaaagccacatagtccacacgtgagtttccatctgcccaaaataagttagccaattgattctcctcgtcaacctgatagacaacgaagaaatttggatccttctctgcgagacaatcaagaaatcccagcgccccttctgagtctgtctctatcttctcttctcgcttggcaccagcaaccctgttgtacacatctcgaagttgacatggaattctctcgtaacctccactttgcaaagcaacatgagacattatgttggcagttttaattcctacgaagttcatcgacctaacttgggcaagcaagccatcggacacaactcagtatgatcttaaaaattgtacctcacttggtgaagcaagctcctgattgtgtattgtgctgaactctttgaatttctaagtgttacacggttgtgtgagtagaataagcaatgctgcctgacatccggttctagtgagagcatgaggtctttttattcttggtatgtccagtgatgtgatttttttttaacctttagaacaacaaacccacctccgcat

SEQ ID NO: 271081 - DNA, 1383 bp, Cannabis indica
ttttaaactagtatttttggatctgatcggatccaatattttaggtccaatatgtattggattagattagatccatccaatccaagaaaaaaagagtaaaattttaatattaatttttatgtatacatatatattttacgtataacattataaaatctagttaggcatccaaactaaatgaaaattaattagttaaattggatgttggatgtagtggatttttatacactccatccaacatccgatccgatctaattggatattcaaaaataatatccaatccgatccgatcacaattagatatccaaaatttggcgatcacaacgttgtcattaaattagatcgatttattcacacccctatatatgcaatgtcataaatgtgtatggcgtaccttataatacaaatgttcttttataaacaaagaaaatgaagagtcaaaatatagaaaaaataattcttatataaaacatttctaatagactattataaaagtgttacattgttattttttatatcttggtaaaaaataagattatacatggtttaatgtgtatcaaatttagtatatattaaaagttgtattaaatatttgatagaaaatatagttaggatttattttttttgaattattttgctatatatttgtaataaaatttgaatgattttttatttttttgagttaatttacattttatgtattggatcatataattataaaaattgggaaaaatataagattgctaatttttttttagccaaatatatatgagcacaaaaattggtcattaaggagaaaaaaagtacaagttgatgacttaatttagcattaaggtgaagtgggtccaatgaatgaactaccattatatcactggtcaatcggctgccttgcaccatcccaacatcacttgtggggataatacaatatacagatatgttcatatattgaggtgtaatgatcagtgcatttaaaatatatatgattttctaaaagattttaatgtaaatgaatgtgattgaattaaaaatttgctgtaaatttttggtccatatattaagatcatatttaatgagagattcaaaaattgttcttgacataaaatatacttttgtgatataaatctgtatccattttcagtattataaaatttaatatttaattaatgtttttaatattaaaaaagagaaattatcgcatatattatttttaacttgttttttttttttaaatttactgtttgagtttctcctgtggtttctatgtgtgttgtcatacgaattttggttgcgatttaggttgctccattaattgctatatgggtttctatatgaaattcgtaaaaatatatatataaaaaaaactgttttgaagtataaaaataa

SEQ ID NO: 271082 - DNA, 4314 bp, Cannabis indica
ccaaagcatacggctttctggatgtagatgatgatatctatacagatggatcttctatctatcgtataattcttatatatacgatataatgaagtaccacatgagtggatatataggaatcaaaatctgccgaatcaatcatgttatgatcttctacatcctaggtcttcccgttccttcatctggcttatgttcgtcatgtagcattcagaccgaatgactctatgaaattacgtcgatacttccacatattacgggtaacgtaggagacatctctatttttcccccggggaatcctcagaattaccactgcttagctttcaattcgcctctgaccatcaaatgaaatgtgaataacccgtcctcctctctttgaaacaaggggcgcttctggttggttctgtcggtgcttgaaacaattttgtcttctccatattactatatctctagagtcaataattttatatgaggaactactgaactcaatcacttgctgccgttactcttcagttttctgttgaggtctatcctgtagaggtactcaaattggatcagtgatcgatttctaggtttcgtcgtaaacctaattggttacttccaattacgcaaatcaatagttcaaaccgcactcaaaggtagggcatttcccatttttataggaacttctgtaccagaaacaatggtatctccaattagagcccctctgggatgtaaaatatatcttttctcaccacccccatagtgtatgagacaaatgtatgcatttcgattagggtcgtattctatagttacgattttaccatatatgtctttgtcattccgtcgaaaatctattttacggtatagacgcttatgacctccccctctatgccctgcggtaatgattcctctggcattacgacctttaccacaacgatgctgtccatagatcaaattatttcgtggattggatttcacttgcctgtctacggctcctttgcgtgtgctcggggtagaagttttgtataaatgtatcgccatgctattaagtattttgatttaagttcttttcgttataagaggtggaatagaataacccggttgaagcgtaatgatcatacgtttgtaatgcattgtatgtcccataataggtcccattcttctaccctttcccggtagtcgatgactattcatagctattaccttgacaccaaagaagagttcgacccaatgctttatttctgtcctagttgatcctgattcgacattagaagtatattgatttttcagcaataaccgaatacttttgtctgtaactacgaaatatttgattccatccataaattttattccctatgagttctagtctcaataagactgttaggtcttactgttcatatgttatgatatgaatataccacaccaattcgttatgtatggatgatgagattccattgatacagagccaattccaatagacttattggagggtcccattggcgtgcatccagtaggaattgaacctacgaattcgccaattatgagttgggcgctttaaccattcagccatggatgcttagcggggatcctcgtacatggtgaataaccaaattccaattgaaatgaaatctttagggtaaatcaatgcaatttaggaggacttaatcttaatgaaaggacatcaattcaaatcctggattttcgaattgagagagatattgagagagatcaagaattctcactatttcttagattcatggacccaattgaattcagtgatatctttcattcacatctttttccatcaagaacgttttataaaactcttggactcccgaatttggagtatcctactttcacgcaattcacatttacagggttcaacgagcaatcgatatttcacgatcaagggtgtagtactatttgtagtagcggtccttatatatcgtattaacaatcgaaagatggtcgaaagaaaaaatctctatttgacagggcttcttcctatacctatgaatttcattggacccagaaatgatacattggaagaatctttttggtcttccaatatcaataggttgattgtttcgctcctgtatcttccaaaaggaaaaaaaatctctgagagctgtttcctggatccaaaagagagtacttgggttctcccaataactaaaaagtgtatcatgcctgaatctaactggggctcgcgatggtggaggaactggctcggaaaaaagagggattctagttgtaagatatctaatgaaaccgtcgctggaattgagatctcattcaaagagaaagatatcaaatatctggagtttctttttgtatattatatggatgatccgatccgcaaggaccatgattgggaattgtttgatcgtctttctccgaggaagaggcgaaacataatcaacttgaattcggcacagctattcgaaatcttagtgaaagactggatttgttatctcatgtttgcttttcgtgaaaaaataccaattgaagcgaagggtttcttcaaacaacaaggagctgggtcaactattcaatcaaatgatattgagcatgtttcccatctcttctcgagaaacaagtgggctatttctttgcaaaattgtgctcaatttcatatgtggcaattccgccaagatctcttctttagttgggggaagaatccgcacgaatcggattttttgaggaacatatcgagagagaattggatttggttagacaatgtgtggttggaaaacaaggatcggttttttagtaaggtacggaatgtatcgtcaaatattcaatatgattccacaagatctagtttcgttcaagtaacggattatagccaattgaaaggatcttctgatcgatccagatatcattttgattccattagtaatgaggattcagaatatcacacattgatcaatcaaagagagattcaacaactaaaagaaagatcgattctttgggatccttcctttcttcaaacggaacgaacagagatagaatcagaccgattccctaaatgtctttctggatattcctcaatgtcccggctattcacggaacgtgagaagcagatgattattcatctgcttccggaagaaatcgaagaatttcttgggaatcctacaagatccattcgttcttttttctctgacagatggtcagaacttcatctgggttcgaatcctactgagaggtccactagagatcagaaattgttgaagaaagaacaagatgtttcttttgtcccttccaggcgatcggaaaataaagaaatagttaatatattcaagataattacgtatttacaaaataccgtctcaattcatcctatttcatcagatccgggatgtgatatggttccgaaggatgaactggatatggacagttccaataagatttcattcttgaacaaaaatccattttttgatttagttcatctattccatgaccggaacagggggggatacacgttacaccacgattttgaatcagaagagagatttcaagaaatggcagatctattcactctatcaataaccgagccggatctggtgtatcataagggatttgccctttctattgattcctacagattggatcaaaaacaattcttgaatgaggtattcaactccagggatgaatcgaaaaagaaatatttattggttctacctcctattttttatgaagaaaatgaatctttttatcgaaggatcagaaaaaaatgggtccggacctcctgcgggaatgatttggaagatccaaaaccaaaaataatggtatttgctagcaacaacataatggaggcagttaatcaatatagattgatccgaaatctgattcaaatccaatatagcacctatgggtacataagaaatgtattgaatcgattctttttaatgaatagatccgatcgcaacttcgaatatgtaattcaaagggatcaaataggaaacgatactctgaatcatagaactataatgaaatatatgatcaaccaacatttctcaaatttgaaaaagagtcagaagaaatggttcgatcctcttatttttatttctcgaaccgagagatccatgaatcgggatcctaatgcatatagatacaaatggtccaatgggagcaagaatttacaggaacatttggaacatttcatttctgagcagaagagccgttttcattttcaagtagtgttcgatcgattacgtattaatcaatattcgattgattggtctgaggttatcgacaaaaaagatttgtctaagtcacttcctttctttttgtccaagttacttctttttttgtccaagtttcttctctttt

SEQ ID NO: 271083 - DNA, 820 bp, Cannabis indica
caaattgtaaatgaacaacaactactagggcaaggacaaaatcagcaaagtggaattttgtgagcattgcatacttggaaaacatcatagactgaagttcaaaacagggacacataaatctaaaggtatattggattatatacattcagatttatggggccctgaaaagactccaactcatggaggtaatacctattttctatctatagttgatgatttttctagaaaagtatggattttcttactgaaaaataaaaatgatgcttttcaaaggtttaaacattggaaaacacttgttgaaaatcttactaacagaaaggttaaaaacctaaggacagacaatggtctggaattttgcaacaatgaatttgacatgttttgcagagaaacaggtattcaaaggcacagaacagttaggctaacaccacaacaaaatggtgttgcagaaagaatgaacagaaccattctgaacaaagccagatgtatgttaatacaatctggtttgtcccatggtttctggggagaagcagttatgacatctgcttatttaataaacagatgtccctcaagtgttattgaattcaaaacacctgaggaaaggtggtctggtaaaccaccagatctttcaaacctaagagtttttggttgtagtgcatttgtgcaccagagtattggtaagcttgaacctagagctattaaaggggtttttctaggctatcctgaaggagttaagggttacagaatttggctaagagacaaaggtggattcaaaactataattagcagagatgttatttttaaagaaaatgaatttccttgt

SEQ ID NO: 271084 - DNA, 1520 bp, Cannabis indica
ggactcaattgcggaggttgcatggcaaccccgctcatcatcatgaaaataattagttggaatgcacggggtttggggaacccgagtgcgttcagacatttgcgattgctagttcaacagcaatctccccaccttttgtttcttatggaaacaaaactgcctgataactctgtttctcgtgtgcgacaatctctacacttcccaaatggattagaatcgcctcgctctggccttagtggtggactcttgttactttggaaagatgaagtggagatcactctgcttaatatgggtcctactttttttgactgctacatgatgatcgaaaacagccccacggttcacttaacttgtttttacggtgctccggaagtcaacaatagacaagtatcttggactctcttggaaagacttgctgacgttgctcctcatctcccttggttagttcttggcgattttaatgaaattctctcaaatagtaataaatcgggtggagctcttcgttgtgaatcccaaatggatgcattccgaaaagccattgacaaaggttgtcttcatgaaactctaattgaaggggacccgtttacatgggctaaaaatcgagctgctgccaatactatcaaagaacgaattgattgggtcttcattaacaatcattgggaatccttcttcgagagccctcaagtgcatcacctagactattttcagtcggaccatcgtgccattagtgccaccatcaacctgattactacacaacctgccactaaacaaaggaaaaatcggtttcgttttgagaagatatggctgtccgactctgacagcaaagaaattattgctggaaattggttgcacagtgactccaccgatcctattgctgttgttatttctaatatacacacatgtgctacacagcttcaactttggcatgatcgcaagtatgggaagatgaagaaaaacattaaaaagtgccaaaagcaagttgaacaactcaataattcttcctatcatagcagcagccactttgatgatcttaaacaagctgaattaatacttgatgagttattggaaaaagaagaagtatattggcagcagcgatctcgagttgattggcttgcttgtggagataaaaatactaagtattttcatacaaaagctagtgctcgacggaacaataatcacatcaagtttctctacaacaatttgggtggcaaggcttcaactattgatgatatatcagctgtagttcaagatttttatgctgatcttttccaagctggcgaccttgatgagtgtgccctcactcatacacttgattgtatacccactttggtaactactgctcataatgatgctctccttgctccgttcacaccagctgaagttgatagtgctctcaagacaatgagttcggacaaaagcccaggaattgacggaatgtctgccatgttttatcaacaaaattggtcaattgttggtaatcttgtatcaaatgccgtccttgacatactcaacaatggggc

SEQ ID NO: 271085 - DNA, 2124 bp, Cannabis indica
actcctctcatttcataagtgaaaaaaacaaaagaaaaaaggtgaagtcaaacacaagagagagtgagatacaatacagcagaaagagagagaagttagagtgagaaatgagagatattgagagagagagagagggttgggattgggaaattgtattgagcaacattgttgattatgttggctcgggttagtgagttaatgtgtgttgagggattacaccatacatgacttgctgtgattattttcttgtagctcctgagattgatatctcttcttctcatcatcaataaagattggtggcaatgctttcaaactggagtatgaccaagttcacattgaacttaggatcggaaccagtataaatctctgtgttattgtgtctgacagtcatttagattcatctgtattatatttttctggttttgtgtttgctggtttttgttcttgatttgtttgttctgatataacttttgtttgtttaagtgtgatcttgaagctagaattacaaaaattaattccaatatatgaaagctaaatttcttacaatctcatctacaatctcatttaaaggttccacaagacttctattgagttacatttgactagaaattatatagagattgtaacatttaatgaaattaaaatattaaaaaaaaaaagaaaaaaaagtcatacacatgtcatatatatatatcaatatcagccgttataaaaatctcaactccacatgttttatcttaacttttggtaaatctagaattgtacgtcttttgtacaatgaaatctttcctcaatattttccccatgtagtactgctgggtggtgggtactactttataaatttagttttttgtaggatttttctttatatatatttatatttatatataaatatatatatgattattcatcaacactatttaattatcacaaacaatctttctggtaataattaaagactcatgaacttggcatatatgtgcaaaagttagaactaagaccactctatgttctttccttaattaaaacaataataaaatatgatattcatacaaagaatatctacaaaacaaaatgataggctgtaaaatctttattatttttcttctcttcttttttttgtttttttttttttttccctttctcatatcttcaaatttgtttctagcaatatttcataggcacaaaaaaccaaaaccatacatgacttcatcaaacattttgaatatcttattaatttaccaaataatttttatgttttttgaaagtaaatccaaaattttccaatctagaaaatgtggatataaataatatatatagatatataaatatatattttgtatgtcaccaacatttcaaccgtaacaattcattcatgtaaggcccttgtctataaaatctcaagggacccttttttcctcatgggcatatattgtgtcggtcattaaacaatttgagaattttcatttttcctttttttaactaactaaataaataattatatcctgtattttttaaatacaaccatagtttaagtagctgtgttgcgttgtgtggtataatggtacgaatatctttatcgatatttttttttgtatgggtttgaatcttaccataacttattttaaaagaattatgtttgactctttaagatgctagtttaacaaggtatgaattgattaaatcaaacgaaaataaaatcacaaaagtatagaaaggtttttatattattaaaaaatatatgtgcatttattatttatttgatatcttgtgttttattaaaatacaaatttaatattttatatttttaatattacttatataatactctatattttgatattataaatgttagtactgtaaatttaaatttgattaatataatcaaactatctttaattatatgagtttcaaatttaatttaattatttaattataaataactaagagtaacttggtctaattgataaagaattattaatcaaatttgagttcgaaacataaaatatgtataattttaaaacaaaaagatattaccaaatttatactttcataaaacacttattttaatagtaacaaatagaggaaattacactctataccctttttatattgtcttctttt

SEQ ID NO: 271086 - DNA, 906 bp, Cannabis indica
ggttacaacttaatttttgatatttaattaaatcactgtaactgtgaatgaatatatgaaaccataagcatgaaaactacatgttaacttaaattacttcaaattctcttattgataacagattagattgtaatgggttttatttagggcataaaatcccaacatatatacctcgcacatgagcaaaaggttgccttcggcaagcccgagcccatgaggcatacgatgaacaaatgagatcctaacaggtattgtaaattcgataaggatattgggcacacgaatgacgaatgtggccagttgaaggatgagatagaaagtctcatcgctcgaagccactttaaactgtacgtgaggagacagagccatggacacaaccagcccagtctgcccaatagcccaaacaagtaggggttacaacctcttcatgttaaaggagaagacatcctggttatttcaggagggccacatattacaggggagagcaataacgcccaaaagagatatgtgaaagagataaagaacaagaagtcaacattcgtcttagaaccttccaagaaggtgaaaattgaggaacctccaataatattcatggaggaagataaggaaaacgtgatatattctcacgtcgatccattggtgattaccattcaactcgccaataaaaggataaagagggtattaatagacaacagaagcctagtaaaaattttttataaggaaacgctgaggaagatggggctcaaaaaagccaaattgaagccttgtatggtaaatctttgcggcttcactagagataacatttttagtgtgggcataatcgagctcgcattaaccttgggcgaggcacccctatccgccaatgttatgcaagacatcttagttgtatggtaaatctttgcggct

SEQ ID NO: 271087 - DNA, 2005 bp, Cannabis indica
ttgcaggaccaatcgtcactctaggatgcatccaaagtcatgtacccgtgtataagagcaacaagtttgtggggtggatgcccaatggaggctttaagtgggaacattataaaatggtatcagaactgtgatccagcaaggagtatggtcgataaggacgttagacccaataaaaagagtgattgtacagtcagagtcccatgatccgtaaagggaaagactgggtaagatgtgcaataccacatcgcctggagaaggtcaagtgtaatgatataagtttgtgtgtgtatatgatggataaatgggtactaccaatatcaacaagatgcattttctttttagtagcccatcaccaaattttagcatgtttgatctgaagaaatcttaggatgggtgacctatattgggatgttttcctaagaagtgtgtgagtgagaacaaagtacgttggaataacttgtgttggtttgtaaggtcagacgttattccaggaagcaaccagtcacacacctgtgtatgagagccataagtctgtggggtggatgcccaatgagacttaaagcggaaacattacaacatagtcactcagaaaacaacacaaaagagctgaattatttcattaaaatgatgaaaaaagttttttctcttaaagtcttgggagctttgaattttttccttgggatagaggtgtttcaagtgcaactggaatgcatttgtcacaaaaaaataaatttgattgaattgctcaaatgactggaaatgacaaattaagccatgtcactcctatgacaagaggcaagtcattatttctgcaagatggtgatgaactggctgattatacacagtacaagagtgttataggtgctttgcaatatcttacatacacatgcctaaacattgcatttgctgcaaataagcacaaccagttctaaaattattaaacaactacacattgaagtgcaacaaagagggttctgtaatatctaaaaggaacaattcatcatggtattccacatcaaatatattgacaagctgcctataactagatattgtgatgtgttgactgagtgtgttttccaaatgatacgaaatgtggctgactactgtctgtattttggaaatacatttattacttggtcgcctatgaagcaatcaattgttgcttgctcaaatagcaaatccgaatattgagctcttgatcaagtctttgcagagatcacttgggttatatcattgatgaaagaaattcagtttgtatcaacatcagttgtttggtgtgacaacatgagtgtaaatggttgccttgaatcctgtcaacatgctcgaatcaagcatattgagcttgaggtgcatttcattcaatataaagttctacataaaagaattaaagtcaaatatgtgcctacttaagagaacattgctaattatcttacaaagggactcactcaagacaaaccttgggtgactagctcacccttgcatttgaggggtggttctaaggtatactcaacaaactaatacagggaattagtgtacctaatgatatatttaagctcaaaagcttctctttctagtttgctgttttgtcttgtttattttctgttatgcctttttgtttttattccagaatatacaatcgccatctgttagaatcattaggaatattctcctgctgtaataatttgtgcagttgcacattcttataaatgaaataatctccccaaatctctcttcagctaagccaacctaacctgcatttacacactttctattttcttcactattaatgacctagcttttctgttataagattttgtttttgtgtgaagttatttatagctattatattggagttatttcattccaatcaactcattctatacccattttggataagagaatattttcttttatcatgctatcttttttttcctgcatgtataaatatattattcatatttttcttttcgatatatcatttcccactacatatatatatttatat

SEQ ID NO: 271088 - DNA, 1319 bp, Cannabis indica
aaaaagcaggtccgtaaaaaaatatcaagggcctggggacgggccataataactgtctaccccttagaagataataatttaaattgtctgaaaggaaggaaagagactctaaatgtaaaaaaaatatatatagttgtaatggtgagattggtcggactgctcggcctattcaatacgaggaggaagacgagggccccggcgttcttcgagcaaagcatcaagcctcttcttcttctttcggaacttggcgagggcttcctcaggtttgggatagaagtcaagcttgatgttttggccattcgactgccaggcgatataaacgccatcatcaaagcgcttgacacaatgcttgcagacaactggggtcaggagctcatctcttttggcctttttcaaggcctgatctttaaaatctcttagctcctttacctccacagtcaggttggccgtcaactgcaagtcagcctgatgcaactcctccaaggactttaacttgccagccatttcgtccatagcctccctggcttcccgaagcttgcgcttggccctagcagtagcctcgccctccgccttcagctcctcctggtgccttgcctccacctcagcctccctttacttggcttcctcccggtactttgcctccgcaagggcctccctttgttgagcctcctcctggaacgccttccttttggcagacaagtctcgcaggatcctcacagcctcgtctatgcccccaaattcggacatgacgaacccatgatcgatcagggtcttggaaaggcagccggtctcggcagtaatctgggaaaagaaacatgaatgaaatcagatgccttagacaaaatataagagaagggaataaattacaagtactcaccgcgaccaaggcagagctgatgtcttgcacctggtatacggagttcatggaatatcttggctgggaattgagttaggtgggacacaaattggctagtcatctttgaggcgaagggagctctggtaggcccgacaaagcagttgaaccagtccgtctaggggtccatgttcaggtcccaaggatttcgaaaggcgtcctcgcgcaaagtgttttgctgctcctcccgcagaatcttctttggggcttccacctcagcatgccccgactgaactcgtccagggcatagttgtgtttggcaacgcgaagcatttgcctctcctcatccgtagggaccggggtcaacacaatgtagtgcgacacagtatactcctccacttcgggaggaattccggagtcattgctcacatctggagtgtccccccctccgggtccgcttagaagg

SEQ ID NO: 271089 - DNA, 1718 bp, Cannabis indica
tataattgtaaatatcaaactttgtaaatagtattaagaaaaaaaaagtaaaaaagtaaaaaaaagataaggcaaacataaatgtttaatattgaaaaaaaaagccacttagtgtaaatttctctataatttattatgttctaggatcacaaataaaattttcaactttttaaatggacggccaaaatttgtcagaagtatttaatatgatagtttttattttttgtaattagagtatactgcatagtcatacgtttttgaaatgatatttataatggtaacttttcagttgattaataggtaattaataagcaattgattaccttaatgacaaaatattacatttaatcaatacgtaattcatccttgtctatagtcatctcccgaaaagttataataataccaaaatatttatcatatctcttctcctaaaaaataacaattccacacccaaaaaagaaaaagagtggtaaagtcgtaaagataaggataaataaaaaaaaaaaaaaaccaagcagccaatcactcaaactttgaccatttgtataaaaatgaagataaatgttaaaaaaattaaaataattgatgagtcggagtacaatgtacacgtggaagccgataagctaatttaaaaaagaaagatacgagagtggggaccactttacaaataaatgataatataataatattcagatcatcatccattcccagaacaaaccagaaactaataaagcccatagtaatacatacccactcaactaaatatcatccatccacactctctctctctctctctctcttatatatattctctttcaattttctcatcatccaaacagaatcgtcgtttcattccactccaatacctaaccctaagggctttaatcgaaaaaaaagaaagaatgatactagtggcgtcaatggcggagctgatggaggagtacacggcgttgctgtcgagggttctagaacatttgttccattcggcgccgtttcctggccgggttcgatttctcatcctccggaatcttcctttcgtttcttatattcctcctcctccttcttcaattcgcactcgtgcttgaattagagactaatttagaattaattccttttttttttaatttcttttctttttcttcttttttgaatttgagggattttttaaggtcttttttttgtttatgtacgtatgatgatgtattatatgaaataatctggagttttttctctttctctgtgatgatttccatattgtatatacgtataatttttgattaagagtaatttggtttcaaatttttgattcaatgtaaaattaagcagtgaattggtgaatgaactggttttgttgtggatatgaatagaagaatagtgtagaagattttagagagaaaaagaatctctttactttattattattattatttcattttttttatttattaattattaattttaatttacggtacgaggatggacgacgaggatgtgttttcgaatttagcaatcgcgttttccaatgtcaaaatttaatgaatttaaaattaatatttaattaacaacattttaacttttttttaatagtaccttccacgaaggtgagtgagagtgtattaatctagggtcaatgttaaatattagactttattcaaaatattttcaactaaataacggcatcacactaaactttaggttgcctctaaatctgttaagag

SEQ ID NO: 271090 - DNA, 881 bp, Cannabis indica
cctatttggggagatggtgaatgttgattgattttatgccatgagttaatgttaattgctattcccttctttcttgattgtgtatttattcatgtttgtgcttaattccatgtttgagattaatcaccttaggcatgctttataatcttaatacaaaatctaaaaagtgagtattgagaatgctaaaattgaataaactaagttttgatgtgaaacaaaagtatttgcatagcctatgtgacattgagattattgcttaatgcgggttgtatgttagtctatctcagagatgcatagataacatatgatttagggcctaaaagataagagttaggttaattttataatctgtcattcacataaagaaagaaataataattagcattaataattgggtaattgaaacagcaggattcgtttccctaatttctcatccttgattaaacacctttattgttttctttaattttcttgttttttttttctttattgtaaactctatcaaaattatttatctacgaaatagaaacaagaattcaattaattggtacttagctacagtcctcgtgggaatgatctcacttacctgagtattacttattaaaatgatacgtatacttgcgtgttggatttatcacaacaagtttttggcgctgttaccggggactgttttagttaatatcaatatagttgaattctattctaatttagttttttttatttaagtttactgatgttttactgaatgtgtttgacctccaatgtaaatctcaatgttataccttgtgaattttgtctaacaacacgatggaccattctattctgcttgggggagatttaaggagctcggggagagaggctatcctaatttctcaagtggg

SEQ ID NO: 271091 - DNA, 677 bp, Cannabis indica
ggcagtggttctcttctgtttcagggattttcggcttttaatttttcaatctccttctgttgtcgagccacaacatcaggcacttcccttttcttcatgccaaacagtttagatgccctggtaaggaacctgcaaatcataaaatgcaaattagttacgattttatttgtgtaactaaataaataacacttaaaataatacagcagccctgacacgtccaggatgctctggtgtcccgagcgcctgcgtcaggatatcgttttggccctggacttgaatttgtccctgactaagcttctcctctaattgagcctaatgcacacatatattcaagcaattagtatgtgaattatatacactaactcattagtagaactcaattaaggattaatatatacttactatcttctctgcaatttccttgtcgtaatcagtgacaagttttcgactcttggtgcgagatttgatccaaacacggtggcaggggggatctggaacttcgagatccttttctacatattttataacaattaaatgagtaccaattaaatttatagcacattattagaatttaagcattacttaccacagcttcccgtacgttcaccattccactccgaccacttcgatgtctggattggattttcgaggaacgttcacgttgcaccttactcaat

SEQ ID NO: 271092 - DNA, 965 bp, Cannabis indica
aggggcatgtgttatagtgagatttctctcacctagaaactcgagaccatactcttgattagaggacacgtgtactcagttttccaatgaaagctgagtcgtctgcaagagattcctcgaagtttcaaacctcgctcaagatagagtcagcgagatacggcgaacatgaccaaactctgatcgcatgattacaactcgtattatgcgggacaagagagtaactcgcatgtatcgaactatgtgcgagtatcctctccatgttcttgcataaacatagagaccgactctctataatgcgagttggtcccaatgaccctacagccttgataaaccgatatagactcgcatgtctaggttctgtcagctcgtcatgcgatgtccacaaaggcgactacctaagaacgcagacatcctaaacgtaattaagtgttaggcccgcgagtttaacattagaatatgaacagtcaactcgcatgttaaaagggcgcatacgttgctgaatttagtaactgctattcatttattgatgttaacgttatttagtttagttattgtaattcaatgtgtaaaaacggattgacaatgaatgcaatctttgtataactaattggacacctgctttgtatataaaggggtgatccaccgtgaaatgagacctacgaaactcttgctacagtggactaagcagaccgtgatctgactgaaccactataatcctctgtcttattgttatttccagttttctgttaagcatttcacattcccagttcgagtactcgccactctaggttgaatactcgcaattgttcttcatataattttcttcttgtcattaataatatcatatacatttggtgttgcgaattttgctcgacaacactttttcactcagaaagatttaaacatgaggcagcgcaatggttagaactggttaaagattatgactgcaagattctctatcaccc

SEQ ID NO: 271093 - DNA, 606 bp, Cannabis indica
aatttaatttaatatttataaaattaaacttagatggttaagaaaataaaatgaattatttccatcttagtattaattttccaataaatattaagaaaattatttaatttaagttgtattaatttaaattaatttgcaactcaaatttaaattttctataaaaatatatattgtatttcgaaaaattaaagtataaaattatacaattttcgaaatacttaaaaataaattaatctttactagaaaaaatacttcaagcaaaaatactatctatctagattttctttaactaattaattcaatttctaataataatatattttagttcatttattttaaattaatcattaaatgaaaaaatcattgattttagttggttcaaaattaattgaaataattaatttacaactttaatctatttttcaagataaattcaaaatcatcttgcataatcaaatgcaatttcgaaaatattgattaataaaataaataaaatatattttgaaaattattcaaatttaagttgttataaaaaatttccaacttaaaataattttctatttaattaaatgtcatgaaaataacaatatttaagtatcatgatga

SEQ ID NO: 271094 - DNA, 4413 bp, Cannabis indica
caagtaattcattgggcatcccaagaagataagggcattaaccttccagggaaattaagcttccatgaaggaacgctccctaactgctgaccaagagataaactcccgcgaaccacggtcttccactattctgtgagtcaaagtctcacccatctaggaggggaaactatttgccaccgcgagggatgtggatctacacgatcaggctatagcgctgcacaagtccatggtacatcattgactcacgagacctttaccaatgcatgtgaggctataggccttgggaccaggctgtttcatgaacaatgtcggaggttgtccctcatgacacgctatagtgcaaggcatgcgtgtcctcgtgtactgacctaaataatccaacatctaggagaaagagaaattcaaataataatgaccctagggtttcacgcgtctgaggcccagccactacaaccagtacgatctgacacccttaaaaactacatgggaaacatgccacctaccaatccaatggtgggattccatcctatcagtgacctatccaacaacggcccatgcaagaaaataggcttataaatacctcacagatagcaggagggggcgatcttttttttttcgaccttcaccttgagattgaagacttactcttcatcaagaaaaacacttgaatgtaaccctattattaactgcataatattcctactaagcttcctcttctttaagaggaacacagtagaaaggagtaaaagtctattgtatatgtattcgtgtaaaccatgatcgaccaatgaccctaggaaattggactcgtggacttaggatagttaacgcctgaaccacataaaaatgtcttcttcattatttcatgattcaggccttcattactttctcaagctctaaaaatatttggttgtcgaaaaactcggtaaattataatagacacaaaatagcaatatattttattttacttgttaacgtcaattttgaaacgacgcaaccaaaaaaaataaaaaatgaaataaatctacgtatagttataccaaaaaaatctaggaaaatgtatatacatattcgagatccaacaacaacaatgtataataaactaaatgctagaactgagatataagctacaaatttatttagaaatctaaatacttaaaattaatttacaaatatatatctaattgaagatatatctcatatctaagaaaataatacaacactatcaaaaaatactactgcaccattgatttctcatcacataacaacaatagcaaaaacaaaaagaacaacaacaagtctcgtatctgttaggacttaattagtacaatttttaagtaggtttttaaagtatttttacttagttcttagttgtatgttgtgcaattttatgcttttagttgcaaatattttcaggtttggtattcgagaaaaataaagaaaattcgagaaaaaagtgcaaaaaagattgattaaatgaaactttgtggctagagcaccaaaaaagaaatccaaaaaattcagtgtgattggagcttctactattaaagaattagaaacagtggggtagcccctcaacattaaaattccacgtcagggtgctaaaaggtaaaaatttggatgcaagatcgtgtttagaaagtttagaggcgggcctcaacattgggatccaatattgaggcattggaacccttaaatcctctttgtctgaagttgggcttcaagtgccacgacactactgctctataaaaatcctgacgatatattttatgtgggtgaatgagacttgccgtgacactacaagagaatgtcatggcctgcctcttctaaagtgcataaatttgtgttttcatctttttaaaaggctatagaaaggatcattttcagcacttttcagcaggcgactttgggagtacgaaaatttgaagtgagaagtggctctaaagactttcaacatttatttttcaaagagttcttccttttcctctatttttcttatgttttcaataattatgagtagctagactttttattagggcattactggatattgtttgacactttattttggtgtaatatgatttagttctttcccaatttttaatgtgcatctattttattcgtacttaattacttttaatttcttaatcactaattatactttttatgatttcaatgcaaaatctgaaaagtgagaggtgattatattatagtgaaatagacacatattttggtataggacgagagtaccgacatagtttgttttgcatttaacatttttatgcttaatacctcctatttgttaaatttatcacgagagtagaaaatttaaatattggttgagatttatatgtccaaacctaaatataagtttctttagcaaatccgctatcacatgaaaattagaatttgagaattaaattatattaaaccatataaagtagattcaaccgaaatttaatcaccctaagctttaatcattattaattttactttatttatttgttttttctttctcgatagaatttaaaatagacttttcttattattgtcaccatatagaattaaaaatttaattgcttggtacttaactatagtccttgtgggatcggcctcactcttgtgagtctattacttgtaaatgatacatatacttgaaattacttggttttttttaaaaaaaaaacttttgcttttgcagctctctctcaagctagtgccatggcgaaaacaagggcaaaagttcagacaaagattcaagctactgcaaagaagaagaagaaacaaggacctaattcttgagctaatgtcaagaaaacaaaaacaatggaagaaatattaggtgtggagccgttagaattctcagatgctggtgcaaaattggatgatgatgatgcaaaatcgaatgaggaagatgcaagattaaaagatgtcttcatgcctcctctgtccccgaagtcttctcttaggtcaattcagagacaagatgagatcaaggaagactttgctatgttcttagaagcaaatcaaaggtgttcttctgcaatttcttagggttcgaaggttatacctcctgtacttaggtcagaagggataattcaaaacctggaatcaagttattaaactaagagcaaagtgaagattactgcagatgacattcaagaggtgattgaattctagaattcttcgattgtttgttacatattaggagccaatcctccattggtagtcctggaaggttttgtaagaagaatttagaaggataaaattgataaagtaggtatgatctcttatagcattttccttattagattctttaatcttgaggatagaaatttagtgcttaatgaaggttatactttcattaacaaacgacctgtttatatgaaaccttgagatccaaatttgaattttaatagagaagacattcgtacagtgcctatttggatccaactagaagatctagagcttaagtattggggacagaagtctttattcaagatagtagggcagctagggagccccttcatggtggatgaagtaacaaaaggaagagacaagctgagttatccacgggttcttattgaggtatcaatacagtaggactttcttgatataattgaatttgaaaatgagcatggctttaatgtaatagttgctgtcaattacgagtggaagccaataacatgtgcacactgtaaggggatgggtcatagaaccaatgattgtaggaaaaggaaggcaagaagcaggaatgggttgtgaaaaatgataccaggaagcaggaagagaagcaaactgaccctgaagctttccaaaaagttgtaaaaggttaaaaagttaagcccacagaaaaagttgcagctccagccacttcaaatgcttttgatgcattaggatttgttgatatctttgaaatcctctctaaagcttcacaccagcaactaaatttgtgtaatcaagtggaattgaaaggagggggggagagcctcctctttccaatggataagataataattttaaacgtctgagggctcaataactagcaaaaacaacatactatcaagcatattatttcttctcagaaggctagtttagtaggtctccttgagacgatagtcaaagctccaaaacttggagctttgtatgttaatatgttctcaggttggtgctttacgactagaatatcttggcatttaggtgggtgtactatagatgcttggaatcctctaaggtttgttgttaacatccttagatattctacacaactaatccacttgtttgttactgctatagacaataaaaagagcttttatgtgaattttgtttatggatttaataatgatgaagggaggaaagaattcttgaatgatctaaagttgcaaatggcaaaagtgttggaaatattttacc

SEQ ID NO: 271095 - DNA, 426 bp, Cannabis indica
ttttgtaaagagtttttttttttttttttttttacacttcaaaataatttttttttttgtatttctacggaaattcacatagcaacccacatagcaactaatgaaacaacttaaatcacaaccaaaatctacatagcaacccacatagaaactactggagcaactaccgaaacaacctaaaccataaatttgaaagaagaaaaaaagttaaaaaatagtatatgagataattacccattttgtaattagtttctacaataaaactaaaggttactaaaaatgtatcttaataatattaagatactataatataatttgcaaagcaaaatactaaagggcttttttcataaatgtacaacaaaaacaaaataattacaaaaaatgtgacaaaaaaaaataattttaaaaatttatacattttgaaaa

SEQ ID NO: 271096 - DNA, 1488 bp, Cannabis indica
cgcctaagatagttagggtgttacaattgactcaacatcaactaggtgatattgacttagatagatataacagtaagtttataatatcttatccaatgtcgatatcggtccagtctgatgtatactctatacatctgatcctagcatactttggcaatgtcttggaaaggacataacacttatccaaggtgtaagtaaactttatagctaattatcatatcagtattaatccagtgtactgacaaatcatgagacttaaaatttgaaacatacaatcatgattatattccactgtgttgacaataatcattaataactatatgttctagatttaatagaatttatacattaaacatataatcatgaaagcaatcatgtgaaccatgtaacataaaataagttcggatcttttattaattagtaaatctgattatattgaaatgagttttatttagggtataaaatcacaacaaactcccacttgcactactataaaactaaaagtgcatttcaattgatcttaacactttgatggccagatcaagtgtagtatgtagtattttctttgtattaggatctgacaggttgaattaaataaaaaccttttccactattacatctccttagtcacaaaatccttgatattttaaaattcctttctgtagatttactcttattaagatattggattctttactatttgacaactatatatatgttagttaggaagtaacattagtagttaatccatgactggaataacgccaaaaaaactatgtagaactttccataggctaaatagttatctagtagccttcttggccattttaatatttaatctcactggtagagttagagacttcagataggtttttacacttcttcaaaaatcactgctccaccccaagagtaattagtatctcataagtagattttctagcattatcgcaaaccttatttggtgtagtctaagagtattaaaatactacctttatcaactagcatatagctattgttttgatcttaagatttgtttgatttctttccaatgttcctttcctggattaaaccgatacttactcataactcctactcaacaacaggtgtctggtctaatgcattccaaaatatacaagagacctctcactgtaagaaattcttttcatgatttttatcttttttggaatagttgaaactattccttagagaaataaaatcaatgtctaggagccaaaagactccctttagaattagccctttgaaaaatgctccaacatcttactaaagtaagttgcctgtactaaagtaagtaaattaccaagcataccacaagccacaggttttgatattctcaaaccattgatattaggatcgaaaagttttgttaagtcaattgaatagacttattatcaaaatttttcttcttgtccttttaatagaatttttttagttactccatatgaatggttttaaccatagttctcttgg

SEQ ID NO: 271097 - DNA, 884 bp, Cannabis indica
ccatcacgaaagaactccacagttaagcgtgcttggcttggagcaatttcaggatgggtgacctcctgggaagttttccaaggaagcgtgcgagtgaggacaaagcacgctggaaacactcgtgttggtctgtagggtcagtcatcagtccatgaagcagccagagtggcgtactcgtgtataagagccattcattccgtgagtgtaagggcccaatggaggcttgaagcgggggcgttacaggttctaccactaaagtggttagatcaggtgacatcattttttcaaaagacttaaccatccacaatgttttatatgtccctgactttcaacttaatctttttaatgttcccagttttcttcttacaattaccaacacaattttattcactcataattcctgtatacttcagggtacactaaacaagaagattgggatagctaatcgcattggcaacctatttttcctactacaatctgtcaactctcctagtcattgtaattcgactttttcttctactaaatcatgtaataatgtgcattcttggcactctagacttggacatccttcattgtccacaacaaagataataaatagtcaattacattatgagaatattgattttttcccctgttctatttgtcatttggctaaacaaaaatgattaccattcaattgtcaaaatcatattgctgaatcttgtttcgatttagttcattttgacatatggggaccttttcatgttcaaagtatttaaggttatagatatttccttactattatggatgatcaaagtagacatacttgggtttacatgttacaatccaaatctgatgtgcaatacttaatcccacaattttataacctcatctcaactcaattt

SEQ ID NO: 271098 - DNA, 1854 bp, Cannabis indica
gtttactcctttgactcataataatagctcttcaactttcgactttaagagtaaccattctttaattctcttgttttttttttaatttttttttttttaaatttaatgaatttaagtttagttaatatgtttttttcaggttgggaaagaaaagaaaaagacaataaaagattggtgaagaagattggagagtatctcatgtcagattcttacatgtatgctccattgcttgctcctcaaaaaggtactactattatgtttatgattaatgtcgtttttttgattgcattgtcgtttcgttcaatagatgagagtggtttagattaagaggggtttagtaaagtgcaatgtataatttgaggtgaaagtaaagataaaccaaattactttatttttgagtaagttttcgatattataatatgaggagggtttctgttttttttttcttcataattaaattggattgttgtgcttagaactaaggttttcaaaggtgaaatcactaataaagaatattaaaaaaatatcattaaaaacaattttttgaaaaaattataataaacaatacacaattccatatcctaaacttagaaacacaaaattaaagggagaaataataaatataataataaaaaaaataggtagtcaagaaatgaaatgatttgcctatgtaaaaaacaaacattagtactagcctaggagctgacttgaatttgagaaagtagtgttttttatatttcatttattttaagggataattagcaccattttttaaatattttttttatatatatttttacggtttataaaataaaaaaaaatcgtaaaaatatttaaaattttgtgaaattgtatttttgtaaattttttttttttatttttgtatatttgtgaaataatctcttattttaaagtatgggagaaaagggtccaaacttaagtccatttaagtaatttaaaagcctagaaacaatctgaaaaaaacagtttagaaaaaaaaaaaaaaaaggactcaagtgcacacacaataaaacaatcctagcacacaattcagcagatgtgtgtccctcggccacatcaatgctaggcggttttgaactgcgaaccgcctcgctcaatgctaggtgtatttctctgcgtggcaacagtagaggctaccccgccttgcctcggtgaattttgaaaaccatgttggaactaataaattttaagcgggggaaggaaggaaatgaaatggaattttgtgttagaaatcatcaccaactctataagcttctaattatttgttagttgtttctagcacttgggccaagcccatataattgtcaaatgttatctaaaagaaaagctagtgtcatttggtaaatgatgtagctagaattatctagcacaatttttagttggtaccaccaccgacttaaaattgtatcgatagtacgggcaaaacgtgtcatcatgttgtgttcgtattaaattttatttgacatcttttcatattttgtgttaaattttattcgatagtacgggcaaaacgtgtcatgacttgtttttgactcatgtctaattttcttaatcttaacccgactcataaaaatcgagttgtatttgtgttgacgcactttaactcgttttggagtagtaaagaaaatgattagatttagcttatattaaaaaaatttatgtaattttttttaaactcaatgttcaatcaataaatatattttttatataattatattattattattattaattttttattttattttatttaaaaaacctttgtcaaattcgttgtcaaattcgtgttaaacggaacgtatcatatttcacccgtttttatttcgtgttaag

SEQ ID NO: 271099 - DNA, 1392 bp, Cannabis indica
tttgaaaaattaaaaaaaccgcatttatagattgatttgaaaaaatagtaaaaagcacaccacccgcatcgcgaataatccgaatagatacatctttctctaaaaaaaacatagatcacagtatttttttaaaaaattcaattatcaagattccaattgttgtgatgcaaattatcaaagaaaaaaaaataataaaagaaataacagaaaagaaaaagagaaaaaaaaatcgatgattcaatacccgaaagatgaccggttgcgatcctcgatcgattgggccccacccacccaagttccgatccaatacaaaattttattcattacttaacggggccgtcacaagccgtcacggccactcaaccctttcacggtactctgctaccgttaaatcatttctctctcaacattcttccaacgacgtcccactcccgtcttttcccctctccctaacgtcgtcgttccgcctcgctcccctaactctaaccctaaccctaacgtcgtccttctccctcctctaatggcgtcctgtgacgacgacttctctcctctcctcggtgacgaccccaaccccaacaacacaaccactgcccccaccaacccccaccacctctcccacctccaccagacctactccacggccccggttcaccggttctcgtcggcgagaccgacgcctaaccagacgatcctcaacgcccgtagccccgataaagttggcgccgaggaagagcaggacgatggtgaggattacggagaagcagcagcgttctgttcgaatccgttcgagaacgatagcgatcagaacggaggtagcgttgttgtgagcgagaagaggaaggaacgtcaccatcatcatcaccgcgacgaacagctgagcgatgggggtggatctggaggtccgtacagttataagaaagcgaagaccacttcggcttcgggcacttctggtggaggtggagagtacaggaaggatcgggaggagtggagtgacgcggcgattgcatgccttttggatgcgtacaccgacaaattcactcaggtggacaggggtcatctgagagggagggattgggaggaggtggcgaccattgtgagcgagcgatgtgagaggcaaaccaagagcgtggagcagtgtaagaacaaagttgataacttgaagaagcgttacaaattagagaggcagaggatgaacaatggaggcatttcaggaagccattggccttggttcaagaagatggagcagattgttgggaataacttgcccataaaggttgcatctgatgatgacaagggtgccagttcttctggcaatacgcctcgccaatcaaagaggtttcgaaacacttcgaattttcgcactcttttttgcttaaatcgatagcttttttt

SEQ ID NO: 271100 - DNA, 1470 bp, Cannabis indica
gatttgctactattctattgcatatacagagtcctctggtttgtttccttgcagcctagacattttactatgttatttgcatttttggcttgcaaattctgttcagctttattctatagaactgtgtattggctaataagtcttctagatgcaatacttattcactcttgacaatattgcagtctcgtttcgacatcttgaaaattcattcaaggagaatgaatttaatgcgtgggattgatctgcaaaaaattgcagaaaagatgaatggggcatctggtgcagagctgaaggtaaacttctctctccaaattcgtcaaatgcacatctactggtgtagaacatttccattaattctttaattacgggtctccaaccatacagtgtagttggtttaatactaaaattatacacattcgacacatgcaatgtctggttctgtctacaggctgtatgcacagaagcagggatgtttgctttgagggagagaagggttcatgtaacccaagaagactttgagatggcagtggccaaggttatgaagaaggatacagacaaaaacatgtcgttgcgcaagctatggaagtagttctttagctgaatattatgctgcaaggcaacaaggcaggcaagaagatttactcgcgcttaatacttttttcgtatgcaaagttctcaagccctccgactgtgctgaccttcgactttgtgcgtgtttattgttttcggagttggtaactgggtattttctttcacggtctgatctctgtggatggatttattaggggttatactttttatgaaatttaatggctcgagtgctttcatttcatgttctcacagattctatttctaagctcgaacatgacccattaaaattgtgaaaacctgattgaaccgaatcactgattgagataatggtccatcatgaattgtttcacttttcacacctttttcaatctcgaagaaatatatatgcttcattttagcgcttcaacattactagaccattaatttagtgtttatatttgtgttagatttgtacatgtttgtgtggtatgcatggatatatatttttttaaaatttatatgtatgcattttattaaaaaaataaatataattgtatgtgaaaatattaatagggttaaaacttgtttatgttatatgaattattttgaagagttctatttgcactctataaaataataaatatatctccaaataaaaaaaaaatataaatttaaataatttttataaattacttttaattttttcttaaaattattttcattactttatgttaatttcagtatttgttttaattttattttaatttttgtcataatatttaaaatataatttatttttatttgataggtatattttttaagaatatattttgaaagaaaaaaaaaaaattcaattcaattaaatatataaattttatataaaataaaaactattaaaat

SEQ ID NO: 271101 - DNA, 1098 bp, Cannabis indica
ttctaattcaacaacttaaatgccaaaatcattcatttaataattaaaattaattatgaaataaaattgtcatttaatatatttattaattagacttaagaaagtctcttaattaacaaataaatcgtagaatcttttttcttcaccattaagccctagcttagtgaaaattcattaataagacatagtctaatttttatagatgatttacaccgagtagggacaaatttaccgtttcacctctcaatgtattttgtccttaaaacacttagcttcttataaatgatatttcagtaaactaatataatcactgcaataagagctcttccatttatctctattaagccaagcttgaaggaaatcatcatttcacttctatgtccatatagaagctatagattccatatctatgattagcgctcccactcaattgtattgtcatgttcccaaattgtacgttcgacccgaaccaaaaggtaggctttaactaacagctcaaagaacacaaataacactcttgagatcgaacctaaccatgtcaggattgagatcttttgatctaagatcaaccagtgatattgacttcgaaagatacaacggtaagattataatatcttcaccaagatcaatatcgatcccagtccaatgtatactccatacatcagatactagcatactttgccaattttctggaaagaacataacacttatccaaggtgtaaataagctttatcgcttgctatcacatcagtgtaaatccagtgttctaatgaatcaagggacatagtcttttgaagcatataataacagttaccttccactatgttgacatcactgtaattgtgaataaccatatgttgcagacttaacagaaattgtatacattgaaccataaacatgaaaactatatgtaaacataaatgacttctaatcttctattgctaacaaatcagattatattgaaatgggttttatctagggcataaaatctgtaatacccagaattaaggaatggattagcaaaaccctaactagataattatgtataacagaggaattgtattattatatggttcaatatatgtgattttatatgaa

SEQ ID NO: 271102 - DNA, 846 bp, Cannabis indica
cttaattagaaaataatttccatatataaaatattctaatactgtaaacaactagcatttaatctcatgtatacatatatgtgaaatagaaacagatatcataaaaaaatagaaacaacataacctcaaaatagaaacaactagcatttaacctcatataacataaaaaatagaaacaacacacattgaaaatggaaacaactcaaattaaaaatagaaacaacataatctcgaaatagaaacaactggcatttaatctcatatatatacatatatgtaaatatcataataaatagaaacaactcacattgaaaatagaaacaagtcaaattaaaaatggaaacaatatcataaaatataaaaacaagtagaatttaactacaatgaaaacaaatgccataaaaatggaaacaaatagagtttaacttcatatatatgtgtgtaaaatggtaacaatttaatctcaaaatagaaacaacttgaatttaacatcatatatataagagaaatagaaacaaatataataaaaaatagaaacaacttacattgaaaatgaaaaacaacacaaattgaaaataaaaacattttaacctcaaaatgaaaactatagtttgaaatggataaaatattataaaaaatagaaacaacacaaatttaaaatagaaatattttaacgtcgaaatagaaactatagtttgaaataaaaatatcattaaaaaaaataaacaattaacattaaaaaggaaacaacacaaattaaaaatgaaaacgatttaacctcaaaatgtacataggaaataaaaataatttgaccgaacaaaatggagaaaaatggaaataaaaaaa

SEQ ID NO: 271103 - DNA, 619 bp, Cannabis indica
taacagatccgttaaacccatttcaaataccacgtgtcaaaatattattggtgggtgttattattttaattttaaaaaataaaaataaaaataaaaataaataaataatttcttttttctttttctttttttttttttttcttttctttcttttcttcttcgtctgcttcgtattcttcttcttcaacccaaccccaaccagtcacaaccggagcaccaccacgatcccaaccacaaccacatcccgactgctaactccggccagccctaaccccactccagcctcgatgttgtcaatcagccaccaaaaaccaacccaatataattttttaaaaataaaataaaaacctaaaattaaaaaaaccctaacttttaccaacattcattcattcatcatctatcaacaatggccgtctctctctcaaatcacgacatcgaccacaacgtcgaatagattccgctacctgactccggtggtgaggtcgtctctgaacatggcgctttctgtttctggcgaccaaaaaccattaacaagccaattatccgaatcgttcttgttcttcaatacacaagagcctctaccatcgtatttaaacataaaccctaaacaatcacgatt

SEQ ID NO: 271104 - DNA, 965 bp, Cannabis indica
tagactgagggcaccaccatgattactaggccaacctagggtataggcgagctaggctcgtgtttaaggcccacctaattcaggggctcaaaaatttacaattttttttttattaattttgaaaatgatacatttttctctaaataagaatctaaaaatgtttttttagcacactaaattttaggtccggccctaatgacaacatgaatcataggttttaggtgtgtaaattttggtactttgtggtattgtatggttaatccctcagctcaataaaaccaactgtgttaatcttggacaagagactagagtagagggaggagcaacactacttgtccaaaaagtccatatttccctttcatattttactttacttgttgtaaagaaatcactaacacaaagtaattatgtacattaattagtcagattgagataataaagtgtttgcaactgagtcacacaacttacaattacaatgacctattttcccctttatttaatattataaagcccacccagatttgatcattgttataatctaaaatccagttgaattattatttttaatttaattcaaaaaatagttataaacatagttttcttataaaattgatggtttaaactttatataaactactaacaattccaaagactaattaataaaaaaaaatactacctaaatatccctttgaacttttgagtttaattttgtaaatttgagtttttagtaaaaataaatttttttactagcaaaataattttatataatcgcaaaaattaccataaattacataaacaaccatcaatttcttataaaattgagattaattggtgataaaatttcaaaattaatacaataataactcataatatctaatatattaaatttgcaaaagaaaaaaaaaaaaaacaaatatttcacgaaaaaaaaaaaaatagaagataaatgtaaaaaattaaaacat

SEQ ID NO: 271105 - DNA, 888 bp, Cannabis indica
ataatatcttttagtacgtattaaagaaatgctagagggaccaaatatctacaatcaaattattattgaatattatttttgaaataaaaggatgttgttttcacgttgcggaaatattgtataatgttgcggtaatatgaaattaattgttttaaaaatataaaaagaaataataaaaaagtctgtaaaaatataaaataaatgcaatttaaatactttatataaattttcttattttaatttaataatacagtaatttgcggcataaatacttactgttaagtgttaagtaaattgtcacgtgacaatttttgattggtcaaagtcattaaagttttatttaaaaaagagaaatttgtggtataaatacctaagtttaactctcagctgcaaataaatacctaagtttaatttttggcggtaataatacctaagttatatttttagaactctgtaggtacctaaccgttaaaatattatgtcattatccactatattttaattaattttttaaagaaataaaaatttaatgatttggaccaattatgaattgccacgtgtcaatttacttaacaattaacaatcaggtacctaaaaaagttctagaattataacttaggcattattaccgccaaaaattaaacttaggtatttatttgcaattgggagttaaacttaggtatttataccacaaattactctttaaaaaataatatatactaataagaaaataacaagtatataatgacttaatatttaacggttaggtacttgctaaaaattaaacttaagtatttatttgtaagtgaaagttaaatttaagtatttatgccacaaattactcttaaagataactatattattaaaaaaatcaatattaacaaaaag

SEQ ID NO: 271106 - DNA, 1163 bp, Cannabis indica
ttataaaaatataaaaaaccgaccgttttaatccacggtttggtcggtttaaaccgaccaaaccgaacttcatttaaaaaaaaaattaaattttttataattatttgaaaactaaaaaattaaagtattgtatcaaatatcatataatttaaaaataaaactttcttagttaaataaataatgtaaaataaatttttttaaatttgttcaaattatttgtgctactaatatggtaatgagttatattaaaaaactagtattattttatgaatgtgtgtatataatacgtaaatgcatcaaattataataaaataaaataatgaataattgagactttaaataaaaaagatataagtaaacttagattaataaaattgtatattaaatatgtacaaaaataatatatattacatataatatatatgttcggtcggttctcggtttaatcggtcggtttgcgattgacactaaaaccgaccatgttaaggcggtttaaccgaaggcggttttttcggttttcggttttttcggtgtcggttttttggtgttcggacggtcggtttactcggtttggtcggtttcttggattttttgctcacccctaccaagaactacgaccgaccactcgcctttttcaatggcgtacggttgtgaagcaatggtcccggtagaaacgttattcccgtcccacaggagaacgacttatgatccagctacaaaccaagttttattataggaagcgctggatcagcttgaagagctccgagatgagtcgcaaatacgaatggcagcttatcaaaagaaggtgactaaatattttaactccaaagttaaaaacagaaaattcactattgggcatatggtcttaacaagagtcttcccagccacccaagaacttggagtgggggtacttgggcaaaattgggaagggtcatatgaaatcgaggatgaaattgactcgggaacctataagctaaaaaggatggatggaaccattgtgccaagggcctggaacgccgatcacctctagaagtattaccaatagtccaaatatgttaacttaggctttgtttaaaggatttgtaccgtctaagtgtatgcaacctctaaattttaaataaaactgagtgccttaaaaacaaagttttcatgccattcagggg

SEQ ID NO: 271107 - DNA, 1519 bp, Cannabis indica
gctgtcgaactgcttgccattacggtagtccgaaccgacagattatgttcttcacaatgaagtcttgaactttctttgatgtaatggttgcgagtggttcggcttccgtccacttagtgaagtaatcaaccgctaccactgcatactgcactcctcctttgcctttgggtaatttttcaatcaagtcaattcccccatattgaaaagggctacggactctgcatctgagttaactcgttaggtggagctcaaggtatctttgaaaatctcttgcatttgtcatatttcttaacataggcttttgaatcttcaatcatcgttggccagaagtaaccttgccttagaattttcttagtataaactttgcccagcagcatgatttccacaaaatctgtcgttcacttcagataatagtcgtgcagtcttcttcttgagtatgatatattgtgcagccttccttctcatttttcgagcttcattcctattatctagaagtttcccagagtcaaggtaggctactattggtgtcatctactttggggaagtatcaatcattttgatttcttccgtgccagtgatgctaggctcttcgaggaactggataggaaccaagtttgccttatcacttacattgcttcttaccaatcgagctaacgtgtctacagttgtgttttcttcccttcgaatttgtctgagaccgtaccttttgaattgtgcaagcagatcatgtattttgctcagatatgctatcatcttttctccccgaggctcgtattctctggatacatgatttaccaccagttgtgaatcactgcagatttcaatgtgttcgactttcatctcccggactagttttaggccagcaattaaagcttcatactcgacttcgttactagatgctttaaatccaaacttgactgcagcgtgcaggtgtttccccccaggcgtgacaagggcaattcctgcaccagatagctgatctgtagctgacccatctacatgtagtttccaggtcggcttatcttcactgttacttggctgaggtgtttgcaccagctcggggttgctttctaggctttctttcttgcttgtgcattcttccacaaagtcttttaaggcttgccctttgattgctattcggggttagaaagtaatttcgtattggcccaactccaccgcccacttgagtagccgtccaaaggcatctggcttttgcaatatttggcgtaatggttgatcagtgtacacccgaatagtatgagcttgaaaataaggccttaactttcttgttgctagaataaggcagtaagcgagtttctctatcaatgggtatcatccttaggcctcaatgagtattttactgatgtaatagactgggttttgtatgttgttctcttctctgattagcatggcacttacagcatgttccgtgacagctaagtatattccaagttcttctccgtccaaaggttttgagagtacgggaggttttgcaagctctgcttttagctcttggaaa

SEQ ID NO: 271108 - DNA, 739 bp, Cannabis indica
tttgtcacaagcaaacactattgccagcatttctttctctgtagtggcgtaatttaattgagcatcattcagagttctactagcatagtagattgtgtggaatactctgtcaactctctgacccaaaaccgctccaatggcatagtcacttgcgtcacacatcaattcaaacggcaattcccaatttggtgaagttactatcggtgctgtaatcaatctctcctttaaaatcttgaaagcttttaaacaatcttctccaaactcaaatggaactccatttacaagtaagctagataaaggttttgagattttggagaagtccttgataaatctgcggtagaagccagcatgtcctaggaaactcctcactccttttacagaaactggaggtggcaaattttctattgttgaaacctttgccttatccacctcaattcctgcctttgaaattttgtgcccaagaacaattccttctgttaccataaagtggcacttctcccagtttaacaccaagttagacttctcgcaccttgttagtactttttccagattttccaaacaatgatcaaaggaagaaccaaacactgaaaaatcatccataaaaatttcaatacaagattcaatcaaaactgaaaaaatagccatcatacacctttgaaaagtagcaggggcgttgcacaagccaaagggcattcttctgaaagcaaaggtaccataaggacatgtgaagtagtcttct

SEQ ID NO: 271109 - DNA, 877 bp, Cannabis indica
tttttgaatcatgtgttttagagaatgataaatccatctggattcttgattctggatctacaaaccatgtcagttgttcattgcaattgcttgaaaactggaattatttgaaatctggagagttgaaacttaaagttggtaatggcgaaatggtatcggttagagctagaggaaaagccaaactcaagtttcaaaacagaattttggaattagacaatgtcttattcattccaaatttcagtagaaacttgatttctgtttcatgcttacaattgcaacaatacaaattagatttttcgagttctggttctaccatttctcgaaatgacattcaaatttgtgttgcatccatggaacaggggctttatgttctaagaccagaagaaccatttgcgcttcataacgaactgtttaaagtagctaaacctagaaaccacaaaaagcaaaagatcgataatgaagacgaaacatatctatggcacttacgtcttggtcatataggctatgatagacttcacaggttaaccaaaggtggtccattgaaaaatgtcaccttaggtgaattaccagtttgtgaatcttgcctagaaggcaaaatgacaaaacgttctttctctgcaaagggagagcgtgccaaggaaccactaggcatagtacattcagatctttgtggaccactgaatgtcaaagctagaggtggttatgagtactttgtcactttcattgacgattactctagatatggtcacatttaccttatgcataagaaatctgaaacgtttgaaaagtttcaggaatttctagcattggctcaaaaccaattgggtaaaaccttaaagatcttgcgaactgataggggtggagaatatatggatat

SEQ ID NO: 271110 - DNA, 557 bp, Cannabis indica
aggactgcttgaagtctgtcttattccccatgatgctttcacccttcgatcttttcgagcaaagtcattacttgaatttttatgcaacttcaaaattgtctaagaatttcatattcagagatactattgtaagatctctaagaaaagggattattttccttgttcttaagtcaatacaaactaagaggattaggctattatcgaactgctcggggctgaacctctataaaattctcgtgtctttatttactttattatattacacacacattatactacttgtcacttacaatttagactcactgtcgttggccaaaagcgaggtcaacacgaaccttaaatcctcaaagaatcaattaaaggtggctctgataccacttgttagtttctttatcactcataaaatatgcaataacaatattcaattttatagataaacatattacatataattataagtgtataaccatagatctaaagaatacctttgttgattcaaagagaagaagccaaatagcagaaccgtaccttaatccatatatagtgatgatcttaat

SEQ ID NO: 271111 - DNA, 2206 bp, Cannabis indica
gtctgggagccatactaaaaaaactaaaaactaaaaaaatgttaaatgtcaaaaaattttaaaaaaatggtcgacaaaatatcgacatcctgtcgatattctgtcgacattatcaaacagtaagcaagaacataatttgttcgacagcatatcgacataccatcgatatgctgtcgacattccaataaaatcaacccaacacaacatcacacaatattatcgacattgtgtcgacatggagtcgatatatcacatagaaattaacagcataaagtgtcgataacatatcgacatacaatcgacatgctgtcgacaacaaattaaaacaatgaatttacattgtgtcgacaacgtatcgacatatggtcgacaaaatgaatttaaacactaaatccagttcaaaaaaatttcactcaacatctgtcgacattctatcgacacactatcgacatcctatcgatacactttaacacacagaaatttctaaaggtcattttgtcgatatcctatcgatatctcatcgataacattgttttaacattgttttttggccgtggatcgtcgtggatcaatgtggaactgtgtgggtcgtcgtgggtggttcggtcgcgtcgtgggggtgagtcgtcgtcctcggttgcgtctgtgggtttagtcgtggggtgggtttagtcgtcgtcgtggggtcgcgtctgtgggtgggtcgtcgtcgtcgacgtctgggtttagtcgtgggggtgggtcggttgagatattggtgtggtgtggggggtgggtcggttgacagagaggaagaagagagaaggacgaagagagagagtgagaagagtaagagttaaggagggaaaattaaaataaaagggtattttgggtagttttggaaaataatggaattaatttgtataaattagtggagggtataaattttgaaatgaggtattttattagggtcaattaatgaaatttccctatagaatttcccaatatttatttatttattcagcccatatttatataagaaaagaaattttgggagagaaggagcgagaaaaaggagagggaaattggtgtcaagaaacaacacaacacaacacaacgtcgcaacccaatcatggaagatgatcaaggatcaaccccaaatccaaatccaaatccaaatcctaaccccaattctaaccctaaccctactcctaatcggagcagcagagcaggaggaggatccatgggaaagtcatgcaaaggatgcctctactactcatctcttcagaaagccaaatccaacaaccccacttgcattgggttctccactactcttcaaaaaggtcaccttcttttcttctcttctcttctcttatttatgtataaagctattatgaaataaaatggatagatggacaattcttttagggcttggattaatggtttgttttacttttagtgctaatagttgttgggtttgtattgaaattttgatttgactagtataatttaggtgggtgtttttttaatcattaaaagattctgtaatttagtgctatttcttgttgggtttgtaaagatttcttttttttttcgtgttaaagaataaataaaatgtaggactgtatcatatgtataaatagtaatgaaggttgaaagtagataaagaaaccatttaaatcctaaaaattatgagtaattggcatgaaagtagattcttttttttttaatataagtttgcaaagtaacattcttttgataatttttttttgcacaatagttataatggtactaggatgtgttttcgacacattttatcaaggttaggttgcaaagaattgtctaaagaatttcatgttgcaaatagtcattttaaaaaaaaaagtctatgttgacaaacacctaagactatatttggtgggaaggagggagagtttaggaaggatggagaggatagtatctctcctttgtattgtttggtattaggagaaaggttggaaggatggagaggaaattagttggtatattcattttgtcttttttcttaaatcattccaaaagtggaggaattacattttcgggatttggagggaaaaggtctccctccctttctccctcctaccaaaacaatggattccaccaatcccttttactctcaccctccaccccaatccatccacccagctctcctagattattggttaagtgaattgttgtaagttcagat

SEQ ID NO: 271112 - DNA, 781 bp, Cannabis indica
gtcgcagttgacaatggctcaccaatcaaccaggacctcatcagcaactttcaatcagatccggttcatggagccatcgaagtatgtgcacagctgagacccaccgtggacatttctgtcccggaaaatgcagactttgtgaggccagagttgcgttgaaggtgaagccaacctcctttattgtggcagttgaatcaatcataaattatagtgaggcgttatttagaatctgaaagagttgagttggccagctatggctattagttgcatgtgtttagcatggtaatgttatgttctgtgtttctttcttaaataagaccaagtgaacttaatgttttagtagttttgagatgacattgagtagtagtaattataataacgatgattttatccttatctttgtttgtgtttgtgttagtataatatttgagtagtaactttataaatctgtatcagcggagattttcagattagactgaatttatatatgttataaatgtatcatgtaggctgaataagtgattttctaatgttatctatatacaatttgcgtggaagccattgaatttgaatttgtggtgaggttttttctgctattatattggatcctgaaccacgtgtcaaatgacttggcgcacataaattgaacattcattaaaataattatatataaagaatacaacattaaaatcgagcaatgcaaacaaaattttgagttataagtcgaacataacaaaaattcaaaattaaagttcttatgctttcaaaaaataataataat

SEQ ID NO: 271113 - DNA, 744 bp, Cannabis indica
aaataatttccaacataaagttgattccacgtgttagcatcgtgtgttgccacgtcagagtgcaaaaattgggataacacttgggatatttgtaatcataagtaaactccttgtcagttaggagatccacagacctcaggttgacctcgtttagaagaaagtcgtaggacctaagaccgtatgggagagtcagcaagagcctgtgtcgctcgaccatcccaggagtaggagcaagtcttttcgagacagctgtgaaaaataaagcaaaattacaatcagttatactcgaataaaaggcatggattaattaaaccaagtcttgtgcaaataataacttatgaattatacggaaagtggttgtgccaattggggagcggcttgtcgtccaaaagaaatcatccttaaaggaagttttattcggcaaatccttaataatcttacaatcaacggtgtgaatcccaagatagtagaaacccctgctgcattcttcctcgctggaacagccttgacagagtagagatactcaatttccatgggagtggggcactcccaattcaagattttgtacagaaccctcaaacttacaaggattctatgtgaaatgagattcaattagaatagggcaagcccgaggatgttaaggaagtccttgaaataatctcgcaagggatttattgttgtagccctgatgtgttcaaggctccaggcgccaatcccagtgaagccacttgtactggtctcgcc

SEQ ID NO: 271114 - DNA, 3775 bp, Cannabis indica
ttctcaaccttgcattttgcgttgacaaaattctactttttactttgtttttattttctttttatgtttcttctttcaaattcaataaagacttcttgtgttgtgttgtatcctaatcgttctagattcacattttcaacattatttattattaaagcttctttgttattgggttagtcagactaaccaatcccatttgcatacatggtcaagccaaccatctaatctacactactatagttctatctcacgttcttttactcattcaatttttcatttataatcatttttcattattgccaatttcaatcctaatcttcactcttttgcccatctacctggttttcttttctcatttcattcatccccagaaaaagaaaaatcttgaatagttattattgcaggagtttgatttgtctattttttttttttcttagtttaatctgtgtattgtaagaaacatggctcattctatatatgctggatcaatgtcgtttggaggctcaagtcatgggcaaggtcaacaagaattgccgtttaagaccagcaaggattccttgagagttatgctcttacatgggaacttggatatttggattatggaggccaagaatcttcctaacatggacatgtttcacaagactctaggggacatgtttggaagactcggaaagctatcgaccaaaattgaaggccatgtgtccagcaaggtaacaagtgatccttatgtgactgtttccgtatcaggagctgtggttgggagaacttttgtgataaccaattccgaaaaccctgtttggaatcaacattttaacatccctgtagctcataaagcagctgaagttcactttgtggtgaaggataatgatgttgtggggtcacagttgataggagctgtgggaatcccagttgagcaattatactcaggtgttagaattgaaggtgtttttcctattcttagtgacagtgggaaaccctgcaagcctggagctgttttgactctttcaattcagtacacgccaatggagaatgtgagcctttatcgaggtggtttggggtcaagtcctgagaatcttggtgttcctggaacttattttcctccaaggaaaggtgggaaagttaccctttatcaggatgcacatgaacaagattgtggtcttcctaattttgagcttgatagagggattcggtatgagcattcgagttgttggggtgatatctttaatgcaattagtcaggctcggcgtttggtttacattgttggatggtctgtggttcacaaagttactctggttcgaaacaatgataatggagcaggaagcatgttaggggagcttctcaaagccaagtcacaggaaggtgtgagagttctgctccttgtttgggatgatccaacttctaggaccatattgggttttaggaaggtaatccttctatataagttataatgttaatgctaattttcttttgcatactgatatgttcattggtttttatgacatttaggatggagtcatgggaacctgtgatgaagatactcgccggttcttcaagcactcttctgtccaagtcttgctttgccctcgttctgctgcgaaaggacatagctggataaaaaagcaggtgatgaatttatagaagaattaatgaacaaagtttttctttttttgaaaaggcattattagtcatgttctgaacaaagtgtttgtttggcttttgaaatctcttgttatcaggaagtaggagcaatctacactcatcatcagaaaacagtaattgtagatgctgatgcaggtaattacagaagaaagattgttgcttttgttggaggacttgatcttagcacaggccgctatgatactccacaccatcaccttttccggactttgaagactgtgcactctgatgactttcataaccccaatttcgcggtaattctgcagaagagaaaggcattacgttgtttaagagtttgtttttttagattaaggacattgaatcctcttaccatttttgcattgtaatctcaaaacaggagcctggtgttggttgtccaagggaaccttggcatgatctgcattgccaaattgatggccctgcagcatatgatatcctaaccaatttcgaggagcgttggttgagagcttcaaagcatagtaaactttcactaaaatcatcatatgatgatcagctacttagatttgaaagaattcctgagtttgtttcaatggaagaagtttctagccaaagccaaaagaatccagaatcttggaatgtccaggtatatattaatattggtaaaaatcttttcatgccattgatttcattcattcctgtgctaactgttctaattatcttctcaacaaatgaagatttttcgttccatcgattctacttcagtcaaaggatttccaagtgatccaaaagaagccactaacaaggtgagatataaatttgacaagattaatttggatacctatttcagctatgtaaatatatggtcaaccaatatgttttcttcactcttaacagaatttggtatgtgggaagaatttgctgatagacatgagtatacacacagcctatgtcaaggcaattcgttctgcccaacatttcatttacatagagaatcaatacttccttggctcatcatacaattggaattccaacaaagacttgggtaagaaactttgcatattaatagacttgtgttgtgcccctttagttgtcatgaaaggacatgagttttataagtggttgtttaattgcaggtgcaaacaatttgataccaatagagattgctcttaaaattgttaacaaaatcaaagcaaacgagcgatttgctgcatacattgtagtcccaatgtggccagaaggtgcgcctacaagcatccctgttcaacgaattctgttttggcaggtaataatcatttggtttagaacaatatgatccaactacttggctaaatatctatctatttacatagttttttttttaaccttgattgctccagcgtaaaacaatggaaatgatgtatgaaatgatctatgaggccttaaaagaagttggactagagaacacatatgagccacaggactatttgaacttcttttgtttaggcaaccgtgaggccccagatgatactaatactagtactgctattatgggagctacaagtgcagaaaaaactcctcaagtactacacttttcatcctaaactactgtttgtctcatcttctaatcaattccaatttacttaaaaacattcttctttgtttttttggtgattaactcaggcacttagtcgaaaaaatcgccggttcatgatttatgtgcattcaaaaggaatgatagttgatgatgagtatgtgcttatgggatctgcaaatatcaatcaaagatctttggaaggaaccagagacactgaaatagcaatgggtgcatatcagcctcttcatacttggtctaagaaaggctcaagtccacatggacaggtaaagcttttgatcataaaaagctaaaatctttcactctttttattcattatgtcaaaaaaattatcatgagattcactctcatgaatcttaagatgctatctgagtccaataaatcaaataataataataataataataataataataataataagggtaaatactattttggaccttctgttttacaaaagttactaattggaccctgtgttttgttaaatgacaaaatggaccctgtattttttaaaatagtacaaataggaccctgaattgattt

SEQ ID NO: 271115 - DNA, 778 bp, Cannabis indica
aaaaaaaattcagaattttccacagaagccgagatagatagctttatggatactcctccagaagcagcaaaagtagattctgatgcagcataactcaattctgacgatgcaaatgacgaatctgccgctgcaactgatacaagagaaccagataagaaaagaaaagtaacataactaaatgatactgtaaccctaaagtttaattgcacaaaagaaaaaggcgaatcggggaagatataaaagcgatatgtgagcgagcttaccatgttggagtatctaaatttgggggattagggttctgagagatggaaatttggtgtgttgccttccttaactaatttgggtttacttttgttcgttgttctctccttgcggtggtcagagccagattcccttataatgagttgagtgcctttctttcttatggtgcgtttactaaactataattggaatcagaataatcaatgagagaaatgtatcggtataaaatagaaaacaatcgaaaacaatattttattatactgtttactaaactatctggaaagaaaactagaataatattattttgtttacataactaggaaaggtaatcagaatgctttaatttgaaaaaattatcattataagaacatgtaatttttttcggtttatagatttttaaagggcatatatatagcagagacgtaaagctgtgacatggtactttaaaatttctttgaagctatttgtttctctctttaattttcttattttttttaattttaatttatataaaatt

SEQ ID NO: 271116 - DNA, 726 bp, Cannabis indica
catatatgcttctgtcaatctctataagccttacaagccttacacatcttattcaacttttggtgattcatatttttagattttttactccaacctacatcaatatataaaattgtcaataacaatttaatcaagtatataataaaaaaaatagaaatggaatgaatcaagtgtaataaaataaaaaaatataaaataaattttatcaatataccatactaaaaatacttggtctatatttcaatgttagtatgaaccctacatcaacataaaaatacttacctcaacattccattaatcaatgacaacattgatgttgattcttgagtactgtcatgaacaaaaaaaaaaaaaaacaaaaattaaaaatttgtgataatcaaacttacaggaaaaaaaaaattaaaaattagaaatatagtagtataaaaaaaaagagaagtatgatgataatgaaaagtgagaaagatctatttatatagagcacataaattacaaaaaaataataagatctcatagacatagcaaatgtcacataattaaattagaaaagaaatgaaaagtctttatagttagtgaattaattattaaaaattgaataagacgataacaaagttcacatatcaaattggaagagaaaagaaaagtctatgtagttaatcaattaattattattgttactaattattttttcaaagaaaagtaataaactaatttaattagaga

SEQ ID NO: 271117 - DNA, 799 bp, Cannabis indica
actctcaatcagaagaggagcatgagcaacatctccggatggttctacaacggctttgagaacataagttgtatgccaaattcaagaagtgtgagttttggctatctcaggtgtcctttcttagacacattgttagcaaagatgggatcaaagtggattcgggaaagatagaatccgtcaggatttgccgagactggaaacagttacataagttagaagtttcttgggtctggctggttattaccgtcagtttgtagaagggttctctaaaatttcaacacccttaatcgagctcactaaaaagaatcagcggtttgtgtggacagataagtgtgaagcaagctttcaggaactaaaatagagattaatcacaactccagtgttagccctaccttctgataaagaaaagttcatggtttattgtgatgcatccaaacagggtctggggtgtgtactgatgcaggtcgatcaagttattgcctatgcctctcaccagttgaaagaatatgaacatcgatacccgactcatgacctagaacttgccgcagtagtgtttgctttgaagatttggcggcattatctctacagagagaaatgtaaaatttatactgaccacaagagcctcaaatacttctttactcagaaagacttgaatatgagacaaaggcgttggttagaattggttaaggattatgactgtgaaatcatttaccatcataggaaggccaatgtagtggtcgatgccttgagcaggaagggtcccaggcaggtaactcgtatgattcagatttcacctcag

SEQ ID NO: 271118 - DNA, 9189 bp, Cannabis indica
aattattaatttttttctcatcttgtattggaatgatattttttttcatttcaaaatatattagtcattccaccaaaatgatgaagaagtcattccattaaaaggacattctatgactttaaaatgcaaccaaacaaaggaatagaatgaaaattgtttttttccattgtattttattaccaccaactaaacgtcactttcttgcaaaccatattgtttagtttacagacccttttgtcttgcagctattcttatgtagagtttccttttcttctttcaactaagaaaatttcaacagagaatttctatcatatttgttttctagtgcacctttagaagttgggaacagggaaaatggtcccgttgcttagtgagtataaacaagttgtgtggatcgatgtgtaataatctgtgatgattactcatattcgatagcccagttgcacttgcatttgactttccatggagttaaaaggagttctctatattattatatacgttacttaattcattggctctattaactgtacgcatccttaaccatcggtcctcaacttttctttgtatctttacagaactactcttcaattgtctcgcttcatccagaaatcattgatggaagaccagggactttggtgatagaatcatttgtggtggatgttcccgaaggcaacacgaaagatgaaacctgctattttgtagaagccttgattaaatgcaatctcaaatcacttgctgatgtctcagagcggcgtgcagtgcgcgacaggactgaacctattgatcggatgtgagagtttggaactggggaccaaagtttcaacctaccttagactgcatggatgaagctttcgaggctttcgcatctcggatgctctggagacggacatgcagtagtattttccgacataggccatgcagtagtatatatctcttatacatgatcgttcctgattataatcaagataaaactctctcaaagatgggaatgtgttttcaaaatcatcaagaatcaaccctcccattcgccataacttaaatcccaaacctttagaatatttattggtagaaactgtcaggttttttagaagatcttacagtgttatggcaagtgttttaggttggtaatgttacctatgtattttggtaccccatttcccaaatcattacctcagtagtcaaaatgttcaatagatttcttttgtatccaaaagaaccatttatgatgttatttgtgagacatcctattaagatttatgctagaatttaataagcaagtagttgttgtagatgtatattattgagtttattttaagaggttccttcctaatcttttctataaaattgacacacaggcttcaaacttcattttgtaactatctcacaattgagtttttgtgattatttgatatgtaatatagtttggtttcatgagacttatgtgatatttttgtaaaagtatatggggacttgtgtgatgtctatggaaaatgtttatgtgataaggtagtaatattgttggaaaagatgaggaacttttatgaatatatgtttctttattttgaaaattttaatttttgtaatacatttttttaataaaaaagagaatgctacaagaatctaaggtaattggttcaattaagcatttaatttaataattaatatgagaaattactatttataaagtgtcacttcatagtactatgctctttcaaaaacaaataacaaaaaattaactagttgctatacttctcttaaaaaattattatgctcattcaaaaattaataatgaaaaaaatttaatccaaataataacatattgttataatacttatgaaataaaatgctattaatagtaagactaaatttactaaatttatttgaaagaaagaccaatcttatgattgattggaggattcttgtctctattagtgcatgagtctccattgttagagcaagagaaaatatccggagacataaatacacttggaatgacagaaatagtgaataatgtcccaaagaaaaaacaaaccaaagaaagaatataacaccaaagcctcagtctttttaacaaagcatacaaaggagaaaataatgaaaggaccaactaactccaataacacaaaattcacagaggaaattacactatatttttcatttcttattttaatttttttacctcttttattactctttaatttatacttagttttataggtcatatccttattatgtgcattagagattctaattttaataagttatgtgaggttatatttaatactttgattatgtagttattacttaattaatgtgtaacaaaaaatgatatttctcaacgtattccaaatttatatttaaagtagtcaatacgcatgttctaacttcaaatggtgtagcctcttaggtgtggagaacacataacaagtcacatcaataaactctttggactaataatgttaggattttcatgaaaatttctcttaatattaaattatgtactagacaatatgtttcatattagatctaaagttaagcaatatctttcatatttagaatattaaagaaatctaaatgggacaacgcacgaactcactaataagtttctagcatggaattgtaatttttaaaacattctctcttagtgatttcattagagctattgcaaagagagtggtgaggtacgggaaaggaaaatcgacagcagttcaggcaatcaagaagcaagaaggatgagatggatgaattagaagcaaactctgtatttgaaggggagcaagttccattaacgccaagaccagtgatgaaacaagtgcagcaagaagaacataaggtgagaatagaatttgtgagctgttgccaagaagagacgtgaatctcaactcaagtcatgtaactgtttttctccctcaatcttaagatctggaaatgtcattcaacgtttaagggctaagtttggtgaattagaagctaaggaagggaaaaaggagtatggggttaaaattgatatggatgacatagcagatgaaatattgttctggaaatcaatattggtttgttatgttgtaggggctaatccacctctcaatgtctttgagggttgtgctaaaagaatttggaaaagataaaaacatagacaaggttggattactagctcatggtgtgtttatagttcgatttcaagctattggatgaaatggagttatacatttttcgaaaaaaaaacactttgggatgcctatattgatttctctaaagaggatgttcaattatgttcgtacttagattcagattcataatttagatatgaaatactagtgagagtgttccttattcaattttcgtagggcagattagtgctcctctgatgttagatcagataacaaaggataaataggttgacttttgctcaagttatggtggaagtgcaactattccaagaatttcctgaagaaatttctttcactaatgaaatccatcaagaggtaacaattcaggtgaagtatgaatggctcttcattgtttatggcaattgtaatgaaatggggcataatttaactatttgctgaaaaaaagaagaagtaaagaaggtgtgggttcgtaaaaaatcggacacgggtaaagcaccaatagtagaagaggcagagaaagatgagttgggttttcaacgagtcaagaattgatgaatgtggcttgaacatagatgaaatttaatgaaattactaatactttttaaattcttgaatatcatggagagttttctagggtggcctaggatggtatagtttttataggagacaatacagaaggagggggagtaccttctaaatatcatggatagaatcttaagttggaatgttaggtgtctcaacagtcacaataaacaactaaaagtcaagaatttgatatacaaattaaaagtgaatttagttgggctccttgaaacgagagtgaaggttaagaatgtggggtaagtttatgtgaatatgtttaatgattggtatttcttaacaaataattcttggcaccaagagaataatgattagttggaatctgactatgttctcaatcaatattttacagtgctcgagtcaatttatgcatcttcaagtatgtccattgggacataaggattattttgatatcacattttttatgctttgaataatgaagctaggagaagtttaatgtggcaggacttaacaaaagtacctttaagaatagtagagccacggttaattttaggtgattttaatgatattttgaagccagaagaaagaattggaaggtcagtcaaacttagtaggtctattgcttttatagaatgtgtgggaaagtttaaagtagaggatgtcaaatttttggattctttgcataccaagaataataaacgggggtgaaagatcatattcactctaaaattgatctggtcatggcaaatcaagcttggcaagtgtaattcgagagtgttgaggtagttttgttagctaaaggaaatttaatcaatgctctgtagtgtgacaatctatccataattacaagttgggaagatgcacctagaagagtatcaggcaactaaattcaaggagcccataaacttaaccaattatttattaggaactaagatggatgattgaaaaccaattatttgaagattaataactcatggatcaatactatcagcgagtaggaaaggtgaattttaaaaagaatttaccccataagaggttaaatatgcactattcagtatccctaaaagtaggtctccaagtcctgagtgctatagcagttacttcttctaggataattggtcttaatccaaaaaattagcaaggctaatttctcataagtacttgatctagttcgaagtcaactatgctgtgcagatcccgtagtagttgactatgtctcagaagtacgagtgaagagacaagatagccccctgctcaactgggactagaccataccatccaattcttaaaaagggcatgggccaggtattcttcacctggaaggtcagtgtcaagacttcgaccaactttttggcctcgaggttcttgaacctttcaggagttagtgtagatgggggagacactcaagcaacctctagctcgcctctttggggcaaaggctctgggttgtcagttcctcctcaacatgaccagtccctgcacgggatggcatcccatctttcttcagaggctccctaccctcattataccccctaaggggttgtctatgagcacgtcacagtctctgactaacctttgggcaagttatgctctttctttaggcttagcatgctagggtaaaaacacctcttataggccagccatggttcgtaatagatttaaagttacatattctacaaaaataaaccatgaaaccctggttctttgtgttcttcaagactcataatccaaaaatataagaaatagagccaagattcaacctttttttttaggtaaaatccctacattcatctatcctaacacacccgtgcaaccattgaggatgagttttctaaagttcacgatagggaggttctttcacctccaacaatggtgtcaaattaaaaacaaaagaacttttaaagagaaagaagggtttcgaaggaacttaatcactaggtagatcctaggcgaggcctgcatttatgggggagtgcaaccatcaacacgatctcccataaagcatgatttgtaactgccataatgagaactaacacctaatggtcagttgaagagactgacgtgtgatcattcacttctacatggaacaattgcaagaataccaaccatgtggagctcgcatgcctaccagtatttgtacaggtatcaaaaatccccatctaggcagacgtttgtagcgatataggcctacatcttgctctaattgcaacctgaatatgcatccataaagtttaggatctcatgaccaacagtggtatccacaagatggtcgatcctcggaagtgggaaataatttcttggacatgccttattgaggttagtgaaatcgatgcaaactcgccatttgttgtttggcttggacaccagtacgagtttaaaacccaaataggataaatgccttggtgatgaagttatttacgcataactttttgacttcatctttcaatgcttactctcgctctttattcagtagccttcatttttgttgtagaggatgaaagtttggatctgtactgagagtgagagaaattactgatggttcgattcccaccatgtctttctgcgactaagcaaaaatgtcgaggtttgcccttagaaatttgatcaatttggattttatttcttgcgctaagcctcgaccaattttgagtttcttggccggcatggaggaatcaatctctaattcatctaattcctctacaagtctaaagctgtgcacaggattcccaaagcgaggatctatgtttgtctcctcgccttgggcgaaccttcaatgcccttggtcggactcactgtttgagctcttggcaggtaggtcttcattttttgctttggacagagtgatattataacattgttgggtagactattggtctctacttaggcactctacaccatgtttggttggaaacttgatgcacaagtgataaactgaagtgactgctctcaggtcatacagagctagccgccctatcatcacgttgaatgcatatgccacatcaataatgctgaattgggtcatgactatcttttgtgcggaactttcactattgtcagtggcaatcagatgtactctaaagagccagtccttagcttgagaactcatacatgaactgtgtatagggtgttaggtctttcagattaagcctcatctttttgtacacagtcttaaagatggtgttggaggaggccccatcatccatcatgcagcatggtgccatcatattccctatttgagtagtaggggccattgtgaggaaattcgacatgggctgcatcttcttcagtgaaggtgatggcgggatcttctaactttagatgcttgggacttctttcctctgcaggtaggacttcatttctttgctcatgacaaagaggtcgagcatattggtccaatgctttgtttgagtccccaacaatgtggggtccaccgatgatgacttgtaaatggccagcagttggtgagggcaacaagttgttattttgctgaacctgtgtttggttttggtcaacttgaacataccgatgtaggtgaggattgctcattcatatcaggaactcgatctcttcctcaagttattacactcattattgtcgtggctgaaatctttatagaatcgacagaacttggttggatccctattactaatgtattttttcatcgaagggggcttcttatatagaatcatgatttgtgtagccatttggatggcatcagggttgtctgttaggatggagaagcatgtgaacttctcctccttttcccgagggtgttgctgtgtaaggagattatggaatttcccgttctttccatttccttggccgaaactattattgttttgtttccctccatattgttttgttttcctccattatttttgttcgcttggaactgggcggtattactggacccaagtgtggcaggtgtgttgctgggagtagttgttttatgtccgccaatttgtacatgccaaacatcttcttcaagttttataaaatcgtcagccaggtctaaaaactctctcatatttttggttgatcttttcctaaggtccctccaaaggtcactcaaaggtaggatacctcttagtatggctatatattgcccttcttccgtcaggcctttaacctttgtggcctcgatcatgaacttttagatgtagtctttcaaaggctcccttgacctttgttttattttaactaaatcatccagttgggacggtatttgtttagaggatgaaaattgcgtgtaaaactcagtagtgaatgtgtcccaagaattaaaccttcttgagggtagtttgaagtaccactattgtatagtttcagatagcgttgactggaaaaaatcctacagtgggtatcatctatcatatttcgcaaatccattcggatctcaaagtatttggatatggggcgagaggatctcctttcgagtgtacattttccaatttggcatttgaaatttggtggtaggggcaacacattgatgcgtgtagagaaagacgatcctcgagtcttgtcaagttctaggttagaaagctttgggcaggataggccttgtattaggctcttgagttgatccaactgtgcttgcactgtaggattaactcgaccagcccttgtccggctagcctgtctggtgggttaaaagggagttggttatttcggagctgaatatttccgtcccaattagcatttcttcggtttaagtcattttgtagatctctatcgaagctaggactcactctatcaaatacaaattctttgggccttggattagagttagtttgagcattatgggaggaacgttgttattatgcccagtgttattatgatctccagttagtgtgcccatcaataggatggctagtggccccttcctcattgagattggggtaagattccccactgcgatacctactccatccttgccttggtgaaatatcttccctttttccttcgtctctaggtaggtcttgaaattggttagtcttgccatacgcccttttaggctaatcattgggttgatggggatgttgcattgtttgggatgcagttggctccactggacatgaggtttgcccatgatccctagggcattgagtttcttccaagacattgggaccatttcctcgaagggggtcccttatgagtggtggttcttctactctggacccagccctttcatagaaccgtctaataagttcattcgcttacctattctgacactttagctccgactgatgggcttggatgatcacgacatggcgatccatccattcttggaattcgcgtctctgttgggcgaaagcatcgttcatagcagcgcgtgtttcttcttgttcatgatggaggatgtttgtatgaccctgaacttgccctatgacttttctcagcctggccagctcagaatcatccaagtcaacttgggattcgttgataccaggttggccaacccttggcccattttctctctagtgtatacctggggggt

SEQ ID NO: 271119 - DNA, 1315 bp, Cannabis indica
agggcatcaagtacttgtccgtcttgttcatcctctatacctcacaaggatggggtgagccatccccgcatgataccaaccggctttttgttctaaaatcaagtcccaagcagagcaggtcgggatatttctacttttctcagatcgaggagaagtggttgacgatcactatagactctgaggtgagtaagatagggcactttgtggatgcatactacttcatcaaaggaatggacaccgtccacactcaattccagcagataccatcgtattgccgccctcccttcacattggggctcaagaagagggcacaaagaattcttcaactggcggatgctgcttggaacattactcttctggccactgaggccaattttgtcaagtacaaaatattcccaacagactttgtctcgaggactttgaagaaggcgaagaaggcaaagtctgactaggacgaagtgaccaagcaggaaaaactgagcaaaaaggggaaaaaggttcctccgagtgaccatgcaccgattaagtgtgttatcaggattaaggaacctgatagacctgtctagccatctacccagtggagggaaaaggaaaggtcgtcctgacggagcaggaataagaagagtcttcagatgatgaggcttcatccttacttgttcgggtgaatgctcctgctcacgtgtagtgtattttaacttatatttatttattctgatacatgatttacacaatatttgcctttaactttcttgtcttgtttatatgcaaccatgtctcaaaaagtgctccaagctttgaagaagaggactggtgacagctcgggcctgactcccccacccaatcgatccaaaggtgacgaggttctgtctaaggagaggagcctggccaaaatggtgattgagctctccgaggaggtggtgcctgctatggaccctccacgccagaaggtacccaaatcaaaaagtgtgaaaggggggagctcagatggatctgatctgaccaaggcctcctctactaccgtggtgctgagcttggaggccgagaaaggcaagggcatgctccagtattaccttgatcggtaactcctcgaggttagcaatcagttttctggggcagacaatgagctgtccttggagctagtgatgggtgggatcctaaaggaagcagctcgcgtaagtattttcttctttatttttatcttgtctttttacaatgcaggctttaactttttcccgtgcaagtcaatctgaagatgtcctacgcctactcccgagccaaatccacggtagtgaatgttgtatcttatatgatcaac

SEQ ID NO: 271120 - DNA, 660 bp, Cannabis indica
tttatgaatcatgcgagggccttattttctgtacagtatacagaccaaggcatgacttctaactctccacctctgcaaatacagttactgagactaggactattgtagtgtccagtttcactaaattggtggccataattttgaatacagtaaaatatcttcatttcaaataaaatggacacagaacatttaaatctctaaacacacaaaaagaaactacactctattttcttttctagctattcataaaaatcttctttgccccatctttttttttttaacaatgaaattgcaaacgtttaatataagatattggattggacatattacacgctaacattaacactcaaatctcatgattcacaaaatgcaaatgacaagagagagctctccaaacaaaagccgttaccaaaattggagacttagctctctatctgacattgattagggcatggccaaaccaatgaaccatgctattcgtgcctaccacctaaacctaaacaaacaaacaacccatctttgccccttctttgtacatttttagtagcaaaatatgtttctaaatgagatgctcaccaaatattctacttgaaacaatataaccgagttctccaaacatttccaagacttgtgtgtttaaataatactaagtaacacatg

SEQ ID NO: 271121 - DNA, 1034 bp, Cannabis indica
aagggcatgagggaattgtacaagaagtgagtcattgaaaagcttcaggcatgtgcattaccattttgtgagacttgtgtttatggcaagtaacacaagatcaagtttacaacagtaactcacaacacaaaggcagtcctagagtatgtacatgctgacctttgggggccaagtagaatcccaacacatttaggcaaacactactttatatctattattgttgatttcagtagatgtgtttggacctatttacttaagaccaaagatgagtatctagaacaatttaagatatgcaaagctcaggttgaaaacaaaataaatttaaaggttaagatacttagaaccgataatggtctagaatttatcaacactaagtttgatagattgtgtaatgagcatgggataactaggcataggacagttgtgaaaactccacaatagaagggagttgttgagcgtatgaatagaaccctgttgaacaaagcgaggtgtttacttcttagttcggggttaggagagccttattggggagaggctttagctactgcttgttaccttgttaataggagtcctaatataatcatagacttgacgacaccttatgagatgaggtatggtaagatagcaaacctgaaacacttgaaagtgtttggatgtgcaacatatgtacatcaatctgatgataagcttgatgctagatctattgaaggcacgtttctaggatatcctataggcacaaaaggttatagaatatgcataaaccagaatgggaaacttaaggtgattttttcaagaaatgtttgtttaatgaaaataattttcctcacttgaaagtcgataagggtagtgtgttgtaaagaccgcttagtttaatttggaagttagcagttaatcatgtttaattatgaaaattatttatagctatttaaataattatttatactgttattattgatttctgagatgcattttatgtcatttagagattttcataagtttgcatttccggtgcccggtatcatggaactcggtgt

SEQ ID NO: 271122 - DNA, 620 bp, Cannabis indica
tgtttcttctttcaaacatgcatcaacatcttctgaaagtcttttaaaaacatctcttgcaagtttataggttttttcagttgttgatgcccttgttacaatatgattgtaagacctggataaatcttgataacgtaatgccaaagatactttaggatcatctccttgtcttatctcaggtgtactacttgtaactcccatctttgcatactttgtccacctctttaaaatgtattgagatggtattttcacaacattatgaaatgagaaaaccttaaggatatgtgagcacaatattcctgcaaactcaaacttcttgcaactacatatcaccgtattaacagatgagtcatatttaactatgtggtgaaaatacttaccatttggagtaagcttatattctgtaaccgctccttgctcagtacgaagttccatcgcacagttataagcctttgaaaactcaacttcaaacattctcaacactgcaggggtgtattcagttgctgcatgattcaaaatttcaattggaagtgatggtgctaaattacgttggctaactttaaagtctgcttttaactcttcataacgacgatcatcgatcaacctctcaaaatgttgaa

SEQ ID NO: 271123 - DNA, 2441 bp, Cannabis indica
gtctttggtctaggccattctttcactgcagcaaccttggcaggatctactttattcccccgttagtgacaatgtggcccaaaaaggcaacctcggacaaccagaactcacatttttgtacttggcatacaattgatgttctctcagtcgctgcaaggtcaagcgtaggtgctcctcatgttcctcctctgtcttagaataaatcaatatatcatctatgaataaaatgacaaactgatcaggatattccttgaagactcggttcataaggtccataaaagttgttggggcatttgtaagtccaaatgacatcaccatgaactcatagtgcccgtatctcgttctgaaggctgtcttcggtatgtcttcatttttgattcttagttgatgatatcctgaacgaagatcaatcttagaaatagtaaaatattaatttataaatttaagctctaataaaatatccaaaaaataagagaatgaaggagaaaagagattgatgcatttaaagtgatattataatgtcatgtcaccgcctcatatctctcctttatatatatatagattgatgagcgagatacaatattctttttgttattattattattattattattattattattattattattattattattattattattattattattattattattattattatatgtacatctgttaaaaaaaaattaactatctaacctactaggaaaaaaaaaagttaaattcaaaattaaaattaaaatttgaatctctcctgaaaactacataatcatctaaaaataaaaatttaataattacatacacatacctgaaaaagaaattttccaaatttaaaattaaaattttactctcccaaacaccattcaatatctgtattataaaaaagcattagtaaaagctaatataactagaacattaatagtacaaagaatataagagtagattggtattgatatctaatagtaatagattaatattaagctaaaatatcagagtttctctttaagttctcaaactttcctcatttacatacttttgagttctaagtaatttagttctctgtcaagttaaaactttcagcttgtcatatcctttgacatgtgttttgtctctttgtaatagagtgttcagttcttgatctctgtaatagaactgttgctcgacgatttataggcccctaaattataatattcgtaaaactgatgagtgacacgctaaatcactttttgggacataaaattgaaactaaaagttttcttatcgatcgataacatggtaatactctaaatattgcaaaaagggaaaactagggttccctaaactgctccaactggaagatcggtcccccaaccggaagaccggttctgtggggtttcttggggaccaactggaattctggttcctacaggtcccactgaactagtcgaccggttcagtgttggaaagaccacaaacacctcaaatcgattccaaatgccaccaaaccttccagacctcctaattagatcacaacaaacatactccaagcaataaaaacaagaatcaaccacaaaaacacaaatcaccattaaagactaaagtttgaactctaaagctcaaactttgtccaaacacatcttcaagccaccaaacaactccaaatcaactcaaataacattaactcaactacataatacaaattcaaacactatataacaccacagaatcttaaccttagaaaaacatgcaagaacttaactttgagcttaagaaatcaaagagaacggtgctaaggggtttaccttgaattggatacaccaagtacttgctaaaatactctgaattgaagctgaaaaatcctaaatctcttgttggttcttgagggttcgagagagtgagttgaagagagaggcttaatatttttatgtttattctaacttgcataaatgatataactcacaataatctttatattaacctaaaaatcaagtaatccatcaaattaaaagttcactaaaagacaaaagaaatctcatgggaaaagactatttcgccctcacatacaccataaagcatacttgccacataggggcaattcggtcaaacccaatacccaaaaaaatttcgacattctcaatgtctaacaatattatcctgctatagctaaaatactaaaccataagaaaatgtaattctatcgaccaaatgtcacgttccaatgttgccggtagaaaatatcaaaaacatgtaatttcatatataacgtaattagcacacctagaattcaaatatatcaccaaaattcataaatcatagttaataatctaatttcataattaatccctaattatctgctaatttatcatattaaaattaagcggtctttacaattatccccccgttaaaaggatttcgtccttgaaatctaacctgaataactctggatattg

SEQ ID NO: 271124 - DNA, 560 bp, Cannabis indica
tttcgacacgatggtacaaactcgtagaggcgtgtccgacccaacgaactcacagacgctagatccgacattgcaagacccagggagttcgagggttccacccattgtcaatcctggacagacgggaagcgtggtgaatggtgagacaactactgttactgaaactgctcctggtgtgctagagactggaaacaacggtttcgcacacagccagggcgttcataacacggctgttccaccaggcatcaacacccaaacgaccatcggagatgcaactgaattgtaaaacctccgtgatgcgctcggactcatgcagggtcacaacaataccctgcatcacgatcaggaggaattacgtgccgcagtaaacctcgcgtttgatgaacagaggcgtatgttcgccgagtggagggacaaagagatggaggcattaagggctcaccatgcataaatctaagatcgtagtcggcaagccactgtgctaatcgaagcgcctatcagactgtaggcgagcaaacaccgagggtcattcccctaggagaaaccgaggataacacaac

SEQ ID NO: 271125 - DNA, 1357 bp, Cannabis indica
gaacataacacttatgcaaagtgtaagtacacttcatcgttgattatcacattagtgtaaatccaaaacactgatgaaacagggacttagtcttttgaatcatataatcacaatcacattcaactgtgttgacatcactgtaattgtgaatgaatatatgttctggacttaacagattctgtgcatatattaaaccataagcatgaaaactacatgttaacataaatcacttctaattctcttattgataacaaatcagattagactgtaatgggttttatttagggcataaattcccaacacaatgtcattagcaatactattataaaacataaacttaaacatggtagaaacattgcaaagcttaagaatatcatgcaaaaccataccgaattccactaaacaactctcttttttagcaagaagtaaaaccaccagcgctgacaatccttttcaacattcacctcgacataccccaaccgaagacacaactaaatatcgtgaaatacaacaagagcttcaacaataggcagggacaaagaaccactcgctggtgtcgaagcagacgccaaaacatggttgtcatggtctcggatcactgctcagaaccccatacgcctctccaccaacctaaaacatgcatctgtattcaatttaacatgtcctttagttggagaaagccacaaagggacaccaatagcagcaggggacggacgagcagacttaaaaagtgacatcgttttcttgtttgcatcctgaaaactactagtaaaagtcgaggcccatccaacaacttcctcaatattacataagttctttcgataccaaatacgtcccaaaagcaccaataatagttttatttcatttttttgagagaacaacctcatgttccctaagtaaagcatagatgttagttctaagtaaagaagtcaaaataagaacaaactcaattaactccacaatatgcatgagatttgagcatccccaaagaacatggaatgaagttttaaaatttttaccacaaatggggcacactatattagtgggaaccttgtgagtagtcaatttgaatgaagtgggaaaccaattaaagcaagttctccaaataaaaatcttaacttttggaggaatacagagactacaaaggtacttccaccaagatgaaggataggaagaaatcacattgctctcaactaggggtattcgcggtgcgggtggtgcggtttttgaccattttttcaaactaacctgcacatgcagtttttttaatttcctaaattgcaccctcagcgtgaaactaaaaaattgcagaaaccgcactgcaaaaaatagtacggtgcggtttttacagtttctg

SEQ ID NO: 271126 - DNA, 1190 bp, Cannabis indica
ctgaattcgtattttgtatatttcctactcagattaataatatcagttgtctctcatggagtaagtgaatttccaaactacgtaattttgtgtttttattgtttactgctttgatatatatatttcactatttattgtttctacacacaacaaattggtatcaaatccaaatatagcgatattatatatcaaatcgaagctctcgacaagacgaatccaacgccgcaagaatcacctcaatcagaggtccgacacactgccagtaaccgttagagtgttgatgccaacaactgagttaactcggtcaaaaatggcaatatagaccacaatatcatccaagtacaccactatgaacttatttaagtcttcatggaagatttcatcatgagtgtacagaatgtggctggcacatttgtcaatccaaaccgcatgacgcaaaactcaaatgccacataccgagtaacacaagtcgtttttggttcatccccttctgcgatccgaacctgattagtagcttgatctcaaatccaacttcgtgaagtattcccacttagctagtcaaataaatcagcgatcaaaggaatggggtatctgttgcgcacaatcactttgttgagggcgcaatactctatgcataatctcaagtaggggtgtatgtcagtcagtttggtcggtttatgttatatttttattcaacccaatgtgaaaatcggattacaaaaatttaagtacaactcacccaattaagaaaaagaaaatagtaacctgctcaacgaaatttgtcggtttagtcgggttaagtcgttcaaacccaccaccaatattttttaattttttttatttttacatataaatattgtattttaattaaatgtaataatgagacaaacatatataaattgaatttgatggcacatgatctgcttttttgttagggtagcttcatgagtgagaaacttagattttgtaataactttactgaaaataacatggtgtaataatatgacatacaaaattaatttggaggctataaattttgttttctttgggattcatatacctacaataatagggataattattttcttttgttaattagaaatatgtagtaatatttaatattgaaatttgctttaagaggattctggtaattataacattttattataatctcttagttaatttttgtg

SEQ ID NO: 271127 - DNA, 1439 bp, Cannabis indica
ttggtaaaagtaaatttgtgaatttgctcagccctatttataggcagattaatgaaaaaagggtgatcatttcaaatgtcttagacgcatcggttccccccaaaagcagatattaggaatcaaatataatcaagtgtaactgtcaaatgtggtgagagaaagctgggtttcgaggcattaattgagtcagaacattaattagccaaaaactaaagggacgcctggtcagcctcacatcgaatcgcgaacagaagcgcctaacacgtgtcatccattcaaatgcaagggcagctctaatgaagtctacacgcaacttcggaagtcccgtacagacttggggggaaaatgttatcccaatttttacactctgacgtgacatcatacaatggtgacacgtggaatcaactttatgtacctgctcgcaagagatatgccgaacagagcaccacatatattcgctcggacgaagccttcttaaccgggcagtgataaatccgaacagcacgccaacacttagcaattacagctttcgcatcgtgagtcaccaaaaaaattcctataattttgggatcagatcacagagatatggcaagctgtctgaatcccttgattagtgtattttgtatttaatatacaatctttccaattacatcaattgtaatcaaaagggaaattcttccctctaaagtttacaaccctataaatagtgattcatactcactgggcaaaaagggaaaaacttatctaagaattcatattcagaggtatcattgtaagagctctaaggaaagggatcattatactccttgttcttaagtcaatacaaactaagaggattaggttattaccgaactgctcgggcggaacctttataaaattcttgtgtctttattatattacatatacattatatcacttttcgcttacaatctagactcactgtcgttggtcaaaagtgatgtcaacaattttcttaaaagtgcctctaatatacttcaactaacacaatttaaattttatttaattaataattaaagaataaaatatttacttaaatatttataaccacaaactgtctatcttagcaactttagttctttcatatattttttcaaaatatgattctaatagtttggtaaatttttaaattttaatatatttattgtgctttgatattcaattttaaataaaaaagtaatttatttatttatctttctaacgtttatttatttattttaacgatatatgactatgcttagaaatttctttgagattcgaaatctattaagtaattcacctgccaaagtatttgggaatacatgtgatgaatttataacaaaaaaattcacttatttgtaaaaagtgagtagttaactaattgacttatttgttttatacatagagcaaacttattaataaagttagttgcaactaaaatt

SEQ ID NO: 271128 - DNA, 747 bp, Cannabis indica
agaagagaaaaatagttttggagaaattttagagtgacatgtcaccgcctcatatctttcctttatatagatatatagattatgcactctattaaaacaaaacaccgaagaaaacgaacggccctactagttagaaatgagctatgggacaaaaaaaaaaaaaaaattggaccagtactataaagataaatagtatttttaataattattaaaaaaaatatgtatattttttaaagggaaatttacatagtatactaacttttaccttttcctttttataaaatactgccaggcggtatttttttactttgtgtttttttttataagtttcatactgcagtatactgtgttaagtttttactgttgttctactggtattttttaattgttctactgttgttttgagttgttctgttttgtattctattggtgttttataaaaataaagtatttttaaaaagatttttcatgtgatagtatttttataagtttcccttttttaacaggcaatttttttatttgggcccttaaaatgagtgggcactaagcgcgggcctagcccgcttatactcaggaccagccctaaacacgtggactatgtagatttaattataaaatcacgtaaatgtcttgtgtcaattattttatttatttattattcccctcaattaaattaaagttatcatctttaattcaaaaataatcttatttaatattaataaaattgttagttaacaataaactaaa

SEQ ID NO: 271129 - DNA, 1006 bp, Cannabis indica
tattatttgaaaaattatgttttagttttggtttttaatttttttttcaaaaattccttccagcttacaaagaatttagcctgttgtagaaatatttcctcaaaaatccagcaaaaatattactgcagcatgcaaaacttctccaaatattaatgggattatgaacaaggcgggttaggatacacgatattttttagcctatctgatttctttttctttctctaaaatgatacacgatattatcattattttttgccaatttaatgagatgatgatgaacaaggcgggttaggattggtgcaactggattcatgcaaagatggtgaggaggtcgtggttcaggtaaagagaagtcgaggatgatgatgtgatgagagtgaggtgggcggaggcttttctaggctcaggtcgtttctggatttgatgatggtgggaaaagaagagaggagaaatgtgattgggggtctaataatgggatttctgacgaatggaggtggaggggtagatggtggtcagggtggttatggttcaggcaaggggaaggtagagaccaggtggctatggtggttaggacagaataggaagaagacaggaaaataggattttctgagaaaaagaaattcagggtatttgagattattttggttaggatattatttgaaaaattatgttttagttttggttttttaattttttttttcaaaaattccttccagcttacaaagaatttagcctgttgtagaaatatttcctcaaaaatccagcaaaaatattactgcagcatgcaaacttctccaaatcaacgacaaaaagccttttgttcatgcatgcccagtttagctgcagcaaaattcaataaaaaatctaacaaaatcttcaaactgccaaatcacatccaaaactctaaattatgctccaagaacacctaaaacataaaaccaagtgtaaaatcctcccaaaaactaaaaataaaaataaaaataaaacaaaataaacataaacataa

SEQ ID NO: 271130 - DNA, 714 bp, Cannabis indica
cagtaattcttggtttatgagaaattcatgggtgtacttttcatctataattaaaaataaatggtttattattaaaaataaaatgatttatgagaaattcatgagtctactttttttatttatatataaataaaaaaaaaaaaaaaaaaaaccccgcacaataacaaaaaaaaaaaaatagggttctagattatctttaattaccgtatttctaacacaaaaataaaataaatcacatcaaatccaaaaaaaacagggttctagattttctttaattaccgtatttctaaccctatttgattatttatgcctcttttataaaccctatttgattaaagttaagattataatattaattcaaattattatttatgattaatgggattaatcaatatataaacaataatttgaattaatcttacaatcttaactttttcattcaattaataattatttgtcacataattattaagtcttttccctttaattctccttttgttgatgatgctaatttattcatattttgatttctacaatttttatgttcagaccaataaggtagtgttctacttggggatctaacgagtttcgccccttcgctaatggcctctaagagttcaaattccaatactgtataaatcttcaatttattctattactaaattaactgaaatatttcctacttttttttttaatttacaactttattgttta

SEQ ID NO: 271131 - DNA, 1156 bp, Cannabis indica
aaaatcctaagtataggggggtatatatatatcataatgtactattgattatataaaggaaatgcctcatacttgttaattcttcaagtttaaaattttttcaagtcttgtgagattttctacttattacaccaggctgtaattaaagtcgaatatatactaaaacgcgagtacccgtgtactgcaaaaatgttaaacattaaatatccccgcgaggatatgaagttgtccaaaataaattgcaaatttgtccaagtacaaagtgcgagtacccctgtaccgcataaaataaaaactagcaaattcaaaagaaaatatagtccaacataagcaaacataaaaggaaaaagtcaagcgttgggagcagtaggaacagattcatccgcgactttgctggccacctcattctcagtctcctccacctccgcgacttcggtctcctcgagaaggttccctccaccaccttgagttggtgtgggtgacatagcgcgaaaagcctcggccatttctgcggcttctgctccaaggatcgagaagtcgaagtctggaactttggaaagagtagtatagatgtagtccgagaccgcctggtcgtactgttttttgccgttctccttctcagtttccaagtcgcgagacatctcttcgatcttcgccttggcttcaagctcgacctgctccttggccttacgaagttcctctagttctttggccttagaagacgcatcttgcttcagcttcttaatgtcttcttgaagctgagcaatatgtttcttcgcgagttcaacctctttgggccctgcagcaaaagccttcgcaaacgtggccatgaactgcgaagctaactccgcagcgcgaggaagcagctcctctgaagatgccttgtcaatcttcgacaagaactcatcgctgacaaacctctcctgaaggtacagcacatgacgagctcgagccgctgggtcgatcacaaccttcttccctttctcttgaacacccttagcaggcctcttggaggagtctgcgacaggagtaacaaccacatcgcttttcctcttctgggaggtaacaggagaggtcgctgctgtcccgggtttcagtttgcggttgagcataggagcggactttaggaaagtcatttctgcgattacaaaagaaa

SEQ ID NO: 271132 - DNA, 549 bp, Cannabis indica
atatattttttataactctttcagatatgtgtggacttttaaattatggatgagtggttcgtggaacatcaatatttatccaacttatttaatcattaacgcatgtgtatgcaactttgttcataccaaaatttaaaatttcaagtagatatgaacataacacattaatgataatataaatttttatttgcaagaataatggtactccaagactatatatttgtttcatcttgttgtatgatcttgatttccatataaaatgatcatatatttataattcttgatgcatatgaagtacttcaggatttctctactaatgaataaactacatatatttaatatttctcaatatacaaaaggaaataaaagtttgttcttcaatcatttataatataatcaaaaactctttaagagtctatcacaacgtacaatttacgaatttatatgcatagacaatcatacctatttttcaactaagaatttacttacatgtttttatttcatacaaagatctttatcatgtagtgcgcgcgactttgaatttatatc

SEQ ID NO: 271133 - DNA, 3134 bp, Cannabis indica
cattttaaggggatggattgtaaaattttccattctttttcattcaaataaaaaattgaaaaataactttctctattacaaaaggaaaaaaactctcaaattcaaaaaaaaaaaattagttggtggttgttttcaaaaaaaaaaaaaaagaaaaaaaaaaaaaaaaaacttaccctttcctccaaaagtaaataaaaataaaaataaaatcatttaataaatttatgtactcaaacataatagttagtttttttatttttatattttaaaatagttttttttattatatatatatataattttacggaaagccacaagagaaatttaaatcgcaactcaaatccacatagcaaactacataaaacttaccggagcaactaaaaccgtaaaaataaaaaattgtatatgaagtgattacccaacataatattatgtttaatttaattaaaattatttaataaataaatttatgtagacaaaaatcatgttactattgcttttttaatacaataatattatgttttaaattaactaataataattatttaataaatttatgtaaaaaaaaaactaatagtatgtttaatttaattaaaataatttattttataaatttatgtagacaattttgataatcctgtcgtctttttaatgtaataatactatgtttaaattaattaaaaaactaataatatgtttaatttaaataaaaataataattttataaacttttttttttggtttgatcaagaataatatttctattaatcaaacaagtcattcacaaccaaatagcgaaaactcccacaactttacagcaatacttacaattttcttgcatttctaagaacaaccctctcaaaattagaaagcttcctatcttgaacaagagacaatctagttttgagattctctttaatgcttctatctatatacatcggagctatacattttccttcaaatacacacaagtttcgattaagccatatactatagatggcactagctagaatagcatagtaaacttctcggtctttttccttggatccactaagaagcaattgaaaagaatttggccaaagccaatcccccaaccacttcttgatattttgcatcactctccaagagaagggacattcaaagaataagtgttcatgagactctagatcccattcacaaaccggacagtaggcactatcaatgggaacatgtttcttaacaagattgtccctggtgagaaggttagagtgtaccatttgccacattataaaacgatgttttggtgtcgagagcttgcaccaaactgctttcttactatcaaaacttgtctccttcgaaatgagatagtcataagcttgcctaatcgaaaagttgccattagttccagctttcatgatagcttcacgagtgaatgaatctcttaatctcagaattttcctccaataccaactcacatccgctttcagctcaagagaccacatctcttgatcttttatgtacaagttgttcacccattttacccaaagtacatctttctttgtagtgatagcccatagatactttgccaaagccgctttgttccatttaggaccttctcaaaatcctaaacctccaagttctctcggtagacataccaagttccaaaggccatatgaagcctgctccgattatccttttcccgcccaaaggaagttgctacacattcggtcgatctctttggctattttttaaggtgattgaaatatgctcatccaataacatctgattccaattataagacactgcttattggaagagctctacctacaaaggataggtgtcggcttgcccaagaatgcaatttcagctttagtttctttaagatgatatcacaatcgtcatacttccacttggttggcctcagagaaatacccaaatattttaaaggaaatgtaccaatcttgaaagaaatctcctgctgaatgagagttaccatatcatctggtatacctacaaagtagatgttagacttctcaatattagctttgaggctcgaacatgagctgaaatgagtgtgagcctccaaaatatatttgaccgaatccctattccccttacaaaataagattagatcattagcaaaacgtagactagagagcttcagcttcttgcagattgggtgataagagaaggctttgtccctgactttccatttaagtgttcgagtaagctagtccacgactagcacaaagagaaggggtgacataggatccccttgtcataagccttttgcaccctcaaactttccttgtattcttcctttcattgccagtaaatagcaggagctccgaacacaaaccattatccactccataaatactcttgggaacctataggcttttaaaaggctttccaaaaaatgtcagtcaattgtatcataggttgtgctcaagtctattttcattaggcatcgaggagggatttgttttttgtggtaccctttgattaaatcctgaaggatcaagacattgtgcgcaagggagcgatttttgataaatgctccctggttgtcactaactagccaaggaagaacctctgaaattctgttacaaatcaacttcgaaacttcgagatacatttatatatcgtattacagtaggttatcggacggtaatctattgctttggaaggattctctactttaggaattagcgttagaagagtttcattcagttgttttggcaagacaccctcctgaaagaaactcaaaatggtagtagagaaatcttgaccaagttccttccataaactcttaaaaaatctcgatccaaaaccattcagactaggactttttataccaagaattaagaaaagaacattcttaatatcctgtaatgagaaaggacggataagttttacctgctgattcaaggatagttgcttgccttcttcaatacattggggaagaatggtctctgttgtagaacttgattttcccatgaagctcttgaaatgagacaaaaagtggtgaacaacttttgagtaatcctcaactacttgtccctgttcattgacgaaagaagcaatcctattagtatctcttctattcttaatgcgcacattgaagtaagtagaattctcgtccccaaacttga

SEQ ID NO: 271134 - DNA, 1549 bp, Cannabis indica
ctagtacaaaattctgaaaaaagagttcaccaaaaagtctgctagccataactatatatttatatttttatcatccaatccaatgtttactaatcaatgcttaatctgcttttaactttaattaactataaactgtgtacttgcttgaaagtttgaactaatgacatacacagaaaaattcgaaaattttagcatctagtttcgttggaaaaagggagccagttttgatgcattgttttaaaaggaaaaaaaaatacaaaaacaatgtcacaaataagctgcattggctcatcacagattcataatagaaattcaaactagaaaccataggaaaaacacgaaccttctttgcaccaggtgttaggctccgaagggtatcaaaatgtgaatttattctagccctgcgtcttttctctgcctcgctatggttcttcaaagcctcaatagttctctcggccgacaccccttttcgctccaacttcgcaggagcctctacaagctctcctttcaagctatccaaaaccaacccacatcttatagaagaatttcccaggtatttatcgtttcttatctcaaaatcagagttagaaacgcctgaactccacgaaaaaggttccatggcaaggcaacaagagtgaaaagtgaacaaagaaaattaacaaacagtttatgatcaaaacttcagatgaagaatgggaccagaagacagggttaagtgttagtgaacaggagtttgagagccaaaaacacgatcttgtacgacgtagttttgggtttatatgattgctactaactatataacttccaaagaagaatgcttgaatggaaaaaaagtcaccattttcttttatgtcaagtaatagttaagatgttttgaccgtttctcgtaatgtaaaacaaaaaacaaacccaataaagaatttgtgagctaagcagcaaaattggaggctttgaaagtggtcagtggtcagaaatagtgtccactatactatccacaccacgaggcttaaaatataaagctagtgcatttttcttttaggttgttcacatatacacacattattttattgtgaaaaacacacattattttaaagagtattactatattcacccatctatataaagtattattttataattggacaataaattataatatttattaaaagaaaataaataagagttaatattaaattacgtccataataatattacacttcacaaaattataaaattcagtacttagcatttctcataccctccttctttgctttctttcgctttaactttcttatcttcaccttttttttttctatttatttatttatttatttttcattttgagcacttatatatatatatgtcattattccttctcttagttctatcacactaattaaataactaacacactattattactagatgaattaatatcatttgtgtaattttagtgtaacatctatgttccatctttaaataaatatattcttttatttttcttttgttagaattttaaataaggtgaatgggctcatctcaaattaat

SEQ ID NO: 271135 - DNA, 1046 bp, Cannabis indica
actgatttctgcgcgaaccatggcatcatcaaaagcttctccgcagtgacacatccacaagcaaatggtcaagttgaagcagtcaacaagaccatgaaggacacactaaagaagaagctcaaagatgccaaaggaaattggccggaagaacttcccgaagttctatggtcataccgtacaacgtaaaaaacaacaaccagtcagacaccattctcaatggcgtacggttatgaagctatgctgcccgtcgaactcgaaccgccatcccacagaaggttgacgtccgatcaaggtaccaatcacatactccttgcagaatcacttgatgaaatcgaagaaaaacgggcaactgaaaacttaaagttggtacctcatcaacaaaaagtagctcggtattttaacaaacaagtgaaagctcggaatttttttgtgggagacattgtcctaagaagggtattcctaaacaccaaagacagcacgtcaggcgtaccgggacccaactgggaaggaccttatcaggtggtcgaagttctcaactccggagcatacaaacttggtaagtatgacgaaaaaatgcaactcattttagtaccacgatactggaatggagaacatttaaggaaataataccaatgagtactcaggtcgggtagaccacttcaaagatttgaccatatcaaagtactcaggtcgggtagaccacattaaagtactattgaacattcgctataagtgaatggcctcttgggcggactccgcgcaaaggtttcagaaacaaaagtactcaggtcgggtagaccactttaaagtacagtttcttatttgttttatgtcatgttaagctaaaaagatccattggatcactagctctgatgtaagttactacggtaacaaatacattttcgatcaataaaagaataaagatagtatttccaattctattgagtcgaaaaaatcagcatgattataatttacctagagtgcgtacaaaaggttcggtccaacccaaaacaacgaacaaaaaagcaatatatttgcaaagacaa

SEQ ID NO: 271136 - DNA, 2036 bp, Cannabis indica
tccaaagccaagaaagaaaagatgccagctaagagctcttaccaagagtccgacgaagggcaatgaagtttagcccaaagtggggaggcagacttagatccttactttggggatcctatagagagctttggactggtataggaattagaagatgtagaaatcaaccccacccttctgaccaggaaagattggtaaggtttagtgccagaaataaaatccacaattatggttctagtactgatacagttagtacaattctaataatcattgagacccatgtgtgcttaaagcttccattccacttcgtggaaatacaggcaataaagaccaaccacttgctcaagagaagcaatcggttgaaggcaatgaacataaactgcttgctcaggaagagcaacccgttgaagaagaagcagtttcccaggcaaagtaaataatggagatccctctaaaggtcacacaaacggagctagatagcttacgcaagttggtgagagacctacatgcctttataggtgtcgtagacaagggttttaatagagatagattgtctccactcttgagatgggtcatggcattggtcattttgaaattcaggatgccaaaatagagtatgtatacgagaaagggagatcctctttctcacatacataattctgaagtgcagaccgatctggaagatattcgagatgattccatgctgaatctttctagccatgttgttagaaataacacaacagtggtatgaataaacaaggcctacatagctgccttacttatgtttttcaaattagctagagacccgcaatcgccatctcatagcactttattgttaatataataaataaagtaatggattatggctttttggtactttatttttaatcaatcatttgtgcctaacaggtcagtttggacatgtgtccttgagataacctcagtcttttatttatttagttaccattgctaggccagaagtctccatatgagtgatattaatgttcaatatgttgaaggttacaaatgccaccaaggttcataataaaaaaatcaaatagtacattggtatggtaggtgaccaagaaaaagaatttattcatttacttggggcatgtcggcaccatcacacatgaacatgaattccacacaactaattggtactttgatggtttaataaatgttgaaggttactcgtaattgtagtatctgagttcataaatctaaagtgctagtgtgtttttgtgggttcattaagttgatcataccacacgtgtagattatatccgtacttggaaaattgttagacgccatcgtggctacacgaaaataaagccatccatattagaccgactaacaaagaactaaactatggactaaaaatgtacgacaaccaagtcctaagaagctatcaactatctgtgtcagaaatgacaacaattgtagctttagtctctcctagttattttagcacgcctgagttattatttttatgatttcctaaacttttgaggtcacttgcgattatcatgatcgggtatataaatctaaagttctagtgcaagtgattctccatggagtacacagatcaaaaagaaaagaaacacataaatcatagaaaactctctagaagcatgacgctacatcaaatagagattttatccctgattgttagaaatcttttgggagtgggacattgtccaagttgttgtattcctttggttgttaaactcttcctaagtatgagacaatgtacttagcataggcttactccaatctttctttttcttttctgccatggagttttttctgtaagcatctatcgagcttctattagttgaaatcatcaaaaaaaggtccttcaataacctttgatttaacccttatactaaatctggtcaatattcccacactactatttagtagtgatttatcatgcttatgctgatggatgggattagtgctgtaaatatgggtcaggctttttaacacgacacataactagcacgagcacaaaaggcacgagcacgactaagcac

SEQ ID NO: 271137 - DNA, 2849 bp, Cannabis indica
gagtcgtattgtcctcatcagtgacattcccagtggcaatcccacaaaatttgcacgtacaattgggacagtgccaatccccagggggaagcgtctgcaatatcaattaaggttcataaaaactccctcgtcttaagacgtgaagaacacactactatattataactaaaccgaagtatcaaatagtggtacaatggtttcacacttctcctcaggaggtcccaagttcgaatcccctctccaatgtaaaaaaaaaacccaggtatcaaataaaagtaaatgttaatgttcagactacctgtatacccaagcagctttgatgaaaggttgatgggcaaccatcacaacagatcaaatccccaccatctccacagataccacaagtatcgtcattgggatcatcaccatcaacatctacagagtgaaaaccaatcttttctgaatcctcttgtctattccacgcatccatttggcattgcagaagagaaaccccagagtccaagaaaatgttttgatatggctgacgtagtttgcttccagcatgaatctcaaatttataaatagtgagaattttactgcagcaaccacaatgaattccatcccttgtaatccagccctcgagcattactcgtgttcttcggcgattcttgtactgcactttttggctcagctggacagttcctgagtcaatcagccaggaaagcagagtcctttttccagtatatggaacaaagccgtcggtttctgaatttatccccttgttacgaaccaacagagtacatcttccaagttttctgcttttccttccatgcagcatattagaattggatcctggggccagcttttcaccagtatcttgcaaatgatgagaagaactctggccatttgagttgacactaaccaaaccattctcattcattctattcttaaatgatttgccaccctgctttaagaacgagcttagtttatcgtcatgactgagactttccatgctttctgaatcttgcttcacgtttatacatcttttgacacggatttcttttgcattctcactgtcgcttccatacctttgcttctttttcatttcctcctccatcttcttcttagtttttcttgtcaactgacagaggtcctcatcaggtataagttcaataccatcacagctgggtttaatctcattatcctcatcaattaactgcttttgaagtgcgtcataggccttgatgatggaccaataagctgttccagatgggttaatataaactgcgtctagataatctctgttccttctaggtctataatctattgtccacccagcttccacaagcaacccccttatccgttcacgcaacttttgcttctctgtgccactaccacgtcgagcttttccgtctttaatcttgcttgaatgtaacttttcacatgaaggagcatcttcaccttcacaactcaccctcttcatagatttattacttgtcattgtctctggttctgacttcaaggaagtatcactatcctctgaatcccaattgggtttctttgtaattttagtgggcaatgattttctagatttcgtagactttttctctgacctgacaactggggctggcttctcatgaatcttttctgccgagtataatggaggagttacaacattcttcttagaagcatctcctatccttacctttatgcgttcctccgctttgtgaaaattataattatctagtggtccacttaaattctttttcttgttcaccatcacctttaaaactccatttttcccttgaagcctaatggcttgatctgaggaatgaccagtcaacttgtctctcgataagcttacctgggcatcatcccgattgatctcaaatctacccttaccaggatgatttccccggctgcttattctctcaaaatatgaactgtttctcttgtcaaccatacgtctgcttgatccagtttcatattccctttcagaaccactctgagccatatgcattgagcccgcataccttcttcccccaaaaccgatgccactatcatcatagagactactgtcatactcattgaagtcaaacacatccagcttacctccctttctttcaccctcatcaaaaccatttctactcatataaccatcctcattatgctgaatacgctctaacctctccctcttcctatcgaattcgctttcttcaacagcaccctttccaaaagcatttaaatcattgcagacacgaatagtttcaggtcctaaccttctacgaggaggcgctagtagctcatcgctagacccagaatcactcacaggtaatctttgtctcttcttacctttctttgaattaaaagccttcctggaactcgatgaaccatggccgccactgccgacgccaccacccccaccaccaaccaagtcatctcctttccttctaacgatcaaacaacccgaagagtttctgttcttcacaacaacccccgaagacccaacagatcttacaccttcctccatccccttaaaatcctcaaaatcctgcctccatcacctcaattctcaataatttgatctcaacccgaaaaccctaattcctcaaggctaacaaaatctaccagatctgaaccgtaaacaaatccaactctcgaaaaacaaaatcaaattccacacaacaaacaaaccaacaatgaaacggccagggaagattttttttcctagaatcttacctcgccgtcaaactccgcgattccctcaccggaaaaatacacctctcgacaattccgatcgctacccgagattttccggtcgcaggaagcaaaatttagcagaaccaagagagagagagagagagaggaag

SEQ ID NO: 271138 - DNA, 1117 bp, Cannabis indica
aatgtatgtatatgtgtttgtatatgcatgcttaaattgtgatttgcactaccaacacttgtatagatatgatacagagtgcattggtatagtgagtgttgatgttgtgagtacgatacagtgataccaacacgggtacaggaaggtgctaaggtgtgtggtatatcactcagtggtactcagggtatggagtaaaccctaccaacacttgtgtatgtggcatagtggttgtaccctagtattgcacgttcatactcatctgtcaagctctgtaaataggtgtatgtgctcctaattataggtcagaaattgtatgatatgttatatgcatttcttactgagtctgtcgactcatagttctgcttccatgtgtaggtaaaggaaaggcgaaagctgaacaggagtgaacctgagctcggatgggattgtacatgtctaagcagcgcgacctggagtgttcagtctcgggacatctggggattgtattttgatagtcgctatgcgacctgaaatagatgtatatttgaaatactaacttttaaaagtttgaaaacgggatcccgatatttgtaaatattttattatattataaagtttaataattaatacaaaagttttaatttgacacattttttaagaaaaattcaaagatttgcaaagattgcactgtaattgaaaaagcactgtagtgtgccttagcattagggcgttacactttttttccccttaacattattcagattatctctctctccctctccttcactcacggtggtttatcctccagacccgacgctggtattctatcaccggccggcgacacgcgctgcatgtagagaacgatcacccttggaggttttggacagtgaatggtacggttaaactcgggaggtctaggagaacaaaacctctcaatagatcgggcttgaagatcattggaatcgggtgttgacgttcgccagaatctatggagtttcgagatgtttgactctgatttggtggcttctggacctcctttcgactattagtctctaaatgtgtgttctccttggcatgggcttctcgatctcatggttcaatacccctttcatcattatcgaacttgggcagccacctt

SEQ ID NO: 271139 - DNA, 1888 bp, Cannabis indica
ttgcataaactgatcggtctgtactgtgttattcgagatggcttcttgactttgggaatgagggtgataagagtcctattgaaagatgaaggatcaccaccatggttgagaacatccaaaacagaactagtaacaagtgatcccacaatatgccaataggtggtgtagaacataaccgacattccatcgaccccaggactgctatcttctgacatggattttaatgccgcatacacttcagtagcagtaaaaggagaagataaaacttcttgagattcatgagaaatgagctctggaatagtgtcaagaactgcttgaatggcctgctgatcaacaccttgagaagagaaaatatcagcaaaataattttcaacctgattcaaaatgtcgtggctgctggtgtatacttgcccgtcatcaccagtgagttttttaattttgttgttggagtgtctcgcattggcacgttgatgaaaaaatttagtatttgaatctccagatttaagccaagagactcgtgatcgttggtgccaataatcctcctcttgagcaagtaattcatctaaaattttttctgaatgttgcagagcagtgaaatgttcttgagttgtgcttgaagagttctgtagcacttcaacatgcttatgagttgttttaatctttttcttcatatgaccaaacttgtggtgatgccaagagtgtaattgagaagcacaggactgaatattatttaaagtttggggaataggatctgaaccattggtactccaacacttaaagataatatccaaacattctgaatcttggagccaaattttctcgaaacggaatcgagacttgtacgtaggttcagctgtttgcaccccagccaaagagaccgtgagcttaagagccctgtggtccgaatgatagtagtccaaatgctgaagagtaggcttttgaaagaaatcacaccatgaatcattgaaaaagccataatcaagtctttccttcacattaccttggccttgacttttattagaccatgtaattaattcaccttcaaaagcagcagcttccaagtgacagcaatctacagccctttggaatgcttggatttgatcattgttacgtaaagggccaccaattttatcagcttgtgtaagaacttcattaaaatcacccataaccaaccaaggaaaattaggagcaatgtcacaacaccgtttaagtagggtccaagtatgaatgcgttgactactttgtggatgaccataaaaaccagtgaaatgaaaagaaggcagatcttgaaactcaatgaaacagtcaatgtgattagaggagaaattgtttatggtaacatcagcttccaacttccaaagtaacattagacctcctccaagtccatgacgaggaacttcaataccattaggaaaatgtaaactattacgaaacttatcaacactaccagattgtaattttgtttccatgagaaacaatacacagggagcttgctcagaaatcagcaagcgtaaaaatctgaatgcagtggggttccccaatccccttgcattccaacttaagagattcatggtgagtcgcagtggagcatagcgtccaccgcggaagtaccaggctgttgcaaggttgaatctgcagagaaaccagaaagaaccgaagcagatgaacggtcagtagtggctggtgtatctgactgaccattgttatgggaacggcatcgtttgagaaatttacgaagagattccgactctattgggcgtttagaagcaggattgtgaccaagggcattatcatcaatatattgagggccattaatgtgtgggaaagcaatgctctgagacatattattggtaatgtccgaaaaaggaatagaaatagatgtggaatc

SEQ ID NO: 271140 - DNA, 1114 bp, Cannabis indica
agtctgcaagcagtattatctcaactgatgagggaaccatgggcctatataatcgagctttcaataagtagatctagaattcaccaagtaaattccctaacttattaattccgccttgtgccactataaatttggaattgaatagcactctaagttatatagaatactctatatgtaccacaatatagatacgttatgattatatgttgttacaatcctaatagtcaaagatcctcttttgatgatctacatcgaaaagggacaaatttaccattctacccttcaatgtattttatccttaaaacacttagctacctataaaattactgaaatgaggcctcaatcatttatttctattcagctaagctcgaagaaaatcatcgtttcacttctaaatacttatataagctatagattctatatttatgatcagcgttcccactcaattaaactaccatgttcccaagatataaatatctactagaaccatttgttaccatccacgaacaacttgaagaacataaataatacaactaagctgaacctaaccatatcaggattaagatctatagacgtaagatcaaccattgatattgagttagaaagatataacggtaagtatatgatatcttgtctaagttcattatcggtcccttccaatgtatactctatacatctaatacttgtaaactttgccaatgccctggaaaggacattacacttatccaaggtgtaagtttaccttatcgtcgattatcatgtcagtctaaatccagtgaactgacaaataattataattaaacttttgaacatatcatcataattatattcaactatgctgacgacactataatcatgaataactatatatatgtttatatatgttctggacttaatagaatctatacattaagcataatcatgaaataaatcatgtgaaccatgcaacataaaacaatttctgatcttttattaattagtaaatttaattatgttgaaatgggttttatttagggcacaaaacccaacaatcgccatgggctattggcatgcattgctttgggagtattagtaggagagtgaagcatgtgcatttctcctccttctcccttag

SEQ ID NO: 271141 - DNA, 945 bp, Cannabis indica
ttataacctgggatattagtatgttttttatattatgcttttcgtactgagtctattgactcacagtgctattgctatgtgtaggtaagggcaaagctaaagttgaggagccgtgagagtgaacaagtgaagattgtacatgtcggggcggttaggcctggagcatatgatcctcgagacattagggcttttgctgtttagtcactagttgacaaatattttgtatataaattgtaaaattttgtaactgtattttgtaaacgggatcccagaattttataaatgtaatatattatgttttaattaaataagtgaaattctaattattcacaatttccaataatatcgttgattagcaacgagctgcacagtacgttaaaaataacactaacatacctatagtagttagggtgttacatcgccttagcacctagtcaccaacgttgaaaagtctctctccacctttcttgttgaagtatcttgtcactcggtgttggtatgctacattagtgatttgcgactcaacacgtttttctttaaggagatccaaggacaatttcaatagttcttagttttcttcttgatcataaaactctcgtttatgggtcgcaatattaacctccactggcagcattgcctccgagccaaatgccaccgagaatggagtatacctagttgctattttcttagtttttttgttagcccaaagtacaagaggtagttcatcgacccatctgccttttgcagcatcgagcttctttttaatagtatccttcaaggtcttattaacagcttctacttgtccattttcctgaggccttgacactaacgagaagatcttaataatcttgttcctctcgcaaaactcagtgaataattcaccatcgaactgagttctttcatcaaatactatcttaacggatattccaaaccttctaattatgt

SEQ ID NO: 271142 - DNA, 843 bp, Cannabis indica
aaaagatgatgcatctattccctgcagagaaaaactgaatgccttctccctaaccctacgccgccaccctctctcctttttctttcacttctgaaaactgaacccttgagtgatagagtgagtgcccacatacatcaagtggtacctcaatcatagtgtggaagatcgtgaagaatccagattcaatagaaggacattcgggctcagatcttggtgatactctgtgacagaaaggatacaatggttagagatctgagtggaaggagacattatattccgctgcaaccactataaggtttctcatactttatatgtgcttatttcatatcgttttagaagttcatatttaggatgttaaacaacatacttgttagtaaatctaagatcctggtaaaatatttccaacaattggtctattaagtggccggccttagtgtgcaatattacccaatattttttttaatccatataatttaaatctaagccctagttgaaacactatgaaaagaacatgatgctctcatctcatccacttgacaacttgacttttcaacctaccaaatctaatttttattctctgagaactagtagatgagagacaccttctacagtgattttcaaacctccttcattgttcttcatactcgatcctataatgatagagtgccatgcctacacacagcaagtcaagtactcaatcatagtgggtaagacggtagtaacaaaacccgaaggagagaaagacatccaggctcagatcttgtaaatactctgtgacagaagggaacaagtgttagagatttgagcgaaaggagtcataatattccactgcaatcaatgtaa

SEQ ID NO: 271143 - DNA, 947 bp, Cannabis indica
tgacactgtaaagtctttagcttgcccagctgaaacctctcctctaacctttattagctctggatcggctagctgagccactttaatacattctaacagatgattgtagtgtcaagttatgatgtttgcctacaacaaactcaatgcttgatctaatcatatcttccgctaactgaggtgaaatttgaatcatgctagctacctgctcgggaccctttctgctcagggcatcatccactacattagctttcccaggatggtaaaggatttcacaatagtaatccttaacaaactctaaccaacacctctgtctcatattcaaatctttctgagtaaagaaatatttgagactcttatggtcagtgtaaatttcacatctctctccatagagataattctgccaaatctttagagcaaacactactacggcaagttctaggtcatgagtcgggtatcgctattcataatctttcaattgacgggagacataggcaataacccgatcaacttgcattagaacacacctcagaccctgtctggatgcatcacaataaactacgaacttctctctgtcagaaggcagagctaacactggagctgtaattagcctctgcttcagctcttgaaaacttgattcacacttatccgtccatataaagcgctgattctttttggtgagcttggttaagggtgttgaaattttagagaacccttctatgaatcgacgatcatatccagccagacccatgaagcttctaacttctgtcactgttttccggcttggccaatccctgacggattctatctttcctggatccactttgatcccatctttgctaactatgtgtccaagaaaagacacctgagacagccaaaatttgcacttcttgaatttggcaaataacttatgttcccgaagtcgccgcagaaccattcggagatgttgc

SEQ ID NO: 271144 - DNA, 743 bp, Cannabis indica
gccaaagccaacactcgtacctgggaatggccgggtagggtctgcagttgaacacaagtctggccgacctttaccatacactctcccacggtatggccgaccatcccctatctcactagaatctacaacccctccaaggagggccagtcaatcaagtccccacagaaacagatccttctatgcaagcacagttggatcaactcagggacatgattcaaggcatagctggcctgaagccttaagatcttgaattagatcggtcaaggggatcgccatttttggcatacataaatgccttgcccttgcccaagtttaagatgctagtatggaaaatgtatgctgggcaagaagacccgttggctcacatcaaatactttgagatgcaacttgatctctagaaggttactagtgaggtgcgatgctgcatattcgtcatattgatttcgtcggaagtcaaagagatgagcaacgaagttcagacaagaaggcagccactttgtcaaaaacaggtcaacaatggtacttcaaactcaccccaggaagattcaactctttggctgagttctcttgataattctacacacaatttcctcaaggcttataccatcgtaactagaagaccttgttgaagtcaaacaacgacaaggagaacctttgaaggattatatctagaggttcatggccaaggctacgaaagtcaaaggccttacagaagaaggccgatatacgaccataatgggggg

SEQ ID NO: 271145 - DNA, 972 bp, Cannabis indica
aaaccctttctcataactatcatacggtctacccaacttatcaaaaatgctggctgctacataagaatgagtggccccagagttaaataatacaaagaagtaagagttttttaccaagagttaacctgtaacaactgaagtgctagcttcagcatcagtctaagttaaagcaaacacccttactggagcgagttttgctgctgtcttttgttcttctttcttgagttgcggaaagtctctcataaagtgtccaggcaacccacagtggaaacatcctcaacctctacactcacccagataatgcttcttacaactgggaccttctgggtaggtatatcaggttttgaaaccaccctaaaggtttccttgaccctggttccctcgttattctaattcaagccaccaggtgcaaatggtgccattctgttctggtcagtggtcgagtcactaccacccctaccataactagaggtaggaagactaggggctccaccaacaacctgagtgcctcaggactcctgggtgaactcaactgtgccctccatttgtagtgcctttcccaccatatcaacataggtgatgttgtcatcagtggcaatcaaaaggtcgtgttttatttttggattcaatctgcctaggtacttttctttcttgatgaagttggttggcacaattcttgaggccaacctagacaatcgatcaaattgagttgtgtattcagtaacgctcatattctctttctaggtgagctgggtaaattctttcctctttgcactttcgattgcctcattgtagtacttggcattaaaaaacacctggaactcttcccaagtaacagtggtaacatcttgagtcagggacaccatgtccgaccaaaccagggcattctttagaaattggaatgtggaataggccactctatcattaccagagacaccaataaaattcaagattcttataataattgtcagc

SEQ ID NO: 271146 - DNA, 628 bp, Cannabis indica
tttttaaatcacttcataatttttaaaattttaatttgctttttaattttcttaattatttaaaattattttttttaagatctaaattattttttaagatttactgaaaaaaatattgaactttctcatttttatttttagagagtacgatttgatagttttcaaagtttaggagtaaagtagctaatttacaaagacacatcagtggaatgatgagatggaacttaacaaaaggactaactagtttagtgtaaatgtaaaagttcatggaattttttataagacgtatattttaagggcagaatcagtattattgaaagtttaaggggcaaaactattaattatttatttttttagtattttacagtactttgaaattaaatttagctttgatgttttacaaaagataaataaataaaataaaatttagcttagatgtaccacaaatttttgtgttatgtttaagtaagatttgaggaagatttatcatattatttatttattattttttttttgaaagggaatcatattattaataatgttttatctttaagtttttgtatttgggaaaaaacaaaaaaatacaaaaaaggaaaaaaaattacaaaaatactttgggccggcccat

SEQ ID NO: 271147 - DNA, 2839 bp, Cannabis indica
aaaaaaaaaaaaaaaagaaccatctgggataagctggagcattcccacaaactggaactggtgttcattagtaaagattgtcactccaatagaaaaagaacagacacttgtttatttgaaacttctaaagttttcagaaagggaaattaattatacataaattgttctttctttttatttttgttaggagtcaacggaagaaacccagattgattaaaataagctaatcttaataaaaataaacgtcactgtattaaaaatgtcttaacttaaacaaaatgaacaatgcgtttatgaatgcattaaattaaaagagaaactctaacaattgatacaaaagatcaaaatttaattaatgtccgctaaggaaacaacagctccataaataatcttgtcatcaccactatcatcaaaacaaatagatttcagatgtttgtccatggcaagcaacaacgatattatctcctgcatgagcacatgggacctgtctccagcaacaaattcattaaccgaaccatcaacttcaattagactacaacctggcacttttgttaccctcttcctttccattgtctctcttactgttttcacacaatcccactggtcagcagaggcatacatatttgaaagaagaacatgaaccccactatggtccagtccttgtttggccaagtgcccaaccatttcttgacccaactcaacattaccatgaactctgcatgcattgagcagtgcacccaacacatacgagtctggctccataggcatcgttcttacaaccttctttgcctcatctatcattccaactctcccaaggagatccaccaaacaaccatagtgttgaaccctaggctcaactctataaacagtacgcatgctctcaaatattttcaacccttcatctaccaaccccattctactgcaagcactcaaaacacctataaatgtaacttcatttggtaggactccttcatcgtgcatcctcgtaaacaaatcaatagcaagtgtgctcagaccatgattagccaggcccgaaatcaaagaagtaaaggcataaacatccctctctagcatctcatcaaatacaacacaagcagtttcaatacaaccacacttagaacacatgtcaataagagctgtccccatcattctgtctagttttattttgtttttgttcaaatatgtatgtatccactttccctggtctaatgcaccaagaaaagcacaggcagttagagcacccactatactattatgattaggagcaaaaccggaagcctgcatgtcactgaaaacctctaaagcctctttgaaaaagccaacttggcaataaccattaatcatcgcgctccaagacacagtgttcttttcaggcatttggtcaaacaagtctcgtgcaatcagaacttgaccggacttggcatatccattaattaaggatgtccatgtaataacatcccgattcccactcatatcaaacagcttacgagctggatccatacaaaaacaactagcaaaaaaatgtactaacccattctgcacaaagtcatatgactcccaacccaaaacaatggtttgtccgtggatcactaaaccgagagataggtcagaaagctcagtacaagatctaagaagaaaagagaaggtatagttgtttggtaaaagaccattctctcgcatactcttgtaaagagacatggtttttaaggcctcatttctctcggcaaaggctctaatcattgtgttccagatgtaggtagtacggtaaggtagacaacagaaaagccgatacgcatgacaaacatcaccagcatcagatgttgcacaaaaggatataatcttggcagcagaataagaatcaaaaagggtgcctgaaatagtgaggtgtgattgaatttgcttgatttgcctgatttgccttaaggcgatacactgatccaagagggaaagaactctcctactggatttcatatgatactataagtaatccagctcaactagctgccaactagaattaacaaacaggcttagaaatccaatatcccaaacatttgaaatccaagcctctgttagtcaaaacaacagatgagttttcagtttcaatggctcgtatgctgaaatctgaacagctcgtcaactaaactaaaaaagtctataatgctcccatcgcaaacccaaatccaacaacaaaagaaactataactcacatttcgtaatatttttcatatcaagatacaaacttttataatgcacggctgcccattacaaccaaagagagaaagaaagataggaagagaaacaaagcttcaacggatctgataaaaatcaccaaagacaacaacaagaatctcaaaaatgtaaattcgcacaactagatcagacagcctccgaaagactcaaattcagctcaaaacaacagatcaaaaacgaacacaagcaacgaaatttctcgatctgaataacattaaccccaaaacaaaaacaaaaacctaatccaatcgcaaaattaaccaaaaaaaaaacgcaacatttctaaaaaaaaaataaaaaatccaaagtacctcttgttcggacaaaggcttgcactgcatcaactgagcaatctgctcatcgaggttaccatgggagttcgaagggaccgaatccataacaagtcgttctccttcgtcgtcaaactcgctccaattacagatcaaagagtgaagatccttctacgtattcctctcctcagaaacctagagctaactccacaaaccctagaattcgtcttcttcgaaaacctctctggtagaaagagagagaaagagaagagagagaagaagagagagagaagagagag

SEQ ID NO: 271148 - DNA, 501 bp, Cannabis indica
ccctgttacacggcgctcaaccatagggtactgtgttttacttggagatagtctcatctcttagaaaacaaagaaacaaccaacaatctgtaaaagctctgcagagacagagtaccgtgcattagctgctactactagtgaagtcacctggttacaatatctgctccacgattttcaaattcctcaacctcatccagcattcatttattgcgacaaccagtcggcaatacacattgctaacaacccaacttttcacgaacgaacaaaacatattgaattggactgccattttgttcgagataagatcaaaaactcaactattcgccttgttcctatctcgggttcacttcaacttgcagacacttttacaaagcctctatcatccaccatcctcaaaaatcacatttccaagatgtccatatacgatatatacgctccatcttgagggggggtattaggatttgtttattagtctttggtagttagttagttactacagtt

SEQ ID NO: 271149 - DNA, 999 bp, Cannabis indica
agggtatatttgtcataattcctttttgaaaaatacatgtcctctgattttagcagttttgtggtttcgagggacatcaacaattaatgaccatcttttccacttctctttcaaattctacccgtaggatcaattatccctctaatctaagggagattaactcaggagtataaaatggaaaagggaaccacctttgcactacttttgccattttagaaattctaagaaattttcaaacttttctgccgaaaaaccatcaccagatttactcgaaaatttgcatgccatctttgtcactaacatttttcctatgagtttcatccgatttaatatttgagtttaagcattcggagggatcttcacgacattcgctaattcataaattgtagagtcgttcatcatcccaaaaacaaacttcaaacagtaagtgacttttctccttcttttcttacaagttttttatgttgtatttttgggtttaattaccatcttcttggtcagcatcgttgttatctcgtttgggtttagcaattttaagggtcgaattgtatctgggtaaatgttcgggtttagacaatacgtgggttttctaaaatctccaattcaccaacttctagtttcataaatttcttcaaggaattgggattgctttctcctagcagcaatgtcccaatctggtttagaagtttatcgcccagaagatttagaaattgagtatcctactaaaatttccattccgtacgaacccaaaactgcaaaacccaaattcaaattggagataaatgatgctaaagtaagggaacacttagtgaaaacccaccaagatgatattgacagccgtcacaggcgcttcttgcaagagatcacagaaggcaaacaccgtttcttgtgagatgctgcctagcctgaacctcctagtgtgtcctatattcctttggctaagcctttatttttacctaaggtcaaaattgctttcgaaccaggtgacttggattttga

SEQ ID NO: 271150 - DNA, 3857 bp, Cannabis indica
aacatatgattattagttggaaattcaaacttggtctgaaaaaaaaataccaaagtcatatatattgtattttttatataatgatttcgtttgatgtattattaaaaaatttagaatattaccgctattctatcccatatagtctgaatgagtgtagcctcaatgtggacattcttgtagtgaattaaatttatatagttcgcaagttacttttatttctctcgaggataagttttggcagggattccacatacaaaatttgtcgtccctttcttattattctcactgctatttataggagtaagatagtaattattgaattttttttgattggtgattacaaaattgtaggtttttttatatttgctttgacttagtcaattaataaggcatgtatgttgtcgtcgagcagaaccattttcaactcttcttctcagaaagcttatttgaagaaccatagatcgagagcttccccaaagtgaaccttgttagccaaatcaacgttaaccatttctgacctaggcaagagtcatgattatcatcttccttttcttcgagtaacatctcgagttcactacaacgtacaaaaagtattgttcttgttggtcctcaaatcagttttttcgagaaccgtcactaataaaattaagtgagtgtttaaaatcgatgcatgtagttaagaatacccgtcggttttaaagggtcattagaaatcaatgtcgattttcaaccaatattgaattaaaaatgaaatgggacatttttggcattatagccttcggtttttaaccgtaggctaaaatatagctgacgatttgctttaactgatggctattctcctcttattatataaaacactttgattcaattcatttcaacctacatctctctctcacacacacacacacaactctgacgatccacgatcaccacctcctatctctccatcctcactctctcattcgagttgcgatccaccactaccacctcctctctctttgcccttgctctctctcatcaaaacaacaatctagacgagccacctcctcctcaccgcccaccatgagccacaaccacctcctcctcgctatctcaatagactcatgacccctcaaaaattataggttagagttagtgaacttcttcttttatttcattacaaattaaacacaaaccatttaataaattggttttctttggtaattatttcatttattcttataaattagtatatgaagaaaaattttaggtcaaggattgtcaatgagcattgtgcaaaagttgacaagtttgaaattgtaactatgttcaaatttcctttctttttgattttttatgtagggttttgtttgtttcccaataaaattagtgggaaaatgtaaactaattttcttttcatttgtatttgcgtctctcatttgttcacagtgtatgttttgaataataccatatattgttattttgttatgagatttggctcaaaatatagcaatagtaataaagtgtcttcaatgagataataggaattgttatatgaaattattaaaaaagtatttttaacctagatttatatttaatgaactgcaaaaaaatataacaagaagaaggaaagaaaaataaatcaattaggttttagtttttttttaattgttaactatagacgaaagtgtaaaattgtcgacaatagtgataggtcgcggtttaaaactttcggtaattcttcttctattgttgacgattttgatgtgtttgtaaacctcattcccgactattttctaccaatgcttactctatccagttttgtgtcggtcgaataggcgtctgtcataaagactaacaaaaatacaacactcgactgttttaaactatcgaaaaattgtttttttagtagatgctgcatatgactcaagtaatatccctttaaataaattatgttcactactagaaaaaaagacctttctcttcaagttttatcctagtttatcttcggttttaaaaacacttactacggaagtcgtttaggcaaaaatgtaagttctaaaaataccaaagacgtaaagggggcctatgtctttggttattacaaaataattgaagacataggtagagcagaatctaaaaattgtgtggggaggaagacctacgtcttcgattattatgtaatcatcgaagacatagctcattttcttcttcggtgacgtatttttatttattaaattttgaatattatttttaattataattattacatgttaatttttgttagtaattatatattaattttttgaaataattataaattagttataattataaagatttaatttgaaatataattcattttaattatactatgacaaaaaagttaaagtttacaaaatgcaatttaattatattataacaaagttaaagtactttataatatgttaactccttactaataaaaatacaaaataagcattgcttaaaattagaagtctaaaggtagctagtacaagtattgtgtcaattttgctaaccacttatgttacaatggttgcaactccgtctccacattgtaagtttacttctttccaaattgtaaattagttattactcaatgaaataaaaattgattagaatgtttatttcttgttggagtaaaatttgaataagtgatcaatttacaaaattatccctatatatactttaacttttattcttatataaaaaaaaaaaaaaaagatatttgagtcattttactaacatttgtgatgtacatagcttctccaatgtaataaaaattctattacataatataatcacaataatattgttatctcattacattatttttaaaagaaaatcgaagattatagtagtaattttgattctattacgatctctatcacatgaaactaaacataatcttacatattatattaatatttctgtgttgttttattggtacacaatggtaaaaaaaattcatgagtatacatttaaacaacatgacacatgatatacataatccttaagaagaatttgtatcacactatctttatttaaacgtaattgatgaaaataaaatagataattaacctacatgttttgatgggattacatccctctagcacgtctctacactagtatacgtattagctcaatctaaaatgcacaactttgttttaatttgttttataaataaacttgttcactaaattactaattgttcaataataataaattgcatcatatctccaattgttacaccaatttagtatagagtctacaccaatgtaaaatctttcttttatgtattttggtacaataacttcattgattcacacattaaatatctcacaaaataaatatattttacttaaaagatctcatattattatattaattacattaatagctcaaaataattaatttatgatataattatatcatactaaaaagatttttaaatcttaaaataatctaataaaataaaatatttattaaatcaattaaacattatacgttatatatataaaaagttattaaaattctatatttgatcttaatatacccaattatttttaaaataaataaataaggattatgcaaaaaaataaataaataaataaaatctcactaataatataaagattctcaaaataattcaagtctatatagtcaatattttaattcttttcaagtgatcaatttgactattaaattattatttacttaatgtttatcttcatttaatttttttttagtttttataacttagtgttatgttgcttttattttatttaatattagtattatttgttattatcattttatattttctaaatacgtttgtttttctaaattaattatta

SEQ ID NO: 271151 - DNA, 937 bp, Cannabis indica
ctaaataatacttatggtgtgtttttttttttgacgcggatacttatggtgtgttgatttcccattatatgctttatagcacatattttcacttcattcttcattgtgtaaaaaatataatttactttgattaagtgtggttcattagattgttcataataaatatctttgattttttgtagtttcattaacttgtttcacatcacaactaatgctttgaaattatacttaattaagtgaaaaattcctatcttatgaaaatactttgtgcttaaatgaaaaatatattttaaaaaatgatagtttgattgagctcaactatcaaggaaatttgggagtcgataaactattaaaaattattaataaatattatgtattctaacgtcttaataatcttttctccaccataatttattcataaaatccatattatgaggccgaagagttgatttacatgtaagagagactttttaaaattaaaattaactaaactctaacctagctccaaataattgatgagatttgtttcaggaaagaaaataaatattttaatgcctttttttatttttccaaaagcaatgtaattttacccaagcaatgtactattttaaatcatacacaaaacaatgaaaaattaagtttttttattaacattaaccgaaaaaatatatacacacattacatttaatagctcaaataaacattaacaaataataacactagaaaccatttaacaaagaataacactacaaagtaatatgattcaattattaacaaataataaaacaatgaaattgttaaaactattaataattatgtggatgtccaaattttttatttattaccattaattgtaatcaacatttctcttttcttagtttccttttttcttagtttcttaatatttgactcttgtatttgtataaataggggttca

SEQ ID NO: 271152 - DNA, 550 bp, Cannabis indica
cagaacaacaggtttttagaatagtcttctcccaaagtcaatatataattaactatggcccactaatatttattcatagttaaacctacatgcagttgcctgcatatattgtgaatgtctaactacagtaaataatcactagtgtgtctctcggcctcactgaggaggtaaagaaggcattaaagggggctttgaaatatttggtttgaactttataattatgctatacaaatccataatcatgatttgtatgcttttgcaaattcactgtcatgttttataaggcaaccaataccatcctactccacctgttagctttgttggtcaaacaaatttactaacaggtttaagacaaaacttcatactagacagagatgtaccaatataattgaaatgataacattttcttgtcattagtacaatgctaaaataaaggaatatatagcataataattaaagaaaatcaaatgaccaatgttagggacttttcttttcatttcttgtgctattttcttagtactttagagcaactaagatggtactcaaaaag

SEQ ID NO: 271153 - DNA, 4169 bp, Cannabis indica
gtaacacgtaggtctatgacacatagatataaataggcgtgtgagtgtaacacgctggtctgtgccacatagctgctcttgtttgtttggtttatactctatggaaagctcgcaatctcagtttgtgggaaaagagtaaaccgaatgcagcgaagatgttcgaaagaataagaagtgatgttcttcaaagagttactgcaatatggccgaaaaaagtatctattgaagataccaactggtttcaaagcctttaattggtgacaaagtttaatagtttgtacagattgtatagattttacaaataaaaaagaagagagttacatttgtatagcagttcattttaggcccttttgggtgctatttgattgtacaaagatagtttttgagcaatacaactttccctgattcataaaaaaaagtatgtaatgtgttaaatattgattattgataattatactatcttgctgggcttggctcacgggtgctctactgtccagaaaagggtaaatctatctctgatcaaccatgagtgtgagagctaagcgatgtatgtacatgttcggggcacactagaccaagcaatcatgtcaatccaacacttgtgcctgaagtttcctacccaagaagcaggaatatggatggttcggggtaaccaaggagaggcgagatagtgttataacgttgtagtgcacctatccatcttggcaatccaagggactaaaccgacataatcggcggggcaatacgagttggaccctcgcattggttctgaagcagcatcagagctagtgaaggatattgaaaaggtaagagtatgctatcaagatccatctaaagttatctgcctaggaaagagcctcgacccggaagaacagagcaagattattgagaccataaaggcatcagcagacgtgtttgcatggtgtcatggggacatgactgggataagtccccacgtaattactcacgtcctgaatgttaacctggacatgcccccaatgcaacgataaaggcgtccgctatatccaataaaggttgatgccctggagaaagaagtggataagatgctgtcaaacatctttatccacgacgtgtattacgcggactggttagccaacccggttttggtgcccaaaccaaatgggatgtggcgaatatgcatggacttcaccgaccttaacaaggcctgtccaaaggattgcttcccattgcccaggatcgactagatggtagatgccacctccagttcaaactattgtctttaatggacgtgtattcaggatacaatcaaatcaagatggatgtcgcaaaccaagaatgtaccagcttcaaaatcgacaagggggtatactgttatctagtcatgtctttcggattgaaaaatgttagggccacgtatcaacacatggtcaacttaatgttcagaggcctcttggggcgttatatggaggtatacatggacgacatgctggttaaatccaaaacaagcatgggccatgttgacgaccttatggagtgttttgaagtagttaggaagtacgggatgaaactcaatcctaagaagtgtacttttggcgttaaatcagggaaatttctagggttcatagtgagccagcaaagaataaaggcaaactcgaaaaagatacaggccttgttgagtatgccctccccaagaagacacaagatgtacaaagcttgaccaggatggtagccaccctgagttgcttcatctcccgttcaactgacaagtgtatcccgctcttcaacatcttgagaaaatgccaaaagtttgaatggactgaagactaaggaggcatttaagaagctaaaagagcacatggccctaccaccaatgttgtcaaagcccattcacggagaagacttatatttatatatagccgtctctgagaatgtggtcaacgcaacattggtccgggaacaaggaaagattcagcacctggtctatcacatcagtaaatgcatgatagggatagaaattcggtaccatgtgatcagaaaactagccttctttctcttcattgcatcaagaaagctgaggccatactttcaagcgcactccatcaaagtatttacaaaccacctgctttagcaagtcttgtataaacctgaagcctcaaggagactccttaagtgggccatggagtcaagtcaattttacatacaatacattccctacatcttgattaaaggccaagcagtcgcatattttattgtagaatgcaatgaaactgaggctaacgccaatgtgccagcttcggatatgcctacgtgcaaagtatatgttaaactcaaatgagaatggatcaggggctggaataggaatgatatcacctgacggattaagactccatgtcgctctgaggtttatgtttctggcttctaataacgaggttgagtatgaagccctaatagtaggattaaaattggctaaagttgtaggagccaacagggtagatgtatacagtgactcacaactaattgtcaatccgatgttaggagaataccaaacccagggggaaaagatggtcacctacgtataagttgtcagagaattgttacaagaattcaaggagtataagattgagcggatcccacaagaaagaaatgcccatgcagattgtctggataagttagcatcaaacagcgaggtagaaaagctaggggtagtgccagttgaataccccacggagcctaacattaggccaaaagaggaagtggccaccaatgagcaagggtcaagtttgatggaccccatcatcaagtacataacaacgggagagctgcctcaagaaagggctatgtctagaaaagtacagcaccaggctcaccgatacttgatgatcaacgatatcctctatcaaagggggctcaatatgtcatatttaaggtgtgtgtcggattctgaagctagacggattgtgcaagaagtccatgaaggattctgtggagatcctaccagagagtcgagcctttccaagaaattattaaggcaagggtattgttggcccaccgtgaagaaagactgtatagactacatcctcaaatacgatccatgccaaagatttacaaacatcccaagagccccgcctaacaaaatcaccttaatgactagcccatggcccttcacggtgtggggaatagaccttattgggtctctcaccacaggaaaaaatggcgttaaatatgcgatagtggtggtggattactacacgaaatggacagagcatgaacctatgaagactataattgccaagaaagccttggactttgtcgtaaagaacattatgtgtcgatatgggttgcctcacaagatagtctcggacaatgaaaaacaattcgattgtgacgaattcacagacttcttcaaaaaacacggagtcataaagagtttctctacggtcgcgaggccacagacaaatggacaggcgaaagccgtcaagaagatacttaaggtcaccctaaagaaaaaactcttggcctacaaaaacaattggcctgaagggttgccacacgtattatgggcctacaagaccactgcaataactacaaccgggcactccccattctcaaaggtatatgggtgcgaagccatggtcccagtagagactttcatcccctcccataagagaacaacatacgatccaggaacaaatcaagccttgttacaagaagcactggacttagtggacgagctttgggaggattcgcaaatgcgcatggcaacgtaccaaaagaaagtggaaaaatatttcaattccaaagtcaaaaacaggaaattttccattggtgacttggtcctaagaagggtctttccagcctcccaagaactaggagtgtgggtacttagaccaaattgggaaggcccgtataaagtcaaagatgaaacagactctgagacctataaactaaagtgaatggacggatccatagtgccttgagcatggagtgttgaccatctccaaaaatactaccaatagttaggagctcagtattaaattcatctttactctgtaagttagcctgcgacaaacaaagtatatgcattatcccacataaatttaagctaagtgacccaaaatgtcttttttaagtcacttagggggtactgaggcatacacacacgcaaagacaggcaaagcaaaaaaaaa

SEQ ID NO: 271154 - DNA, 995 bp, Cannabis indica
ataattataaaaaattaaaaacttgtttttttttaaaaaaaaaataaagttcggtttgtaaacccgccaaactgtggattaaaacagtcgattttttttacatttttataatggtcggtcgattttcggattagaaccataaaaactaaaaactgaattttgaattttttttttgtaaaaaaccgaccgaaccgacccttgctcaccccctagtggacaaagaattggacaggatatatgggctgaggacccactttctaaagggaaacctataaaaacactgatttttgacccaatctttacaaaaaatattaccacacggcagaaataacttttatcctgtcttggccatttgttttcttttatactctagacacaaaaaaaaaaaaaaattacttacattttatattagatatcctgcctttgggatgcatcttttgagcgagggtccttaagtgttgatatgtctgagagattctgattgtaagcggctgtagcctctgcatcatactcaccgagaatgaactcttgaactacctgaaaatgaaaaaaatatccaataccattattatcagtatagtctggttctgaccgattttaaacatgaacaaggctactggcatttagacttcgtcttagacatatcaactgtaggtttctgaagtaagagcatcataagcacacaactagtagtggcataacaattacaacacaaaagatcagctgtgcaactaaagtggataaatgcatcagaagatgtgtgtgtcaacatcaataccccctgcccttccctccaatagatacatgtaaaagacgacaataaacatgacataggctggtagcctaaatagtaaataccttttcctcctccaaatgaagttgccgtactctttttggatagcagaattcgtatgaccaccaaccttcttgctgcaatggagaataggtaaaattagtaactaaggtctcgattggtgcgtaaagtaggataacat

SEQ ID NO: 271155 - DNA, 1413 bp, Cannabis indica
tcgtaactcaagacatgagtcgggtctgatgcatatttcctcaacattgaaatatgaaatatgttatggacagctgataacactggtggtaaggctagccgtacctgcatgaccatcttgagtatctgaaatggcccaatgaacttaggacttaacttacccctcttgttgaagcgtcttatacccttcactggagaaacccgcaggaaaacatgttcccctacctgaaatgtaacatctttgcgcttcggatcaccataacttttctgtttgctttcggaagcaagcatccgagccttgatattgtctatagcttcattggtcttttgaaccaattccaaacctaggtacttcctttctccaatttttcccaatgaattggggaacgacatttcctaccatgcagcatctcataaggagccatccctatcatactttggtagctgttgttgtaggagaattcaatcaaaggcaagtaattactccatgtaccctcagagtccatgacataggatcgtagtagatcttctagtatctgaatagttctctctgttttcccatcagtctgagggtaaaaagttgtactaaccacgaaatccattgcaatgtcttcccacttccacttaggaagggctaatggttgtaataaccctgccaacctctcatgttcagctttgatttgctggtaggttaaacacttcgacacgtactctaccacatcccttttcatctcataccgccaaaagtagggttttagatcctggtacatcttggtggttcccagatgaaatgaatgaggtgtggtgtgggcttcatcaaggatttctttctagagctcatcaatattaggaacacaaacccgagccttatacagtaacatttcgttattcgagattgaaaaatccttaggccgaccagcattcacctcatctcgaatcttgattagctctggatcttctaactgcgcctttctgattgtatcaagcaaattagattggaatgtcaagttatgcaactttccaactacaaactcgatctttgcattaaccatctctgaggccagttgaggagctatcattacaatggtgaaaacctgcccgagacctcttctactcagtgcatctgccacaacattggattccccggggtgatacaaaatcttgcagtcataatctttaaccaatccagccaccttctctgcctcatattaaatctttctgggtgaaaagtatttgagactcaatgatcagtgtaaatctcgcatttctcaaccacaaagatagtgtcgccattttttagtagcaaatactacagtagcaagctctaaatacatgcgttgggtagcgatactcatagtctttcagttgacgggaggcatattctataactttgtgagcttgcatcagaacacat

SEQ ID NO: 271156 - DNA, 1763 bp, Cannabis indica
catagaacccatcacccctctttttcttctttaaagcattaacactcaaaaccaatgagagtattatcaatgatcaaatgcctttggaagaacgcactttactcgagattatatggccaaggacttcccgcattcgaatagtcatagactttgtaataatttcataaaaaatattacaaagactaattgagcaaaaattaacagctcgaacatggttatcaactttaggaatcaaacaaataagagttttattaatacatttcaagcttgattccccattcatgaaagcaagtgtcactgcaacaatgtctgaaccacttcgtgccaattcttttgataaaaaccataaatgaaactgtccacccccaggcttttagacgtatccatttgaaaatgaactttgtcacaaaaaatttacgagtgaaacgttaaattcatttccaaaaaaatctttaaaggaataccgatgctaacacccttgcaaagggatcctcttagggatgatctgaagtaaataaagtagaaaaataatgcacaaccacctcaccaatattggtttgactcgaaaactctttacttgccccattcaaaattttagatacaatttgctcgtctaccaaaagtacagtacttgcaaaagtagatagaattttgatctccgaacttaagccaatcattcttagctcgagaagctctataaagcatatgaagttcttttttaatcttgcatagatcctcacaactaatatttttaataaatttttttatttatcatagaaaatatgggattttatttttgaatataagtatggtagaaaaataaaataaaataaataattattttagtaattaagattttttctccttaagtataacaaaaattaaatttaataaaaatatcgttttgtttagctaaccataaataattaaaattagatagctcccaagatggaggttttggtgtaagaacatagttcaaccaagaaataaaagttattaagacaaaaagtggtgatgacataataattcatatatatcaatataaataaagaaattaaaaaatttgcaatatattaattcacatgtgaacacatgtatacgagtactagtaaacggacactagtatattttatatattatcacacattatttatatagtttcataatttaaaagacaacaaaagatgataaagaataatgctaatattttgccctagatgagcatttggaaacatacatagttgaagtatgttttgaggtgaccgaggaccaatcacttctaggagatggtgactaaaaagaatatataaacaagtgaaaagagttgacccgacataggttaagcctattttattttttattttttagttaattagttatttattttgtttaattgaattaattgtttttttttaattattattttcctttaacttgaccttctcttctgcatcttcctatggtgatggaaaattaaatgccatgatggggtttgcacatggaggctgcggatcatcatcatcatcacactaaaaatctaattaactacctaacaacaacttactaataaagcctaatattactactacttaattaaacaagctaattaatttattgtctttgatagtctctagttctatagtacaggattaggaataggagtatagtagtattggccattggaacatgttaattgggtctttttgagcctaatttttctccacaaagggtgttattaaatgactcaaaacttgacactatac

SEQ ID NO: 271157 - DNA, 534 bp, Cannabis indica
caagaagaattacgagaaaagccaacgaatcatacaggttgctgcccggttttttgcacatgttgcaaaaaactaatcccggaacaatagtgcacatggaaacagaggatgacaacagcttcaagtacttgtttgtcgcactggatgcatcaataaaaggatggaagaaatgcaaacctataatagttgttgacggaactttccttaaatcaacatatggaggtacattgctctctgcttgtacacaggatgcaaatgggcacatttttccactagctttttctgttgtggattcagaaaacaacaactcatggcaatggtttttcacaaaagtgagagaaacatatgggattagagaggaacagtgcttgatctcagatagacatgagagcataagtaaggcagcttgtcaagtatttccagaaatcacacattgctattgtgtataccacctgttaagcaacctaaaagcaaccttcaagaagaatgcaagcaagctggataaaccattcttcgctgcagccagagcataca

SEQ ID NO: 271158 - DNA, 846 bp, Cannabis indica
gcccagtaagaagagctatgtaggacataaccctcctaactagttacttgacataattactcttaatattaatcaacagtaattcacattccataaatatatccacaacgcatgttgttctcacatgcacacatcaagtctcataccgcacattatactcacatacgataatcaactattctctcatgttgatcagacatgaggtaacctgccctgccttgtgttattctcacacttggcatccaacagggcaattaattaccataagttgtactcacccatgataatgttataacctgcaagtgttatgctcacacaagcagcaagaccctaatattattctcatgctaacgatgctcacaaaatataaggaaatcacaacacaatcaaattaaatagcaaaccaacccaagttgtatgcataacatacaccctgtgcacagatgtccactcttcttacctcagttgctaagaccacacttgctacctcgagcacctcaacgaatttccttgttgagaacaagatcctcagaaacattcagaacgtggtcgcaaacattctcctcagtttcgtcgccggtaaagtgtaactttgtctccgattgctctcgaagcgtcctttcgattggggaagctctctacagtgctcaggacctcaaaacgattaagaaaagtggtccgagaaggcagatcggggtcgtctccttcactggcggtgtaccctctttaatggagtcaaaatattggttcttcgttttggacgttaaagcttcatttacttacgttaaaaacgatccttagggtcccatgcactcatatataacctcccttgacccaagaacaagc

SEQ ID NO: 271159 - DNA, 955 bp, Cannabis indica
aaaataataattaacaaaaattttattaaataaagatacataacatcacaaaagagattaatattatatgtatattcctatagtcttctacgctattatacatttagtaatagttaggatatgttaagttagttactccaactgtttggagtctgttattttctgttataacatttcttctcaagttgttattttttgttgcttaagccactgtactcgtgcctatataaggcatgttatttaagcttcaacataataggaaaatactttttctttctcctctgtttttagctctaagcttctcatatggtataaaaagttaccctgcccatttcaatggcacgaccttccacaagatcccaggatggaatccttccacatccacttgaaaatacttcatcagatcctccaactgatgccacttccgctcctacaatcgctccaatggcagcttctcgacgaacaaccaccaagactcgatctcagaatcacaacgatattcgcgaagatcaatctccaagaacagaagataatcaaattcgaaacaagtgatctcactctcttctcgatcgccatgccaatgaagacgcatccagccctttcttccttagctccggtgaccatccaggtctggttctggtgtcgactgttcttaccggcatcaactaccagtcttggaaatgggggatcaccatggcgttggctgcgaaaaacaaaattgccttcatagatagatctcttccacgacctgaatttggtaattctcttctcccttcttagctttgttgtaacaacatggtcatatcttggcttgtgaattccgtctttgctgaaatcgcccaaactataatgtactttgacctagctactgatatgttagctgaagatttaatgagggtaatgcacctcgaatattccaacttcaaacgcaactcactcggttgcaacaaggtga

SEQ ID NO: 271160 - DNA, 936 bp, Cannabis indica
ggtgaaacacttaaggcatacttaagtcgttttagcacggctgcagctacggttaggaatttggatgacagcacgcaacttacagaccttcaggaggggatctctactgatccattgaccgcagggggcaagttgtgggatgacttacaaggacgcctagtaagaagcatcactgagttcaacgaaagggctcaggtgttcgttcggaaagaagaagcccaaaaggaaatgaatttgttaaaaataagctcgggaggcaaacccaggaatgtttcgacatgaactgtttccactagaattgataactcgggggcttctggttcaaagagaaaggacgaagttaaggaaccgtcgaaggataaaaagaaacagaagaagcatgataagtaagtgccagtgtatactatttataccaagcgtaatgaaactcgggagaatatttacctcgcacatgagcagaaggtggccttcggcaagcccgagcccatgaggaattcgaggagtaagagggatcctaacaagtattgtaaattccataaggatattgggcatacgactgaagaatgtcgcctattaaaagatgagatagaaagtctcatctcttgaggccattttaagcagtacgtgaaaagacaaggccatggatacaaccagcctagtctgcccaataacccaaacaaccaggggttgcaacctattcacattgagggagaggagatcttggttattttgggagggccacatatcacaggggaaagcaataatgcccagaaaagatatgtgaaagagataaagaacgagcagtcggcctttgccccagaaccttccaagaaggtgaaaactgaggagcctcccattacattcacagaggaagatgagaaaaacgtgagatatcgtcacgtcgatccattgtgggataaccattcaactcgctaa

SEQ ID NO: 271161 - DNA, 1064 bp, Cannabis indica
gggccgaaagtttcttcctccttttgagcagagtcacctgctcttcctcaaccaggacgtctccgtcagcatcaactggctccccagcctcattgtattccacttagttagggggttcaacctccgcttcttcctccacctcagaggaactgctaggacgtacgtcgtcctgctcctcaatctcttggaccctagcgtccccttcatgatccccctcctcctggacggctggatcctgtttggcgctgggcaaagtggcgtgccgagctacttgaggatcagatgcgtcaaccaaacgcgttgttttcttggtacgagccatcattctatggctgggtataagatttgggggagaatgtccttcgctagaagaaggtgggctagaacaaagacgaggatgatcctcgtgcaaaagttgaagcaagtcatggtcgattcgatgtttgctctcccaaaactcacctgggttcatctacaaaagacaacacagaagatgagtgtttggtcggaatatcgaacgataaacaagcaaatatgtcgaccaggagtactcaacaaattaaagaattagaatgttctaagaaaagtcaaaactcaggaagtttgaaagtttctcgacttagggaaaaaaatttcatgaatcttagaataagcaagatgaaagacaggcattacgcagttcaaaaaggaagcattatggactgtaaaatcgcgtgaaaccatgacaaagaagaatcacagagttttcgaacctagggtttcctatgtattttctacagtatagtcgaaggtgcattcgaaatgtaaacatagaaaaataagcataaaggatatcgaaaacttactcaagagtcatatatcgaaaacttaccaacgagcagtttcaatgaaggaacttcagcaaacttgaagcccaaaacatctcttttcgctctgaactcacttagcaaagaaagatggctaaaatgagtttatgtgccaaggcttgttgatatttatatgcaagtcacgaaaagaggtaatcatttcaaaagaacctcagacgcctcggttcccccttaaaa

SEQ ID NO: 271162 - DNA, 1622 bp, Cannabis indica
atacaaactaagcataacagttgaacgaatctaaaacaacagatagtgaggcatccatctcgctataggaaggcacactcgtggtacttcactaattagctccagacatctttcaatgagaattactactccatcgagtcagctctctcagatagaagctaacattcaaatgatgttgactgctgaagttcaccttgtcaccaagaactgtgattgtcagaaggagcattatgtcttcaatagcataaacgaagaaatttacattatcaacctcggaaagacatgggaaaaactttgactctctgccagggttattgttactatgcttctagcgaaatgtccatgaatgacacgcttcacaacacatttaatacacgtttgcactgacccagtaaaagcggaccaatcacagttgtgtgattttcggataataatcgcatttattttacgcgggacgcaatctaatccaacaaattaaggggattattgttgtaagatattagtctgatttgtaattaatttccctcctatgtaactataaataggagcagtttacactgaaaaagggacgaaaaattcattagagaaaaagccctagaattgtatcagaaatctaataagattgactcgtggactatgcagaattttaactgcaaaaccacctaaaaaacttcatgttcttattttttccttcactgcttttattttctgtgcaaatccctcacgatttaggctttaatacagttaacgaaaatctgtgttaacagtttggtgctttcattgaaagccttcgtgaaaaaagctcagaaaaaatcctcctgatatatataagaaaactttctccatggttgaaatcagagaaaacgttgacactcctcatgaaaaaaccactcaccatcctggaaaagagccaatgggctctcgaaagcctcccaactcacaatctacacggaccactcgttccaggaggacccaacctgagggtggcccaagatacacggaccactcgttccaggaggacccaacctgagggtggctcaagtacacggaccacttgttccagaggacccaacctgagggtggcccaagtacacgaaccacacgttcaaggaggacccagaatctgggaacagtgtatgaagaaccttaaatgaacattggcagagcccaaaccaggcaaactgatgagcatggtgcctacgatcccacaagatacgtgccaatcgtcgagttggaaaaccgccaactcagacgttgcttggaggaggcaacccaacagaatgctgagttggaacatgaggcactcgcggccagggcagcacagaagaataacacacaaattaaccttatcctggagtgagaagaccacgaggtagacctcgcggctcacgaaccaggaggcaggagatagctcaggagagccctcagaacgctcaggaagaataacctggggaaactgaggttccccttgaaatgaacaaccaaatgatcaaccagagccttctcacagaaatgagaaaagaaggcgaccagaaactagggaataggaaatccctcatggaaacgagggaaatcctgggacacaacctggaatacattggtcaccaatgaggcaccgccaa

SEQ ID NO: 271163 - DNA, 1263 bp, Cannabis indica
ctcagaagttagcatacttaatttgtaagagatcactttctaggtcaaaatatattacgccatctgtaattggactagtgaaaaaacacacccaaacaaacaggatactaaatcggtatcatgtggggaaagatactgaagtaaataagcagataggtcctggattcattttggctgtataccaatgtaacaaattgcttctcccaccattactttgttataaatatataaaataataagagagtattttatttgaaataattcccaaatacacgagttatgacaacactccacagatgttgaaacacttcatagaagttgaaacaataacagagaaaagggaagataatgacctgataccatcacattggcaatgaacccatcgctggcaaacatcacagcaaaccataggagtagattctgaatccctatagacctataaattttcaacagtaaaaaatggtatatatcaagaattccattatctttgactgatgcattgttagtattctggcaaaatcaagaagcatgtttttgattataaaacatccaaacaaatggagtaccttcaaacaaacagggcaataattccccttaacgaacaatcgaccacatgcatcacagcaagtgtatcccagaaaccacctgtcagtttagaagaaaaatatggtgatcctgatattaaagaagcaaacaggttgatttttttactaaaaagaacacagaacaataaataagcaataattactgtattacctgaaaattaataatataaatttgcatgtaaaataacttagcaatactctcaaaatttcttacaaacttttccctctactttatagagaaaaatttagtaagtcccactcaatatatttccactcatttttctcttccctccacttatctttcctaccaaacaacttttttttccttttctttcctttcctttatcttctctaccaaacataacattataatatgttaagaaaacaaaacaaaataataagctgtttggtaggagagaaaagtgaaggtatgaggtagaatggatggaaaatatggtgaggccgccaatttcttgtctccaaaatgacaagaaatgggagataaaaaattttattagccaagactctaagggtaatatagtaaatttcacaatatgttaatttcattccttcctatatagaccaaataatcatgggaaaaaaaaaaaagtcctttcaaatccatgtatatatttccttccgccctattaccttttca

SEQ ID NO: 271164 - DNA, 881 bp, Cannabis indica
gcataatttgctagtggtgtcttctattcttcttttggtggttaaaaatctcaacaaggaaagctacaataaattaatgaagtaaatagatcagaatagaataaaagaaatagaattaagcacatttaaaagatcacatgtaaactaagaatctaaaaagagaagtgtattctcttctcttataacgactactgctaaagaattgtgtcgtatcgaattttaaataaataatcttctatatcccattcgacaatatttcacctttatcacgagaatcatgcatgaatatattttcccaaattaattctatatccaacttttgatcactcaaactataatattcataaattctctcctattcgacacccgaatatgccattgccaataagccaagcaaatatttggaacttattatatatgttaattccataatataaggggtgatatctcatctcatattcagcacacatgtttcgatttcgaatataattatataagagcacaatagtcatgatctgtagccagcaaatggtgttagttttcgtatgaatggaccccaccaaatttcattaaaaaaaaaacaaaattacagagatatataatgggatttggttgataataggaagcacatattataattaattaataacaaaaatcgaaatagctccatcaaggtaattagaatttttgtacttaaattttgatatataccaatcatgcttcttattttaattaatatttaattattttaataatattttataatttaaatttatcaaatatatataaattaatttttattaaataataaaaaaaataatactgtttttgattaaaatactaacttactatgtaatgtctattatagaaagtcatttctt

SEQ ID NO: 271165 - DNA, 442 bp, Cannabis indica
ttagggcacaaaactcaacaattgtttcatttcgaataggtaaaaagcgtactcataagcttgtttttcctaacttaatctataaaattatgtcctctcagaaagatgtggcctactctcatgagacacttgagcctcctcttactaacaccatcttccaaccctcggagtattttgatggagcttttcccaagcgtcataaagctggtgctgctactgctggtgcaagtttgagttctgctcctgcagatgtctaggaggtcaaacatgaggttcaacagatgaacaatcgtcttgcttccatggaggaggttcagcaagagatgtccaagtagctgtcctcattgatcaagctctatggggcataagtttctctttcattttaaattttttttttgtttatggatatattttaaggtttttgtctttggccattagataa

SEQ ID NO: 271166 - DNA, 703 bp, Cannabis indica
acctttttctttttccccgagatggaagtaggatttttccgttgctttccttcaaagggataccgtatggggctaggctccatggacttatgcttctaagtgcttggtgaggactcttccggtgtttctttgagtctcgtagggatggctttagggtgtatgtggatccctactgtctccatggttttttgcatggtgaccatcacctcttgcatctttttattttattctttctgggcggtgatctcagcttcatgatcagcagccttttgtcttaagagcagtagttctgcgtaactgccttcgtcgtaggcgttgtactcgtcaaggttttcctcgtactcatcatcattggcctcatctcgttcctcagagtccacgttgactctcgaagccacttcctcgccttcagggttttgagcgtcttgatgacgacggggctaacgtgtgttgcgagtttccaccattgtaacttgagcttataagactgttgtttatctagagacgcttccttcagctctcaatgaaagtaccaatatgttgactgaggttttcggcaagcaatttaataatatatgtaagaaagctgtaggaagtttaatgtatgagatttttacgtggttggggcattaatgagccttagtccacaagtcttttttatttatgagagtattacagagaatgttcttggtagatattcctc

SEQ ID NO: 271167 - DNA, 1016 bp, Cannabis indica
ataacatattcgggaaacatatagattcactcaataaaaaagtatcaacaccaacagttctctatgaagataatactgcttgcttcgctcaactaaaaagatgtacattaaacgagatagaattaaaacacattttaccatgttcttcttaatacatttcaagagaatgcatattggtatccaatatattcaatcaagtgtactcaatcttgtagacttattcacaaagtcattaccaatatcaatatttaagaagattgttcacaagattagaattcgttgattagaatatctccacgaatgcctaaataaagagaagttcattcatactacactcgtgttcccttggtcgagtttttgttctattaaattttctagcaaagatttttaatgatacagttattatagaaattcaataaggagtattatgaaatattatatatataaatgttcaaatcactcaaatcaataataccataaatattattgtatttctttttatttaattaatttaatttcctatttttaattatatttttatataaatagaagttcaacttatttagaataaattaaattatcattcaatttctctttctctatctcttttcatcttctttttctttttcttatttattttatattattcacaataatttataacatagcccacttattcattttatattccttttctttctctgcttaactatatattattattctttttccgcttgttcaatccgttggttggtatcaattttctcgaaagaattaaaaaaagtccaaattatcataagaaaaaagttagctgttgcaattatattttgtcaaaaaaaaaaatatttaaaatagtaaataagcatacgtggggttttttctattttgggttaaaattaccttaaatatacatttatactaccataagcaaaaataaacatttatattgtttattaatttcaaatatactattttcaaagtttcttatttacaaaaatacacttgaaaactccccc

SEQ ID NO: 271168 - DNA, 538 bp, Cannabis indica
gactcaccaagagtgaggtcgatcccacatggattgtagtaaagtacgttaaaattaaacttttacttctatttggttaaataaaaattaagaataggttaaaactagaaaataatacaaatagtaaaaggagaaacaatttaaggaaattaacagttaataaaaactagggcttcgatttcaattgtatctattgaatatggcttaatatgattatcttcctattatcaatttctatgcaatagcaggtttactaaggtaatttatagtcttctcagatatataaatctcaatcacatgcaaactttctactctcgtgataaatttaagatgcaacagacattaaacatagaaaccctataagctatctaaaccatacaggtactctcgtcctatatcaaaattcagttctatttatagcataatcgatactcacttgttaaatctcgcatcgaaatcattaaacagttaattaatagtcaggcaattaaaagtaattaggcacgaataaaatagaatacatagaaattagggggaa

SEQ ID NO: 271169 - DNA, 730 bp, Cannabis indica
gataaaacagcaaattgcaaaagtggggcccaatatccatagccttggccgaccacttatgtaggatttatcatttatattttcattattttaatgtcaaataattcaaacctaaccctagttggcatactataaataggtagtgatggcttcaagaaaagatgacgcatcttattccttcagagaaaaacctgagtgccttctgcctaacctagccgccacctctctttctctcttcttcattattgaatcgaatcccttgagtgataaagtagtgcccacacacatcaagtggtacctcaatcatagtgtggaagatcgtgaagaatctagattcaacagaaggaccttcggactcagatcttgctgatactctgcgacagaaaggatacaagggttagagatctgagtggaaggagatctattattccgctgcacccagtgtaaggtttctcatactttatatgtgtttatttataatcgttgtagaagttcatatttaggatgttaaacaacatacttgtgagtagattgaagatcctggtaaaataattccaacaagtttgctagaccactttgtttgctcacggaacatgtgtttttatatccagtatgaagtggaagtttaaatttttgaatgtccagttctcccaccaggaagaatggatgcagtaacacctgaatatgaagttgctaaagctactaaattttttgatcgtattttagccaa

SEQ ID NO: 271170 - DNA, 3482 bp, Cannabis indica
gattttaatatcttaataatcttattttacacatcttatcattttcacactcactcatctttaatcttaagcgtttttattacttctttgatcttaatttttaaaactaaaatctcatcaaatatttggaactaggttagaatattcttgttttgtttgaaatgacttcttttgatgttagtcaactcccatgggtttgaccgggtacttacatgaacattatatttcgaaataattcgtgcacttgcgagtataaatattaaaacactcacttttgagtacaacagtcacgaaagcatagtccccaaaaaaattttgacttacaaacagtggaccattttttccaatgaactttgcgttgattattacccatagatccccacgaaaaattttccatcagttttccaaagtgtttacaaatagaaaggggaattctataacaggacatagcatacgaaggaattgcttggataactgccttgagcaaaacttctttactagcttttgaaaagagcttttgattccaaacagaaagcttactactagctttttgaagaaggaaaagaaaggaagatttcttagagcgtagggacacccaaatatttatcaacaaaaggtttatcttctatgtggagagaatggaggaaagagtttttctcctgagacatagtgttttaagagaaaagaacagaagacttggccaagttgacaaattggccagtggctttattgtcaatgttgagaatatcattgatagcttcacaattttggatgtcaagaagagtgaaatgtaggctatcattaacaaacaagtgatgggaaattgaaggagccgagtgacatatagatataccctgaaatagataatcttgagttttggaacggattagggcagaaagacctttagcaactaggaggaacaggtaaggtgaaagagggtcaccttgcctgattccacgagaaggaaagataagagaagaaagactattattaatgcagagtttgagagagactgtggaaatacaactagagataaggcaaatgaacttggtagggaaaccaagaagagaaagaatgtgattaatgaaaccccactcaactttatcaaaagctttctccatgtctagtttaagagctacccaactaacttttcaacttttcctataggtaacggcattaataatctcattggcaataataatattataaaaattgattctattgctaagaaatattgtgggaaatgaggatagagagaactacctttagcctattagctatggacttagcaacaactttgtaaatagtagaacaaagactgataggtctaaagtcccgaaccctggtagcattattttttttttttgggaataaggacaacaaaagtctcatttatgggagcaagattggccccattattaaagacatcaaggacatcatgaaaaagatctttacccacagtaggccaactgttctgatagaaaaaagggttaatgccatcaggaccaggggccttatcccctgaaagctgaaaaatagtagttttgacctcagagaaagtgaaagggttgaccaaaaaattgaactaataattatttatgcgcttagtaatacccctaagagccatgttgatagagcctaaatcagtgccattagaggtaaaaagatcagatagaactgaacaaaactattagtaatgtcagaatggttactaatagtagagttgccatcaagagtaagactattaatgatatcatttcttcttctagtagaggttttattatgaaaatatttggtgttcttgtcactagctttaagccaattaaccctagatctttgcctccaaaaaactttctccttaagaaagagagcactaagagaggtttggtaattattagcacttccaatatcatggctagagatgaaaggctgagagtaaatcctatcaatgatcgattgcatattattgattttatttttaaattcatttttgtccttagaccaacacttcatagcttgaatacaattatcctgcttacgaagaaaagaatcaagagtgggagtaacactactaataaccctattagatgacaaactttctttaatgagattaaaaaaacccggttccatgagccaatgattttcaaagaaaaagctcttattatttttatgaatatgtagagtaggattgtaaacgagcttgagtgctctatgatcagagccatataaaggaaggtggaaaatgttagcagtaggaaaaatatcgtgccatgcctagttaacaatgccccagtccagacattcaagaagactaccatgcttccaagtgaaacagttactaataaaatacagagaaaacaggttgtatttacaaataaaatgctaaaaattatggatagcgtgggcaggggcaagttgttactattacgatcattatagcctaaataatcattaaaatctcctaaaataagccaaggagaaaagggggcaacatcaaaaagacgatccaacaagatccaagagttagacttatcattgatataaggagatccataaaaatataaaagatgataataaacatgggagttaatagaaacagtacatctatattacataaatagtaagataaaatattaacattgtcagcatcattctaaaaaattaataaaccacctcctgatccatgtctagggacctcaaaaacactatcaaaagacagtctagctttgaacaaaatacttgaattagatgccacttagtctccatcacaaaaataatttgaggttgatgttgcttgatcatgagagagagattttggaatgctcgggaactccctaatctgcgagcattccaactgataatactcatttttttggggtagggttgctgagcaacacctgcttgttcattagagtcaaataaaaatgggaccacaataaaatcagaattggaagatcgagctcttttcagcatacttctaacaaaagaacccaactgacagttctatctagtgaaagaccttttagtcctgatttggtacctaaagccactttggcctgtggaatgggtgaaacaaatgatagagctctagacaactcaagaaacatatggcccttaccttagaggtagcagtaacaatagtcgaaacaaagataggggtggaggcaatgggagaaataagagggtgtgtaacagcttggctcgagactacaggtaagttggtagttcgggtcgtgttacctaaagagatagatgtagggtggcatggagtgtgggggtattaactaaagtcgtattgacaatactaggaaaaaggaattagtcgacaacatcttaaaggccttggctggaagtgttagcaagagatggatgttcttcaaaagggatggagttggaaagttcaaaaatgatttttttgtaggtagttttagcaggagccctaagagaatcttttgttgaaatttgttttaccaggatctaga

SEQ ID NO: 271171 - DNA, 2396 bp, Cannabis indica
aaaaaagacctaaaaacaaaaaaataccatataaattggtcaaacttaaatgtgccatatttatcataagaacttttaaaatcccatagtaagtgtaatttcctcttttaaataaggtttgctttgagttgaaatggatcataggcaaaaaaaaattttgagcccttactataaagataaatgatatttttaaaaattattgaaaaaaatatgtatattttttaaaagatatttttttatttgggtccctaaaataagtgagccctagacgcggtcctaacccgcctatgcctagggccgaccctgattttaaagttgacaatatttctccaatgaccatctcaatcttttagcaattacaaatctctacaataactattaaaataagtaaaaaaatatgcaaaagaattttatagagagcaacctttaaatcactactatcctggagaggccatggagtctattggttgggatttgagtgtgaggagattttaagggttcaagttgaggatgaagaagaagaggtggtgttagggggaggggcggaggaagaaggaatcgatgcacgttggtgtttagggggggcaatttttatcaaacagagatgtggattttaagattatgcaaaatattttagcctctttatggagaccagggatgggcatgtttgttaaggaattaccaccatataggtattcattccaattctaccattaggtcgacatacagagggttatcaagggaagcccatggacgttcgatcaaatgcaatattggaacgtttaaaggaaggggaggaaccaaaggccttggttttgaacaaacttaatatttgggttcaggttttcaacctccaacccagtagcatgtctgctagtgtgttgaaggatattgtcaatgttatgggggagtatgtggaatatgatcctaagaacttcatcagagtgtatcaggattatctttgagtattggtgaccctagatattaataagttgttacgacgatagatgaagctaacgaaaataggtgggtcttctttccgggccaagagcacccactttctactttatatgtggaattataggccatttagagaagttatgtgctaaactctttgaaaagccattggaggaaatcgttaaatcgcatggttctttatgagggcttagtttcagaagagaaaatagaatattggtgcccgatggttgcgtagaaagggtgggttcctggaatggtggccggcgacaatagcatggcagagcagatagagaagatggttggaccaatatggtaagtgataatgatgaagagttgatggggggatgtgatggcatgattggtggggatagggagatcggtacgagtgacggtgagaaagtcaaagatttcccaaccattaatcactctaaatttggaaagtttgcgtttaatgggaataaagagggtagagaggcaggtcaaaacaaaaataattcaaaaaaggggtgtgattattatggataataaaagaaaaaggtctattgatgtattggaaaaggaagcttttgaggtagggttggatggagttgggctctcaaaatactcagacatggcgacccttgtgaatggggtcgcccaacattatgagtatattgggttagaactgttgtgggcttgggaacccacatatcaatcagttcatttatgaacttgtagttcaaaagaggcccaatgttatttttttgtgagactttatgtgttgaagacaaggttatgagtgtgtgtaggtccattcgctttgagggattctttatggtggagacccagggaagaagggaaagccttgcattgatgtggaaaaatgaagatgatatttgttttaatagtttttccaaaaatcacattgactgtgagatttcgtgggaaggtagtagtaagtttagactaactggcctctatggtgagcctaactgaagcttaaggaagaatacttggtacctcattcacaccttgaaggaggaatctcagctaccttggtgcctaattagaaattaaaacaatattttggtgcaaagtgagaaaagaaggggtaatagatatccagagtggcttattactagcttccaagaggttatttctgagtgtggtttacaagacttaaagcttcttggacacccttttacttgggaaaaaggaagagactcgccccattggattgaatctgaaagtacaacttgttaattttaatgatccaaattaccatgttgattatctttagattgattgatttcaagatatgaattatagacaagaatcaataatcaagcagtaaatcacacaacgatttacaagcttcatctgcactgagaacacatctcagtcgactagtgcttgggttccccgaaccagggtaaatt

SEQ ID NO: 271172 - DNA, 1102 bp, Cannabis indica
ttgctatacgatttttttgttgtcgatttaagattgcaacgactaattgtaataggagtttctatgtagaattctgtaaaaatacaaatatatataaatgtatatatattgaagtgtaaaaataaaaaagccactaaaatctataaatttatataaagaaaaacataagatgaagaaagatgccacttatctgggcctccctctctttcggtctagcagtagttttcatgaaatgcaatttctggtgaagaaagttcttgctagaattgatggttggaaggctcgtctgctgtctaaggcggggagggcctgtttaatccagtcaaatccagtcagttggagcttcgttgcctatatacgttgctgcttctgaggttatcccgtgcgggatagcagcaaagattgacaaatatcttagaaatttctggtggggtgtgcatgataaaagaaaaccgacccataccttggagctctctttgtaagtttaaacacaatgggggattaggctttcgtcatatcaaagacatcaatagtgctttcattctcaaatggggctgaaagctgatcaatgattccttcagtatctggagtgctaccatgaaggcaaaatatttgcagggagcaagttttttcgacgttgaatgtaaaacatctgatttgagactttggaaagcaatggtgaagtccagattgttgctgaatgaaggcatctgtagaaagatatgggatggaagatctacgtcaatctggtttgactcttgggtacctacgagtgaccataaaccccgccctctattggacactacacaaggggcaaacctagtacactactttattaatgagaatctcacttggaatgaaacttggatcagacaatggtttggcgcgaatgttgctaaacatatcattaatattggtcttcctgcacatcactagaaggactcatggttttggctaggtgaggagagtggagtttttacgatcaaatcggcttatcacttagttaagaagaatactgtcatcaaccacccaatttggcaatggaaagttctatggaatactcctatccatgcgcgccttaagcttttgggatggcagattt

SEQ ID NO: 271173 - DNA, 1732 bp, Cannabis indica
aaaattggataaaaatctttaaatccaacaatctcaatagttcagggttaacgaccagaaaaattcaaaggacatgatgatttgatacatgtcaaaatttaggagacaaaaatcctaatgagtctaccaaaagttagttaatgctaaatgctaagttagccattaccaattatagtttgagtttgagttgactcttcagctcattttcttccttcctttgtttctgattcaataattagccaaaaaaaaaaatgttcagtgtaaattatttttattgctcatgtcaaatgatatcacaattgaatagtatccattatactaacaatggaaaagacttactatcaaatacataatatgttgcatgtaattggattcattatttctagtttcaactttcaagacatattgaaaaagaaaaatggttgtgagtgttaaatgatatcctcaaaagttaaaggcacacctcatgtaaagttttccaccatagatctgtcttttcctgtagttctcgccactgcatagccaaatcgaattcaaatgtattggtctgtgtacagtgtgctgtcgatactgcaactgcatttctctacataaaaagtaaagtacaagaagaataacaagatatcttgtcacatatgagattactatgacgcagagatggtaacaaaaataattcagcaaatgcaagaaggaacctgtttcggaaaatgtctcacctgatcctcccgttgctttggaaccttaaatctgtcaagagctagatggccagcaaaagtagtttcttggtcagatactctcagatttctttggcgcccaactacaggtctgcaaatgtaaagcagtaaaccctttatgttccaccaaattttaacagcaaatttagtgaaaaaagaaaaagcatataaagtttgattaccttccatcaggtaaaatcaggaaactactgttccacttacatattgcagattgagctgcaactttggacttgaataaaacaaaagccttggctgtgaatgcatagcaagatatagatgaactactgcaaagctttaagtgaaacttaatgtagaaattcaatatgattccctagtaaattagtaaatgagacaatgggaaactaagaatagatgagccgaccttaccgtatggtgagtttgaaaatgtaccaaactgtaccattcttgcctcaaccctttcattgaatgcatgccaaattagatcctgaggaaaatatggaataaggaacaaccagaatgtgcaggccagaaaacagttctcaattctcataactgtgaaaatgtgatctaccatatttgatttatgcatcaaatacttagagggagagaaagggtgtacaggggaattatagtcactacctcaacttcaactgaagaaaaggatggatccaaattttctaataagaccagggattctgtttcttgagctttctgcagtttctcttcccaaggctgaaaatcagcaaggaaaatgaactctgagtatatgatgatacaaagaaactataatcattgctcttttttttcttttcccaaacattgtaaatgtgtcataagctttgagtatataaatatatgtgtatatatcgatgtgggggctctgcccgcagtttaaagagcctttcttaacaatttttcattttaatagtaagtaaattaaattagaaactcacttgctgtttaaaccaactcctatcctgcaagaaagaaataac

SEQ ID NO: 271174 - DNA, 819 bp, Cannabis indica
aaaagaaaaggtagaaagaaaacagaaagaaaaaagtctgtcctatgccctaagcaaccattatacgaagaacgtatggtcttctacaaaaaataacaacagatgcgtgacaacagtaatcctatcactagagcagtaaactcaaaccgattatatgaaggatttaaacacttgcatgcccagaaacttcgaatgcaaacccagaaaagaacaaacagataagtaacagcatgccattcaataataaagcaaagggtgcaaagaacttacgatgaagtgttgaaactgggggtcctgctgtgaatcgaatagagacaagaaggactgatagtaacaaacgaagaggaactggagaaaattgcaaagtgtttaaaggcgttgttttgggtctgagaattttctctctgggaaatttgagcaaagttggcaagaaatgggaagtaaccgaaatgaagaaaaggtggtggcttttataggcaaagctgcatgaggaacaggcgtcatcacctaccaatcaaacggtgggggaagcgcacgattcgaatgctcaaagatcaacggaccagattgatttgcaataaaggcggtggaaacgtttgagtatccgtctgacaccattaatgcgccgtatcaatcaatgggcgcgaaacgaatcgacccctgcaaaaagtgaatcgctgcattaaaagccatcattaaatacaccctcacgcgctcaaagctcgtgccaggaaaccgaggagtcaaccggaagcacttgaacaagccttgttttatttttcaaataaacaaggcttggggggtaaatgttgcccctga

SEQ ID NO: 271175 - DNA, 848 bp, Cannabis indica
aacacaaaaggggaagaactagggttcccaattttgtcgcaaccggtagaccggttctacaatcggaattctggttctggggggaacccagaacaccaaccggaattccggttcccacaggctatattgaaccggaattccggttcagtgcaggaatttttcaaaattccataactcgagcaaaacaactccaaactaattcaaactttccagacctgctctaaataccctaaataacagttccaaagcaataaaacaacccagtaagcacatatacaaaaaatgccattaaagctccaagcttttagttcaaaactcaagcttgactaaaccaaacaaacatgcattaaaacatacttgaatctactcaaatatacataaccaagcctctgcaaacaatagcaaacaaataccacaagcacatcaagctatttcaacatttaaccattaaaatcaagattttgtgtaaaaatcccaaacttgaacaaaagcaactagcatgcatcaaaacctatcctatttcactcaattaaacattttaaacctatagaaaacaacaacaacaactaacagcagctattactatcaaaatcatcaagcatgcaaataatttctttcttaaaattcaagaacacaacaaggaaagtttcaagaaccataccttagcttaagatcactaccaactagccgaaataacaagaattacagggaaaaaatcccagccctagcagccccaatcaaaaccgaaagagagagagagagctcttgaaaaaaaatggctactttgctttcttttccaattttttaaaatttttttgaataaaagataaaacatgcataactcaatc

SEQ ID NO: 271176 - DNA, 1344 bp, Cannabis indica
atccctaatgtacaatgcagtttgatcctattgaagccagactggattgtgttgggaaaattgtcacccacgagagtaacaaggctaaacatgtggtgatggagggagttaagaagcaatttggaatgaccaaagttcttccatcagcatccacaactttaccagtacgtagtccatcaaggtctcctcgagacccccgattcagcacagcgaaggctaggtccgagaacatgtggactggaaagagcaagtctccccaaacccgtcattctaaaaggctggcatcaagtaacaagtagtgaaacactattgtagcatatttagtacaactgttacaaaagttaggttttagttcataagttatatttagttatgttatatatttgcatcatactattgttaggtgatttggaattgcactaatgttggtgattttagcatttactatatggtaagacttgtggtagtttttggaatttggtggaaccaattattattactattgttatcttttaccattagtataagtttttggaaatttttttaccataacaatatgtgaagtacattattaagaaaatgaaattaaccaattttacctttttgttgacactgtgttttacgccaattatgtccataccaaaaataataaaaatacttatacttatgtattttcccattgtagtgagatgaaggcattaattctggccttgaatataaatttggatcataaagtgtaagtacagtacaataatgagaaataagaattaattattttaccaattatgttgacacaatttctttcataacaattttaccatttctaaatcatgtaatttaaatctatgaagaaaaaatttaatgtatttttaaaatgcaatatattgaacatcaaggtttataacaattatatggatacctctaatatattaaaaataataaataatggtaccaatctattaaacattaaactccatatctaagtaaatcatgtaatttaaaactatgaaaaaaaaacttgaagtatttttaaaatgcaatatagtgaaacatagcactattcactaagttaccatgactgtttgtgtattatattctcaaaattactgatatttatctttaaatcttataaattgaaactagtttatttagttcttaaataatgctttttggatcactatgtaataatgaaatcactttgaaagacaattaatgtacacccacatattaacataaaaatcaatcaccaaatattacttaagaatttttttagaactaagttaaatcctagctttgctttgacaacatagaaaaaaaaaagataaaataaacatcataccacat

SEQ ID NO: 271177 - DNA, 2051 bp, Cannabis indica
agagagaaggtataggagggtattttgagatttaattaattttagagtattaaattcctatgcattttagagtatcaaatttccctaagcaaataggattgttattattttcaatttttagcaaatatttgctaactctattgtactacatgtaattaatagaggacatttcctaatgacttgaactataattagacatcttaaaccattatctagtttttcatgaacagctagacaaaccaaatattataatgcactagaaagaatgtctcttcatactcaatatctaataattgaacaaatccttgtgcagagacattctcactgaaattgcaacaatccaagcagatcgatatcaaagtgaaccacaagatcgtatccaatttgccttctttgtgtctgagccctgctaaaacattgaattttgatgaaaatttagatttaaattgattgatgtttagagtaattggtaatgtgcaagatttgaggtgagtgaatccactttcatttggatacaaaagaattaaagatagtaagtaataaaacggaacaaggcattggcaaattgaaaaaactgccagacgcatttcccattgccaataaaacgaccgactgtacagtttataaacatgtttgtattaactcaaaactctcaattatctcatattccttccacctttgctacccaattcctcccataaacctttctttatagcagagtaactatacatataatcttgtctcactactttgaaaacacttggttattagccaaatccaaacccttcatttgcctcgtgaatcgcaagaagcaacctctcctccagatgttgtttcgaaggatactcgggtagatccagctgattgaaactgcaaaaaaaaaatgaaaaaggaaaatgtttaagagacaaatcaaagtagtaatccaagcatgaaattatgcaagatcaaagtagtaaaaaaaaatagtaaagtaccaagtatgtgcagatggcaagtgattggcgcttccataagctttgtgtatctgaaatttctgggagcctgatattccttgaagtgcactaaaaccttctaaaggaacctgtgcaaaaattgaaaagacaaatgttataatacattaacacgaaactcataacgatccttaattcgtggttctttagattataaattaatacctttgaggttccagtcacaaactgcaagagacgagccttatcctccttgctaaaaccttgcgcaacctcccaaaaccactgtataacaggagaggcagcactgtatccagaatactctgtatttgccctcatgtcatccactgagatagatcaatacaacaattatttgttaggattttctatgctctctatctaagagacaatgaactgttcataaaaaaggaacttacaatcgatgtctggaagcccactgatcaatagttctaattctttgtcatggaaaatagagatgagatcccgatgaattaattcattgaacccctccataaaagcatttatttgagggcgaatggctgttgtcagccgatgttcagcaactaaatcaacatattggtgcttattctcttccgtcactttgatgttccgtccaccaggaatcaattcgtagtccgttaccttcaataagtttataaagttagaaccaacacaaacattatgcaagatcaaaaacaaggaagagagagaacattacttctgtcctttcatacaaaatcagcttttcttcatcagcatcaatgctgaaagtaaggttcagatcatcactgatatcattctgcaaacaagagaaacaccagttatttattttatctataacaccggtgtgcaaatacaaatacacattctggcatccaccatacctcaagcatccatttcaggtttttaaagtaatcaggatcaatagcttcaatgtcgtggtaagtgaccttgacccccaatatatgcttgtagaaagatcgtgtaaaatggacatctaagagctgcccatcgaaaagtgctttcccgacctgtaaaacagaagaagagaactgagtt

SEQ ID NO: 271178 - DNA, 925 bp, Cannabis indica
agatatgacttttttgaagtcagcacctgtcctgaagatcaagccgaagggtggagcaacgacgacttcgcccgttgtcgcccaaaagaggaagagcgatgcgatggctacccttgccacagactcttccaagaagctggccaagaccgcacaggacaaggggaagaaagtcgtaatcgatccacctgttcgagctcgcgacttcctagccatgcaagagaagttcctggccgagatcccttatgaggatcttgttacgcgctctgctgagctggccgcgcagtcgatgactctgttcataaaagctgctgctactccttcgaaggaagccgactcgctgaagaggcaaaatgcccagtttcaggagaacataaaaaggctgaagcaagaagtggctaggaaggagaaggagctcgaagaaatcagcaaggctaaggagcaggcggagctcgaggtcaagaaatcgcaggcgacgatcgaggagatgacccgcgagttggagactgagagagagaatgggaagaagcagtatgatcaggcagtgtctgattatatttataccactctttccaaagttccagacttcgacttctctcttctcggagcagaagccgctgagatggccgaggcttttcgtgccatgtcgcctactcagacccaaggtgggggagggaaccttcctgatgaggtcgagggtgcagaagctgaagaagtcgagaacgaggtcatcagcaaagtcgcggatgagactgctcctgctgctccagatgtttaattatgttttttaattttacttctcttttttatatatgcggtacaggggtactcgcgcttttgtacttagacaaatttctttttattttggacaaatttatatcctcgcggggataactatcctttaacattttcgcagtacatgggtact

SEQ ID NO: 271179 - DNA, 1372 bp, Cannabis indica
tgttcttcgatgcaagtaatcttagtttgcattatggatgtagtatgatatcaaagtgaaggtgttgtatataatagagattatatatgacaaggaccaatatgaataaaactgtctttattagcatgtcatttactataaatacctaattcatatcataaagatgatcaatagtagatcggcctaaatcttgagttatcatgaactcctattcatgttattagtttctttgattcactccttaaagtttctcagagaagatgattcttacaacttaatcaaataatgtggattgctgggaacatgatttacaattatagaatcttgacttttctaacgattgatggttccctttaagtgttaattctagaagtggaatattgtgcacaaatttagatgggatctaaattatacttccactagtgaattaattgtactaaaggataaaaaagtaattagaagggtaaaatagtaatttgaccaaaaccaattacaaaccaacacatggagggctaatcactggaattgattatatcaacggacactgctgttaaactcaataaatataattctataattactaagagttttattctatatttatagtagagtatcatgaagttaataaacaagggttatttggtttatgagactcaataaataatctagtttattaaagcttagaattataggtccatcgtccatgaatcgcaaccttgaaacactgtcaacggtagggataaagagttgtataatgtgatttggagaaatctattttgaattagaaaaatagtaattatttattttttttaataaataaataatcaaattaattaactagagaaaagacaaaaattattaagaaaaagtttgtcaatacaagatttgttaagataaaagttttcaggacaaaagtcaccaaccttgtccaaaataacaaggcaggcacctatagcatgttcgtgaccttatgaagtttgtccttttgggttaattaatagaattaggtaaatatctaatttgaaaagtagttatagatatatcaaggttgttaagatacctctcaagtagttaagagattccctcataaatatcagtaaaagaattcagttatagatatttatttatttaaacaagtaaatataatttaattaatgagatttaactattataaatagaatcctaatttgagagggtcggccctatgctaatttgggccttaggaaaaaataaaaattggggtccagtgaaaaagtgaggttattgggatttgaactctcaacctcttaaaagttaaactaatcaaattacaactaagctacaacatatatttagcattaaaagtattattatttattttattactaactat

SEQ ID NO: 271180 - DNA, 1986 bp, Cannabis indica
ttcaactgcgacattgtcggttgccaatgtccttatggtatttgcaatacatggtaggatctcttttgctcctcgcatgcctcatgggctcgagcttgccgaaggcaaccttttgctcatgcgcgaggtaaatattttcccgagtttcattaagctcagtataaatagtatacactggcacgtgcttatcatgcttcttatatttatttttatcctttgacgattccttaaaattttcctttctctttgagccagaggcccctgagttatcaactttaactgagacagcacttgttgaaacattgctgggtttgcctctcgagcctgttttcaaaaattcatctcttttttgagcttcctcttttcgaacgaacacctgagccttttcgttgaaatcagtgattttctttaccggacgaccctgtaggtcatcccacagttcgcccccagcggttgatggatcagtagaaatccccacctgaagggctgtaagttgtgtactatcatctagattcctaacccttccagcaaccgtactaaaacgacttaagtattccttaagttttttgccggcctatttctttatattggttagtgaggccacctcgggtagtctatccattgttgcctggaactgtttcttgaaatccctagacaactgttcccaagaagttatggaatggtgagtaaacttgttgaaccagctgcttgctgctccaactagcgaggtgggaaaaaaatacaacgtaagttgtttgtcacattactagctcgcattattgtgttgaagttgttcaaatgcgagacctgttcggtggttccatcatacgatgagacatgtgggtttttaaatcccaggggaaaaggagtattcatgattactgggtggtacagctcgagctcctcatctgagtcaaatccagattgtctccctaattcccccacttgatatctcctaaacttatcctccaacttatctatttgtaattacttaggatcctcttactttgaaccgagttgttggcaaaaatcaggttttttccgattcaagtgctctcgcagatctgagtgggagtaattactagcagaccttgtttcactcacagactgtgtcctactcacggaccttgtcttgctcatggaccttgtcctcaagtgactcacggatttactagttcccatgctttctctatcattatcttgtcgagcactctctcttcttcgagctgatcgactgtgggtcctcgaacaccctgaggtcacacttgcttcttcacgctctattcttccccctgagtgtggtttgtcatatttcctccattgggatttgtacgagacctctctctatgggttcgggaagaatgcttgtgattcttcacaggggacctacgttccccaagttgagtcccagggtcatcctcatttccatgaggaatttctggttcattggtatctggttgcctcccattctcatttctatgagagggttcaagccaatcattcgaattttcagggggaatgtcattttccccaagttgttcttcctagacattttcctgtcttctggttcgtgagccatgaggcctacttcgtggtcttctcactccaggtttaggttgattttcagtgttagtcccctgtgccgccctagctgcagctgcatcacgctcaaattcagcgttcctccgttgtgcctcctctaagcggtgtctaaggtggcagttttccatttcataatttctctctcccataggctgagtacctcctcgattgggtccctcacccctcattccaagattctggccattcccacactgagttctcctcgagcgtgttgtttgcgtactgggaccaacgttaggctgagtcctccagggactagcggtctgagtgcttgggccaccctcaggttgagtcctcctagagcgggtggttcgtttagaccttgggttggaagaccttctggagcccacaggctctttccca

SEQ ID NO: 271181 - DNA, 919 bp, Cannabis indica
tggagtgcttctgtcttcacactatcagaccggttgaaatatctattgatcaattggtctgaccctaagcgagcaacctgcgcagccttctcctcttctgttggccccgaggagaagtccaggcctgtagtgagggcaaactcaaccactccgaacctgagctccttctgaccaatgtaaaactgcattttcaactcctcctgagcatcaaccttcatcttgtgcaacatcagttgctgaaataacacctaggagaatgtcaggggttgtgcattccaaaagttgccgaaacggctttctttcaccgtgttattcaaattgtactcctcaaaccgagacttgatttttggaaaatttcccgtgcctctatatgtcacacgaccagtaaaatgttcgggtgctggaattatgagtctgggagccatctgaaaaaataaattacaaagcaatattactgtcaaaaattaaaaaaaggtcgacacaacatcgacatcatgtcgatattctgtcgacattatcaaacagtaagaaactacataattttgtcgacaaaatatcgacataccgtcgacaacctatcaatattatcacacagcaaacacagaagcaattaaattaaattgtcaacaacatgttgacatactgtcgacatgctgtcgatattccaagtgaatgatcacaccaattaagcaatacaaaattgtggacaatatgtcgacatactgtcaatattctaagtgaatggtcacactaattaagcaatacaaaattgtcgacatcatgtggacatgaggtcgatattatgaaacagaaagtaattaagtcatattgtcgacaacatatcgacataatgttgacaaattatcgacattttaggtcaaaatttttaatctaattaagtcgacatcctatccataca

SEQ ID NO: 271182 - DNA, 986 bp, Cannabis indica
ataaaagagatgaacttgaatgtttacaactactgttcagttattacacgaaaagaacatggcttgaaacatacagcggctcaacatatcctgtacacaatcacacaacatgggatgtaccacaaaacataaaagatatcattgttctgccaccaaaccagaaaataagatctggaagaccaaggaaacgaagatttttatctgattgcgatacaaaaaaacataacaggtgcagcaaatgtggtcaacacgggcacaaccgaaagacatgcaacaatcaagcaataaaatagatacatatgaattatttgaattgtttaattctctgggagaattcacacaggatgatatgttatattcgatacacttgggatattattttgaaaatttttaacagtttgctaatagttgcaaaatcgttttatgacagttttgacacttgttaaaggttaactacgaaaataacttcattattaaagtttttaaaaagtcaaataggaatttataaaacatagttaataaggataataaaaaagttgcaaaaaattgaataatacattgataaacaattgaaattacaagtatgctgaacagtgcacattgtttgtatatagttgtataatagtttctatatagttgtacgactgtatataaaaacttcaaaaattggaaaaacataaaactgatgctgatacaaacatacaaaaataacatattataatgattaatgtcaaatatacaaaaagtttaaaactagatccaaagtataaaaccaaatataataccttgtaacataaaaaactaacaattgtctgataataaagtcaaccaataacaatacattgtcactaatctaaaagaccctactttttcaatttagaagccttagaagacttgctttgcttctcatcctcgctatcaatactttcatcaattttcctttgcccatatgagaagaaaagggcagcaagtcaagtacgataaac

SEQ ID NO: 271183 - DNA, 1318 bp, Cannabis indica
gcaattatttattgttcccacttcagtttgtgactttttctgttctcaatcgaaatcaatttttttgatagcttcttatgattctgcagttgattgatcacacaacgcatcacttcaaggaaaatggagtggttttctttattgatgactagctagcttatcatataatgtaaattgtcaaatcctcttttcttttctatataaaagtagaatgtctgcctttttactcagaaatgtgacctctgttagttattaaaatgaattctgtgaatgggtgatgcttagtgattaaacacataaaaatttgtcagaattatttggacccatgtaataatctttattgttgaaatgtacaacagtgtgaatacgcggctttaatgaatagctagctcactggtctctctcatctcatatcacgtgaaaatcagatcactgacctggtttcaccaatatggtgaaacttaaacaaatgaataggttataaaataaaataaaagctgaaaagagactatacaatttgcttgaagactttaaaatgcaatttttttttttttgatatttgttttgtttttatggaccaaaggaacttcaccttccagtccattgaccaaatgttaaacttcaaaattcatatcttccacatatccacatgcctttttagcaaagtgtataggtacatattatcatacacaccttattaccttttaagttttttttttttatttatttatctttctctgcaattatatgttatagtactattattattatatgtgagacatagcacaaatgccaataacaaagtgaagtgataccaactaaactaaccaaaaaaagtagaatgcggcaagtttattaaaggaaatatcagctttttcttggcactaataatatcggcttttgtctcggaaaatcgcatgcatacctaaagtagaatctgatgtggagaaacttaagtgaggaaaaggaaaaacgcaattatcaatgcgcaaagggttcgattggcatgtttttgttttactcaggttggatattatagatttttcttataatttaatggagttttcaaatgataataaagaatgtttttatttatttttattgattgtaataaaaataaaattggaaatcaataattaatattattatcattaacttttatataatatatatatatatatactaggttataatctaatttattggagcttacaattataggtttatcgttctaattggccgccttaaaacactatcaaagatagagataaaagttgtacatgtaagtttggaaaaaattatttgaatttgtcaaaat

SEQ ID NO: 271184 - DNA, 614 bp, Cannabis indica
aagtatgttctagacttactcaaagaaacaggaatgcttgggtgtaaaccagcctcaactccaatggagtcgaacaagaaaattggctcgggaacaaatcagacccctgtggacagggggagatatcaaaggctagttggacgccttatttatttatctcacactagacctaacattggtttccctgttagcgtggtgagtcaatacatgagtaatccaacagaggaacacatggaagcggttacaagaatcctaagatacctcaagatgactccaggaaaaggtctgctattcaagaagaatgataataaggaaatcagagtgtacactgatgcagactgggcaggagatataacagacagaaggagtacttcaggttactgttcttatgtttggggtaatctagtaacatggagaagtaagaaacagactgttgtttccagaagctcagctgaagctgagtttagagctctagctcccggtatttgtgagggaatttggctgaagaagttacttggtgaactgggagtatctacaaaagagtctatccaaatgctttgtgacaatcaagctgccatcagtatagcaaaaaatcctgttcatcatgacaggac

SEQ ID NO: 271185 - DNA, 873 bp, Cannabis indica
ttttaaaattatttttttatttactttgtaaaatatttttatattttttaaataattaattacatgtactagtaaaatcgtactacacaggtggatgatccaacatgacacttataacacgtaaaatggatggaaacaacaaagtgttaatagaacataagtttttggggttttactgtcaaaaaagaattttgaaggttaattgcttgcgaagtaaaaattttggaaattttgtcacacagtttactctttatttttatcactcattcacattatttttgactctaaaaataatctaatagtataacacttttaaaaaatattataattataatcatacatattattatttattatatatcttaatttttagcatcaataatttttaaactttaattttttattttaaaaaaataatgactatataaatttttctctcttcaataatacagtatctcaatattttaggatagcaaatatcctcttaatttttaccattacatgtgcttttagatggcagcttttcagatttctcaaacaataattaggatgtcatacttagaagcatggtacgtagttaggtaggaaaatagtaatggttaattagaaagattttattctttctctttaaagagttggtggtacatggttaggtttttttatatatactctcaaatctttcctataaatatatgagactatcacaaagccagtgataaactagctccaacaaaacaaagaacatacagttataatatatatatatatatatataaatatataatggaggtgagcattgtctcaagagaactaatcaagccatcctcagaaactcaccatctgaaaccaaacaacctctgcctttttgatcaa

SEQ ID NO: 271186 - DNA, 640 bp, Cannabis indica
atgccaaggaaattggccgaaagaacttttggaagtgctatggtcatatcgaacaactagaaaacagcagccggacagactccatttgcaatggcatatggatatgaagctatgctacctgtaaaactcgagccaccatcccacaaaagattaacgtacaaccaagataccaatcacgtactcctggccgaataacttgatgaaatcgaagagaagcgaaccacaaaaaacttaaagttaatagcccatcaacaaaaactagctcggtatttcaataaacaagtgaaggctcagaaattctttgtgggagatatagtcctaagaagggtatttataaacaccaaagacagtacaaaaggtgtactcggacctaactgggaaggaccatatcaggtggtcgaagtccttgaatccggagcatacaaattaggtaagtatgatgaaaaaaatgcaacttattctagtaccacggtattagaatggggaacatttaagaaaatactaccaataaggtaccaggtcggacaaccatactaagtactgaaagaacgtttgcttttaagtgaatggcctgccgggcggactatgctcaaaggtttctacaaaaatgaaaaagtaactcaggtcggatgacaccatt

SEQ ID NO: 271187 - DNA, 626 bp, Cannabis indica
tttttatgacttttggaaagctagccctcaagaaaattttgattacctgggcgaggccaaagacatgtatctcaagtactgtgcttctcaagtggcttatggtgaacccaaggcgactacttctacttctggccagaatgttgatgtaccttttgctcagacaacagatcctccagctcctacaggcccagaagacctgaaccaagagcctaggactccagctgtttaaatacttctctttttatctttctttttttatatatcttattcgaccattaggccttttctaagagatcatgatcggccaagcggccttctaacttagaattatttttcattttacagacaacaggctgaccgggcagcatttaatcccagtattacgtgcttttgctatctttaatgaatttccttctctgtttataatcatcgtgcaactttgtttgttttatctttaccaaatgctttgtacaggtataggtgcccccaagtgaccgagcagacttgtgactcatggtcacttattttttacaagtatacttttttatctgttcatggttttgggtttgacgaaaccttttgtacgcactggatggtaaatttgcaacatgttagtaatttcgact

SEQ ID NO: 271188 - DNA, 1331 bp, Cannabis indica
ggaaaaggtggcatgctctccggtggggcaacacagacagcgcttgcgggattagtggtcatgaagcttgccaccgggggattggcgaagttaagctgttcaggccacaacaaggcattagtggtaaccttaactttacccatgatagttttgatatcataccttaactccggagggaacggggcttcatcacacgccttcatgtagtctatgcaccctttgttgtagctgtgcctcattcggccacaaaagaaacatatgtcggggagattctcgtacttcagctcaagccagacaactttgttaataccagtgaaatggacgggaactcggcgaggaagaggctgagcaacatcaaacatgaccctaatcctaaagtagggtccccaagtttcccggaaagagggccagtagatttccaacaagtggccgagagatgacgagacaagaaccgccagctcttcagagcgtttaagaaagggagtgttgaacacttgaacccaaaggggtattttgagtaagctatctccattaaggacacccaaggaatttggaatatccatgaggatagcttggttgaggtaggtccaaggttgttgtagcaaaacctggcgcctatcttcatcacaaccaaactcaacaaggaagaggccattaccccgatcggtgataaccacggggttccgagatatattgttccaatctctagtcattttctccatgaagtttttgcggttaaaggatttaaccgtgtgaaccttaacaacaaggtagagagggagagactgtatatcggactcggaagtgtttgtggggttaggctcactgagtgtttggatagtgcactcggtttctgtgagattaagagcaacagacagtgagtttgttaactcatccatgatattggccaagagaattaagcaatgtagaaaggacaatatgatacggtggagggtttgggatattggaacagttatattgtgattattaatggaccacaaatatgttatgctgactgaatacttataaaccaaaagagaaagtaaatgaagatttatttgaaagttataactagaaaaaccagaaatagagcaattatgggacggagataagatgatagtgaaatgatgatgactgaaaacttgcaacggaggatgagtgatgcagcggtgggttagagacaaagtgttatgcaaagtgaaaaatatacagtaccaaaccaggaaacacatgagattgataaaaagcaaaggttgaactctagtatgaatatgcagaaatgtgactaagtgtgtgtgaagagagagcagacagggaggggaatatgtgcg

SEQ ID NO: 271189 - DNA, 1344 bp, Cannabis indica
gcgacgacgacaacaatcggcgatgaaacattagaaaaccctagagaaaactttttcagagagaagctaagagaactatccagaagcgagtttttgatagggttagttagttgttagttagattttttaaaaggaaagtacaatttatatataaacataaatacactggaatcaaaattgacacttttgtttactattttaatttggtaaggtgtttattgttatctctccctcttcttctttttttttttcataaaggaatgtagagtgctattattataattttttagtcaacttttatgtttaaaaatacatgttaaaatatatattttttttatggtggtattcgttatagttacaacattatttctgtaatttttttaaattttttgaatagtttagagttccaaaaataaatttgaagtttgttgtctctctgtcctacttaagtacttggactccccgttaactgatatattatgtgtgatgacttggctttcttgctgacaagttatactccatgtggcattaatcttgcccacgtggatatgccacgtcatgtgggaaaaaattaagataacacatattctatagtagcgctcacctcaatagtgactgcttagaattgggtttacaagtatgaaacaatggtagaatctcataaaataagattaccttgcatcctgcccaatacaggacaactttagattcttattttgatgaaataaaaggttactaaaatggtgtcaattttagaagagctcaatacctatttaactggtgatatctttgcatcccgcccaatacgtgacattgtatatcatttggttaaaaaccttggaaaacttgagatatgtttgtttttttagtattttctcatatcttccatattttgttatgtacttacagttttccaaatatatgtgattagaatttatattgaacatagcattactttttgttattgattatgtagtatcaattttgaatcttcattgttggtctaacttaattttttatttttaatggaatcatccccaatagattgtcatccgttaaacaacataatagtgttacatctcgtaagataagtattttataaatgcaaaatttagttgactcattcccaatagatgacaacttagactagggtttacaataacaaaacaatgaagaactttaaatcgaaattattctttagatttcctctatagattttttatttagaaatttctataatcatacatcattggataatattaatgattataatcatttgtttatgatgtttttctattttcttccaagaaaatgagtaacgcggatgaacatattcaagatatt

SEQ ID NO: 271190 - DNA, 2213 bp, Cannabis indica
aaaaaaaagagagagaattctattatttactattattgaaattcatactctgtattcaaataaatatccctaataatggactcgtggagtatgtagattttaactacaaaaccacgtaaaatatctagtattaatattattatgattaaagtctacagtaaatttattacgaaaaaggctatatattcggttaacgaaaatctgcgttagcagtttggtggtttcattgagagccttggtgataaaaactcagaaaaatccctccttataaactcatattcaaaacataattaaatggctgataacattccacgtgaaggcaattgcccagaggaaactaccgatcgtcctggcaaagaacctatggggtctcagagaaccaacacatctgaaacaccacatttagtgaggaacaattgtaatttcaatgctgctggtgatcaaatcccagaaagaaggagtgaggatgcctatgatcctaccagatacgtaccactggtagaattagaaaataggcaacttcgacaacgcttggctgaaccaaactgataaaacgctgagttggagcgagaagttattgtgaccaaggctgcacagggaatattccctcaaaacctacctgatccaactgtaaggagaccgcgaggaagaccttgagcctccaagacgaggaggcaggaaaataaccaagggaatcctccaaatacctaagaagaacaacctgggaatacaagagatgtcccaatggatagagtaaatcaagccaatcaaagtaatacaagaaatcaagaacatcaacgtgatgttctaggaacttcccatagatttacaaaccaagggaatgaatgaactggcataccagaatcatcttgcatgaatgcagaggcaagacaactgcgattaagaaactagaaaattccacataacgatggaagaaatcgtggaaaccaacctaggtctagtggaggcatccacaatggccttcacgcatagatagagagaatatgcacacttacctaagtaggggacgtgtgtctaaatcttttgaataagaagaccaatgcgagattaaacgcgtgaagcaagctcaagcataggagaatcacgatcctacgggcacattaggtcgactggaacaaatagaaaaatgcaagatgggagcagatctcaacgttattttactgaccaggagagtataagtaactaacatagttaccagtctaaaagttactcagggaccaggtctgtaagtaattatgagcaaaggcatcacgaacctgatctccgcaaaagattacactaaaggcagccagaccttcgcgagcacttgaatcgaagtgcacctgatttgtgtaatcaacttaaccaaaatgcaaattagcaacctgtgaattacattaaattacgagtaatttaattggatgataaattcaaaaaatatcaagatggagaatatggcaagttgccaggatatgactcagatgacgaaactaagccattccacgctgacatcttaaattcagaatttcctcaaggatttaagaattcgcacgtctcgcaatatgatgggaccacagatccagtcgcccatttgaataattttcacactataatgcgagcaagcaatgtttctaacaacttgtgttgcatattattttcaacttccttaacaggagctgtgagcaattagcttgataaattcaccaaccattccataacatcttgggaacaattgtcgaaggatttcaaaaaaacattttcaagctgcaagagaccatcgaccagagtcgtcatctttcaccaacataaaaaaaaaaaactgggagagtccgttaaagcgtacttgagtcgcttcagtacgactgctgcaaaagtcagaaacttgaatgatagcattcaactcacaacctttcaagctaggatcacaactgatttatctacagtagggggtgagttataggatgccttgcaaggtcgccctatgaggaatattaatgaatttaatgaaagagcacaaatttttgtgcgtaaaaagaaagcatgtaatgaaatgaagctgttaaagacttgctcgaaagataaacccaacacaagtactgcaacagcgagcaccgtcacaacaaaggtcaaaaatcccaatgaatcaaataccaaaagggaaagattcatcaaaggataaaaagaaacaaaaaaaagcacgagaagtatgtacc

SEQ ID NO: 271191 - DNA, 1641 bp, Cannabis indica
tttttttttaaatttatgctttgaatttctaaagtaattacaaagttagttacaataaaagtttttatacgattttttattgcgatttaagttacaacgctaattgcaatagaaatttttatataaaattctgtaaaaatacaaaaaaaaaaatatttaaaagtgtaaaaataaaaaaaaacccttaattttatttattgaaagaaaaagaaacgaagaagacataatttgttcatatatctcatttttttttgaaaatgtttataagaaaattttaatgtaattacttttacggtagtgattttagacacctaaataattatgttttattttttttttatcataaacttatattatagttatgagattttgtttggaaaaattttaataatttatcatattaaaaataaagtttaaacaattattttgttaagaaaaaaatccaattatacttaatgaaatcaaagttgagtcatgaaataattcattctctttaaacgttcgcgacactacctaattccaaaaaatactattactcaaaatacatatcgtaatataaaattatttataattttcttttcagtagaaaaaaattacataaaactgttttgatctcaattttactaatcaactaactcagctcagtcggacagcagctacgagcaagtggtgttcaagtgagtctttgtgtgactcgtctctcgtagtcatggcaaaaacataaaactgcttttatctcagtttttactaactaaccaacttggctaagtcgaatggcagcgacgtgcatgtggtgctcaagtgagtctttgtgtgactcctccctcttccataaaagcgagtaccccaataaaaaggaacaaaattactaaatgaaaatttgtgttgagtcacgaagtaagtcactttctttaagacgtttgcgacactaccttttctcaaaaaatgttattgcttataatacatatcgtaatataaaacttttttttttcattgggaaaagaatacataaaagtgtttttatctcaatttttactaaccaaccaacttggctccgtcggatagcagcgacgcgcatgtggtgttcaagtaagcatttgtgtgtgtgactcttccatctttcataaaagtgggtactccaataaaaaggaatgaattacttaataaaaatctgggttgagtcacaaagtaagtcgctttctttaagacattcgcaacactacccaattccaaaaaaaaaaaaactactgcttggaatacatatcgtaatataaaattatttatattttttttttatgaggaaaaagaatactagacgcatgtattgttcaagtgatcctttgtgtgactcttctctcttccaatgatagtcatggcagaaacgtaaagtcttaaaatttaaattaaagttactctagaaattaaattaaaggggattacgaaattacttaatgaaaatttgggatgagtcatgaagtaagttggtctctttaagacgtgtgacagtcagtagtcccgtgatccgtaaggggaaataccgggtaagctgtgcaatctcacaccgcctggggaaggtcaagtgggatgattctgagactgtgtaggtatgggactacacagttgaagagggcttaaatggat

SEQ ID NO: 271192 - DNA, 886 bp, Cannabis indica
tgtatccttcaaggtcttgttgactgcttcaacttgaccattcgcttgaggatgtgccactgcggagaaacttttgatgataccatggttcacacaaaaatcagtgaaggattggctgtcaaactgcttgccattatctgaaactatcttgtgcgacagtctgaatcggcagattatgttcttcacaataaagtcttgaactttctttgatgtaatcgctgcgagtggctcggcttctgtccacttagtaaactaatcaaccgctaccactgcgtactgcactcctccttttcctttgggtaattgtccgatcaggtcaatctccaaatggcaaagggacacggacttttcatctgtgttaactcgttaggggtagctcgtggtatctttgaaaatatctgacatttgtcacacttcttaacataggcttttgaatcttcaatcatcgttggctagaaataaacttgccttagaattttcttagataagctttgcctggcggcatgatttccacagaatctgtcgtgcacttcagataggagtcgtgcagcttcttcttgagttacacatccgagcaatggcatcgagaatcctcttctgtacataattccctttattatgatataccatgcaactttccttctcatttttcgagcttcattccgattatctgggagtttcccaaagtcgaggtaggctgctattggtgtcatccagtttggggaagtatcgataattttgatttcttctgtgccagtgatcccggctcttcgaggaactggataggaaccaagttctccttgtcacttacaacattacttcttgccaattgagcgaacgcgtatgcaattgtattttctttcctttgaatttgtctgagaccgta

SEQ ID NO: 271193 - DNA, 2022 bp, Cannabis indica
gtagaatgatataaaacgcacaaatacatacacatcttgctgtattaaggtatagtaaaataacgggcaaaatattgaagtataaagaatagatacagaactctaggaagtaaaacttgcaagtcaatcaactaagaaaaaagctagcaaaaacgaaagctccatgcataagttcatttcaacatttccaaaagacatgtaagtatacaacataaaacaagagcaactctaatgtaaccaagtgactatctaacgagcaacaaacaactgcctaactatgattaagccattcatgaaaaacagcaaaaatattcttccatttcaaagcatgccaagtgctttcacgtaattaaatataacaaacgttaaactccattaagtatatcatttctataagacacaaagtagccaaagacataattttgcataaaaataataactctaaattcctctaaacctctaagaatccgtaatcatctattcacaccttaatcaagcacctaagaacacatttggtcatttaaccaaaacccaagtatctcaaatttctttaaagaatttaaattaacgaaggtcaaggaatcagtaatataatactccataaaatacagtagaattagatagcagaattagccttctcaccattagatcctgatcgctttccacgcttgatcctctctagctgtaactgcgtgtccatgaacatccgcatccttcgaacctccaagtccttcgcaaactgcatcctcttcttctccaactctaccatctgcctcaatttctctgcttcaactttctcgtacacttcaccaaacctcgatatcgccctagccaaactccgtaaccctgcaccatctacactctcgtcatcactatatctctctttctcaacctcctcctcctcctccacgtcctcttcattctccaaatcatcttcatcctcctctgcctctgccgcagcagctgcagcagccattgcagagtaattcctcctgaaaaacccctcttccggggctgcagaaagggccggtcgcttctgtcgcagagccactaaagcggaactagcaacggttgccgcggacgaattcttccgatacgaagatgaagaatgaaggggaacagcgatcggcggcgacggcgatagagaaggagagggctttttctggttggaaccaattaaggcatctagacgatcgaagaaagtccaggatgaagataaggccccattggaagaggaaaccctagccttctcaaccttatacttctttttaatggtatcgattcggttcttacactggacatcggtacggtgggtcttcttagtatggccatggagagcgttgacagcgtcggccacatcttgccaatccttctgccgaagattacctctgttgagctcgagatagcggcggccccatgcgtcgatgagagtagatgtggcctcctcgctccagcagtcctcacggaccggcatgggccgggagtgagaggagacgggagtggcggaggacggagttaaggattccgtgatgtcgcccatagatgaaggttacggtggggtgggtggtggttgggattgttgttttgacgacgtgtgtcaggttggggatcgtcgttctgagaaggtgggttggagtggagaggattaatgccggttattttgttttgggttgagaagaaacgtctctagggcaaacctatagaggtcgcctcggtggggtgtcgttagagatgagtgccggccgcatgagccgcgagtgtaggagacaggtcgccgggatgggcgcgtgaagcctactctcggcttgtgtggcttgcctatgatcttacttaccggctcgactctttccatctttttgttctccttttactttaatcgtacggtgggtctttcgcgtaagcttgtcaggcaggcgggaaacgaagtataataacttaactcaatttttctctttatttatctaaaaaaaaagaataaccatttctcttatcataactccaaaaaaaaaaacaaaacactag

SEQ ID NO: 271194 - DNA, 864 bp, Cannabis indica
gttatatttttgaaattttcgtacgtaccgaaccgttaagtgtcaagtcattattcgcgtgtctaattttttattgatatatttaaaataatttttaaataaaaaataaaatttaataatatagaccaatcaatgactgctacgtggccattgatttacatttgacgcccaagtacctacggaaatttcagaaatataacttaagtattatcatcttcaaaaagtaaacttagatatttatctgcaattaggagttaaacttaagtatccatgccacaaattacttaaaaaaaattaatttttatttaaagaaaaaatatataaaaagtttttgaacacaaatggggtgtttggtattattttcaagaaataattttttaaaacaaagttaaaaaaaaaatgtgatcaacaaaaaaaagttgtttcctaaaattttcaatcacttttttcttcaaattaaccaaacactttttgtttttcaaaaactacaaaagtttttttgtgttctagtcattttttaaaatacaatttcaaaagcaaaaaacaatataaaaacccactaaatatatatatatatatataatatttcattttatgtatgtggctggctaatgtaactatgtaatagaatataatatttgaaaatgataacaataagatgcaaaaacatccataaaaaaatcacattataatattgtatattcttacttggaaagagatatggttatccttagggttgattggtctaataaattcatccatggaatcatattcatccattagtgatggattctcaatcaagtgtatcccaatcccatagttgtacaacctataataagcatacaaattacaacattttcacaa

SEQ ID NO: 271195 - DNA, 1179 bp, Cannabis indica
cttggccaaaagagcttgattaaaaagttgaaattctaaaaaccaaccccacccatcgacttgggctaacatactgtttcacattcacccaaggaatcttcctttgatctccagatgaaccccgccaaaattgtcttacaatagactttaatttttcacaagttttcgccgaaagcttaaagacactcatcatataagttggaatagcttgaagaatagatttgataagtacttctctcccaccagctgaaaaaaatttcacttccatccccgcacacgcttcctaaccttctcacagatcccctcaaacacctatttttgtttctaccaatcactgtaggtaatcccatgtactttcatgtgtagccactgatgtcaaccctaaaactctcaggacctcatcttgatccacctgttgcacattcggactaaaagtgatagtagatttctcaaaattaatcttctgtcgtgaggcagcctcataagttagaaggataggctttatagttttagtatcacctctattagccctaccaaatacaaggctatcatctgcaaagaacaagtgagtaacacgtggtaccgatctagagcacctaaaccccattagttcagatttgcatcctgcaagggagaataatgaagataatgattcttcacagaagaggaataaataaggagataaaggacatccatgtcgtaaccctcttgtcggaatcactcgacctttagggcgataaccctaacccaaccctcagcaaagccaaactgtcacatcatactggctaagaacccccattccacctggtcatatgctttactcatgtcaagcttgagtgccataaatccctttctcccgttatttctttttaacagtgaatgaagtagctcaaaattgaccatgtatcaaatgccctgagacaaatgcactttggaaagatgagatgaggggaccaagaacactttcatcctcagtgataaagctttagtaacaattttatacattacacaattttattttaattatgtgtatttttagttatatattttttcaaaaaaacctagtaaagatttttttaaaaaaattacaataggtaaagaaagtcacatattataaacactttccctattttattactttttaaaaaactttaattaaaaaacatatatattaaatat

SEQ ID NO: 271196 - DNA, 671 bp, Cannabis indica
ttaatttttttttactttttcttcctcttctttcttctcctttttctgcagaccctcagctctccaccatcaaaatccaccacccaccctctcctccggagatccggctgccaccccaactcccaccgctggcgcccaccgtcaccactcctctggaggtccagctaccaccccaactctgacgattaagaatcttaatagcaactttgtgacctgtcaatgcatgctctcagtggcggacccagaatttaaagtgaggggggcgtaattttttattgtaaaaggagggagggcataaataaatttaaaaagaaaaatataaagtgtagttagtgggatttgaacctttaccctctaacctatttgccatctaccttaaccattacaccaagcttactattatgcctataaatatcatcttttaatacaaatatatgttgtaactaatttaaatacatatacatttttttcccgattttttttttcagggggggcgactgcccccctcgctacaatgtgggagggagggcgactgcccccctcgctacaatgtgggtccgcccctgcctgctctacaattttgaccttcccgaaggaaccaataccaagtgttttccccagcttgtaatttggtaaaaaaaacatattcacattgccaccagctctgccag

SEQ ID NO: 271197 - DNA, 1167 bp, Cannabis indica
attctccatacttgaaccattcatattggaagaaaaataatttattttgaaacttgattattatattactataccaggaataaatgttactataaatttatttacattaaccaataaataaattagaaaattataaatctatcatttttttttctttgtttttttgaaaatggaaagatgtaaatcttaagattgataattttccttacacggtaattcacttttattatttgatttaacctaaataatattatataatactgactgcaattcttaatattattattaaataatttgtaatattatatgtcaaattaataattcatattttattgtgatcacttgtgtttcaattaataattagttgtgttgggagtttctttttaaaataaaaaaaaaaataaaaatagtgaactaagaaattataactatatatagtatttataataaatttatataaaggaattatgaggaggtgatagtatatatatatttacaatcaaaatgtaattattgaaatattttttatatatatataggatttttcttaggtgagaacactacttttactctcacttgtgagaacattttgttttagttttaattggtagtggggtgtatgaaattaaaataaattgttgaacataccattatatactattatattgatattgtttttttaatttaaaataacaaacgataaaactgactttatcaaggagtttgagatttttatcgacatcaaaatacgcttcatccatgagagtatttgcttactactgtgtactattctacctgtaaaaattatagtaaagtgtatgtaatgtgtttgactttaaaagactcatcatttttataaacagaaatatatacttcaagcataactttgcaattattttgaggaatttcaactgctttgagcaaaatcaatatggaagtcttttgttatttagacagttacaccaaaaatgagcataaatgacattagaaaatgtaactaattcctacattaggtgacatttattgttttagtaacattttacacaaatgtaagatattccagtgtgagtaaatattgaaatgtcacaatatctttatattagtgacactttaaaaatgtcagtgttatttataaattaaattaaaaaattattaattctttaaaaa

SEQ ID NO: 271198 - DNA, 662 bp, Cannabis indica
aaaactctggaaaggacaaccaacggtcccctcctcgtgacaacctttcacctgtctctcgagtatagtttcccttgtgaccgcacctgtctcatcgcgaaactaggggcatgtgttatagtgagatttctctcacttagaaacttgagaccagacccctacttagaggacacgtatactcagattttccaaagaaagctgagatgtccctgagggactcctcaaagttttaaacctcgcttaagatagaataagcgagaggcagcgagcatgaccaaagtctaatcgcattcgagacaagagagtagctcgcatatatccaactatatgcgagtatcctccccgtgtccgtgtgtaaacaaggagaccgactttctataaatgcgagttggtcctagtaacccagcagccttgataaacgaatatagacttgcatgtctaggtgctatcagctcattatgcgatgtccacaaaaggcgactatctaaaggacgcagacatcctaaacataatgctaaacctgcgaagttaatatcagaacgtgaacaactcaacctgcagatttggaggatgcatacgttgatgagcttagtaactgtcgttcatttattaatattaacgttgtttagttaattattgtaattcaatgtgtaaaaacggat

SEQ ID NO: 271199 - DNA, 662 bp, Cannabis indica
cattttctaaccctaaactacctacctcctccctctctcttttcatttatcaatcttttcgtcatttctcatatactttctaacctaaataacttgccgccaaggagaaattttgagtgagaggagctccaatcagacccgcaccactactccgaacaaccgagactctccgacagattacaaggaagccatcgattactcaagaatagggagatgggggaggagaagaggcacgagatgttgcagaatttgtttggagatcaatctgaggaagaaggagagatcgattctgagcacgagtctaaccccaacccaattagatctctgtaattttttcttcagtagttttttgctcagcttattggaatcttaagctatcttctttaattacattatttagaaggttggggttaaggtttttggctttcgtttgggctagagaggcaaggctcgctgccgtgcagagaaccaaaggtcgccgtcgagcatagaactagaggtcgtcgccgtgtagagaactaaggagagagagatctggaggggaagggaagagaaagagacgaggctcgtttttggcttggatggccagagaaaggttatcaccgtcaaggggaggctcgttttttgcttgaaggccatcgccgaccctacaaattgacttt

SEQ ID NO: 271200 - DNA, 712 bp, Cannabis indica
aactgatttttttatcaaaataaaacttaataataatctgatctagagatgttatgacaaagctgattatattctctaaatctactcgtgttagaaattgtgttaaagttagttgtattaaaaaataaaattgttgaaaattgagctgaagatcctatttttaccattttaaaaaatataaggtgtattttatcatttaacaaaacagatggttcatttaataacttttacaaaacataatgtctaaaatagtatttactctttattaaaccaaaaaagtcacataatttcattggttcttaggaaagccatctgataggaaaaggacaattggtgtttagtataaagagaatggtcccaaaataatgtggcaaaagtaattctcccctcagaatctcatacatacgaaatttcgaatggagctatttgattgcatttgcatttgcccgtacgtgtgaccaagatcgtccacttgttcatttgattggaatagtacaccaatcgtgttacacatttgggccttttagtcttttcctttatattcaaagaaaaaaaaatctaacctcggtcttatgtaaaatttaataagccatttatttattttgacttatattaagccattttattttattttattttttttttttttttgtagttctattaagtccatttattaatatgtaagagaagtgagaactctgaactaacacac

SEQ ID NO: 271201 - DNA, 2059 bp, Cannabis indica
acataatgactccacactgtaagtctttatctgattctttttctttggacgtgttgtttaaccagctttgtttttaatcaaatttctctacaggtaaatcaaccattttagaaccttcggttgaaaagcgatttgggagaagaaaggtacaaatgttgggacgtggtagtaagaaaagtatcggtgtcactaataggtggtcagattcgcacacgtgtgaacaaaagaacaggtaaaaaagaataacaatctggagaggccattaaatgccgacaaacacaatagaaagattgttttagtagtttggataattttacactagtttttagttttgagtcagagtaaatactgtacatttcatatatgtaatgttgtttcctaatgttaatttataaatagccttcagtttcatttgcaaatatctttatccccttaacgaattatataaataatttatatataaatagtatcagcataacaaatatttcatgacgtaaatgcttgtcaaattcgatacataattggttagtgagtaattttttttttttactttagtaaaaggacatgttcctagctaggtttttcgttctattcaattaatagtgtccaagtgtcgaacttagattcaatgattcatcccctagtcgatctgattagctggtagttactttttcagattaagacaactctggcaaagattaatgtaacttggccaaaaactcagaaagattttctttagatttggatggaatgggatcctaccgaacgctaacttttacataaaaaacgaaattaaataattgtatttggtaactaatatctgtcgaagtttatctctagttgtcttctagtttcagtaggtatgaagggcatatctattattggatttgttgtacaaacaaaacaagagaaaacacacctcgtacattgatcgaatatcatagcatgttcgttgctctctgagctttatccctcccatgcttaatataatctatcttcaaacttgtttcttgtgaaaagtaaaaataaaaactaggatatttaaataagttgttaataaataagaatgttcaccaaacaataatcacagagcgcaagtgcaatgtcgaaaccgttaaatatatatatccttattcatctattaaaacaaatacatgaattgttaatctatggatacgaaataaaaattacaaattttattgtctgaaatactgtacaacaaattttgcaaatgccacaaataaagcaagaagggcatatgcattcatgttacatccccattatttccagtcaacttcgccaagatgtttattagctgggataaggtcaaattaagtcgattagtaaataaggtgttaaggacatacatacatacaagtaaatggcaataaacaaactgatttgcataaacaattttttacttaattccatttttttttcttccaaaaattatattttgatgataagaataattatagtttgaaaaagcaaacgctatacccgggaagcttggcttgcactggcaacaaattataatgggggaaccagagatccatatgttcttgaaactttaaatgcactgaacttacctcattcgttttgcgtgattaaataaggtgaggaactcaatcattgtaagagctcaaagcagcaacaaccgatcctgttgttgtaaaagtcgatgcaacatctggatattctttccaagatgttgtcacttccagagatggataaagccagctttttatagaatctacaaaagagcttggttccaagttcagaatagcttcccaatccacctgtaagccttttgggatgcttcctgtgaacctcatattggcagcaagaaacaatccgagcataactacgaatccaacgacagcggatcctcgcgaaagtggcatgaaattgtacctgaaagcatttcagttttgcttacagataacaaattgtacgaaaaccaaagcaccctctccacccaagagtaagtaagataccagtaatatgtcatccttaaaatagcatctctgacagtttcaagcgcatcgaaatcagtaga

SEQ ID NO: 271202 - DNA, 985 bp, Cannabis indica
gtcttggtcctagtccgggtttatgatctaggtctggggtcaggtcctgggtctcggtgctagtttttgaagcccgggtaccggatctaggtccccatcttggtccggttcctaggtcccagtccgagtccaggacccgattggggttcaagtcctagtccgagttcgggttcgagtttccgatcccggtctgggtctagatctaggtttgagtcttgattcaggtccgggcccgagtctcgggttccgatccgggtctgtgttttgaggcccgggtcaaggtcccccatccaggtccgggtcctaggtcctagtctgggtccatgtttgggttcaggtccgggtcctaggtcctagtctgggtccatgtttgggttcaggtcgtagtccccagttccgatttttattccgtgtctgggttcgagttttggtctgggtctccgtctaggtcgggatttgagtcctagttcgagtctagggttgggtcttggtccaagtccagatcccagtctggatttgagtttgggtccgaatccgagtccaagtcttgggtacgggtccaggtttgggtcttggtctcggtctgaatccaagtcccaagtttcgatcccagtgggtatgggtctaggtctgggttcaagtctaggttcgtatccagatccatgtctaggtccgagtttgggtctgggatcgggttccaggttcaagtctgaccttatcccggactcgaaactggaatcagactaggactgggactagaacccagatattggaccgtaacagggccaaaacctaaacccaaactcagactagaacccataccgggacttggacccagaccgcgacctgtgacctgggaccaaaccaagaccgcgacctagatacagaccaaaaccaagacccaaaaaccagggccgaacccaggacccaagaacttgactcagacctaggacccgaaaccaggaccagactgggactgggaccc

SEQ ID NO: 271203 - DNA, 573 bp, Cannabis indica
gtacggtcagggtatgaacgagacgctctagcaaagctatagcaaccatattcgcagaccgtttaacaaatgaaaacaagacaaatggaaaatcattaagcaacattttacaatcgttaatcaaatcaccaaatactgaaatcattctaaaggaactcctcaacgattgtaccataaccaaacagtcagtttcaacaaagacccgctgccacaaatttgagtattgttttacccaactaagcgcctctctgaagctcatggctactgcaacttcagcagccacattcccactacaagaaaaccatcttttgctggcaaaagtacactaactgcgtcggtaaagttttgccggcgcacaactgcgctggcaaagcttatctgggaagcttggtcggtaaaagactttttatcggtgcgtagagtacatacgccggtaaaacttccttttaccggcgagaaatcacgcaggtgaaaaagaagcgccggtgttaaaaaatgtccttatccgctatgaacctgctttgataagcttttgccggcgcaatagtgcgccggcaaaactattagcgccaa

SEQ ID NO: 271204 - DNA, 1273 bp, Cannabis indica
gctccaaaagacaccaatagacgagataatgctaactttaaggacccgagacataggctaattataacctaacatgagttgatgtagatataaggattctaatataacctctattatctaacatataggtcactttcagaaatctttcttgactgtctcctaatgttccttgtttgattacatcttagatagcttcgactcaacagtagtagtttggttaattcatacataaaagtacatttaacctcttcctatttttttttcagggatatcttgttgtgacatattatcttagtctgaaactttaagttccttctagactaagtcataaccatagcaatctagtattaacattaatgtaaaatacttgcctaagattaagtaatcattagagctaccacaaaatatttcatgaggattaggaattttgcctaagtcattcgaatggaacatgcaaaaattttcctatcttatcctcaaaattctgataagttatttctatccatatgaatggttagatttactttctcagttgaattctaaagttcctatcacaagtgtcatccaaatgaagatgggcttagaattttaaaattctcccactcgaataaggtattgtgatactatatccgaaaactttattggtatcaatttctattactacagtaacatattaattggaacaataaataagattaagtataagttctaataattttctaatttgttcattatattacatccatgtttaatcaaaatatgtgtgtcatagagtactatggtgtattgagtatagtctagagtttaaaatgaactacatatgtcaatagcttcatccacccctaagtattatagagatcatgtggagttatgaatataatccagatttcaatagatataaaagatcgttgaactgtatatattattcttaacttcttccacccctatcagatcaaaagatcttttattaaacaaaatcttaataatttcttcagaattaacgattattcgtaaacattgaatttgaattcgaagtgtttatgtggtattatctctttgcagagtttaatataccatagaatttgtatcaataataaagcacaaacacatacaaacattgtaaacatataaatataatttgtataggcatacacaagataaagaaatatgaagcttaattcataaatacaattcattatcaaaagagaaaactttattataatattctccaaaaaaaaaaatgaattatatccaataatatgaaaaataggga

SEQ ID NO: 271205 - DNA, 2677 bp, Cannabis indica
tattcttctatgggctgctctactgtgtgtcgctgcatgttctctgataacaatattcgctcttgtttgggtgctttgtgatcaattcatgggtgatttcattgttgctgaatttaataaaaaatatctattatttttcctacgttcatttctcattgcattgtttgctcatgaagtatttaggcattttatttgaaaagtatactttgagtttattctttttccattgttgtatttaatttagttcacatttccttatctgttactaaacatcgttttacaaccttcttttaccaaaaagctataaaagtgtgaacaatggggaaattagaaaaagtgtcgacgtttatatggagaaaatacgcagactacgtatataccaagtgggaaagatttctcctatggaacatggttgagccctatacaagacccaagtcattcacacctgtggttactgtctatgttgctgctttttacactggggttgttggggctgccattactgagcaactctacaaggtacctcttttctctgccttcacttttgtttcagctaacattgacgagttattgcattctaaacactggtttgtacctttgtttcccgggttataatttatgatgtttgggagtgattgaaacttagtggctaacaagaatgtttaataaagttatttgggttttggcttctatgtaaagaccaactcaagtcatttgaagatgggaaaaaatgagatgaaccaagccatgtgagttattcagtacttaatttctttccatgataatagtgtttctctatgggtgttgagagttgagtgtttctcttagggagttgagagtttcttccatcgagtttagtgtttctccataagagtttaaagtttcttcatgagagttgagaggtttttatgagaactgagtttttaagtaccctatatgtgatcttgttacttctaactccatttttcaaggcaataaagaaataggcctagtgcttgttcttccatggatgtaggctcaagcagttgagttcaaactatgtaaactctagttgcatctttgcttcatttcttagtttattccagattctattagtttcatctttgttcatttcagcatcaagtttagttttgaatcttgaatttggttcaaaatattgattcattctctttttagattgatgttcttgtttagtgtaaactgtcttaaatcacaacatatgatatgatcacactgcatttaggattgatggcttcttaaggttttttaagttttataatatcttttgacattcagctaatttactctgcagagattcttgttagtgttgtaacctatctaattggtttggattttcttgttgattactgctttaggggggattggttgtgaaacataagttttgacagtgtcaacagtaaggaaaaatagaaaaactcaaggtgccagaatgggtgatatcctttaaattgggacccattttctaacaaaattttgtaggtaatattaatttctaaccttggttcttattatgagagacaattatgttttgcttatgctgtgtgcttttgagtgatttacacttgttcccaaggagtgttgatttatggaaattattttggtgcattccctttgttgcgacagttgtaggtgtttctgtgcatgacttgaagtagaattttacttggttagaatactatagtaaattcaaaactattgagcactgtagttcacctcagctgtgtatgctttctggcattggtgtctttttaagagatgctgatacagcctgatctttcaaacttagtccatgatagtttgggaagaaaaacattgctattttccttcgattaatttggtaatgaatttatgctgtcctttctactttcagcttctcaaagtagaacagtctgatatcaaatatttaggggatgcaattcccattattgaagtcatggtagttttcctgataatttatcatatcgacaacgacaacaaatgtggtactttatgttgttttgagttgagtcatgaaggagaacgactcacgtaacgaaactcaaaccttctgtatcttgcatgttttcatgtttgtgtgaaattttgttgtgtggtttatctatatgtgtatttttgactcggttcttgtttatttaagtatctttatttggttacaggagaaatattgggaagaccatcctggagaggttgtgcctataatgaagccaaagttctattctggaccttggaaggtagccatgggggaggtccctgcccatctgaaaagaaagcctgaacaaagtgaacattgaatatgctatgctatcatttgtaaaaattatagagggaagaaaaaaaaatcttatcaataaagtttcatagttttcttgattgacatatataatgcatctgattttgctctcagcaagttttgcttttatcgttctctactgaacgaacaattgatcatgtattatcagtattatggagcttatcaatggttgaatttatagtgcatcttataaaggaaaaaatgcttggttttttttttttgtttttttttttttttttttttttttttttttttttttttaaagtagatgtgcatttctctattaatcatcagtattgttaaaatgtgcagcggattttctcagagattgaggaagcttataat

SEQ ID NO: 271206 - DNA, 906 bp, Cannabis indica
atcaaggaaagattggtcaagaaaattagatgatgcattgtgggcatacagaactgctttcaaaacaccgattggcatgtctccatatcggttggtgtttggaaaggcttgtcatctgccggtggagttagagcataaagctttttgggccatgaagactcttaacatggaattaaaagctgcaggagagaaaaggctactacaattgaatgaactagaggagtttcgaaatgaagcctatgagaatgcaaaaatctacaaggagagaactaagaagtggcatgaccaaggtttagtaaggaaggagtttcaacctgggcagcaagtgttactattcaattcaaggttgaagttgtttcctggaaagttgaagtcaaggtggtcaggaccattcacagtagtcaaggtgtttccctatggagcggtggagttaaaaggtgaaggtccagcaactttcaaagttaatggacagcgtttaaagctctacttgggaggtcaatttgaccaagccaagtccgccatgattctggcgccactatgaagaacacagctcagcgtccggctatatgacgataaagacagcgctcttgggaggcaacccaagtgttttctttaatttttcagactttttgattatgtttttagtttatgctttagtatttttagtattttcaatttttagctaagtaccagacattattttttccagttgaatcgtgaaaaacgtgaaaaaaaatatatttaggaccaggagctcagtggtcgcgaccgtttttggtagtcgcaaccctggtcgcgacctagggttttaacaaaaccacaaaaaattttcatgctcagtagtcgcgactagcacaactggaagtcgcgaccccagtcgcgactacccaattttccagaaacccc

SEQ ID NO: 271207 - DNA, 1676 bp, Cannabis indica
aagaaattctctggaaacagcgctccaaagtccattggcttcgtgctggggataagaacaccaagtttttccatcagaaagcttcttccaggaagaaaactaactttattaggaagctcaccctcgatgatggaaccatcatctccactcactctgccattgaagctgaaatctgccgttttttctctaatctctttcagtctcaaggcaccagtactgatgctgttaacctactcctctccactatcaattctaggcttactccccaacagtttgcctttcttgatggccctttcactgttgaggaagttaagtctgccttatttcaactctctggggacaaagctcctggctctgatgggctgaatgcttatttttatcaaaagaactggagcattgtagggaaggacttaagtgatgcaattctgagtgtccttaataataatgctagcatggactccatcgacaaaactctatcgtgctcattcccaaaaagcataatgcttctgctttaaaagactaccgtcctattagcctctgtacaaccctttataaaattgtttctaaaactattgctaataggcttaaatctataatggaggatgttatttcccctactcaaagtgctttcctctctgaccgtctcatttttgataacatcctcattgctcaggagatgatccatgccattaatcataggaaaacggggaaaattgggtgggtgggaatcaaacttgatatggaaaaagcattcgaccgtgtggaatggaattttctctcagcaatccttagccatctaaacttccctagcagaatcatcactctcattcatcagtgcctctcttctgtttccatcaagttcagtattaatgggaacatttctaaggaaattcttcccactcgtggcttgagacaaggagatcctctttctccctatctctttttgttatgctctgaaggtcttgctgctgctcttaacatccaaaagcaattgggaaattttgatggcatttcaattgccagaactgcccctgctgtttcccatcttctctttgctgatgataccctcatctttgctaaggccacatactcttcttgtaatgcacttcaagcagcccttcaactctataaccaagccactggccaatgtgtcaattttggtaaatcttctatccttttctccccaaacactccctctcaaatctcgagtcatttctatcaaacccttgggatttctaatgggcctttcatgtcaaaatatcttggagtcccccagtgttttggtagatcaaaaaagaacagtttcagcttcatcttagaccgtgtcagttccaatctcaaggtctggagtcataagttcttctccaaagctggcaaagaagtccttttaaagtccgttatccaagctataccctcttttgccatgtcctgttataaactccctgcctctatctgccacaaaattgagaaactcatggctcagttttggtggggctcttttgggaatcactctaaagctcactggaagtcttggccttctctttgtcaatcaaagttctttggagggcttggctttcgatccttaattcaccacaatcaggctctactggccaagcaagcttggagagtcctaaccacccctgattctattgcttctcaaatcctcaaggccaggt

SEQ ID NO: 271208 - DNA, 3524 bp, Cannabis indica
ccactttgtgttcttcctcctcttctcttttcagtgtgtcactatattaaccccgaagagtcttataaacttaagcttgttgtgcaaagcattttttttttgagtacatttcttatatgaattcataaatttagaaagaaaaagtaagtgatatgttgaaatatatatgcagtgacacgacacgttgagtatgaatttagggtctaaaataaagtgatagaatagtgagggacatgttaattaactgtgaaaaccaatcttaaaatacttttcttcaaacaatacaacaaaaccacagaaagaacaagaaataaataattgatattgatacctcaattctcatagatgatataacaaataaataagttgttggttttctaattttttttgcctgatgcacaacctgagcctttttgactatctaaatccacaatgtgaatcgtagatcaatccataaacaatttatagcaacacagacatataattgtaactgaggcttaaagaacatgttcaaatcattatttattgtactaaacttgatgaatacatgttctgaagtatttctccaatatgcataataaaaatatagaataagtattatattggagtttgacttaaattatttatttatatttgtgaagttacaattcttttgggtaattattaattgtgtgaaaaggaaagtcttggtggccaagttttgaaaagtttttttagaggaaactttggaatgtcttggtccccagttgtcttagtgcccaagttttgtactttataaatatatattttgtgtgtaagagaaaggtatgtgtgtagagaaaaagagtgagttgtgaaatgagaagtgggtgtgagtttgttgtgtggtgagagtgaggaagaagcaaatagtgtattatgatttgggttcagatagagagtatatgtaattttgaagtgataagtgaaatatatatatttttgtggatttggtagttttatcaatccgagttaaaattctttgcttcctttatttgttatttcgttatgcttgaagtttattatttttcccaacaagtagtatcaagaccaaagttctcatcaacacaaaaaatgtcaaaaaacggtgtctttcacaaaatttgagatcgagcttttggatgggaagaacaatttgagtttatagcagagcacggtgaaagatgtgttggtacagcaaaggctcctaaaggcactgcaaagaaagaaacctaagagtatgactgataaagatttgaaagagttgggcgaaagtgataaaaactattagtttaagtttggctcctgaattaaagtattgtgtaatgaacgaaacatctccctttgagttatggaaaaagttagaaaaactttatacgtcaaaattcctaacaaatggattatatttgaagaagcagttatatgagttaaaaatggttgaagaagaagatgttagggatcatataaatagatttaataagtgcataactcaattattaagtgcagatgtcaaaattgataaaatgtagctattattttgttagcgtctttaccaaaatcatatgagatattagtgactatatttttagttggaaaaactactttaactgtagatgaggtgtcaactgctcttttggagacagatagtatcaagcaaccaagtagtatgtctcatgatcaaactcttgtgacgaggtcagattcaagtagtggtaggagtacatcgagaggaagatatgatgacggaagagacaatcgcgctcattcactgtcttggagggaagaggagtgctactattgtcacaaaaagagacagttaggaggaattatgaagagttaacaaatcatcttgaagcaatgaggaatcaagaatgcaaagacacaatatctaattccatatatgttgctggtgaaggctttgaaagtgactttttctctgtcatagctgatgaaaacttttctgactattggattttaaattctggttcttcgttccacatgtgcccgtataaaaagtgctttgacacttatattacatatgatggttgtactcaatacaagaactgtaaataccgacagactaatatattggtgaaaagacaaaaaacaaccgctaaagcctagtacatgcgggtgtccgtcgctattgacccgctgataatattggattgctattaatctttaatactgatggactgacacacctgccgcttataataaatttagcaacgaactaatagcggcgggaccccccgctaatgaggttttataaaaaaataataatttaattatataatttactatttattaattttttaatttgtataatttcttatttatattatgtatataaaatgaattttaaatataataaatgtatttaaatcaataaaatatattttttttatcattaatataaacaaatataataaaatgaatataaaatatactgtgcattaagctaattattattgtttacacataattaaaaacttaaactaattatattgtccacacataattaaaacttaaactaattattattgtcttcatcaaacacattatctaaaacttctaaaccaactttctagttgaatggggttatttgtgcattgtcccgagcttgcactaatggcggtgaagggtaatatggttgctgcatgcgaagttaataactgagcaaattgtcgagtttgttgttatgggtgagtgagaggttgtggttgtggttgagtggaaggttgttgtatcggctgacattattactcttagaagaaaaaattattatgacttaattagtatgaatgtaaactagatgaacaaaaattatatttagtccaaatgtaaataacataatcaaaattaacatcattaaatataccatttatgtaattattacaaatatttcaacatcagtggagctaataatcaccatcactctcatcattttgagaaataatatcgtcttcacatcgatcaagtaacaactcctcttcttcatcagctatttcgtcgtctgattcgtcatctacaacattttcaccaacttgattaacattcaaattttgtgcagtatcaattatcattgccagttctagaggttgcagaattaactttcctagattcatagtcatgaaaaatttgacgagcttgtatcatgtacgacattttcatcaaggtcgtcctaaatgtcccaaaagtgccgatggtttacatcttcaactattttccagtttctacctctaagcaaatcaataaggtaaaatacttgcttagtttgagtaacaagtataaatgggtcatctttgtaccattcttcactgacattgatactagtggcattattctcagtgattgttttccttctacgtggatcactcttaaactatttacaatacaacaatgtcactgaatacaaaccaatgaaattgacagaattggagtttttcattaggcttgagaatgtaaggggcatgtggcttcatcaacttaccattcccattatcataaatccacaaccattctct

SEQ ID NO: 271209 - DNA, 672 bp, Cannabis indica
tgttgttttccataatttatttttttaacgtcgattttactgttcttactccatcttcctggaattaatgattattttctgagtgttctcgtagtgctgtggtggttctatccgtgagtgttgaagatggaggctataaaatacatttcttcttctttctctatagttattttgtgtttttttattttggttatcttaaaaatacatttgacgagctcactagaaaaaaagttttgaggtgtgtgcttcttttatgtttttctaaggggttatatctgcctattgttctatatttgttttgtgttgttttaatagtttttttgttatgattttttaagattgggcttccaaatataattgctaatgcatttggtattgctctgcagaatattttgtagcttttttaatcatattttttttgtttgagttgttttagtgttattttacagttgttttgccatgattatttatttgacgtcgatttcattgttttttctcaatctcaccgtaattaattttttttatcgattgttctggtgttttcgtggtggttatgtccgtggatataaaagatggaggcctcattttttttttttggtgtttacattataaaagaaaaaaaaaactggccaagataatataaaagttatttttgccgtgtggtagtatttt

SEQ ID NO: 271210 - DNA, 2350 bp, Cannabis indica
atatggatgccaggctatggcatatgcttgactaattaggcaatgggatatatggatgccttgttatggcctaggcttgcttgattaggcaatgtgatatatagatgctaggctatggcatgggcttgctttgattaggaaatgtaatatacaggctcacctgattagctgatgtgatatatggatgccaggctatagcataggcttgcctaattaggcaatgtgatatatgggctcaccttattaggtgatgcaatatatgaaagctaggctaggatatgagcttgcctaattaggcaatgtgatatatggataccggggagccgtatttgggttgttcatatgagacaaccgtgataagtcataattataaactgaaattgttgttaggtttcttacttgttggcgaccctgtttaggtagtggtagtgagatataggtgccagactatggatgcgattattggtgccaggatagggcacgagcttatctaattagacgatgcgataaatgggtgtcaggttttggcacaggctcacctaattaggttatgcaatatattatttctatgatagggcacaggctcatctgattaggtgatacgatatatcggtgtcaggttttggcacggactcacctgattaggtgatgtagtgatgtgatatacaagttttaattttgagacgaccttgcctgattaggaaatgcaattgatagtttcttcttatttccatgtatatagttggttatattatatactcttaggaatgttattgtttaattaaattataatagttaaatggatagttaattattacacgtatccaccttcattactcttcctgttgactccttgtgattcacaagtgctctatggcagcggtaaaaggcaagaaaaagttagaacagccatgatgtgacggtcttttctaacaatgtacatattaatcctactggcttgtgtactgaattgccaagagttcttttgggttgtatcagctgtgtattttgacttgttatcgtttatagttcttttgtaaaaattttataacaggaattcccgaaacaaagttttagtgttgttatgatgtctgttactaaggttttaatttagtgaagtacgttgtcaataatatcacagattttaataataatttatctatttttactaaactagtttataaaatcacacgtggtgttcctatatattaggacgttacatatgtagtggatcagtatgtaaaattgtacgttaaggaaatagttcgacttcaagttgctccaaagtcaattttctcaaatcgtgatccaaagtttacatcaaaattttgggaatatctacaaaggtccatgggcactaagttaaagtttagcactaattttaatcctcaaactgatggacagtctgaaataactattaagatattagaagacatgctgtgatcatgtttgttagacgttgaagggtcctagaataagtatctctctctaattgagttttcatactaaaatagctattagagtactattggtgtggcaacatatgaaatattgtactggagaagtgtcaatcactcattcattgggattaagcaagtgagagaagtttctttggacccgaagcaattcaaaaaactagtgaagatatagaaaggatcaaggctcatatgctctcttcataaagtagacaaaaaatctatgctaatccaaagcttagggatgtggagttccaggttggtgattttctattcctcttagtttcacctatgaaagggattcagagattaggaaagaaagagaagttaagccctagatttattagtcccttcgagatcctggaaaaggtaggttaagtagcctatcggctagcattacctcctgccttgtctggagttcgtaatgtgtttaatatctccatgcttaggaagtacatgtcttactcaacacatattttaaattatgatgatattgagctccaaaagaattttttatatgaagaacaacatttaaggatcattgataggaaagaaaaagtattgtagaaccagacgattccattagtgaaagtactatggaggaatggcaaggttgaggaagagagttgggagttagagtcgcaggtgcgggatcagtactgagttgaattgggatagttttagcagttgtggtctgagttgagcaagattgagttttaaaactaaagcttgctcaactctggggctttgtgatattattacaattatgatttttgagctatgatttatgtttgggtaaattgcggcataaatacctaatgtttctgattttatacacttaaatgcctaatgtttatttttggaggcaaaataac

SEQ ID NO: 271211 - DNA, 1210 bp, Cannabis indica
tccgggtctcaattccggtctgggttcacgaccgtgtccgagcccgagttccagtctcagtttgggtctgaggctaggtttgtgttcggttctaggtctgtgtctgggtccttgtaacggtcctagtcttgtactagggtcttggttcggcgattcttgttcaggttctaattttgggtcccaggtctaggtttgggttccggtttgtttctttgtctgggttctggtcctagtctgagtccctgatctagacaccgactactggtctgttccaggccccattacccgaatcccgagtcaagatcaggatcactatcacaggtctcggtctggttctggttcaggtcccaggtcccatttctgaatttgggttcgggatcgagactggggtgctgttgtaggtcttgaccctggttctgtgtccttagtctggttccatgtttgggtctgagttcaggttcgggttcggatcccgagtccaggtttgggttgggacccgggttcggctcccaattcgggtctaggtctgatttggagtccgggtccaggtccgtttacggttctggatctaggtccaatctaatttatgattcaaagtccaagtccttgttctagtcccagtcaacttccagttttggttccaattttgggtcacagtgtacgggttcgggtccacttttgggtttgggactgggttcaggtccgggtgtgggttcgggtccttgtcagagttcgggtccagggctgggtcccaaatccagacaccgactacgggttttgtccaagccctgggcccagattcgaatcccaatcacgggtcccactctggtgccgggtcacgagctgggtcttaggttcatgtctgggtctgagtcgggtactatgtcccagtccaaattctgtttcccatgtccctatcctaattcttggtccaggtcccagttattgggtgggtttgggtctcggtccaagttggggttacgagtgcgggtccaagtttgggtgtgggtcagaatctaagtccagatgtaggtccagcatttcgatcccaatctaggtctagttgtgagtccaggtaagtatttggatccctatctacgtccaagtctgtgcttcggattgggtcccagatttaggtccaggttcgggtctcaattcctgtctgggtacacgatcgtgtccgggcctgagttccagtctcagtttgggt

SEQ ID NO: 271212 - DNA, 1056 bp, Cannabis indica
ctgatggccttgtggtccgtcccgctgaaccacttgaagcctggctgagagaactaaagataccccgacctgccttgcttgggggtagacttcaggtcgaagaaccaagcgaccacgtggggagaaggagcatcccatccctaggaagcatagaggacgaagagagcgaacaaatacttaatgcccttgggagtaatctgagccgggcagaggctgaagaagtccgccacatattggaagtacttatgcaagggcatcagcacccgttgctagccgtgggcccccgaccaagtgcacatccccttatcagggtttgtggcacggttgtcgtgggcgggaatgtagcagtccagctcgcccaggtatctgtcctggtcgagagtgcggaggcgtgcctccgaaatgttggacgaaggacttacccacctggcgcccaaggcatcctgcctcctgtgaggaaccgcctcagcaagctcctcactgacgtagtcaacgccctcaaccaggacgtccccgtcagcatcgactggcttgccagtctcattgtactccacgaagtgagggggttcaatctcttcctctccctcaacagcgagagggctgcccggacgcgcctcgtccagctccttaacctcttggacctcagcgtccccctcacggtcctcctccattgggactgccaaattttgttcggtgtcaggcagagtggcaagccgagccacttggggatcagaagcgtcagccagacgcgtagttttcttcgtacgagccatcatcctatcgctgggtacggaatcagaagagtctccttctctagaacgagagttggcatgaagacgagggtggacttcgtgcagaagttgaagtagctcctggtcaatttgatgctcgggctcccaagactcacctgggttcatctacaaaagacaacacacaagatgagtgttggacggattatcaaacgaaaaacaagcaaatatgccgaccaggagtacccaacagattaaagaacgactgtgttcaaagaaaagtttaaactcaagaagtcagaaagtt

SEQ ID NO: 271213 - DNA, 3935 bp, Cannabis indica
tttaaggtcgttaaaaactgcccactgaactagttgagtatatttggagtttaaggactttttgtctaatttcatttcaattttactacttcagtgatttgtttatatactaaatcatgcttcccaaactttgatatctaccaaatcatcgcccctcgaactttgacatgtactaaatcatggcccctggactttcatccatgttagacttttccaactaaaattaagaaaaaaatccttaaatccaacaatctaaataggtttagggggcattttcaatgatctaaaagttcagggggcaaaaatccatatttaccttaaattaattttaagttttctcttattagttgttactagataaatttcttaaactaattatgtaacgcttaagtgacaatgattcagttgtataacactttattagatacataagataaaatttaacaaaagtattatatttcagtattgttgataattcaggcaatttataacagacagaataataatataatttggagtaataataatttaacggcaaaaattttaaataatttttttttcgctattctgaatcgtaatatctgaacttttattcttcacaaaaaattaaccctatatttaaaataaattataaagtaacaaatataaaataaactaaaacaaaagagtaaaagaaatactttagttgattggttaattattaggtttttttctaaatttaccgtttgggtttctaaagtggttgtagcgctagttgcaagtaagggttcctatgtagaatttacgtaaaattaaaaaaaaaaactagttttgaagtgtaaaaatgaaaataaccctaattattattatattttctaaaaaaaagtattattgaaagcctaataaagaagaacactaaaacaataatagtagtttggaagcattaacttcatgatataattttggtaattagataattatttaagtgtactaatattctaaatatatatatgtttaagtgttatttataattataattatttgaatttatattttttgtaaaatatatatcttttatttattgtattttcttttaaaaaaattctcacttattatattcttaaaaagtctacatataaaatcaaaataaaatatattttaaacattagttaaaaaaattaaaatgaaaaattatataaaattttattaaaaaaattatacatgatgtcaaagaaaaaaataaaaataaaattaaaataattatggacaaaaaaaaaaaataatttatatattaatatttattttttaaattcatataagtttatttttttttaatattgatgtgtacacagtgcaaatcaaaatttctatataactaattaaataaacctatgggtaaacccacttccattgtgacaccacttccatgaaatatcataaacaatcgttaactaactataaaaacctatatttattttgagtacaacttttgttgcaaatatgtaaatataagagtgcctacatcgaatcgaatgaattagatcatataaattagatcaaatctcacttaatattattagaaatttggagataagttgaatgaggtttcatctcaaaaccaattggtaatgagagaagtagctcattcatcttataaattataatttatttttacatattaacaatggaaactaactctaataaatattgttcgaaagaacatctggtcccaacacattagtggctagtaataatcatcaaaaaagccgcttaacaatctattgtttttaaccaagcaaacctcataacctgtacacttttttttttcaaggttggggagttgaagaaattagttgaagagggtaaggtgaagtacattggtttgtcagaggcctcagcttcaaccataagaagagctcatgcagttcatccaatttcagccatccagctggagtggtccttgtggaatagagatgttgaggatgaaattattcctgtctgtaggtgagtctcattaaccaaccttataattattcatttaaatacatatttttatgtgttattacatgagaacatatatgtaatgtttttctttttaaagaaaagcattcatagattaaatggaaaagaggatatatccactataccataccgtttgtgggtaaaaatctactttgccacattagccacaaaattacaagttatgtggtattgatctaataatattgtttttgttttttgtcagggaactaggcattggtattgttgcatacagtccgctaggcatgggattcttatcatctggctctaaacttctagatactttatccaatgatgacattcggaaggtaggtatcattgattatgtggtatcattacataataaatatgttttaggaaaaatataaaaaataaaattaagtttccttttggtttgatatacataataagtttaaaaatttgtacgagtaattatcattctcacaaaaagaccgccaatgaaggggaaaccaagctgataataacacaaaaattttatacaaaatacccaaagttgtttatatatatatatattttatggatttttcttttcacacttttgttttacttaaatttgtttttcaagagaaaataattatgactttcaaaggataatgtagcacgtatgttgtctaattgatacaactacttcaactttgatatactaataataaaatatatatgtgcaatgtgtgtatacttattgcagacccatcttccaaaattacaacccgaaaacattttacataatcaaaagatatttgatcgagtgaatgaaattgcgacaagaaaaggatgcactccatcaaagttagcattggcatgggtccaccaccaaggaaatgatgtgagtcccatcccaggaaccacaaagatagaaaatttcaatcaaaatattgaagccctgtcactgaaacttacaccagaagaattggttgagcttgattcaattgcttccgcacatgctgtcaaaggtgatacatatgataagtctgcaagtacttggaggaactctgaaactccaccattatcatcatggaagttggagtgaatatacatgcatgcaatgcacatgcctaatataataacaagctagctatagctactgctatttccctcgtgtaccttgccattatttttcaacctttaccatatatatgcatgttgaactagtgttcttgattggtatgcaagtagttttttgtcaagtgagtttcaatctagttattattaagcttttagggtgtgttgcatacagtataagagggttgtattgtactaaatatgtaaaataccattttctttttctatttttttatctcatttttttttttctagctttcatcattattttttttttggtgtatgtaatttcattgcatatatatgttttcctctactattaattttctgtattaataattgagtgtaacaaaatttgttctcatcaaaatggggctgttgaatatgtgttaataaattaatgatctatgtagagatactttaaggagaagaatgttgtttcgactccaagtaaaagattatatgggtaatagaagaaattatatggaaacatacagtcatacatgcgcaaaaaatcaaaattatatgtatctaatttatctatagcaattatcttagtgcaatactatcaaataagttttatcccaaaatctctaaatcagaactaattttatttatctaattatccttagtgctaatattattttattattaatataattaaattaaagcataaattatatataataacccataaactaaaaatttaaaattgaaaaagtttaaataaatacacatctacatgtttgtatattatctatctttatattttatattatgtgtttgtaattttgttagtatattagtatcatttttatataattttttttaag

SEQ ID NO: 271214 - DNA, 801 bp, Cannabis indica
taggtgttgtagggattttatggaggtagtccttaatcccttttgactgatgtgattcctcacagagtagccgtcactagactttattgatcatagcctagtaggtgcaaattgggggttgtgtcgtcagactttattgcgtgtggcagttccaatacgcttccttccatgcggcattaaatgcgagatgactattcagatggaatctaacaccacttggaggtgctttgtggccatcttgctctccgagagcacatgaggcttacatgccttctccgggaggcatgtccgagataatcctttgctttcaagaagacatagctgttttatttaaccgctaaacccttcccatccacgtgtcatcatccggttggtccacgtattttggacaaaatcaggggtaaaaatctgcattaaatataatgcatttcgaaatttgtgggaaaatgattaataaaataaaataaaatatattttgaaaattattctaactgaaattaaaatttctaactcaaatataattttctatctaagtaaatatctttgaaaataactaatatttaagtgtctagaataaaattaacttaaatatttaatattctatttaattaaatttattatatataagaaacaaataattaaatatcttgaataaaatcaacttatttattaattataatttaatatctaagaaaaatattctaatttaagttgatctaaaattaattaaaatgattaattttcaacttaaatatattttctaattaattaaatattagaaaatataattagttactagaa

SEQ ID NO: 271215 - DNA, 1104 bp, Cannabis indica
cccataaattgaaatgctcaattgctttattttccacgtaaaaagatttgcggaagaagtaatcaaacatcaagaaaagaaattagatccaataaaaagacaataccttggtaactcgaccaaataactttcgaacacgaatcaagaagaaaacgacattatacaaaccaaattctaaagtatacaagaaataatactcaataaacgaaactccagatcccaattataattccaaagattgaaaatcaaagcgagagatgaaaaagaaagtaccaggcagtgaagaacttaatggtctgggccatgacgaaagcaagaaaagcagaaataagagggaaattcgtcaagattgtcgaagaagacacagccgaatttcccaccgccgtaacagaggtcgccgtcatctcatccatcacttcaaaaatctcgtctttcgttctcaattcttcttagaatcgaatcaaaattctggaaaaatgaagaaaacccagctcaaaaaatgtacaatggacagtctctgactgattcaacgaaatttgtagagaaagagagttgctttgatttgtaaaagttttcccgggaaagggatggaaaattatacctatttcaattaatggcttcttctgatttttaactgtctttctttgcctttgctactctttaatgatttttattcattaaaattgattttgtttttagttttaacttttgggattttgaattttagttaattaatttaatttaataaaattgagttatttgtgagagactactccttagatcaaataatgtgatgaaaagggatatgcccaacccatgttctagaatataccttatttgtcattttacaatttggattgaaattgggtttattctattctatttgggcttatttacccaacaaatgaagttaaccaacaaagtggcaaaattccatagtcaataattctatccaaactaaaacaaaaacacactaataatttctttttctttttctttttcatggagtgtggatcgatgcatttatttaaatgttacttaaatttggaaggcttttcttaggtgtcgtttggtaacacttttgttttcttaattttttaatca

SEQ ID NO: 271216 - DNA, 2687 bp, Cannabis indica
gttttctgcaactggttttactgtttttgttcactgttgcattgattaatttcagttgctagttctggtcttaatcatgttctttgcattgtgttgtttgcgaggtgtttgatcatgcattgatcacatcagcaagtatattataataataccatccatggttagagatcaatttggacaaaaattattaattataatttggatttttgggttgaaattttgacatgtaaccgcttcttgaattttgcaaattgttaaaaaaaattaaaaattaaactattaaaattattggattcaaaaattttgtcaaattttactagctaaataaaaatttaaataaatactaaatattaaaatttaggtgcataattttcaaaatttaaatataaaaattcgaaactttagtacacgaaaattacgtgttattaaacttataaaattagatagaaatgagattttgaaaggagaaacaaattgtgaagcatgatgtaaaattaattaattaggttgtaaacagaattttcaatcataactagaaaaatttctaaagacattacgtctccctgggggcgatcgatcttaacccaattttgcttagccgcagaagggacacacttttctgtttaacttttcttctcatccaaacaacccaattttccactttcatattcgaattattgtttaatatatttgagtggacggtgacagaagaagagacaaagagacagcctagtccaaactccacgctccagttgatccgatggggccaaatgcctggacgatccaacgcggttcaacgatctgactcttactcgggccccaccgacggcgccattattcataggagaacaaaacacaaacacaagagaagcttcttccctctctgctctgcttttgccggttaagatggatgaggtcatcacggctgccgatgccaccacaacggcttcgcccaataaccttctcccttacaatcttcctctattctccgctttgctcgcctgtgctctcgctcagttcctaaagctattcactacctggtctgtgcaaattacacatccccttttgactcaatcttcatattatcaaatttgaaatgcattattataattgttattatgaaaagatcagttggaatttgtgaaaaatttgtatagattatggttaggtataaggaaaagagatgggattccaagcgaatgcttgattcaggtggaatgccctcgtcgcattcggctactgtgacggctcttgcagttgccatagctctgcaaaaaggaactggagcaccggaattcgctctcgctgtggtcttggcttgcgttgtatgtgaaaccaaacctttcttttttttttttcgtttaatgtttataatttgaggctttttgggttacccttttctgttttgttgtttttaaatgaactagttgggttgggggttaaagatctttaaatgagtacctgcacctgcagttgattaacaaggaaatggtgaaaaggtctcatcattttctttaaattagtcattattttcattaaatctgttgagtttggctccaaaatttgtctggaatcaccaacttgtaaatttgatttgtactgggaaaattgccgagtgaatttttgagaaggcgtttacaatgtttgagctcttgcaggtgatgtatgatgccactggcgtaagacttcatgcgggtcgccaagctgaagtaagctctcttgtatctacttttttcaccctagacgaagcttgttttcagatgatttgttggtatacttctttaacttgttgtgcgtaagatgaccacattgattttcctatgcagttgttgaaccaaattgtctgtgagcttcctcccgagcatcctttatccagttgcagaccccttcgtgattcccttgggcatacaccaattcaggtcctttgcattcttgcttacttgttttttctttgatagatttaatcacatcaaacacaacatttacttagttactgttagagtaagttggttaggagtcagttagttgtccccttggttcttgttttctgttaagctttagttagttagttgctaattgtatttagctagcctaagctacactgtatataatcacagcttgaattctatgttttcaattaatgagaattacttctttctttcacaaattctcaaacttaacatggtattaaaacttcttcgtctacagtaatggagaaccctttgtttcccagcaatggaggtttgtcttaccctccaaacaattctcaaacaacttatttgtctcagcctatcaatccaaacactacttcccctgctttaccaaaatcatctccaatttcctttactcactctctttcagttcatcttgatgaacacaactacttaccatggaaacactaagtctttgcttccattcaaggaagcaggttgcagaagtaccttgatcctcatcgagctccactgcagtatctcacaaatgcagatcgagctgcaaatcgcgtcaatccaaaatttgaagactggatcagcaagatagcattctggtttcttggctcctctccttgatgtctgagaagacactcacttggatggccggatacaacacctaaactcagatttggaatgctcttcaagagtattacacagcctttatttcattcctcgatgggggttcttttcaccctt

SEQ ID NO: 271217 - DNA, 894 bp, Cannabis indica
ttaccttaacaggcaagaaatgtgctgactttgtaaagtaatccactacgacccaaagtgagtcgtacattcccgtggttctgggcaaaccaaccacaaaatccatcgcaatgtcctcccacttccattctggaagtgataatggctgaagtaatcctgcaggtcactgatgttctgctttaatttgctggcaggctaagcacttagtaacataatctaccacatccgtcttcatcccataccaccaaaaatatggcttcagatcttgatacatcttggtggttcctggatgcaatgagtaaggggtagtatgagcttcatccaaaatctctttcttaagttcagtgttatcagggacacacactcgtgctttaaacagtagcattccactgtcagatatcaaaaagtccttagctttacctgctaagacatcatctcgagtcttaagcagttcaggatcttctagttgtaccactttaattctttccaacaagttcgactgaagtgttagattatgcaatctctcaatcacaaattcagtgcttgccctagacatctctgaggctaactaaggagaaatcattactgtattaaaaatctgatcaggtcctttccgactcaaggcatctgccacaacatttgcctttccaggatgatacaggatttcacagtcatagtccttcactagctctaaccacctcctttgtctcatattcagatccttctgagtgaaaaagtatttgagacttttgtggtcagtatagatctcacaccgctcaccatataagtagtgtcgccaaatttttaaggcaaacaccactgccgtaagctccaaatcatgagttggatagcattgcttataatctttcaattgtcgtgaagcataagctatga

SEQ ID NO: 271218 - DNA, 1014 bp, Cannabis indica
tcaaatgttccacttccaccgacctcttttcgcgatgatccaccaaactccctccatcaaatttcaccatcattaacttattactatcattattatcctcaactgataataattccggatcgaacgtagtagaagtataaaaagaagaagtagttacttgatttttactttgtaagtttaattcgtcgtcgttttggacctctcgatcgtcgttggtggagtctcgataagtggcttcaagttgtttaagtttgttacacatgtggatcaagtggtctggctcgtctgtgggttcgtgatgatacgtcatttcggcttgtaagagggttttaaagaaagtcaatctctgttcgaaattgacaacgtcgacggagcgattacgatgatgaagatcgtgatgttgtgatgaaacatcaagtagttggctgagttgggattctaattctcgaaaaatcttctgcaaaagtttataatcatggtgtgtcattttttttattttgtttggttgaagagatggtttggaaagttggaaaggaaaatgtgtagagcgaggcggttaatgttatatagtaatggggtgtacgtaacagttgcagctcttcccagtttcccagtttcttttgacggttttggggagatatcaccctttatataagagttcttttaggattaattacaccaaaataagttaattgcattttattgcaatttataataataataaaaaagttaattgcattttatttatggttatatgatgacttaattaatttaggtatatacctaatattattttcttttttaggtctttttcattttacacctcaaaactagttttttgttttttttttgtttttttgttttggttttttttttttttttttgtcatttttacgaaattaaactcctattgcaactagcactgcaacctaaattgcaacaaaaaattgtataaaaatccctattgcaactagtgctccaatcactttagaaatctgaaccataaatttaaaa

SEQ ID NO: 271219 - DNA, 1236 bp, Cannabis indica
tttttttttttttcttttaattgtttcaattaagatgggctttagctctaattagtccaagcctaacaaataagggacggacccaatatgaaatttattgaaagtaattataattttatttaatataggcataaataatattataacaattaagtccctacaaaataaaaattttgagtctatcattattggtgaagcaacacaactgtgtttacatagagtaataattcatccaattaatatgcaaacttaatttttatataataaatgaaatctcaaattttgtaataaaattaacagataataatatataaacactaactttttcccccaattattctaagtaaagattttaaggagaagtatatatatattttataattctttaataactaataagataattcaatctttattcaaaaaaaaaaaaatcaatctatttaaataaaataaattactatattctataaaaaataaaaataatttgcggcgtaaatatttaaatttaactcttagttgcaaataaatacttaagtttaatttttgacaacaataatacctaaattatatttctgaaatatctgtaggtaccttactactgtgaagtattcagtcattatacatgtgttattttttattagtatattttaattaattgttaaataagaaataaaaatttaataacttggccaaatcaatcaggaactaccacatgaccattaacttgatacgtaatggtttggtacttatataagttttaaaaatataatttagatatatttatcgtaaaaaaattaaactttattatttatctacaactaaaagttaaatttaaatatttataccacaaaaaataataataattgttataacattaccaaaatatagatatatttcgtaagatgttgccaacgttgcacatgcatatttagtttctatgtttttggtagtattaagatatatatacatatcacttttaagttaaactaagccttatttgattttcaattgttcaatcagaaatagaaggcatgtatagtacgtagtatagtaccacatttttttgttttcactttaaaggcaccaccataaaataactcagatctaattcttatttcactctccaatgacaatataatttgcaaataagtaacttctatttttggtgatgtctcaaacacgtttcatacaccaagtctttaacttttttccctaaaaaagaagaaaaaaaaaaaa

SEQ ID NO: 271220 - DNA, 824 bp, Cannabis indica
taataccatgccgcggcccgtgtactcctctggtccaaattctacatgtttttatcctttttccgaatctgattctgatattttccactgggatatttttatgcgatattttatcttttttctattgatattttccaactcttcatctattttaaatctgcaaaattaaaagataaaagcgtaaaaatgctccaaacatgatttaaactaaatagaaaaatgtgctaaaattaacttaaaattaatactaaaaataacctaataaattcccccaaactaagcttttactcgtcctcgagtaaagtattaactaaacattaaataagtcaatctccaaaacatgagtaattttcaagtagcttcaataacatgatgatgaaaagtttcacttgtgcatataatccagaatttcagttcagtcacacccctgacagatttcaatttattttcagttagctcatgaaaccatagaatgcaattaactaacaattaaaccactttatgcatgccaattacaatcatcaatccactaacccaaaatcccatatgctcacaatactaactattcttcaataatataaattaatgcacaaccaagaatcagaaagtctttccaggcttgtattgttaggcttaggtaagggtaaatgaaatggtcatctcggcttgtctataccataagcttctccattcttgtcacccaacatatttttcacacaaaatttcaatacccctttttttaattacttgagagatatttaatttcttcaacaagctggttgcaacaactttatatttatctcttttttttttctagatttgac

SEQ ID NO: 271221 - DNA, 1214 bp, Cannabis indica
ttcagtgattatattagctcactaaaacatcatttataggaacctaagtgttttaaggataaaatacactgaggggtgaaacggtaaatttatccctactcggtgtaaatcatctatagaggatctttaatcattgagattagaacgatggttaaatgtttatagcgtatctatatcgtggaacatatagagcgtctatatgactgagagtgcaattccaagttctatgatggatgcaataaggaattaataagtcagggaatttacttggtaaattctagttctgcttattggaagctcggttgtataggtcaatggtccctatgctagttgagaccatactgcttgtaagactcagttaattgattttaattaatcaattataattctaaaattagactatgtataatttatgaattttcactaagcaagggcttaaatgtgaagaaaagaggttctaggaattatttattaattaagagactttattaagtctaattaataaatattttaaacggtaactttatttggtaattaattttaattattaaataaatagttttgggatttaagtggttagaattggaaaaatggcatttttaagaaaatagggaaagattgttgtaaaatggcaaaaattccaaagtgggggcccacaacctattgccgaccactagggaaggattttccatttaatttcttcaatatattttaatgcctaaataattctaacctaaacttaagtggttgcctataaatagatagtgatggctcacactaaaaagatgatgaaaattcaccttcagtcaaaattttcccgagccttctcttctattattttcgaaccaaaccttttcttcctctcttcatttttttcataccttgagtgatagagtaagtgcccacacacatcaaggggtaactcaatcatagtgtgtaaggctgtgaagaatccagattcaagagaaggacattcgtgctcagatcttggtgatactctgctacagacaggatacaagggttagagatctgagtggaaggagccattaatattccgctgcacccactgtaaggtttctgaaactttatatgtgtttatttacattgtttaagaaattcatatttaggatgttaaataacatacgtggtagtaaatctagatcctggtaaaatatattccaacaatcaatttattctagcgacgaagcttgcat

SEQ ID NO: 271222 - DNA, 544 bp, Cannabis indica
gaatgaaaatatctctttccaatgtattttttgttagttttttacccgaacaaaaatacccaaaatttaagaataaattaatagttaaaaaatttcaaagaaaaggtcaacaaagacctactggaatgtatttgaatttttgcctaggaggcttgtccggtgccgcctttgtctcttctttataaaaaacctgcaagtgtttcacggggatgataaaatataattattctttatccttgcgatgttccaaaatttaattaaaaagtgtaatcattatcatgggttgatcaaatgctttcaatctttatggtctgattgtcttactcaaccatatttaaaatcgatatttaattccaaattcaaatgtaaaattaaattctattattcaagcatcatgaagattctagattcaaacacataataacattgttctaattagataaaactaaagaaatagaaaataaaaattatatcgcatgtaaattagatatgagcagtaggtaacctaccttgaacttttccgccgcctagacgtgttctcttc

SEQ ID NO: 271223 - DNA, 1191 bp, Cannabis indica
ttacttggcttgggctaagaaaattttgtgctttgtttggtaagtttcaacatttattcttaattgatttattttgatatgtttccttttcaagtttgatatcatattcattgtattttgtctttgatcttaaaggattttcataaattggctatttttggaaagtatcttggttattctagttttcttttatttttttaaaaaaaataattttggaaaaagagtgggggcagttttctttggtgttcgtgggctagtggttactcaaattttgaaatcgatttcctttttttctccactctcccatgtttatttaaacttattttcacttgtcatttattctcaccacctacccgattcctatttctttgtgttcttgtttctttgcttttcattcttactttcaaaaattcatgacgaagactaagaacctaggacatctaagcaagatggtggaatgcgaacaagccccctcaaatgcttctcctgctgctccaattttgctgcctgttgctgcaactgcatcaaagccaggaaattcatcgcttcctcagcataaatctcagcctgtgaagtccaagttgaaatgaattcccaagcaggttgctaggaaatctgtgcgtccccacaaattttgcacttcatcgtcttctttgtcgaaggggtctccacctcgtcctactgcatcaagtaagggcgttgccgcctcaactccaacatgcccttcctctcgcactcttgcccaacaagcttcactcgagaaggaactttgcactaaacgaagccatgacagacccattcctccttcccagaagctaaagatgaatccccgatcggtttcttcaagttctcaagaagaagaaccaatggaggtgccctctaatgattctgagaccaaatctgagtctatccattctaaaaaacagattccaaaagactttggatctcctcttagagtgaggaaactgaacttgaagccatgccacctttaacaaaatctgctccagcacctcctcgtgcatcttcagcagccaaagcttctactgctgccaaaggcaagcagcctatgcagagttcatctcctggtaatatctctccatctgaagctgtcaattctagattttattaccgtgataatcagcatgattggaatctttatgctaccgaaaatttgaaagtgagaggaattat

SEQ ID NO: 271224 - DNA, 962 bp, Cannabis indica
atatttaatttttttttatataaattataagttagaaaaataatattttatatcattttacttatcagatacttataaatagtattttcaatatttaaataacctagatgtttttgtaaaaatttaaaaaaaaggcttaatttgagatattttgacatataattaggataattattatttgtttattattttattcttaaaataaaataagattagaaaatggattgttagaataaggaactaagaagtaaagccaagagaatggttaaaaccattcacatggagtaaccaaaaagctttctattacaaggacaagaaaggaaattttaaaaataagtctattcaatggacttaacaaaacttcccattcctagtgttaaaggtttgagtttatataaacctgtggcttgtggtatacctggtgatttgcttactctagtgcaagcaacttactttggtaagttgttggagcattttttaatggcaatctatagaagcttttcgacttctagatataggattttatttatctaaggaaaagtttcaactattccagaaagataaagaccaatgaaagaattccttaggatcaacaacgagagatctcaaatatgctttgctatacattagactagacacctgctgttgagtgggagtattgagtaggtatcagattaatctaggaaaagaacattggaagacaatcaagtaaatcataagatcaagaagagaaactatatgttagtcgataagggtggtatttaatactcttagactacaccaaataaagtttctagacttgcgttagtgctagaaagtctatagatgagatggtgattactatgggggtggagtagtgggtttggagaagtgtaaaaactattctgaagtctctacctttatcagtgagactgaatgttaaagttacgggaaagatacttattcagtctgtggaaagttct

SEQ ID NO: 271225 - DNA, 2073 bp, Cannabis indica
gaagttttttgaacgcgcgtgataaactgaaatattaagaactctgtttacgatattgtaaactattcggaagtttttaaaaatttacaaagatgatattttgagtgtgaagttgactaaaaaattataataagagattgtaattaatagttgtctaacaattttaaatggaagaatcaatgagcaaccttttttccttttcctctaataagccatttggatcggatcctatagcttttttggctaagtaaaccaataaatagacatatgttatggtgaaaaaataaagggagataaatccaatagatatcaaccaagtaacaattcaattaactaatattaatcaagtattagaaatcataaataaaaattcagaacaagtttgaaaatttatcttttttaaaatataatctcttttgttgttgtagatatcgagtgtcaaaaataaagttcaaaatattttattgcatgcagattgttttgaatttgattaatcaaaaataaataaatttattggatatcaaccgtaattgaaaattaattatacatgatctatagtaactttttaaagtagtccaaaatattgctattaatatatagtataactaataaatcattatgaaaataaaaataaataatgaaaagaatcccaaaaaatatcttattgtatagaaaaataacaaagtgccaatatttatgcatgagtttattttgctcaagactctattgacaacttatgatatatttttagacatacaataacaagtgtaccacatcttataaagatgtttctaacatttttaggtgaaagcataaatagggaaactagtttgagaaactaataacttaatcatccttaaaaatttgaaaagataaagttgaaacaaacctatttttctaagaatctaaataaatagatacttccaatgtcaagggacaaacttgttaccaaggtttttctctctaaaactcattgtcatttgtgtgagtttttctcatcaaagagatataaccatcaaatatgtatagtagctttttatagttatgatacatgagataccaagattaaatttttctagttgagacatgttcattctgcaatagagtgagtgagagaactatattattaaaaaacaaggaattgtaagagtcattcacaactagattattcaaattcgaaacaaggagtacattgacaactaaattcatttccaagtgtaacacaaaagtcttaatcttttcaatctcatttatcataacatgcataggcgaatagagaaaatttgaaaaataatcattaatatatatcaagctagctgattttttgttgttgttgttgttgttttgattcaaaaatatcattttagagaaaatttcaaatcaattagttgcgattcaaaacacacaccaatttttcacttaacaaaaaaaaaatgagctacttcatttctcaaatcattaacaaaaataaataaataaatcagatactctatttctcaaatcattaacaaaaaaatcagctactctatttctcaaatcttaacaaaaaatgttgcaaaagcatagagatgaagaaaagagaatttgtattgattataagaatgaattgttaaaaatcgctcccttgctcacaatgtgttgatcctacaggatttaatcaaagagtatcgtcgaaaacaaatctctcctcgttgtctaatgaaaattgatttgagcaaagtctatgaaacaattgattggaatttttttcgaaagcctatcagttctcgagaatatttatggattggataatggtttgtgttcaaagatattgttatttgctgatgatgaatgggaaggtacaagatcagtttgaaggagcaaaaggcttaggacaaggggatcttatgtccccccttctttttgtgttagtcatggaatatctaactcgaactcttaaatggaaagctagagacaaagcattttcttatcacccaatgtgcaaaatcctgaaactcttcagtctttgttttgtcgatgacctaatcatgttttgcaaaggaaatagggactcgataacatgtatattggagg

SEQ ID NO: 271226 - DNA, 1009 bp, Cannabis indica
taaggccttagaagtggttcatctcggttatgagtaccgagtccaacctgattatgccttgagcgcataatccctaaatctcatttcaattaacatggcatggcatttatacacatatatcactagggtaataaccctaggctattagaccgttcctattagggtaataaccctaatcccggttactaaacattcatgcatatcattctcaacataagcgccactgcgcatactctacgtgctaatcactgtcttacctgttgtcccgcaatagtagagattccgaatccccgggtgctcctgaccaggtgccggtaatcctagtcacaatactgggatttacacaaatagggttaatccctaaattcacttccacaaaatataaaattggcatccaaatcacagataatcacatagagctcgaaaagagctttccaacggtataaagaacgtcccaaacggagtcccgagtcaaaagttatggcaaaaacaaaaacttaaaaaaattaacaatctgccattatcatggtcgcgaccatggtcgcgaccactgggtttaaaaaaccagaaaacccagttttcagcttcgaaaatatgccaaacttacccccaattcaacccaaacatgcataaatctcaaaatcatgaaatagagctgctagcatatctcagaggatcaaaaacacatatctcatgcatcaaatccaaaaattcagattacataaatgactcaaaaatcatgctcaactcatcaaaatctcaagttcaagaacatgaactcaacccaacacaaacctaataaaaatccagcagcataacaccattttaacatgaaaatccaacctagaaattccatacaatctctgcccaagctcaacaacaaagcatataacaaatagaagctcaatttccacaagattaacatcaattcactcatcatgcaacaagaacattcaaaactcaaagaacatgctttttaccctaagaatttcagcatttaatttcaaat

SEQ ID NO: 271227 - DNA, 841 bp, Cannabis indica
ccccttctactatgatataccgttccttctcataattcgaacttcatttcagttatctgggagttccccggagttgaggtaggttgctgcttgcgtcatccagtttggggatgtgtcaatcattttgatttcttccatgccattgatgctaggctcttcaaggaactggatagggagcaagtttgccttgtcacttacattgctgcttgccaattgttaggctatttttagcctgtattttggatcaactttatgtttgcttttcgttgttttaggacggaattatgcttgttttctatgtttttaggttcctcggagtaatggaggcctcgggatgcaaaagtgcaataaaaggcaagcgaagccaagaaaaacgccattttttcagtttgacgcatttctggccgcggctatagagtccagacaaagtgcaccatcgtcgatgctccattcgtcgcggcgagatacaccctcgccgcggccatatggtccactacacagagtggtttttagaggtttatctggccgcggcgatgaacaatgtggccgcggcgagatcccgtacggccaggggtaaaatcatcccaggaaccctaaaaattagttataaatagaaaactgcgattggaaatcaggggaagcgatttggagacctaaaacactgtagaaagtggcaggaagagcagaggaagtcaaagtgaagatccagagtcattccaccaacagtttctttctctattcctttttaatttatgctgaatattgttataggaatggtcatggatttaattatgaactaaatttcccatttagggaggatgatgattgttgtttaatgttt

SEQ ID NO: 271228 - DNA, 532 bp, Cannabis indica
taattataatatatttaattaataaagatgattaatgaagattattacctttgacattgatgatttgtgacgttttttcaactcagacttgatcaaattcagtcccctattaatcgccatcttctcaagctatgatatgtatatatataaatttatatatatatatgagtggagaaacttatttaattactcttatggcttttagtacttaattataatacgtatctattaaattattatatgtggatggatcaaaagatgaaaatgaatgaatatgtacgtactttgtgtctttatatactcaaatcataataatcctaattctaatataattataataataataatataaatatatttacttagtcaaatgaaattatataacactaaggaacaaatcatcttaattatttgaaaaaaaaaatatagatatatattatataattatttaacttatatataataatctaaatttttagtcacgtggtgtaatttaaatatttggggatctataatcatctttgaggtaacc

SEQ ID NO: 271229 - DNA, 576 bp, Cannabis indica
atttcttaaagaagaaggagcattatgctcatggaaaattcgatctgacaaaaaacaagaccccctagcaacacaatgggcagccctattagcagaacgattaacaaacttaacttggacattatttaaagtagataaaattgaacgacagtcttccaccaacaaaccaaactgagatggcatatgagtagtactagttattgcttggataacaactagagcgtcagactcaacaaccactttctcccaaggtttacccttgatccaactcaacgcttccttaataccaattacttcagcaatttcagggagaacacaacccagacggttccctgaaacagcttcaataagtgtaccattgctatcccgcgccacccaaccatagccaaatttttgatgtgcttcaaagatggctccatcgacattcaccttaacagtatcatgatctggtttagcccacagattacttctagttacatcacccgtagcaaagtaagcatggggcgattcaaagttagcaatcttccaatttgcaaggactgttcttgccgacttcactacatccaaagctgaacg

SEQ ID NO: 271230 - DNA, 561 bp, Cannabis indica
aaaactttattctagatgatgatgatataataaaaatatataaaaaacaagcatgcgccctaaattaaggggagtggtattatgttatattagaaaattctgaaataataatatagacaaactcgatcacttttgaacatctagaaatacatttttctagagctcacaaaaacaaatccactatactactactatagtcctctcatctaaaattaaaaagaaatccatatatatcactagtctcatgttcattagtcctattattggattttctttctaacaaaaaataaggaaaaaaaaattagaggccaaattttaataaaaaaaaaaataaaaaaatatgtcacaaaaaaaatatttttactttttaaacttttttatatacaaatatatattttcagtgaaaaacaataaattattttatagtttatttatatttgtattatagttgtcatagattatttttctagctgttttatattttatttacagttaattaatagttgtcgtgagattgatttttaattgttttttagttgttttacaactttttgttaagta

SEQ ID NO: 271231 - DNA, 1504 bp, Cannabis indica
tgttgggattttattccctaaaataaaactaattttattgtaatcttatttactttcaataaatatcagaaattacatctagaccttgtcataggctttgttcacatgttttatacatgattatagatttaatatataagcttttttaaatcttgaacatatagttgttcacaattacagtgatgtcatcacagtggagagtaattgtgattatatgctttaaattatttagtcccacaatttatgagtgtactggatttatactaacgtgataatcagcgataaaatttgcttaaactaagtttagtggaatttattttccaagacattagtaaagtaaactaggattgaatatatcggctatacatcgaactggactgatattgacagtggaaaagatattataaaattactattatatcttttctaagtcaatatcacttagttcatcatagagtatttgatctcaatcctaagatggttaagctctagtttgaatgtattacacaagttctttgacttgttcgttaccagcttaccatagaaccaactcaatatttatatcttgggaacccagtagtccaattgagtgggagtgttgattatcgatatgaacatttatagcttctatgtttattaaaagtgaaataatagttccttagagcttggcttaacgcaataaatggagcactcattttgataattatattagtttccaaaaataccattgacaagtagcttagtgtaaggataaaatacattgaagggtaaaacagtaattttgtctttattcatgtaaactatctatagatgataaattattcttgtgattgaaataatggataaattcatagtgtatctatacattgtgtataaagtgttctatgtaattaggagtgtgattctaaatctatagtggaggcaggaagaatttctaagttggaaatttactcggtaaattttaagatctgcttattaggagcttggttacataggcccatggtccccacattgttatagatatatcatcttgtggactcaactaattggtttatcaagtcaaattagaattcaaaaaataaactacatcttatttgagaattttcaccaatttttggaagaaaaaataaataggagtttatctattaattagtactctttgtgagtctaattaataaatatatttaaattgtattttatttaataattatttataattatgaaaataaaattagtatttaaataattagataagataagtgctaaaattagaaaagacactttagtttcattcgttgaaataaagtgtcaaaaatctaactctaaagcccatgaggaatttggccctagagttagactccaaccctagtctttattttaagcccatctcatctacatctaaccctaagtgaatacctatgtaaagaaagtgaagagaagagaaaattaacctaagtttcataatgtcaggtaactttttctcttctcttctttcttctatttc

SEQ ID NO: 271232 - DNA, 594 bp, Cannabis indica
attcagtaaaggtaacaacagtcctaacaacacccaacagttggtaaagtctctacccatatagatgtccgcacatggatttggggggcaaatattatcccaaattttatcctcatgatgtggcatgcttatgtggatagaatcagtgccacgtggcagtataggtcaccaaaaggaaggccaagttagcacctaagcaaacgaagaccccaacactcaaacggggatcaagtgacaggtcggccagcctagggacggcaccatggctagccagcctggccaccacaagggcctgggcagccaaggaatgcattgcaggccttgatggaccctcccacacgtggacaacagggatgggctgcaaattgggccctaaaagcccaacataatggctaaataatatctagaaccaagggcactttggtcttttgtaaatatctaacaaactatacgaatgttaagggtttgaattgtaaacctatggttttaggcctcctatataaaggccttaacctctagccaaaaatctaagttgcctctaagctagaaacatgcttctaaactctaagtgtttgataaactctctctctctct

SEQ ID NO: 271233 - DNA, 979 bp, Cannabis indica
ttctaaatcctcgaagaaaggagagaaacgtctggccaccctggaggaagttatgaagggtctagtggccaaggaagggtaaaagtcccgtgctaacgagtgggaagcggctgtgcttcactctaccctgacctgccctcaccagctggaacacatcatggtggtggcaggtatcaagcctccgacctccgggacataccaccggccgccgcgggatgcggagatgcccaaccataactatgggggcttcggagcctggagtcagacgcacttaatggccggggccatgcttccccttcaagattactttatgaatttccttgtatttgtcggccttgcgccataccaactcattcctcaagcctacaacctgctttcaggcttatttattttttactctgcccggagctggggctctcccagtctgcagagattctatatttttacgaactcgtttccattcctaaaaagggagataagtttagggacgatttttacggtctctgggcccatcctttgaatgagggtccggtcccttttaactatcaaaagcatgtgaaggaatatcgtcaccgcttcttcttctcctttgggttccaggctgtggagcatccggagcttctcacggagtgggttaggatccctccttatgcgcggactgaacctactaagcttttcctccaacgggctaagactttcgccacatatgacaagaaggccctcgatgtcggggagttggtcacgacagagcactgtcggaaggccaagctgatccaggggcaccagtcggtggacgactccaacctttctaaattcttctgtccaaatgtgagggttccggccgcagagaaggtactccgggatgatatcatcgccacggcagaagataagtaccagaaatacctcttccgaaaggaacaggagggggcttatgataaggcccaagtggccgccgaaaggcccctttgtattgggagcc

SEQ ID NO: 271234 - DNA, 956 bp, Cannabis indica
aagtatatgtattaaaccataaacatgtaacatacctgtaatcatacttcacttctaaattgataactaaccagattgtaatgagttttatttagggcataaaacccaacactttcaccatttggggaattgacctgatcggacaattacccaagggcaaaattggagtgcagtatgaagtggttgcggttgattactataccaagtggatggaagccgagccactggcaaccattacatccaaaaaagttcaagactttgttgtaaagaacacaatctaccggttcggatttccgtacaaaatagtttcggataatggcaaacagtttgacagtcaatccttcactgatttttgtgcaaatcattgtatcatcaaaagtttctctgcagtggcacatccccaagcaaatggtaaagttgaagcagtcaacaagacattgaaggatatactaaagaaaagagttaaggatgctaaaggaaactggccggaggaacttcctgaagttctatggtcgtactgaacaactgagaaaacgacaactgaacagactccatttgccatggcatagggatatgaagcaatgatacccgtagaacttgagccaccatcccatagaagattgacgtagagccaagaagcaaattacgtactcgctgaatcacttgatgaaatcgaagagaagcaaaccacatcaaacttaaagctgacggcccatcagcaaaaagtagctcggtatttcaataaacaagtgagggctcaaaaattctttctgggagatatggtcctaagaagagtatttctaaacaccaaagacagtacgacaggtgtgctcggacctaactgggaagggccatatcaagtggtcgaagttcttgaatcaggagcatacaaatcgggtaagtatgatgaaaaaatacaaatcgttttggtaccaaggtattggaatggagaacat

SEQ ID NO: 271235 - DNA, 1957 bp, Cannabis indica
gccccaaactggaaccgaacaaaccaatcgcatagtatccaaatcaggagctcaaggtcgcacaataacatgttttctatcaaattgaacaaccccagctttgagaatcatatctctagtaacagtgtccttaaatttaacaattgtaaaaccaaagttcattctcataatatgctcaataccaaaattttcccaaatacgtttgacaataccctcaaaaacaacaaaaggagaattttctctcgaaaccatacaaacaattgcttatttctgaaattcagattcaagtttagataaatcaagtttaataatgggcaaaccttccttaacctcgaatgtcgtgtaatgaagctgattaccctcgttattggcttgaggctttaattgagaccataaggcctgcaattgggcatgcaaactggtggtcggaatcgccatagacgccgcctattgagaactctgcccaggtccagaggtacaaaccgaaactggaaaaataaaatctcaatcatcctcatcaacaccaaaatcttcatcccgtcaattagagcttttttagtttgaatggagctctagagaatcaatatgttctggtctaaaaacctcttcagttgcacgtatcgaagatggcttctgagactcaatcgacttcagagatggttttttcttcttcgccatcaagaagaaacagtcacaactaaggaacctattgaatactttgctcaatttatgtgtattaactatggaacctattgaatacacataaattgagactatattaataaataataaatttgttagcctatattacatattgccaatgcatactatcatatcttttctatacaattcttaagttgccacacctatccaccaataacacgcaaaagatgtaaaaacctcttctctatttaacatctcaagatttgtcggataagtctattaatcacccaaattatcaaatcatcatccttgtcatttgataatttaacatagatgcaaatatcttaaattctttggttttatcaagtcattgttcttgtactcgatgtttctcccatgccagtgtctcccatgccagtgatgcgccatgttaaatagtaaacacgtttctcatacataagaaccagttaatgattcacttccaccagtttattattaatattatttggtgatccaatttttctcctaaccacagcaaatgataatagtgtaactgggcaagtcttccaaaaacatagataggaatatgaatcattgtttgtagtgattttttaaactagaagatattaatggaattagaatcatagaaatcccagccgagaaaccagccatccaagtgtagaatgcataacaaatgaaaagcttcttctatttgaaatcatttcaagaaacataactgaaacaaagattataataaccataaatacccaaatcctcagtttccactggcagtccaaggtttattagcatatacatatatactaccacttacaagtgtccatatgtttgtttgatctgttcagattctgttcagcagttcatcaaccttcatagcccatttatctaactagtgctggaggaaggataatcaggctgcttctctggcatggcattttgaaatgctggcagtagactgtatgcctcattcagccgggacaaaatagggtattggctctgctcaagtatttaaatcagaaaacttgttagtagatcagatggagagcttttagtagtctccagtattattggattattttatttttttaatctttattcctatcattatttttacaataggtttctagcccgacaaagtaaaagaaaagaatcccggaaattataacaaataataatttgatagtataaataaatgaaaaagaaagagtaaaatgtaataaagaaaaagaagttataagaagaaaaaaagaaagttagttgatggcattatgaaact

SEQ ID NO: 271236 - DNA, 889 bp, Cannabis indica
ccaaccaacgcctctgtctcatattcaaatcttttcgagtaaagaaatatttgagatttttatggtcggtataaatttcacatttttctccgtaaagataatgccgccaaattttcaaagcaaacactaccgcggccaattctaggtcatgagtccaatatcgctgctcataatcttttaactgacgggaggcataagcgacaacccaattagcttgcatcaacacgcatcccaaaccctgtctggatgcatcacaataaaccacgaacctttctttgttggaaggcaaggctaacactggagttgtaatcaacctctgcttcagctcttgaaaaatagcttcacacttgtctgaccatataaaacgatgaatctttttagtaagctcggttaaaggtgttgagattttttaaaacctttctacaaaccgacgataataaccggctagacccaagaagcttctgacttctgtcactgttttcggtcttggccaatccctgacggattctatctttcccgcatccaccttgatcccatctttgctaacaatttgccctaaaaaggacacctgagataaccaaaattcacatttctcaaatttggcataaagcttgtgttcccgaagtcattgcagaacaacgtggagatgtaactcatgctcttcttgtgatcgagaatacacaaggatgtcgtcgataaacacaataacacatatatcgaggaaatccatgaataccaaattcatcatgtctatgaaagctgcgggagcattggttagtcccaacgacataaccaggaattcataatgtccatacttagtacggaaagccgtctttggaatgtcctcctgtcggattctcaactgatgatagcccgatcggagatcaat

SEQ ID NO: 271237 - DNA, 629 bp, Cannabis indica
aaactttgccaatgccctggagagaacataacacttatccaaggtgtaagcatacctatcactgattatcatgctaatctaaatccagtgaactgacaaatcagggaattaaatttttgaacatataatcatgattatattccactgtgttgacaacactataatcatgaacaaatacatatcttctgaacctaatagaatttatacattaaatgtaatcataaaataaatcatgtgaaccatgcaacataaaatgatttctgatctttattaactagtaaatctgattatattgaaatgggttttatttagggcacaaaacccaacatccctcttgcactaacataaaacaaaaatgaatttcaaataatctcaataccttgatatccaaataaagtttagtatgtactattctcttcgtaataggatctgacaaattgtattcaatacaacctttcctccacaattacatttccttaatcacaaaatccttgatattgtgaaattcctctctatatgtttactcctctagggatactagattctttactttttggcaactacttttgcgttagtcagaaagtaacactagtagttaataaatgttggaacaatgccaaaaatgtata

SEQ ID NO: 271238 - DNA, 964 bp, Cannabis indica
gagttttatttagggcacaaaagccaacagaatgtacaagaatcaatgatgattctaaaaagtttgttccaggactggtgatctagaaagtctacattaatggagtctccaacgaaaaaggttttagtgcaggaattattttgatctctcttcaaggacaccaactttagagtgctctctgttttgagtttttagcttccaacaatgaagcagagcacgaagcgctgatttcaagtttacacctatccaaagaagttggagccaaaaacatcgagctgtacgatgactctgagctagttgtgaatcaaatatcgatagagtatcaaacaaaaggaaagagaatggatgcttacgtatcttgggcccatgaactattatagaattttaaaagatatactatcaaacaagtccctaaggaccaaaatggtcttgaagacatgttggctgagttaacaatagaccctaaaatagaggatcactgagttgttttcattgctcgattacttacaccaagtatctagtcactgggggtaaatgctatgacaactctgcctcttggataggccttatcaacaaattctgaagttttggagaactactaaaggacaaagttgtagcatgaaaaatccagtatcagtgtccccaatatgtaactatatatgacaagttgtacaaaagagggttgtctataccatacttaaagtgcatagccaggactaaaattagtgcagtgatctacgagattcccgaaggcttttgtagagaccaactttcaggctgagtttgtttaaaaagattatcggccaaggatatttttgggctataatgaaaaaggattacatcaactacgttcaaaaatgcgagcagtatcaacgttatgccaaggtcccaagggctctgctaactgaaataaccctcatgaaaagtccatggcctttttatagtttggggaatcggcatagta

SEQ ID NO: 271239 - DNA, 1780 bp, Cannabis indica
tttttttttaaaaaaataaaatgttattttaaatttcagtacgaattttagttagcccaccctcacactatatcttgggtccgccatatggctgggaacatgattaacaattatagaatcctgactttcctaacagaacgaatgctagttccctttaagtgttaattcttgaactagaatgttgtgcacaaatttagatgagatctaaattatacttctacaagttaattgatggaatggtaaaacggtaatttgactaaaactaattatgaactaatgctaatcactggaattaattatatcaatggacactacagttaaaatcatgactaaatataattctataattattaagagttcaaattctatatttacagtggagtaatcatggaattaataaacaagtattatttggttgatgaaactcaataaataatttaatttattagagcttaaaatcataggttcatagcccctgaatcgctgctgccttaaaatattaagatgtataaagatgttcagaaaaatctactttgaattggtaaaataataattatttaaataggaaaaagacaaatattattaaaacaaaatttgttaggataaaagtcaaaattttaaagtttttgagataatcttttaataagaacaattttatacacttattagaggtatattttaaacttgctactttattatttggatttaatatacacatttagagatttatgaaaatatggtacaataatgattagatgatatgaaaccgtaatttaattaattagtaccataaaatcaacagacatacatactgctcgtatattttgatttaataaataatataatgactatccacaacacaccacatgggtaagatgttgagcactttatacctaatagcagtgctcctattatatttatacggagtggtggcggtggacctcttaattggggtggagaagtgtagcattattggtggtggagcccgtccaaaacagtcgacctcacgcaccaaaagtgtggcataattcatcggctgaagtcattcgtgaaagctgggttgcacaggacccatgtttttgggacaaatctctttcttatttcttttaatttaaattacgctatttggtaataatacgaaacttgctaataaaagtcaccagaattcattgaaaattttgtcatttaatcaaataaacaaaagctgtgatattcactgatttcgttctccaaacgagagaacaactgtcatttgatgtgtcaaccgatctgtatgcctaacatatcgcttcctcacttttaattaccactttgccgtcaacaacaacaaaataatttacatatatagcccattaccaaataaaatgaccatcgtctctcatctttcaaaaaaaattacaatttacgtcagttccatatgtaatagattcaattaaaaatacttaaattatttaaaaattgtattagcataagcgcaatttacgtcggttccatgtgtatattcgattataaatacttgaataatttgaaaattttaattagcataagatttctcaaatttttttatgaaaaataatttaacaatgagtttttggcagctaaaatttctcaactagtagcaaatttaaagtatcattaagttaaatgtcatcatagattgcttatacgtataatatttttgtatatgtgatatatttatattggtacactgaatattataatttaaaaattattttcaaaatttattttaaaattaaataaaaatttaaaataaaaaatt

SEQ ID NO: 271240 - DNA, 1529 bp, Cannabis indica
tttatttttaatttaaaaaataaaaataaatttataaatttttttatatagacaaaaaataatataaatattaaatagtataaaaaattcattttttttttattttgaaatgacaatatttccttatataatactataattttcaaagttcattttattataatctcgtccttataatataatgtgataatatatactaatgaggaacatacctctttatggatttccagtcgttatatgaaaaaggatgaagatgtctgaaaaagacagcggaacccactccggcaacactcaccaagttagagttacaactattttgattgtttttgctattttcaataaaaagattgtaactttcgtttgggcttcgaccagagaaaaaacagcaaggaagaagctggtcttgggcatggagccaatcaatcgcatccatctgctgctctattggcaccttcaattatcaaacaacattcactccaaatatcagctaaaatgtctgatctctattctctccaaataaataaatgccaattctcacttttctattttcccttaattttcataaaaaaaaaaacaccaaaatcccatgcccacattataagtccattccaacctgggttttctttcactttttgaatttttactaaggcatgtttgtagaatacgctaaactgatctgaattacattgtcaataatcaaatgcaagataaggcaatcaatcttcacacccttcgatgtcaaccaaccacgtggcgtgattgtattggtctaaaagctccatcttttatagagataagatagaaagaacacttttttttttctttctttttgaaactcggactcactgaaacttaaacccatttctgggtgtatgtacttaattacctgaagacgtataattccagaggagaaaggaggtgggttgtgtttcaagtctgatatggcagaggtgaggttgtccagagccactgaatgagaaggaactggtggaagagtacgtgttccaatggtgccgagagggaaatatgggtttcctttgcaaccattcatggacagtacatataattgatacctctgttatcaatcaatacaaacaatgcatgtcatgcatatgtataagttaaaggtagtacttatgaatgaacatggaaatttctcaagtttgtgtgttgaccaagttgggaaaaaagtgttcttactttatgaggaaaacgaatataattggaaggcctgctagaaatccgtaaggtagatatgccataattggctgattctgagtccatgaaacgaccaagggaatgccttgctgcagccacagaacttgccatagaaaagagagagagagagagagtaaacaaagtcttatgttattacaaagatgtaactatgaaaaaaaatgtgttcttgtttaatatttaagggagagtgagagagttttttgcgtttgagggacgttaactagtcactacgcaagaaaatatatacaagattattatatgccacatcaacacagaatctacctattgtt

SEQ ID NO: 271241 - DNA, 1636 bp, Cannabis indica
ttaagtcctatttttgctattattttatcatgtttttattccatatagttcaatcctaaccctaagtgaattagtataaaaagaaaagaaatgtctcattatccaactaatgcttctaaacatagttttcattctgtcagacaactagtgttttgagacgtcttcttcttcttcttctttttctctctactatttcgaaattcttagtgttcttcaccattaaaatttgagctttagtgattgagtgcatgcccacccacaacaagttagtcctcaatcatagtgtgtaagactgtaaagaattcaaacaactgaaggagtgtcgggctcagatcttgattatacgtactctgcgacaaaaagaatacaagggttagagatctgagcggaatgcgtcatttaatttcggtgcaaccaatgtaaggtttctcataccttttatatgtttaattttcatcgttttagaagttcatgtttaggatgttaaaaacatacttgttagtaaatctaggtcctggtaaaatatattccaacagtcccaatccggatggtttgccctatcgaggttagtaccatattactgggcaatcctgaaatacaaactattacagcttaactggacatgatgcttgggataccaactatcagcaatgtgatctacacaattctagatatagaattgtattgactatccctaaattttactaatgttgtacgctcgggtctaagtacggttggggaccatccacaaaatccaagtttattacctcgggaggcatcatcttcagcttcccgaggggttatgttcttcaagtagtgggtgcgagccacataatctttatcttcctcgtcaacaagaactggaacctgctgctagtctgaatacttcgagactttgaagtctctagtggatttcttgctaccaagaagattgaaggtcttaaagttatcttcgtgtaataagaaattagctgcttgcagcccaaaaggaagaccaagaaattttttttgtctcctttcaatatctggagttgcaataggcctcctcgtaatcgttgtcaatacaacataaacaaaataagtaaaggcctacatttattaaatttaaaactcaaaacaaagtttttgagataaggcaatacttatgtattatgcgaaacacagttgtgttgataggggtgagaccagatgtccaaaagaattcgtcctttaattcatttttattaggcagcctcacaatgatcctttgaccatttgtgtgggtcccaagatagtaaaaaccacatgctcctcacttccttgcgggacatgccttcactgagtaaaagtaaagaattttgagtggggttgtgtactcccacttcaaaatatgatacagacctttaaatttgccaattctgtatgaatttggtaccagttgaaagggagtgatgcctaagtagttgcaaaactccttaagatagtctttaagagggagaactgttccatctcttatgtgctcgaggccctaggcgccaatcctagatggctcgctagtactacaaccttcttctcaaatcacacgttcaggaggaaaacaactgaattctccctggggcaacaaacctaactcgacatccttgcccatacttgatgc

SEQ ID NO: 271242 - DNA, 776 bp, Cannabis indica
gacaacggacctgcatggtctgaaggcccaaccaaaggtacactatggccactcacctaaggcgtgcaggtggggaccctcaaacctgcaactggggaccacgcacctgcaactggggaccacgcacctgcagctcaggaccacacacctgcagctcgggatcactttcccgcaactggggaccacaggcctgcaatcagggatcgcctgacaccaaacaagagtacgaggcgtaaggccaccaccagcatctgcagcctacagcttgaaaccgatgtgttgataccttttgaccattttgtacctctggccactagagcctataagtaacccaatctcagatgtgagggggttggaagtccatgttgtaagtcatatagttaatggaatagagaggagagtattcatcatttcactttcatttttcctctcatctttatcgcaaccctgagtaattttacattttccgaccactcacttggttgacgagttctaaccgtcaataatttttatagttcgagaaacttcgtaattgaaaaaaaattcaaggagacaaaactctacaatagtcatagtcagaggaataaatcctatttattctaaaaagaaaaatattataataattttaacaactaatttaatctccatccttcaaactttactactcttaatattccatcctctctgacctctccatcctttcaactttactttaatattccatcctctttgacctcttcatccaccctactctctcctaggggtgtacatcaaac

SEQ ID NO: 271243 - DNA, 626 bp, Cannabis indica
agacccagatcgaggctagacctggacacaaacccggacacagactcggacccgaactcaaacccacacttagaatcagacccaaatctaggccaacacccgatccaaaactcgaacacagaccaggatcagaaccatggacttagacatagaactgaatccagactaagatcgcaattggaacttgggactcggacccaacctagaccatgacccaggacgtgaacccacacccggagcgtgatctggacctagactaacatccgaacccgaacccaaactcagataagtactcgaactccaacccgaactcaaacccaaactcgaattcagaatcacaaatggaactagaaccgaacaagaactaggacaaggaccaggacctaaacctgaactggaaccgagatcaaaacccaggcagagacctaaacctgaactgagactagtactcgaacccgaacctagaccgtgaccaaaacccacacaataacaaggacctcaacccagaatcaggatagcgacctgggaaacagaactgggcccgggacttagtacccaaccgagacccgaacttgaacctaggacccaactcgtgacgcgacaccagaattggaaccagacttgga

SEQ ID NO: 271244 - DNA, 106 bp, Cannabis indica
attgattaatcaaaaccaatcaaataagtcttacaagtaatattatctcaactcgtgtgggccatgggtatatataatcgagcttccagtaagcagatcaagaatt

SEQ ID NO: 271245 - DNA, 701 bp, Cannabis indica
ttcttcttcctctttccacctctaacttccaattaatgctttcccatttaatgtttccccataatcattacaaatatttaatgcaacttattcattttcaaaaccgagaactccatttattactcttacagaaatcctttggctatcctcttctccctgatcttttcaagcatttaattccagacgccatactcaggtggagacgaatcattgctatgattctgggcagaaggagatctagacatccgatagctaggatggaaatagcatcctctcatcttctactcgctattcactccaggtattctcttccttttttcacctatttaaggttatattgtctgggttttatttactccatccctgctttattccctttgtctcctctgtgttttttttccatatttgctcaccaccatgaataccttgcctgataatcattccatccaactcacggaagaagaagctcttatccatgactttgatcatgtgtccatccatcccgaaccacaagcccactctttcttcttggctgtcaagatactctcccccaaaactatcaaagctgactggatccacaaagccatgaaagatgcctggattgtctgctgccctttctctatatttgagttccactctggtatgttcctggttcgatttggttgtgagggtgactgcagaagggtgatggagggccagcc

SEQ ID NO: 271246 - DNA, 660 bp, Cannabis indica
ttgtaatgggttttatttagggcataaaatcccaacaaactcccgcttgcactaacataaaacaagtagtgcatttcaatcaatcaattgtcttgatatccagatcaagggtagtgtatttgactaaacccaaattactggaactgtaagtatgtgataagctattgctttctttaccattacttcctttgtgttcataaaacattatgcaacatcatttactatatgcattatgttgggattttatgccctaaataaaaccctttacaatctaatctgatttgtcaacaataaaagattagaaatcatttatgcttacatgttgtattcatgtttatggtttaatttatatatatacacaaaatctgttaagtccagaacatatagtcattcgcaattacagtgatgtcaacacagtggaatgtgattgtggttatatgtttcgaaagacaaagtccctgtttcatcagtgcattggatttacactgatgtgataatcagcgatgaagtgtacttacactttgtataagtgttatgttctttccagaacattggcatagtatactagtctcgaatgtatggagtatacattggactggaccgatattgatcttagtaaagatattataatgcttactgttatatctttccaagtcaata

SEQ ID NO: 271247 - DNA, 819 bp, Cannabis indica
ttttttgagattgtgttgccactatgtataattgcatagtggcagttaattacaaagttgacaaaaatatgtttatagctattaaaatcgtgggatttgattacatttcacaaaatgtaaatgtggtgtatgattttgaaaattatatagctgtgattttcccgcttttactgggtcaaaaatatcgtgtattaaacacgtctttatttgttgaatccggagatgtctcgacagaaacttgattgtagtgatcctaatggcgagctggagccattcttctttctgaggtcgacaagatatgtcttacgtcgatcgcgggtatacaaaaatcttctaacttgccagggttatgagcctcgctcctattagttggatgaagctataggaagtctcctcatagggagatggtcatctcgcattcttgttcttcgagtcgatctgactttgacatttagtttgcttattgaaagctaaggtatgtgttacttttctccggtgcctcgctattcacctttagcgacatatggtttctcgttaataaactaagtacaagtttgtacattgattcctcgcctaagaccttacaatcagtgagttacaaatatactctaatacttacgcaattaatgagttattccataaaaatatattgcaccgattcacattccctttattttgatacttgtcctccagtcgaattttgggtataataattaccccgtaaaaagttcattttttaataaaaagaactttttattaattaaaattattagattaggaatatgttagttttaacattttatcttattagacattttt

SEQ ID NO: 271248 - DNA, 502 bp, Cannabis indica
caattgcaaggattggatatcaagtattggggtgagctttctttgttcaagatagtggggcagttgggagaaccactccaagttgatcaagttacaaagagcagggataggcttcaatatcccagagtgttaattcaggtgagtctatctcaagaatttcctaaacagatttcatttattgatgaatttgaccatgagatagtgttggatgttaagtatgagtggattcctttggtttgttataattgctcgggcataggtcatgatacccaatcatgtaggaagaaagagagtaaggaggaaactgtgaaacaagtatggatgcctaaaaaatcgaatggaatgatgcagaaccttgtagatgcagagggctttcaaagggtcacaaagggaaagagagtattagaggagagagtagaaggggatactgtgattaataacaggtttgagtctttggaggaggtaaatggtgtgatagctggggaagagtgtaacataggag

SEQ ID NO: 271249 - DNA, 199 bp, Cannabis indica
tagagaataatgaacttgatgaaaattatgttgctcaagaagtagatgatttaatagttgaacatgtggaggatgaaaatgaagacttggtgaatgatggaaacgatagtgattcgtcggtgtaacttttattttgtaaatgtttgttactaaaactttttacaattaaatgactttttaatttctttcgcattaatat

SEQ ID NO: 271250 - DNA, 795 bp, Cannabis indica
gcctacccctcacatttggacaagctccaacgagcataactatcatggcataattcctaatattggatgttccttcagcctttaacgtaatgctaggccgaccagccttttacgacttaaaagctgtcacatcaatattccactcgtgcctgaagtttccaaacaaaaatggggtagggtgtcttagagggaaccagcaatctgctcgggaatgttacaaccttgcagtggccaaggataagaaggaagtatcctccagccagagcccggacaagggaatgaatattcccaagtaggaaaccgcccaacgcgaggatgaagataaggatcctcgacttggggacccaagcagcaatgttggacctgtggaagaattagaagagatcgagatcgataaaatcagaaagggtttgttgctcgaagtaaaatcggaattgataaaatttttgagagcaaacctggatgctttcgcctagtcacatgcgcatatggtcggaatcgatccttctattatttcgcacgtcctgaatattgatcctaacataaggctagttcagcagaaacgaagactgctggataaagaatgagcagtagccctgaaagacgaagttgaaaagctgcgcaacaacaacttcatcattgaagctttctacccggctttggtcgcgaatcccgtactcgtgcctaagccgaacaagaaatggcgagtctatattgactttacagacttcaacaaagcgtgccctaaagaatgtttcccacttccaagaatcgatcagctcgtcgatgcaacag

SEQ ID NO: 271251 - DNA, 1103 bp, Cannabis indica
gaaaagatgaagaagtggcatgatagtaggatcaaagagagagtttttgtgaaaaatcagcaagtgttgttgttcaactcaagattgaagctatttccgggaaagctcaagtcccgctggtcgggtccatttacggtgatggaagtgtatcctttcgaggctgttgtggtgaaagatgaaaagtctggaagagaattcaaggttaatggacaacgattgaaacattattggggagaagaggttaatcaagaaaagacttctatctccttggaggatgcttgatgtttgtaagttgggggtgccaaaagaaaaaaaaagattgaactgagaaaaaaaaaagaggaaaaaaaatttcaatgaaggcgcccccaagaaaaaaaaagaaaaatatatatatatataaatatacatatatacatacttatataactgcatataaataattctaattttcttgagactaatgaatttgcaatggggtggtgatcttgatttcaggtgcaaagaatgggatgatggaaaaatggactgctgcaatatggtgtgagcagatgtgtatgttgaagtagtaggtcccaatacaacattggatcaacatcacttcaacattttgaaggagggatggctaaaaaatgaaattgatgaagcaatgatgtagtgatgttgtaactactgggagtattgagttgtgtttggatactaagagttcaattgaagcagggatttgaaaaaaaaattacttacatatatatacatataaagcatattatcaatatatagatttaatatagtaaaatcatattttattttaaattgtttttctatttttttttccttttacttcattttaatccctctttacccaaaagaaaaacccccaaatcaacccattactctcagcaaaacaaccatagccgcatctccaccttcaccaatccagcccacacgaagccctaccaccagcaacttcatctccgtccatcactctcaaaatcaccatcttcaccacctcagtccatccgcgcacacagtcaccaaactcgacctagccccaccatcaccaacactagccgtccaccatcaccatcatctccgtccaccac

SEQ ID NO: 271252 - DNA, 655 bp, Cannabis indica
ttcgaaattaaaaaaaaaaataaaaaactattaccaaatgcacccaaattaaataaatggatgcaatgatgcaacccctaactgtttcggcatctataagaattttttactcttaatttttttatattcgtgtacgttataattatttaaaacaaccttcaaaattttgagaaaatcgaaatagtttacaatatagaaatcaatattcaaattgtctatttcacacacgtataaaataaaaaaaaattaacgtgtgttataaactctttgaaccttgttttcgacgtgttaaatttttttaaaattttttaaaattttgtcaaatattttaaataactaaaacgtatacaacaattaaaaaaattagactaattttttttctttagatatcggaacaaataaggatgtatcagtacacttattttaaggggatgtattataaaattttcctaaactattcaatttccatcttttccacgatggatcttcatattctaaaacaaaagaaaaaattaaataaacgactctttttctaaaaaaaaaaatatatcccaactgagtaagaatacatattgtttaaaaagtaagaactctaaattaagaaaaagtttcttcaaagaaaacataaataatcgaattatctttttaacggtac

SEQ ID NO: 271253 - DNA, 1070 bp, Cannabis indica
actcaattgtactatcgtgttccgaaaatgtacgtatcatccgaatcaaaaggtaggcttaactaacaaatcaaagaacataaataacactcttgagatcgaacctaaccatctcaagttcaatatcggtcccttccaatgcatactccaaacatctaagcccagcttactttggccaatgccctgaaaaggacatagcacttatccaaggtgcaagtaaactacgttgtagttatcatatctgttaaaccatgtgtactgataaatctaggaatacatttaatcacacaatcttatttactttccactgtgttgacaacacaataaacaagaatatcagtgtgataagggtttggatgaatttattaatcaaataagtaaataaatgatcacatgaaccaaataacacatgaaacaagtaatgaaattaaatatgtttctttattgataattgaatagaaaagattacattgaaatagagttttatttagggcacaaagcccaacaatagttttaatcctggtttggctaatgaaaaggttagtagtctttttgtggtgggtgagaaagcttgggatgttgatgtcactactaaaaaatcccaaattcccgtcggttttacactgtcggctaaagaattcccgacagttcataaaaccgtcgcctatacgagcgtcgcgaaaactgggtaaaattaacgacggtcgaaaactgtcgggaaaataatatgggccacggtttaaaaccgtcgcctatagtaaacactaaaggcgacggttttaaaccgtggcctatactataggctacggttaggccacagtttaaaatcgtggcctataatgttgtaggcacaggtaaaaaccgtggcctttagtataagccacagttttaaatcatagcctatactataggccactgtttttaaccatggcatataatgttttaagcacagatttaaaccgtggcatataatgttttcaatctattataaatttcgtatttttcaacgacggtttttgccagtcattggattgtaaaaaaaaaaaaaaataattaggataaagtatata

SEQ ID NO: 271254 - DNA, 2734 bp, Cannabis indica
ctagtgggatttttgtaaagacaaagttgtaaccagttttaggttttttcttatcttaaatgtcttgtactattttcatttgaacttaatacaattgtgtttgcttgcgtttttattcacaatgtaaacaactatattttgatcaaatatacagtacttttgggtttctccattgctcgtaatcttcctgtttaagcagttagtaatctaccaaactttgcctcgcaattgcagttataatctgccttaagcaaacttgaatatactttaaggattttatcacattgtatattttaaatttactcgtatgaatagttaattatattatctatctattttctaggtttaagtacttttatcaaggcatcgtgatgcctcattttgtactttcctagctcacgagaaccgttagtattcagttttatacacaaccaccaccctgtacccagcccagctcacaactcaaaccacagactcaaacacctaaaaccaaaccacaataacaaccacaggttaaaccaaccatatcgaacaccagaaagacatactgagaactcgcagtcctctaaatctgagaaaaatcccgctcaccacttacacaaaccaatcacacctctgttcgcacagcctgtcgaatggagctctggccaaccgcaacccctcacaaaatagagcaagctttgaggtttgccgtcgatacgttggcactgtcgtcaaactcgagccaccgccctacaatctccaagaaatatcgtcttcaactgcaccgcgtgaaagactacaccctttcaaaagagggactagacctaagcgtttacagggcagcttttttaaaaaagtgcatcaatacattcctatttgttttgatatttagagagttttttagtctattttttttcataatcatatacgttatatttatttaagatatccttcaaaattttgagaaattcagaataatttatactataaaaaataatattcaaacaaattattttgtacacgtataaaataaaagtcacgcgtgcaacatactgtttgaactacatttttggcgtgttaaatttttcaaaatttctcaaaattttgcaaggtgtcttaaaaactacaacgtacacgaccatggaaaaaattgaactaaaaaattctttcaaaagacaaaatagatagcaatatatagatatacctcttttaggggtgcattgtaaaattttccaataatattctatatatatttgaataaataatattatatatatgtgtatatatatttattgtaaattctacaatacaatccctaatagaggtgtatcgatgtacctctatctatttcagcatttaggagaaatttttaacgactttttttatggtcatatatgttgtagttatttaaaatatcttgtaaaattttaaaaaatttaaaaaaattactatgccaaaaataaggttcaaacagtttattacacatataaattttttatacgcatgtgatatagactgtttgagtactattttaatttatgttactacaagcaatataatattttaataatttacaagtcatgtaattaataattagtaattttatttaaattatcaattaaatataataattgtgataattttaataaattaaaataatagtaaaaactattattattttattaaaattataatataataataaatattgtttttagtgttatagttaaaacgaaataaatttttgatactaaatttaatgttagtgtgaaactaaatttagtatctaaaaatgctccaaccctaaatatatcatttgctttataaaaaaaaaaaaaaaaagcctaaatatatcagataaaaaaaattgttttcttatgctttaaaggcaaccaaataacaaagaaaaaaaaaaatccaagttaataacattattacaatatcatgctatttgttttaccttgtttctaaaaataccctaggcattaagccactaaggctagcttagtggtgagagagagatggatgggaaaagggaaaggtcatgagttcgaacccaagacctttaagctataaattattagttgattgtaaaaatatcattacgctacactcaaaaaataccccaagcattttaacatgatcttcttctctatttctctgtctattgttctttctctcactttcttgcacgcaccaaactcagaaacactcagcttcgccccctcttgtcctctatgtcactctcgctctctttttgcctccatccgcctaacgatcgatcggaaacccattgagaattttccatatgcaaagctatttaatttgtttgattaactttttgatttaaatcgattattgattattgttctagattgcactacaaaaaatcttacttttagtcacaacaaaacttgtaactaaaagtgaaaaaattgtgactaattataaatcatgatttctatgttgtgagtaaaaagtccatggttaaaagtattagtcacaaaaattacaatttgttgtgactaaaactaaattagtgacagcttataagtaaatactatgttttagtcacaactaatagtttattgtgactaaaagtcacatttagtcacaaaaaaattatgctgtgactataaatttgtcactaaaagtaacagttttttgtaatgttgtttgattgctgttcttggatcaaatttgagtagagtttgttaattccatttttggcatatttaattgacaaaaatat

SEQ ID NO: 271255 - DNA, 566 bp, Cannabis indica
tggaccatctgcagtatggctggcttcatctcaaaattgttggcatcgatggcaggtggtcttatacaagatctgacccctatcaagttaggaagcaaatagtccctcaggctacggtcattgttgttgtgaccattagcctggtcttctacagctcctccattgttgccattattggcgttgtcagccatgactctttcttgtttaatttctattgcatctttttccaatctcttccttcttatgttctttttacaagttttctctatttcaagatcaataggtaatctgacagttgcaccttgacttctcataaactagtgaacctgaaaattataagatcttgaaacaaacagaattagtactataattgaaaacaaaccaaattagaacaaaatttaatttttaataatattaactatcaatccccggtaatggcgtcaaaaacttattgtggtattttgcaacacgcagtatacttatcattttgacaattgttactcacaaagagtgaggtcgatcccatgagggttgtagttaagtacgttaaaattaaacttttactt

SEQ ID NO: 271256 - DNA, 687 bp, Cannabis indica
ggaagcgctccgaacaacaccccaaaagcgaattatggatccaacggttgctggaaatctaacagcggcgagtaaagagacggagagactacaagaaatgatgtggaacaaattgatagcattggaagcaaaaggccagatgggagtacacagcgaatgggctcggatggaggggtcaaccctttcacccttcggaaaccacatcctgcgcataaaagcccctcagcgttacgtggcccctaacttaccagagtataatgggacaggagacccctcggaatacgtatgtcaatttgagcaaaaaatgttaactgtctccgtcccactagaggacttggaagcaatcaagtgcaagaccttcacgcaaggattgagagggccagttctgcgttggttccacaacctaccatcaggcacaataaattcttaccaggatctcatcctaagattccaggccaatttcgcgataagtgtgcgaaccaccaaggtggatacggacttaatgttaatacaccagcgcctcgacgaacccctagcacattttatcaataggttcagcgaggaatacgtcagtatcccgaaatgcaccgattcagtggcgacaaaagcattaatgcagggattgatacatggttcagaattaaagaaggcgatcatagtggagcctggcttgtccctcacaagggc

SEQ ID NO: 271257 - DNA, 807 bp, Cannabis indica
ataattaatcataattaactgataatttccaaattaactaagcgggctttacattgcaagacaaaattgatatttaaagagtgagaattggaagagagagtggttgtaccaatgttagaaatgagcaatttcttaccattagccatagcaactatttcttgactagtcaagggggtaacagactcaagattgtctaaagagtgagcaatatggttggttgcacctgaatccacataccatccaacatcatcaccaaaatccggtatagattgagcaagaaaggcctaaggatcataatcgagggactgttcagtaaggttggcttgaggttgagcagttgaagcctttggtgcgatccaatttctatcaaacctatagtggcaggtgttaacagtatgcccaaatttcatgcaaacttggcataaaggtctgttattgttggtaggtcgaggtccattgccacagtttgagaatcttgatgagttttcaggaccttgtcccctcccttagccattaaagggtctatactgaccatttcttgtaccaacagtaagatttgcaaccatatttgctcagagatctaagacagctgagtgtctttcaagtcttgactcatgggacatcaagagagcttggacttcttcaagtgaaacgagtatcatttcgagaggtaatgctagaaacaacagaatcgaactcaagaccaagtccattgagaagatgtaaaataagatcaaaatcatcaataggatgacctgcaatagccaaagaatcacaaacagacttgatcttatcaacataatctga

SEQ ID NO: 271258 - DNA, 767 bp, Cannabis indica
aaaagaagaagaacaagaattagaactaatactacccccatatttatcactactaaatagataactattaaaatctcccattatagcccaaggaagactaggagcattataaaaaagcttatccaaaagttcccaagtaaaacgcctatgactttccacaggagaaccataaaaacaagtaaggtgccaaatatcattagagttaaaagaaatattacaatctatatgattaagagagtagttcaaaatatttacattacaatcagctttccataataacattaagccacccccaaaagacaatctagggacttctaagccaaaatcaaaacccaaagaagtcttaaaccgatcgatagagtgaggcttgagtctagtttccatcaaaaaaagaactaacggcctatgagtcttgaccaaaagggaaagctggttgaatgctcgagagttccccagccctcgagcattccaactaattagagtcatttttctgggcgggtgtgcccagcaacacccgcctgttcagttggagttgtggaaggaggaacagaatcagcatccccagacctggctcgcttcagctgagaacgcagagagccaccaatttggacttgatgcgagtggaaagtaggtctcttgactcctgaagcacaagcaagaccctttcccttgacattaggatcaggagcagcagtttgcttctccatattggttcccaagtcaagagaaggaatagcatcagcaagagatctagcagccattataac

SEQ ID NO: 271259 - DNA, 837 bp, Cannabis indica
aataatataaataaagttaactgtttgtatattttcaatgagtattaatggtattattaacttttatagttaatttgcacattgtgtattagagcacaaatataaaaatagaataattacataaggcaccattttttgtaaaatatttacatttttacgttcaaagaatattttttttacattttttacggttttccaaaaaataacacgaaaacaacataaaatcaacaagaaaactaacataaaagtaacatgaaaataacatcaaagtaacaaaaaaaaataacatacagataacaaaaaaacaacaacaaattaacaagattacaacataaaaagaccgtattttctgtaaataaaattaaaaaaatcgtaaaaataatttaaaaattaccgtaaaaaacgtatttttagtaatttttttagttgtttttatatttatgtgaaataatccctataaaaattgagccaaatatagttttgtggtatattttgggccaaatttaatttaaaatctatacaattcattagagatagtctaaatgttatgcttttatatttactagtatgttatttttaatattttattattaaattttaactaacatatacattttcatgacttgcattattattattattatattattattaaatttcatatttaactttgtattattattattttatattttataagcattaaataaaatattaaaattttgaatcaaagatttacaattatgtattggagcacaataataaaagttgatgtaaaaatataacttttacatctctcattgaaaatggtctaataacatatctattctatataaa

SEQ ID NO: 271260 - DNA, 623 bp, Cannabis indica
cgatgagcggcttgtaaatggggtactcttggacatgttaggaattgacttagatgattgacggcataggaaatatcgggcctcgttatggtgaggtaaatgagtttgccgattatactcctataggaactgggatcgggaaggattttccctttatctttgctgagtttaaggttaatttccattggagtagacgcaggtttagctccaaggtaacccgtatcggctagtaattggaaagtaaaaggtctttgggaaacgaatatcccttgtttggttcttcctatttctaaaccgagaaagaagcgaagagatccaatgtctttaagggtgaacttgttgtccaaaaaagatttgaagtgagtgatgacttgctggttattgctagccacaataatgtcatcaacgtatatgaggacagcaaatataaatgtagatgtgtttttgataaacaatgagttatcagaaagagattgatgaaagccagccgatttgagagtggtacttaacttttcataccattgccgagaagcttgtttaaggccatatatactcttgttgagtttacaaacagagtttgggggggccttgtatccgggggggattttcatgtagacttattc

SEQ ID NO: 271261 - DNA, 2078 bp, Cannabis indica
aggtaatacattttgttacctttcttatatcttgacattttgaaattatctttgaacatagtcgtttacaaactgtccataagctgcttgatgaggaagcaaccccctgtgattttggtactatattgaacatgttttctagttatggtgtggacctgtgtaaagaatttacatgtcagtctcaattcaagctactttttgttccatagctttctaactcactgcatagtagatagaacccatagtgaagtgaactattgtacttgcaactttgtcttctgacttttgtaaattttgatgagagcatattacattttagtgtagtaactctttggaaggcgtaatctggccattggtgcataaagtatactactctattaagtacttttattcggtgtctgtggtgcatagcttgttcctacataaacttgtgtaaataaatctcatgtttatatattagctaggttttacataagggtgtgactaatggaaaccctctgcataattaatttaacttgctttctgctggggcctaattttcaattattttgattacatgtggcagcgtttcatcatcagaccttgtttcaaagtggatgggtgaaagtgaaaagttagtttctaatctcttccaaatggcacgagacagtgctccatctatcatcttcgttgatgaaatagattccttgtgtggtcagcgtggagaaggcaatgagagtgaagcttcgaggcgtattaagaccgagcttctagtacagatgcaggtaaatgcggcgggaagttgtgaatgtggattattgagttgcttggtcaatttttatttcatttggctcacctgctctattatgcatcctattctcgcagtgacttattttaactatatatatgatcatcaaattatttctggctattagttttacacagagaccgctaaagtaggttgatgtgaaccaacccccgaacagtagtattagcaatagccaagcaaaacagtaggaaattaggctatggtaataaaagagaaaatacaatgcctaggcatttcgagaagcctaggatgtctccatgatgcaaatagagaaaatactcaattctttgcatacacactctaatctaatcgcttactcacctctatatatactatcaaaatttcactcgagactagtctcaatacaatgagtcatacccctttatttcctatactctggcacactctactaatatggggttctaacataggttgtgtgtatttgttttcttttctgattgtgttcggtcttggtccttctctggagggttgctttattttcatctaataaaaattgtcttttaaagtttttcttcatcaatagatccttgatattacttgtttgttgagatgtatcatatgattttgttcttttttccatataattatgcttctaatgtatcaaacagaagtatatttaagagaaaatgggtgtatccaaatttccatggttattattagcttagcttgattccatctattttaaaaattgcattgcctgttagtgtgggactttatttgtttatttctcttatggaagagttgatgaactcatttgcagcttgttatttaacttgaattatctttcaaatgtttagggtgtaggaactactgatcagaaagtacttgtacttgcggcgacaaatactccctatgctctagaccaggtaaaagaaaaaaacatgaagcttttagtgtcttcatttgaaccacttgcgatcggttttgtagctatggctaatcagtagaaatgcaggctattcggcgacgttttgacaagagaatttatattcccctacccgatgcaaaggctcgacaacatatgttcaaggtaatataaaatgattacacgcaatcttttataatctaatctaaacaacggcttaaagtttgatgttttggattttggtaactattgctaggtgcatctgggagatactcctcacaacttgacagaaagtgattttgaaagtttaggtcgtaaaacagaaggtttttcgggatcagatgttgctgtttgtgtaagcaccaacaagcctcatgatatgct

SEQ ID NO: 271262 - DNA, 545 bp, Cannabis indica
attttggtctttttgttttgtgttttgtctttatgtgagtcaagtaaatagatgcatttagatttttagttatatttgctgaaagtaatttaataaaaccaaaaaccatttctttatatttttttttaaaaaaagagttagagaatcacatttattctccttctctcttttccctctcctaagccctagaaaccagcaaggatcttgggttttcttcagcaattttgggtttagatagcatctttgttgaggtttcaagctttggtaagttttctagttcctcttttgttgtttcttaagtttaaagttaagatttttgcatgaaatgagggttattgttgttgttcttgctttgtttgcttgtggtgttttctgaagttagattatggttagaattgttaattagagctggtttggtggtagtttttgaggtttgttcaaggtttgagcttatgagctcaaactttgcactctcatggtggtttttgtatttgtgcatgtagtagtattttgttgccttggatatgctctctaggttgcataaa

SEQ ID NO: 271263 - DNA, 758 bp, Cannabis indica
aatgcaaaataataccaattttttcctccaatatgcttattgtcatagattattttttaacaaaacaaaaaatatgtaaaattaaggacacatgaatcacgttcatactcattttaaattagacacaatatattgggtgattcaatgaacccttaccaatgcactattgtttcgacattgaagagaatttttacgtttaattttttttttatagtcatttatgttttaatatttttaatatttaagatattctataaaatgttaaaacaattaacacgtgaaaacgagctcaaagagtttgttattcgcaagacttttatatttatacacatatgaaacaggctgtgtgaattctattttcggagtgttaattttttttagtttttcaaaattttatataatttctaaacaactataatatatactataaaaaaaaattagaattaaaaaattacatttaaataccaaaaagaaataaaaagtaatatcaataaacccctcttacaaaagtaatggtagaattttcaaaatatatatgtatcaaataattatgataaaagataaaacaagtatagtagctatagtttgtgtattgtataaatattagtagcaatgaatacataaaaagctaaatttttcttatatagagatgtgaaagatgaatcttttccaactaatattacaaaactatatatatattaattgtaaaccctattctctctcctcattcctctgttcaactacagtactagagatag

SEQ ID NO: 271264 - DNA, 953 bp, Cannabis indica
gtagtcactctttataaatattacatttaattgttaaattttttaatttcaaaatgcaatagcagcggaaccccgttattatcaattttttaatgaataatactaaccacgtattatccgcaggtcaataacggctagacctgcccataatttactgactgaaattagccttttttaccgataacgtatcttaaacatcaaagccattagtaacaaaaaaaaaaattgaattaaaaattttgcagtgtaagcaaagaagatcgcaacactatctgaggtgaccggattcgtcgaggtgcacaagtatttccactaatatatgtacactttggtgaacctagctagttgcatcacttagtccaacaatgttaaactacaaataaatagatacataaacactactaagctttggcatgaaagtaaaaacctcatcatattatctctaccaggactttaccataactaccataagtggtggtcgagaaaaaatattaatatataaactttatttttggatcaaaaaccatacataattttataaaaattgaagaggcgtgtcgtgtattagtataactcaaagacgagtcgcatagagcgactggagtggtcatgtcaacagcaaacaagatatgggtaagtacaagtggcgccattgttggcagcactagctactagctggtatatagctagtgcaaatacattatacagtaagccccgtagtcatcacctcaatcaataatggtcaatgattcatatgcagcagctttctttgaccacaaagttaactcttcaatttacatcacaagcctgaatagtgtgtccagatgaaaagataattcaattcaattgtatacagcatatagaagtttgtggttaggcacttaaaagttaaccagtcaactaaaccgcgcatattttctttgtaatgattaataaggtactatttttataaa

SEQ ID NO: 271265 - DNA, 651 bp, Cannabis indica
ctggaaaagacataacacttatgaaaggtgtaagtatacctattgttgattatcatgccagtctaaatccagtgaactgacaaatcagggaattaaaacttttgaacatataatcatgattatattccactgtgctgacgacactataatcatgaacaaatacatatgttctggacttaatagaatttatacattaaacataatcatgaaataaattatgtgaaccatgcaacataaaatgcagtttctgatctttattagtaaatctgattatattgaaataggttttatttagggcacaaaatccaactattctgtcccgagtatttgtctattttttcatagtaaacgagagctatgaactcagataagtcaaattcataacttcatatttttacttttttcgacaaagtgacttactcacaaatcgggtagtttcgagtctcccgattttgtgaaacaacatcttcgagaactagtgaatgacttcaccagaacaaagatattgactaaatgatgtcaaaatatcacttaggcataaaaaatacattccaaacacattttcccactcaccctgtgttcaagttgacgtcataggtcaacttgggctctggtattagagcagccttcagtaaaacaaccatactcact

SEQ ID NO: 271266 - DNA, 2085 bp, Cannabis indica
ttattgtctctattaccgacggggattccccgccctattacccgtcagggaataattggggacggggcaaataataaaaggcggggacggggacggggactacattcctcgtaccaccccgtccccatgtgcatccctaactactagagaggattggttattgtaaatatcagtgatgttagacagtttattatgatcgaggcccatagctccaagtttattgtacatcgtggtggtgcaaagatgcaccaagactcgaagaggcaatactagtggaaaggtatgaagcaggatatggctagctttgttgctagggtatggtttgtcagcaggttattgttgagcactaaagatcttcaggtttgtttctacctttacctatactagagtggaaatgggataagatcactatgaacttcgtaactggtttccattcacacccttgaagaatgacaccttttgggtgtttactgatcgtttgaataagtttgctcattttattccaatcagaaaggattacaagcttaccatgctgactcaacttcatgtggacaatacagttcaactacatggagtgctttcaagtattatttttaatagaggtctttagttgaagtcatggttttggaaaacattggaacaagttttaagaactaagttgcacttcccacttgtcattctctggtactggacaatctgagatgatcatacaaactttagatacatttcttgtccttgtattttagattttgatgtagctagaagggaacacttgtcattggttgaattctcatacagtattagctaccaagccagtataggcatggctccttatgaggccttatatgggagaatatatagatcgtcactatgttagactaaactggattatcatgtcactatgggacctcagattgtcagtagtatcacagagaagattaaaggaatcgaagagaggttttaggttgttcagagttatcataaaagttgtgtccatatccattaacgaataagttgagtttaaaattagtgtttatgttttcttgaaagttactctatgtacggtatgatgagatttggagtaaatgataagttagccccaagtaaaaattagacattttgaggttattgagggattatgggggtcacttattgatgctacttaccagcgtggttggaccatgttataacgtgttccacatgtttatgatgagaaagtacactccatacctatcgcttggcattgagtctaaggttttccattttcgggaagatgtgagctatgaagaacaaactgtcagtatcttgacaagagagttaaaggtgctaaggaacatagagattccaatagtcatgatcttgtgacaaaaccatagagatcataggaccgattaagaaattagggagtcgaagatcttatttatttaattttcagcttgaggtcgtatcttaaaatttcgggatgaaattttttaaggggaaaagaatgtaagacctggtaaaaaaaactatattataataggggtgggacccacatgattaattatttacctctcatttctgctaatcccccttccccgacactcttcttcttcttttacttttactattcaaaaacaccacacaaacactaccaactgcaagcttagatctaccaccctccgagccaccattttcaaaatgcactagaactcacacccaaagtttggtggcgatcggagctaagatgtgctcgtacgtaagctctaaaatttttccgtcaaaacttcaaatcaacattgaagccaacttcattgaacatttgaggagtgtttggtacagttagaatcaacatcccgaggagaacaatcttcactaagttatttgtcctagctcgttactttttctgaagagatttgaatatactcgcctctttagaagcattttctgatgatttcagtgtttgtttaggctaacaagttgtacatccatgatctactcatcaagggagtcgttttcatatatactactcttatttttggtgatatttctggtataccaatttctaccgccactgatcgttattgtgcaccgcttagctgagat

SEQ ID NO: 271267 - DNA, 1376 bp, Cannabis indica
tcttcccttacatatatatagagcctcttctcactcacaaacccaccctcaaaacaattactcaaataccttttttatttagtatattctagctcatcatactaatcttagggcctaagagattgttactattaggtgataaattggtgaaagtgatagagcaataggtgtaaatggcagagttggtgattttattgatactagtgcagcaatgtttaaaataattgggaaatgaaacctatttttcatgagaaattcaatgacagggaggtgctgcagttgattgagtaactgtcatattgtggatagtaggaatttctaactcaataggtgtaaatggctgggggacaatttaaaggcttttacttgtaaatgtcattaacaatttagttctaagggattcctaaggtcaacatattctagaaaagtgtagtacattcaaaggtaaaacaaaagcctttgtacagctactattgtggaatcaattcattgtacatgacacgctgaagagaagcatgcctgcacaatttttgcctaccaggtagtgtgtattatgtagaaataaaataaaacagcagaccacttgtttttgcaatattccttttcaaaaaatataagggtgagattattacaaaatttcatttgcaatgggttctgctacatttttgttttgaagttgttgggatttctgattttaggaagcaagaagagacagataccatgacacacaacagtcatggaaggttgctaggctctttgactggagtaatgtagaaagatatcggaagatgtagatgaattggtggagattatatgggataaattaatagtgatcctagatactcttttcgctcactattagtgaaacacaatgatatggtaatgttttcaaccacacaattcattaagagtaggaccgtgtcacttatcataggtggttaataataatgacacatcattgtgtgcacaaattgtgtgtagaaagagtctcaatcattaaccaacattgtactagctttttaatattatgttttcttttacccgaagaggggagattcaaacgtgagatctcttcttagtggacgattattattgctattattatttgaaactaggctccccggtctgaccctacaatgattggggagcaggaatctaaaaaaattgcgatataaatacctaggagagactcgaatctcatacattgaggcacaaaccacatgcctcgcgtcatatgatgttaaggacttcaaaagaaaattgttttctgattcggttagggttttattctttttttcaaaaaagagaaagaggccacttgttttagactgacctcccctcattataaattgaaagcctcacttgtgacagagaaa

SEQ ID NO: 271268 - DNA, 1388 bp, Cannabis indica
ttttttttttagttattatgttatagttatttaagaatatttataaatttttaaaaaaattcgagaccctattaaaaaataatagggataattatatgaggtattatttttttataaataaattatatttttatatttaaataatttttttttatatttttacggttttatatagtaacaacacgaaaacaataagaaaactatataaaaataacatcaaaataataacaaaaaataacatatagataacaaaatatcaacaataaattaacaagagtacaacataaaaagactgtattttgtgtaaataaaatcaaaaaatcgtaaaaatatttaaaattccgtgaaatcgtatttttgtaattttttttttattatttttgtgtatttgtgaaataatcccaaaataatatatacatattttattgtacgtgtgactgatttttctatatgtatgataagtaattgtataaatatttattatcacggtaaattattcaaaaacattacaaataatactaaatagctacaacataaacaattaaaaaaaatatataagtatttttttaatatcaaaataaataagaatttactaaaacgaccatttaaaggtctactatattcttttaaaaaaaatatatgtgacacttcaaattctctatatgaacgaatcacatatttaataaaaatatattgtatataaacagggttggtcctgagaatatatgagcctaaggcgaatttgattttggggcctccaaaatataaaaaaaatgttaaaaaagtatttattgtttacaatacacttaattttaattaaataaaagcttaataatttttttattgtttattttgggctctcgaaaagtgtgggccctaagtacgagtctaacctaccaatgtctaaggacggttttgtatatgaaagaatcccataatatgtgacatttcaaaaaaaaaaaataataataattacatgtgtaacaagtgcaagcaacatttattcaaaaagaaaaaaaagtgcaagcaacattataaattttgtccacacttttttttttcgaaaaagtaaattttgtccacacttactaaatataacatagcccaaatgattaaagtgaactcatataacatagtatgattgattggtttcttttactttttttctaacattaactaatcatgtaaaagcattcacggtacaaatacataaaaaaaaaataataaaaaattataaaaatacagttatataaaattttaaggatttttacaattttatgattacataatttttttatattgtactcttgttaatttgttattatcgtttgtatgttattttttttttgtttacttttatgtaattataaactgtaaaaatataaaaa

SEQ ID NO: 271269 - DNA, 2218 bp, Cannabis indica
gtctctaaacctcctcgtcctgtctctaaaatctggcttgcatttctataaacctctactcccaatatggtgaagactgtggcagatttgcattgccgttgccatgaccctgcttatggcctttgactcagccatgagcatgagggggattttgatttccttgaccacctctagcctcgaccatatcaccctaacttctattgtttccttgggtctccatctataggatgagcctattaatttaaaaggcaggttgatcaagcagtggttataattggatactaattactgcataacatggaaatataagtatacacttattctgctatcatgctactaacattcttcctaacatatttttctaatcatgcttatctaatttaaactactaaactatataagggcttactgaaccgtgagtcgagcttgtctttaatgatgattgtacatatctcgacagtcttcgaagaacaacctaaccgctctgataacaaattgtaatgccctactagcttaaaaatgttactgtattttattaattattgtgctaacctttgctaatcaaaagatctaatataaaatcgagcttaataaaatatttcatgaaaaatataaatctcactaaacataattcataaatagatattgtttagaaaactcggaattccaaaatctatttttcaaatattgacaaaatacaacctttactgagctccaagctcactgtggtttagcttttgctttgcctttacctacacatgaaatatatatgtgagttgacaaactcagtaagaaaagcataaaacataaacatatatccaacttgtaattatgttctcatacacctaattaccataagtctactactcgtgtccaatgcatgtaattgagtctcgaatgttgttgaccatggtacgattaaccataataccagcctatactcaacactccagtcgcactaatgtggtagcatcaattcatactataagtacaattgaccataatatcaacctatactcaacactctagtcgtactgatgtggcaccttcaattcgttatattttgtattgcctaacatatatatgtctatatcacagtgcaattttatgtacaccatacccttatatattaatttgattggcattatttactatctgatacccactagtatcactagatatcaatatctaaatgtaactctatgtagggagagatgtgtcatctactattctctcttggggtcttactttccttcttttcctgctttcataatccttttccagcgtcttttttcctttgtcaactcttctcttcactttctattctattttatttttctctgtgtcccttttccctttgacctttgtagcttgacattcagtttgtccctgttcatgtgttggttttgaccttttgttctcttgttttcctatgtggggtctgtttgttttggtttgtggggtcggttgccttattttctggtggtggttggtggtccttgtgtgtgtttttgtcttggtttgtgttgttatttatgatcatggataaggtggttggctctgttaatggaaataaaggaagatgcctctctttaaatgaggtatctatctcccttgcccctggtgtgataactactaagatactctccaaagtttgcctttttggcaaaattctctcggccagaacctttaatgttaaggatgtggaacactcttgctcccttttgtggaagactcggattagagtggagccaactgagaatgcccttgctggacctaacacctttcgttttttgtttgagaatggagcggctagtaaaagggttctggattaaggcccgtggtgcgtcaaaggagatatgctggttttactctcttggtcttctggttttggggccaaggaattatccttcaactcaatccgcttttgggtccaaatacacttccttccccatgactactactcaagagtaaatgcaaatataataggtgctttggcggggaacgtagtgaacattgaacttgacgaatcgaaaccggtcactgtgaagaagtggatccgagtccaggttgatgcagacgttaaccgacccctctacagtgggtgtttcttcaaggttgctaacggcgaaaataaatggatccaactgaagtatgaatgctggaagcattctgctaccggtgttgtatgttgggccacaggagaaaggactgcagc

SEQ ID NO: 271270 - DNA, 502 bp, Cannabis indica
tccaatgactaaaaatgaatgtagttaaatatttgaggtaaccattgaaatttcctccatatatatataaactattttgacctcctaactacttgagccaatttgatacattttttgaaaaaattaaaagttattttattaaaaaattgtgctataaagatgtttggtaataattagaaatcaatttattgataaatttatgaagaatgtacagctaaaagttaaatttggtacaacccaacattcaaaaaaagttattttgataaatttgattaaaatactataacaaatatatatgttaaaatatatttatttctttattatatattactaaaaataaaaatatttaaaattaactaatattaaaataatattatccctattcctgaatgaagaaacatgtggcataagaagaggagtacgacttcgaatagccagtgagtaagtctcctccgcgaagccaagtcatggagaggctgcacgaacccaggaatggatcaag

SEQ ID NO: 271271 - DNA, 530 bp, Cannabis indica
aatattttgacacgtgacaattttaaaaaaaaacggcttagttaaaattagtactaacggacaaataaaaagtgtgaccttgaggactattgctgttatttttagaggttggggactaatctgcatcacagtaatctttttacagacttttgccgcaaattttccaaataaatatatatctactatgatatatagaagaatcaatctcattttacttctttttgagtagcttagaataagtttttctttttggtctatctatatcatttcatactaccataaataaatagatgatatacttaagtccaaagtctcaaataaaagataaagattcttaaaagcttgacacgtaataggttttgtaaaagaaaataattctcctttgcttcataattcatatatattaactccttttcataaactggttgatcatctctgaatgctctgtaggagctaacttcttggaagtatacagtcttgttgttcatctcctgttctattaaccagtttttttcaaagtcaccatggac

SEQ ID NO: 271272 - DNA, 971 bp, Cannabis indica
tttaatattcttagtaaaaaaatatatattatctattaatggaggaggtttcaatagttacattaaatatgtaactatcatagttatatatttttagccattagattactattgaatggttgtgattaatttaataattaaataaaaataaataataaacttataacctaataatcacttaataatttattttcttataaaactttaatgaagattatattaattttaaaattaaattaattataattattaactatttttttgtaatttattattaaataagaatcttttaacaattttttttgcccttaaattattaaaatttttgttatacccgaaattcgcctaccatttcaatggaggacacgtgaagttaaggagaatatggatcgatgcgtgtaacgctaattacatttaatggaataactcattaaatgtggaagtgagagagtatatttgttacttcctgactataaggtcctatgcgagataaagatatacaaactgttgcgtcatgtattaacgagaaaccatatgacattggatgcacaaggcgagacatcaacttcgttacgcttgggaagacataagcgatgcataatgactatgaaaacacatagcatataatatacaaactaagtataacagtcaggcgaacccaaataactaatagcaaggcgcttatcttgctataagaaggcatgatcctagtacttcaccaattagcttcagacatcttttagtgaggttattagtcttggcgaatcggttctctcgagtagaagctaacattcgaatgatgactgctgaagtagtctttgttattaagaactacgattgtcaaaatgaagcgttatgccttcaagcaaagaagcaacgaggcgtacatcatcaacctcgaaaaagctccaactcgctatcaaggtcactagtaccgagttcctatcgagacattccaaaatgttatgatt

SEQ ID NO: 271273 - DNA, 638 bp, Cannabis indica
agagagagagagagcttttctagttaggattttagtgttgggatttatgtccttaaaataagtaattaatggataatatattatagaatatatgaaatgcaattataagataagtgaatatattaattatagaagcataattaataaatatttgaaaattccttattcatatgaagatggtataatcttgtaaggtcgtataagagaattaagattatacaatatgaataaaataaattggtagtgttgaaattttatgccctaaactcatttcaatataatgttatttgctatatcaatagaagattaaaagttatttgagtttacatggtatttcatgtttacgatttcaataaaacatatagttattcacaattacagtgatgttatcacagaaagtaattgtgattatatgattcaaagtctttagtctcatgatttatcagtacactgggtttacactaacgtgataatcagcgataaaatttacttacacttgtataagtggaatgccatttccaagatattagaaaagtatgctagtactggatgtatggagtatacgtctgtaacgccccgatattttgccttattttacaaaaatactattttcatgcataatttgaaaagataaaaaa

SEQ ID NO: 271274 - DNA, 697 bp, Cannabis indica
aggttaattttaaatgctatgctcgcgcattgttcgcttttgctagcgcagtgaaatgcaccggcaaaagtgtatatatatatttcaagggacgaagcaccaccaccaccgcaccaccaccatggcaccacgccaccaccaccacctcctgtattgacaggggatgatattttatctcaattggactgaattcaatttcgtttgcctggaaaatacaaatagtttgggggtgtaaaaccgaagcgttttgctgaagagctaaattggtcaaaaaagagtatattttttgaacttgagtattggaagaatttgtccttacgacataatctcgatgtaatgcacattgagaaaaatgtgtgtgacagcttagtaggcactcttctaagtatcgatgggaattcaaaggataacgagaaggcaagaatggatttgcaagacttgccaatacgacatgagttgtggttgtatgaagaccgaaatgggaagtggaaaaagcctctagctaattacacacttagtggtcaagaacagattgaatttatagactttataaagtttgtacgatttctggatggttttgcgacaaacttagacaaaacgtaaatttggatacaggcaagatttctgggctcaaatcccatgattgtcatgtattgttacaatgtttattaccggtaggtatccgtaagtactggaa

SEQ ID NO: 271275 - DNA, 747 bp, Cannabis indica
ggaaatataaaataataatttattttattttcatgataattatgtgtaaaaaaaattcataaatattaaataatttaatattagaaagtaactaatctaaaataacttttgcagattgaatcagattgaatttgacctattatacacggataggatgcactataaataaattattaagaatacagattgaattggatgaacacccttaacagttttggcaactctacccctaaaatgtaaattgaaaaattttattaaaaataacaactcaaaaattaaatttgagctattattacctattccaaaaatataaataaaagtagtgaaaatagttttccatcaaatgagttaaatttgagtttattcgaatagcatatatagagaaatattatttattgagagttataaaaaatttatattaattttttttaaagcctttctttataataagtgtgtgatattattatattatttatttaatgttataaaataataaatatattaaagtatataatttatataaatgatatagaaaaattaataattagtgtaatgtaaacatacgaggttaggtaagatagagaaaatttaatttttaataaagtatttagaataatagaacgtagacaaagtattttaataaattagaaattgtgttattttttcaaccccaaactaaattttgggttctccactataggccgccattagagtaggggtgtgtagaaagtcacccaatctaattac

SEQ ID NO: 271276 - DNA, 620 bp, Cannabis indica
acatattgaattgcaataattaaacccaaacaacattaacattaataaatgagtgacagttactaagtccatcaacgtatgcgtcttctgcatctgcgagttgactgttcatgttctgttgttgagctcgtagggttatcattacatttggactgtctgagtccttaagcaattgcctcttgttgacgtcgcatatcgagctgatagaacctagaattgcgagtctatatcggttcatcaaggctattgggtcgttgggaccaaatcgcaccatagagagtcgatctctatgctttcgcagaagtatagagaggatactcgcatatgtcccgacacatgcgagttggatccattctctcatcctgcataacgcgaattacagttacgcgatccgactttggtcatactcgcaagatctcgctggctttatcctggcgaggttcaaacttcgaggagtctctcatggacatttcaacttccattggaaatctgaatacatgtgtcctttaaataggagtcttgtctcgagtttctaggtgagagaaatctcactataacactagctaagccacttccaaaagttacttccccacactgcataggtcgaatgttaatcaaaa

SEQ ID NO: 271277 - DNA, 887 bp, Cannabis indica
tgcaacataaaatgttatttctgatctttattaataagtaaatatgattatattgaaatgagttttttttagggcacaaaacccaacagcactatcttgtccgcacgaagtagagatcgagctcgatatgcttggtccgtgcgtgaagcacagggtttgcagtgagtaacacaatgctgagattatcacaccaaatgattggtggctgaggaagtttgatgtggagctcagagaagagggaatgtatccaagttaactcagcaactgtgctggcgaggctgcaaaattcagcttctgtgcttgatctagaaatggtatgttgctttttgcactgccaggcaacaaggttaggaccatagaaaatggtgaatccagatgtcgatcgtctgtcatcggggtcagtggcccaatcagcgtcaaaaaatgcaacaatttcatcaagaggagctttggtgagatgaagtccatgagtgattgtgccactgagatatctaaggatacgcttaactgcaagccagtgagagacaaggggattgtgcataaactgacaaactttattcacactaaatgaaatttcaggcgtggttataagaagatactgaagagcaccaacaattgaacgatataagcgaggatcctacacaggttcacttccataggcagataacctaaggccacttgtcattggtgtgggggcaggtttagcatcgtgcatttgtgctttgaaaagcaagtctcgaacatatttagcttgggatagatgtaaaccagatgaggtatgatgaacctccacaccaagaaaataatgtaactcaccaagatctataagagagaatttatgattgagggcagtgacaatgtcgctgatgattgtggggttgctgcct

SEQ ID NO: 271278 - DNA, 692 bp, Cannabis indica
aaacattaaacaacaatcatcatcctccctaaatgggaaatttagttcataatcaaatccataaccattcctaaaacaatattcagcataaagaaattaaaaaggaatagaaaaagaaactgttggtggaatgactctggatcttcactttgctcttcttgccgctcttaactgcgttttaggtctccagatcgctccccctaatttccaatcgcagttttctatttatatctaatttttaggattcgtcggacgaaaatacccctgaccgtaaggacgctcgccacggccacagggtatctcaccacggcgattggggcttctaaaaacctcgtttttgttctcgagttatggccgcggccatggtgatctcgccgcggcgactggacccaatttttctactttgacatctttcagtaaaatgggcataactttctcatacaaactccaaatgagctgattcaagatgcgttggaaagataaaaaaaaagatctaaaacttgtatgttttgacttcttgcaaaatataatcagaacatagtcgaattcaggctttaagttttaactttattttctttcaaagttttctctattttataaatcactattttccgaaatttgtctaatttatgcattccaagtgttgaaacctgaaaccaaagaaaaatagcgtaattctattccaaaaataa

SEQ ID NO: 271279 - DNA, 621 bp, Cannabis indica
tatcatgatacaattaccaattgtactctttccaataggaataatcctaattttctctcatttcattcattgatccccatttgtgtaatagtattacatatttatactaactaggcaatattaacaattgctaattagtccctataacttttcatgtaacacttcccaacccttcaaaatcaccttgtcctcaaggtggtaaaaataaaaaaaataaaactaagaacaagtacaaatataaaaaaataaataactaattgcagcccattttttttttcctaaaaaaagaagcccaattgtttgttggcccatttctctaatagattaaaccttagggtacgaatggtatcatcttcaacctttgcagcagccgactccaacctttgcccatattgagtttgtgacctccatgcattgtatccttccttaattgaagcttcatccccactcactattttaaccacatatttatttgcagaaaataaccagtaaaagatgtatataagtatatatattttatattttttttttctgcaaaccagtgaatacacagcaaggatcgtcgtcgcttctgtttgccattgcgctatctgcgatgcgatccgacgcgaccaagcttct

SEQ ID NO: 271280 - DNA, 514 bp, Cannabis indica
ggaccataaattgattggttcgagttatttggaatggagcaagacatttgattgtatctgaagagtattgacaaagatgatcacatgactgacgatcctcccaaagaaaaagacgatttaagaaaaatatggctccgtgaggatgctcgcttgttccttcaaattcgaaattctattgataatgaggtaattagtttgattaatcattgtgaattggttaaagtactaatggattacttggagtttttgtattatggcaaaaacaacatatcttgcatatatgatgtttgcaaagccttttatcgtgcggagaaacaaaatcagtttcttatgagttactttatggcatttaaaaaacaacatgaaaagcttaaatgtgttattgccatttgtcctgatgtgaaggttcaacagtgccaacgagagcagattgctgttatgagttttcttgttaggactctcatttgaatttgctttgcaaagtcacaagttctctctacgttctgatgtctct

SEQ ID NO: 271281 - DNA, 646 bp, Cannabis indica
tttttaaggagtaccactaaccggctagttacaagatggcatgtctagaagattttaggtgccactagtgtccaatacagtattctaaattaaaatatgtagagactcgatcgatatattttgcttttaacaattctcgtgaaagcatctctaatagtgcaccatttcactaaattagtgtagaattttcacactgtttcactccaacggtacaccaaattggtgtgcaccaaaatctacaccactaatagtgttgaattttgaatctacacaaatttagtacaaactttttttttggcattctagctagcccttattttaaaaattaatctaatattttagttattaaattaaaatttatcaaaagtaataattaatttaaaacattaatatattagaaaatacaaaataataataacaaaagtagcgtttggttgggatgaataaaagtataagaatagtataatgagaatgagaatggaatggaataaaatttaagtgtataaaaaattgataaaaaaattaataagttttttcaaatcttgcattgaaagaatacttcttttattttaaaatggaatagttattcagtaaaatggtggaaaagttaatctattagaatgatatatattcaatactttaaaaa

SEQ ID NO: 271282 - DNA, 799 bp, Cannabis indica
aaacggccacggagagctgatacaatggcccacggtcttgatggcggggtctcccccatggacgaacacactgcccctcccaacattgtgctgactccggttccaggagattaggcgagacaggagctccggatagctaaacacaactacgccatggacgaatactcccgggggtatgctgaggtggaagcccttaggaggctcttgcgagttgagatgcaaaatactctcaacaacccggaataccagaatccgtgggacctaaatttggaccccctgtcggactgattcagtcacttcctcgggcccaccttagctccctttgctgcggagatgactggcgagtttgcgtcccagctcacccgttgtgcacctaaacggttcgctgcttgtgcatccttgaactccatcaacgaagtccaggatctcagccactccctcactgtggtaagtgtttcgtagttcactttttcccttattattttctttttcggagattcttacttgtattatatttttgttttagcttgttactgaagccggccgtctctcgaagaacataatcaaccatggtgttatagtgagatttctctcacctagaaactcgagaccagactcctctttaaaggacacgtgtattcagatttccagtgaaagctgaaatgtccgtgagagacttctcgaagtttagacctcgcccaggataaaaccagcgagatattgcgagtgcgacctaagtcgaaccacgtaaccataattctcattatgcagggtagatccaactcgcatgtgtcagaac

SEQ ID NO: 271283 - DNA, 611 bp, Cannabis indica
tgcacaaggaaaaggtcagcatatgaagctaagtatgaaaagctaaaagggaagtgtcgaaaagaaaagactaaccctagtaagctcctgcaagactccgcccaccaacacatccagagatgagtggtccgcaccagccagctgctcaccgacctcaggaaccagccggttcatgtgatgagccatcgcttccctgcccttcttgacctcaggcagcacgggcatgggtaggattggtgcctgcatccactcaggaatcctcctgaccagttcggacccagatgttggtggcccagactccttagaattggcagattggggagtagaaggatttgcagcagccagctcctcagaaagatcaatgacctcttcagaaggcctcttctctgaagacccctctccgaccttggacttcttggccggagggggagcactagagcctccgctcatcctcttccttaaggcgtccatcatctgtcgagacatgtctgcaaagagcaaaaacagcatggttagcaaaaaccaacaaaaatacaaagtatggaagccaagaagctgaaaaagaagtaaagcgcagactgactatctgcctagaaagtcagaagtccatc

SEQ ID NO: 271284 - DNA, 531 bp, Cannabis indica
tagcttcgaacccaaaagaaaatcaattgttcattctctgaaaaagaaaaaatcaaaacgtttgtaaataatcattgaagattcagactatgatttcaaacttgatgagaagattttaaaatactcaaagtgtgaaaggtatttatgttatttttcagttattttagagtttttttcttttttgttgtagatgttctgagttttttttctctgatctattttgctcattttaaattatttgttattgttatgtattttgtattttttgtttcttattgtatgaatatatttttagtgttttttaacagtttggcgtgttcttttgagttagtttttttttcttaaaaaaaaatagtcgaatacacgttaccccacactcattacttactgatcttctcatctccatcattttcaaaattttcttcttcttcttaagcttttttttcaatttttttcttcatttgtttgaaagattgatccatgtttgttcaattaaggtttccattacttcttactcttctcatctccatc

SEQ ID NO: 271285 - DNA, 6357 bp, Cannabis indica
ttaaaatatccaataatttaaaaatagttttcaagacaaaaaagaaccccaaggccattcttttttggcgatactcaactgtacattaattaaaaatttactaaagtggtaacacaaaaccctcaactgcatttggtgaaagcatttgagcagagaataacaagtcccactaacaacatattcttaggtatccatcttcggctccaacaacaaacagtcgagagaaaggtaatatactaatactggataacatggatatattttttgttccttgttctgccatgtacagattttgaggtataattcgatatcttccatcctgtcatgtccaaaatacaaactcatcatcaacgaccaaagcatgttgctcaatcatacaaaatagaagggagcttaacataagcaaatataacaatattacgtacttcatctgcagatttcgacaaagaagaaagcccgatcttgtttcttgatatcgaaatgatgtcttggccccacaccgaaaagctagatataccatccgtatgacctctgaaaattgtaggctgagatccataatttctgcacagaaaagtcatggcttgtgttatgcatccagcaaagaccagcaagcagtacacacaatgttgttaagtacttaataactaaaccatcagcctagataacatgttttttgcatttaccttctcaagtcccatatttttaaagtcctatcaagagagctggtgacgagcaaatggtcctctggtgcagctacctgcacatataaaggggctgaatattttagtttggagcaggaaatccatttagataagtttctctttggttatgttagacatacttttgtcacatatccgtcatgagctttccaagaggcaataacatttccactccttgcatcaaataacctacaatgacctgaacttagtcctgtagcaatccaggatggtgaaggagaagctccatccattctcattttgtctgatccacatgaacatattgaagagacaagagaagaaaatccagactccaaatattctcccctccaaagatgaagctttagaccacgggctacatctatgaacctgcaaggcaaaagttaatacttaaatattgattggtgcagaactttttctcaatctagaatattcatttaccttagagaaccatttcctgtgccaacaataagcttatcatcaaattctatttgatgcatacaagtatacagggaaccatcaaatgcattagtcagcagtccaccagataatgtgctggaattcagcatattggcctgctcagggttgatcttcgagaaagaggatatatgactaggatggtgcgtagaatccgaagattccgcaaataaatatataagttttccagtacagctattccaaacatgtatagttccatcacaagatgccactcttcccgtagatgacaggatacaaatgtcattcacaacctgaaagatgaaaaagtcatttaagttttcttcaatgtgccacaaataaatcctgagtgaggagaatccaggtctgttgactgtgattattgcagatatacattatagaaagttaattgtaacttcaataaaaaaaagaagaaccaacctcctcgtgaccgtaataactggacaatgaattaactcttgtcaattcccatttctgaactgttcctttaaaccctgcaccaattccagcagtaaataccatagactcatctcgacagacagctaaagatcttatggccccttgatgtgctcgcgtagagtatatgactgatgctctgatcttccatggatgatcatctttgagacctccaacacgaccaaggaaatcaggtccatcccagctagcagctgctttagggaaccaaaaccagggttcaaacgtatcaaagtttgaagatgcttcatgcatattaacaggattctttgatataacttcagaaatccttctttgaggcattgagcttttggtgcttctactcccctgtgactgtggaattgaccacccaaccccattaagcaacagtttagcaggatggtattcaggagttgaaccctttctgaacacaggcctcctagatatagattcagaaccacttcttgtcaattctcctgtatattcccactgaatcatgacaggctcagaatcaactttacgtgttttattcatgcacatgtgtgtgcaagtaaatgggaaaaaaaaaataatagagaacaaagtgtaccttccaactgtggtatcgcagaagatactgctctagaagcaaccaagttgtacagcattgacgaagtttctctatccctaaaagtgatgctaaagaaggatacagaagcaacctgccaatgtcctagaaaatttaaaatacattaaaggaagacaagaatttatgagaaattcaagaaaccttaagataacctagacagttaaggtggtaagattacaagcactcacacaaggtccatccggctgtcaatctgagcctcaccctcaattttctgtttagaaagcttaaagtttctggctaaagaagatatagtctcctgtgagaaagcaagctcatcaaatagttctttgagctgtggcaagatatgcaaagctgtcaattctggtccaatttgctgacaaattgataccagagtcgtcgcggcaacctaatcagcagaaacatccttagattgctgagcgtatactagagaacgggtgcaatttcagatgcacatgttaggtaatttcaagaaagactagatatggaaatccaaatcagttcaaatctgaaaatggagatgaaaaagtgtaacccatcacaaaaaaccagtacaaaaatttgacatacctgaagtactccaatctccaacccattctgcataagaatcaaaatatgcaagcaactttgatcctgcaatatcatatattcacgggatattctctattactcttgcaaatgttgccttatcagtttacatagacatactgtatttagaaaagaataagacacgtacttcaatcagctcctttgtaaccacctcctttggcaagaatacaaccaggccagtgattgtcatcaaacaatcaataagagccaaagcgctccagctctgcacaggttctggtttttccatattcgaaatgctaatggaggaatgaacaacaagttttagcagtggcagcatctgtctgacgatgaaggtctcccctaagagactccctgtaatgtgaaagcataaaagcaatttaaaagcagaagacggtaattccgggtaggcactagagcatgaaaaaactaacaaataataccaattctaacaagcacatcaattccatcactacagagtcctttcccaaagcagtgaatcagaggcaagatcgtctgggttgaactaaatggttagtatcccagtaagaaaactacttaatatacaaacagatgtgtagatcgcaatttgtcaacatttaaaatgtgcagtaatacaacctgacgaacagtaataggtacaccaagctcttcactagaaccaattagcagtacagcagcagcagctgccgaactcttatgagcagctccatgcaaatttgatataaccaaaggatgtatcatatctagataagtttgtctgccaacctgattccatatctcacgcattaaagagttctgtagaagtgaaacctttagatgtgaataacctgcagtctgaaatgaatgtctatataagcaaaataagccagcaagcaaaaagcacaccaaagtaaatgttacaagaaagtcaactacaagcctgtaatatcttctggatagcaggcaaaattattttcttcactgatataggtttcaagcattttattaattcctttagaagtgaataagcccattccgcttctacatctgataaaggagccactacaagtgataggcaattacgagcagcaaattcagctgctagtggtcccattgccttcagggcaccttgcttagcaaaagttgcagcatactgtagacaagatccatgtttagctagaagttggagcggagcaagaaataagtaagaggtcttgattgttgcagaaaaaaatggtgattccaaaagacatttggctgacggccgcctacataatattgaaatatgaaagaaaataacttgagctgataagaaacaaaaaagtgaatatctccacctttatatttactaataaagttattgttaaatgttctaaataaaatagggaagtatattacatatacagtcagtaagataatttaatagcaacgaaattttgaaagataaataagtaataccttgtccagtctttctcaatgcacgcttgaacaagtactctaacgtgaggaggaagttcaaacattaatctaggtaagacactactttcagtgtacatggccattgaagctgaatcaaagagtggttttcccaagtgaagttctgctaatatacaaccaatagaaaatatgtctttcgcaatttctacagatgaactcgtggaacaaaatgatttctgcccccaaagcagcaactcttgatagctcacagaatatacatctcctacctcaagatactcaagaagagaatttgtatcaatagaaaatgggaatccacggtgtttcccagaatttgattgctggtatgtatgcttcttaaaatcatcatttggaggatgttcaacagaagaaacattcttatcataatattttgaatgggtcccatagagagcactcaaattcgtagcatgttctacaaatgtagatgcttcttccaattcttgtaaagaatccacttcagagagtaaagaagtctcactccttgattcatttacaccacactgatgtatagattcatttgacttcctcacagaaacctgacgcataggatgtggtcgtgtaaagagttgacggcgccccactgatcttggcagcatgggctctgatgaaggaagcattacattctttgcagcaacagctgcttggccagacattttgtaaccaaacataatatcaatccattgatgtagttggcgtgagacccgatcactttctaaagcatcacgatgcaatttaataaactcttctgcgctatctgcccaagaggggacagccaaatctgtcatcccagcatgtagggaacagaatatttggggatcacagtaaaactcaggaatgcactcatcgggcgtccattggtagagtctttgcatcgtagaaggatattcattaggctcgtaaacagagcgaacggccatacgcagaacacttaaaggcaacctccttgctttgtaactacaaacagccaattcagaaagacactcatcagatacatgatgagggatctcagaggttgaataggtgaaatccaattgttcgtcgcctttagccaaacgccacttactcttgctcaagtcacgccacccagcatcagaattctcatctggtttcgtgttgaaatctattacccatggcatcactgtatgaaacgagtaatcaccccaccttctcccagctaatctattcaacacaagtagatactcaaaattactcatctctcccctccaccacaacttgaaatcacgttgccagtcaacagaagggaaaagcttcaagtcagcataaagagattgagaaggacagtcctctacacagcatcccaacttttctgtggatgcatcatcttttgagcttgagttgaatcctgaccagccaggctcatcacatacgcgcaaccatgcccagcatgattcagtcaacattacactagatggggtcatattaccatgggttacccctaaaccatggacgtaagccaaagctgagagcagctgataaatgagaaagttgatatgccactcagagttcaaagcattggggctgtaatggaggatgttctccagggaaaagggacttttgggaacaattaaattaacataaccatgacatttcaccattgcaacgacaggagctatgtttggatgtctcaaagaaccaggaaagtcagtgtactcgaaagagggcacccctaataaagctagcaaattgagactatctcgacccgaagctttcccttcaagaaaaagactaagagaagacaaaatatgatcttcaaggtaaagatatgagtttttggaaagaagatcgtcaaaaatagagccagaggtatagctagtaacatgagcaagaggggccaatgccgtgattatccttgcacaagagaacttacccgaatgagcacatgaaccactccgcagccatgtgatctcattggcgacctcagcttcactttccttatcaaaatcttcttgctggttttgtatatagtcagctctgcaaaaaaataaaaaaaaaaaa

SEQ ID NO: 271286 - DNA, 553 bp, Cannabis indica
agcggcaattatatctaatttatatttttagaatttttgtaagtatttagttctttaagtgttaaattaatattaactttttattagtatagttaaatgagtttttaaatgaaaaaaaaaaatttgatgacttggattaattagagattgtcatgttactattgatctgataaatataggaatatgaataggaatgtaataaaatttaaaatgcataaaaaaattgataaaaaaattattaaatttttcttggaatggtttttttttctttttaaaatggaatagtcattctactaaaatagtggaaagagcatttcattggaatgtaattttaatactttaaaatgcaatcaaaaaaggaatgaaatgaaaattgttttttttctattctattttattttattacttccaactaaacgctatataagtatttatggaagttttataaatataatttaattattattactgtaaaaaaaataaaaaataagttgcctttgactgattttttcagttttgaattgattagcaatttgaatttgaattcaaaatt

SEQ ID NO: 271287 - DNA, 921 bp, Cannabis indica
atgtctaggttctatagactcatcatgcgatgtccacaaaaggcaactattcaaaggacgacaaacaatcctaaaacataaatgataaaacttccgagattaacatcagaacgtgaacagtcaactcgcagatttggaagacgcatacgttgatgaacttagtaactgccattcatttattaatgttaacgttgtttagtttaattattgtaattcaatgtgtaaaaacggattgacaatgaatgcaatccttgtataactgatcggacacctgctttgtatataaaggggtgatccaccgtgaaatggcacctacgaaactcttgctacagtggactaagcagaccgtgatctgactgaaccactataattctttgtctcatttttatttccagctttctgttaatcatttctcattcccagtttgagtactcgccactctaggttgaatactcgcacttgttcttcatatagatttctttctgctattaataatattataaaaaattggtgttgcgaaattcactcgaccacatttggcgccgtctgtgggaaacgagaattgaaatattattcatttcaagtaagaataccatcatcgctggaaatcaaacaaatggaggtgctaacaacgggtccatcaacatcggaatgatgaatgtaccgttatctggagctagaataccacctgtggacgtcgttaatggcagagtagggaggagcaacatcagacctctcaatctgttccctgaaacagctggtcctcaagtcgaggaagcgtccacaccaccagcaaccatgcactttccacccgtcactccggcggtggtatatgagggaatcatccagctcaccactgatcaatatactgcgatccagggccaattgcgtgcactacaggccaaagtggatggacaaaac

SEQ ID NO: 271288 - DNA, 1844 bp, Cannabis indica
tacaagagtaatttgtggcgtaactgatctttcaatgctttactgatattcatggttaataatcaagtaatagtaatttatgctttactgatctttcaatgctttgaagaactgtgtatacatgaaattttccttgttcaaacccttgaaatcactcattacctaactgatacggtcacaaattcttatctctttctaaacagctagcaatgaaaatttggttcttttcttttgaactggtttcagttcatgatatgtgttagagttagagcttgagattgtttgaacacctaatagatgattagtgaaaggaaagagataaaagggtacttatctttcttctgttgtaggccttgaaccaggaactaaatatttttacaagtgtggggatagctctattccagctttgagtgaagaacacatgtttgaaactttgccaaagcctagcccgaatgcatatcctaaccggatagctgttgttggagatttgggactgactagcaatactaccacaactattgatcatttggttcaaaacaatccctcaatgattttaatggtgggagacttaagctatgccaatcagtatcgtacaactggtggcaaaggagcaccatgcttctcatgcgcctttccagacgctcctattcgagagacatatcaaccccgttgggatgggtggggaaggtaacctttctaagaatcttaataaagtgagataatttaaaaaccaagatggcatgactttaatactatggtgatatattacaccttgattaaattttctacttttcggattttgtttttgttatgtagaagtgtggttgagaaagtaggttaggatttgatactcgttaagaatgtggaagtgtagttgaaaagtaggatagagttttgtgtatggtaagatttatggggttccatctaaaaagtaactgacaaattagcctgtgggactctcttaattttcattttagctaaacataaatgttgacacaaacatttcttgttacttagcagaggagagtaatttgttgatatgctcattacagttaatcaaaagggaagatccccttttgagtatgtaaagatactaccaaaagtgacaagcaatatatgtcaaaacagtaggaaattaaggtgaattgataagaacaagtgtaaagaaatgtgatctctctatctaacattcatgtaatggaatttcaggttcatggagcctttaatttcgagaattcctatgatggttatcgaaggaaaccacgagattgaacctcaagtttctggaatcactttcaagtcatatgaaactagatttgcagtaccctcagaagagagtggttctaaaagcaaattttactactcttttgatgctggaggaatacattttattatgttaggagcatatgttgactacaatgccactggtaacttaaatactcttcttttacaaaatctttgatgttaatagttttagctttgttgttatcagtactatagaagtttgaactagtgtttatacaagaagtagcttccatttaaatgtctgttttagggcctcagtatgcttggttgaagaaagatctcgttaaagtggatcggtctgtgaccccatggctcgtagctgcatggcatccaccttggtacaacagttatgcttctcactatcaggagtttgaatgcatgaggcaggaaatggaagcacttctatatcaatataatgttgatatagttttctctggtcatgtaagctgaatcttattctgttttctccaacttacatatcatgtcagctcggtagccgtgtaatgagaaatcctatcatcctacctattacttatctt

SEQ ID NO: 271289 - DNA, 622 bp, Cannabis indica
tcctaactgatattcttgttaatagacaaagttaaatatgtcatatttaactataaattcctctttttcttcttgtattattataagggaaatcaataatgggagattttgtgggtcaattttaagattgtgttactaatttctctcgatcacaaagtcacctacttgtgtatatatatatatccaaatctttattcattggcatatatagtcatttttcttttcaatcaaacttttagataatttatatatatataattgcatatatggatcttttgtaatcttgtcacagcagaatcaagtgcataacaaatcccacaatcgatttcaaagttgaactaatttataagatcatattattatttatatggatggccgtactttcttaattaaaatcattaaaaattatcttaaaagaaaaacacatcaaaattaaatcatatagtattattaaggatgatagcttcattcaattttcaaaccacgggtgccatgatttttgtatttttgataatgttgttgtggactagagagatttatatatatgaggaatgtgatgatatgcaaagttgaatatcattttttgttgtatttttaactcaattttgtttagtaaaccgat

SEQ ID NO: 271290 - DNA, 1577 bp, Cannabis indica
ctctgatgtaagttactacggtaacaaatacacttttcgatcaataaatggataaagatagttatttcaaaattcaattgattcgaaattatcatcatgtttctactttaccatacaatgcgtacaaaaggtttggtcaaacccaaaacacagaacagataaataatatatttataaaggacaagtgaccaagagtcatacgtctgctcggtcacttggggggcacctatacatgtacaaagaatgaaattcattaaggataacaaaagcacgtaataccgggattaaaagatgcccggtcaggctgttgtccaaaaaatgaaaaataattccaagtttaaggactgcttggccggtcatgatgtcttagaaaaggccctgaggccgaataagatatataaaataaaccgataaaaagagaagtgtttaagcagctagagtcccaggctcttggttcggttcttctgggccaaccgaagcaggaggatctgttgtttgaataggaggtgcatcagttgtcttatcgaaggttgaagtagctgcctcagttttgccataagccacttgggacgcgtagaactcaaggtacatgtccttagcatcgcccaagtagtcgaaattggcctgaggattagccttccaaaaatcaaagaagagctcgagaccagcagtctccaaggcattgaccttctccttcaacctgtccacctcagccgaaagctcctcctccttgcttccttttcctccttcatctgatgaggaactgctcaaagggaagtcctcttgttctgaagactgtttacctcagcagataaggtctcgatggtctcctcaaaacggtcaggaacctcgagatccttagtcagcacagtgattttcttctgagtggcacacaacttcttcttggcttcacccaattccaactgaacagctccgacatttgccctggcttctttaacatccttccttgcaaagtcaacctccaccctcagggtgtcggacagagccgtgttcttggaagcagcagacttagcctgggagtaagtgtaagccaacttcttaccggcttgcacaaggaaaaaactttagcatttgagctaaatatggaagattaaagggaagtattaagaaagacttaccctggcgaacacttttaagactccgcccaccagcaattccaaagaagagtcattgtcagcaccagccagttgctcactgacctaaggaaccagtcggttcatataatgggcctattctaaggaaaagacgcctaccagggaagtcattgatctttctgaggacctgacagttgcaaacccctctactccaaaaggtgcaaagtctaaggagtcttgaggagggagtttggataggtctgaccaatcgagaggtgggtctgagctggtgcagacccctactccacctttgccagtgcttacagaggccaagaaaggcaaggagatgctcgcccactatatgaacctgttggttcctgagattagtgagcaattggccggtgctgacaatgactcttctctggagctactgatgggaggagtcttaaaggaattcacaag

SEQ ID NO: 271291 - DNA, 1358 bp, Cannabis indica
atatatcaaccacattcatatatttatattctttctaataatataaaatatataggtatattgtctccgattgtgactctgttggagttttctatgatactcaacattacacctccacacccgaagaagcggctgctgatgctattaaagcaggtgattatcacaaagccattatgcataataaattattaaaagacaaattggaatgacctcacctaataatcataagagagactagaaaagaaaaaacctcactaattgtatggtgtagtaacaatggtaatgatgccattttctaatatgttaaagaaggacttcggatatcaccaattccgtacctgttgttgtggcctggtggtgggatggaacgctgactcttaatttgaattgattggattcttttacttgggaaaaagaaaatgacaaggttaattagaatctattgaaaatgtcaagtattgtacttttatgagaaaaagactatgtgctagtacgacaaataatgtaacgtatatctatgcatatccaaagcatgacaataattggggtgattttgttttctgataaataaatgtgggcgattttgtattggtggcttaggtttggatttggattgtggaccttttctggctgttcactcagaaaatgcagtgaagaaagggcttttgagcgaagctgatgtgagtaatgcattgactaataccctcaatgtccaaatgagactgggtatgtttgatggagagccttctgcccacccgtatgggaaattgggcccaaacaatgtatgtactccggcccatcaagagctagcccatgaagcagccattcaaggaattgtacttctcaagaaccaaggcccttcactacctttgtctacccgccgccaccactccgttgccgtcattgggcctaattccgatgtaaacgtcaccatgataggcaactatgctggtacgatttgtaaaatatcatattcttttttcaaaaaaaaaaaggttattttatgataaatttttaaatattatgggaaaccttttttcttttttatgcataaaaaaaaaaatcatcaaatttgtaatttcttctctctttattaggccagcttgtttattcaaatgggcctctctcctaaaaaaacctaattttttactatttttggtccgtttataggtgtggcatgtggatacacaactccactcgaaggaatagaaaataacacaaaagcaatacaccagcaggttgttcagacgtggcttgcactggaagcaagtcattcaatgcagccatcgacgcagcccgtcaggccgatgcaactgtttgtataatggccgttgtaccagtccatcgaagctgagttc

SEQ ID NO: 271292 - DNA, 1049 bp, Cannabis indica
aataaaggaaaaagaaatttcccaacaaaaaataaggaaaaaaaaaataaaaggaaaaaaaaggagaacacactagtttaatatatcgagtgtgaaaaaaattagaacaacaataatattggtaccaaaactgtcaagatttacatgagagttaactaaaaaaataataattcaaataaaaaaaattaaaaaaattttaattattaatattattttatttttaaaaataaatatataattaaatattattataatatgtataaagttttaaattgtatacaagcagtcttattgtaagagtatacaccttatatcttaataaccacatgatctaaaatcaatggttaaaaaaaattccctaccggtaaggaacttttgctaggtcctaccatagtcttgccctatatatatatttatatctagtataagatttttaaaatttaaggggggcacagcctctgttggggtatatgtggcttcgtccctgagtgtacacgtgacaaatttttaatggtccacataatattaattattaaaaaataatttttatagtggccaaaaattgctctaagcccaacagaaaggcctaacgatcgaagtacttacaaagcccacttataagtcagaaacaaggaacccgtaagcccaatggctcacatgggccacacccaatccatgccttttgggtcatacccatattcgaatgtccaacccacaataaagcttgatcttaaagtgtaatgttagggttgacgcgtggaggaagaagaacgttaagtttcccaactaacccacgaaaatagtgatcttccctagcatagcggagcaagaatatcaaccctctaagtgatacgctaaggggagggcgctcatccaggaacgaacctaaaagatgacgctcatccctggagaagtgggggaagaccgtttctctagggacggaccacgtttcaagaggtagccgttttcctaagataataaataggcccacactgggactgggtgagggcatcgaaagatatacgaatattcactctctctctctatct

SEQ ID NO: 271293 - DNA, 2109 bp, Cannabis indica
gtcggagggtctcataatgaccgtcctaatgagactaaaaatgtttgtttcatcttaattttattctgtattactacatgcaaaatgtcatcatccaagtattcaaattgctgatgaacgcgtttgttgtagcaagccacttgttgcactacgggtccttgttaaaaatgaggcacttatggctggcattctcagcctaaaccgcccaccactagaagctccggcattcatgtcttctacagcaccaatcccattgataaccccacggtcgtttgatgactcgacagcttctgaaattccaccaacatcctaaaagacagagggaatcgaaagttaatttcagatcaaaaaatatttgcaatgcaggaattatcttattataacctcaggtgttcaataagataatatctaatgtaagcaatcctcccaaaaatcctgagctcatgataagttcaacaaacctggtctgaaccactggaaccaggagaagacattggatcggacatcaaaagaggcggcaaagactcagtctgccaagcaaaagcacatgacatacattcatgaattcagtgaagcacttctcaggtataacaagttgccatatataactagctaaacaaacatctattctgaatggtctgaataccaagttaagaaggcaaataaatgtgcttaatacagttaacctgacaatttgtggctattcagccaataactgaagattaattaagagcactgtgaaataatgtttgagagcctgggaactgaaattacccttgtcggagatattggcggtgcctcaagtgctggccttgcggagctggatgatattgtctgtgtattacaaggaagaattttagcttgaaaagtgtgcggaaataaaccatacaaaaagtacaatccaaggacaaagcaatccacccattagtttaaaaaataccattgttcaactcttaaagaattggtcaataataataacccaagaatatgagagtactgcacataaatcaggaatcacctagaactgaattatgaaagctaaagtatttagaaaagttcagtttatacatggcagagtgatataaacagttcaaaagcatatagcattgttcaactcttaaagaattgggtaataataattacccaagaatgatagtactgcacataaatcaggaatcacctacctagaactgaattatgaaagctaaagtatttagaaaagttcagcttatacaggagagaatgatataaacaagttgaaaagcatatttaaatgcttcagcattattaatgtacgaacgtttatgaaaccagaagttgccaataaataaaatcctatagcatcaataaagaatagcaacacatcaagcacattcacgtgaataaagtaaaaatcccaccttaacttcagtggttctggcatgttcaatactctgggcaacatcacacaaccttctaactccttcattagtaagattctatgtaaatgaacaaaaacccatggttacaacaccataatgaaataatttagattgtaatgtcttttttccttttaaaattagaattgtaaatcaagatcatcattgaacatacctgcttccattctatgctattgattttagtttcctatgacgcaagggggaaaaagtatcagtattgaaatccacattcataaatccagtcaccggagtgaaaaaattaaatagaacatccaaaagaaaatagattaccatagctcggacagcattatgaacagatttaacatcctcaccaattgtattcgttcttccccgtagtccagaaacctaaaagcataaataaatgtccatgaaaaaaccctgtaaaaaaatgggccaggggatagggttgttgaaaggatgggagtctaaattgctgctcatatcttcaccatgctcacctcctcttttgtcctactagaagtttcaagacactcctccaaaccacgatctaggccatctatttgggaagataactttcgtttagtagcctgaaaaaagaaaaacaaaataatcatactgttgaaacataaaaggcaaggcacagcattcgagtgatgctcatttttgttttcttattattttcaaagaa

SEQ ID NO: 271294 - DNA, 540 bp, Cannabis indica
ttgattccacttcgagatgcatcgatttgcttgtacataagaaaatgttaactgaaaaacattaaaacattccagcttataatgattctcccccgttgatgtcacatgtttttttgtggagaggcaccaacccaaaaacatagcaacatacatagctcctagcttaaaatgactttatttttgtttcagagagacctactactaacccaatttgcaatgaggatattaatttattaacctccatatatttacttatttactttatttactcataattctatccatgagttgtaggggctccccccagtggcggacctaggatttaaagtgagagggggcgtaaattttttggtaaatgaggggggcaaaaaagtatatttaaaaagaaaaaaaaatgcatttaataggattagaactattttcctctaacttatatgctaagtagcttaaccactacaccaaagttaatattatgcttataaatatcatcttttattacaaatatatgttgtaactaactaaattgcatatatatttttt

SEQ ID NO: 271295 - DNA, 1224 bp, Cannabis indica
gttgactgcttcaacttgaccatttgcttaaggatgtgtcactgcgaagaaacttttgatgataccatggttcgcacaaaaatcagtgaaggactgcctgtcaaattgtttgccgttatccaaaactattttgtacggcaattcgaaccaaaaattatgttcttcacaataaagtcttgaactttcttggatgtaatagttggcagtggttcggcctccatccactttgtgaagtaatcaactgctaccactgcatactgcacccctcccctgcctttgggtaattgtctaatcaggtcaattccccaaatggcaaagggccacggactttgcatctgagttaactcgttgggcagagctcgaggtatcttaaaaaatctctgccatttatcacatttcttaacataggcctttgagtcttcaattattgtcggccaaaaataaccttgccttaaaagtttcttagataaactctacccagcggcatgatttccacagaatccatcgtgcacttcagatagaagtcctgcggcttcttcttgagtaacacatctaagcaacggcatggagaatcctcttctgtacataattccctctactatgatataccgtgctgccttcctcctcatctttcgagcttcattctgattacctgggagttccccagtgttgaggtaggcgactatcggtgtcatccagtttggggaagtatcaatcatttcgatctcttccgtgccagtgatgctaggctctttgaggaattggataggaaccaagttcgccttatcacttacattattgcttcccaatcgagctaacgcgtctgtagttgtattttcttcccttggaatttgtttgagaccgtagcttttgaactgtgtgagtaggtcatgtattttgctcatatatgctatcatcttttctctccgagcctcgtattctccggatacatgatttaccaccaattgtgaatcactgcagatttcaatgtgctcgactctcatctcccgggctaattttaggcaagcgattaaagcttcatactcggcttctttactagatgccgtgaatcaaaattttactgcagcgtgcacgtgttgccccccaggcgtgacaagggcaattcctacaccagatagctgatttgtagccgattcgtccacgtgtagtttccaagtcagcttgtcttcactgttacttggctgaggtgtttgtaccagctcg

SEQ ID NO: 271296 - DNA, 2364 bp, Cannabis indica
aatgaaatgtcttttccaccattttggtggaatgactattccattttaaaatagaacgaaaaaccattctaatgtaacatcggaaaaaattaacatttttttatcaatattttttatgcattttaaattttattccatttctatttctattcctattcctcccaaccaaacgccaccaaactatctaagtgttgttgatttgacttactttagtagaataaatgatcctatatatataaatataatataatggagggtgttgatgatgtgattctgaagatgatgatcataattgtgatcacaattatgttaactatattctataataccactactgcctcttattctcattcttcatcttgtggaaatatccataatataaccaatcctttccacgagggattgggtagggtttctctagtttgcatgaacaacactaccctcctcctcacatcagatcagtatccttacaatttaacagttgtgggaatcaattacaacaactacacaattagagttgtgtactcaaatctccacaacaacaagttcaaggatgattgctcctccatccctagccgacgcgactgcttggattatatgctctggtactatggtttggaaatagtaaccaggattggagaggatgggttatttgggtggagaaaatttaaaacttacccaatttcggagtacatactattcataagatgtcaaaacaaggtctacaataatcctctttacatagacccatctccttgcataaatagctctacttttgggatcgggtctgggtctgggtttgtgtacgtggtgtacgcttctgggttcaagtattctgatttgggtaactcttgtcggatactccagtcggccatcgtaccggtgaggacagatgaggagaagaagaagaagcttaatacatcctacaaagacatccaccataaactcaccactggatttcagctttcatggctccaatatgcatcttctaatgcagagtcctgctacatcgataaaaagtccaacaataaggttgcatgtgttgatgatgattgcatcgataggagagggatactactaattttgtgtagtaaggactattaattaatttctaataattattaaacatatagataataataaactgatctgatatgtatgcatatttatacagggctcaggtattaccatattcgagattttctgaggaaaatacatcaagtctatggtgagtgataattaagttttattatcttttacgatctgcatatctaaatatatttctaccatcttattttcctaattataatataattttaattggtctcttctttttccttggttagttgacccagatgaaccatattattatacaactctagagcgatttctcgtaattgctcctcgtaagtaatatctctatttttaatttttatagcataatgacttatataataatattttaattatatttgtatatttactataaaaaattcttacttttagttacaataaaatttattaaatgtaaaaaagttgtcactaattaattaaaaattatcattccttatgactaaaaggttaatagctaaaagtattagtcacaaaaattataatttgttgtgactaaatgtattttaagtcacaatacttacgttaataaaactaaattaatcacaacttgtatctaaacactatgttttagtcacaagtaatttttttttgtgactaaaatttacatttagtctcaaaaaatttatattatgagtaaaaaattatcaataaaatataactattttttaccgtgattattcatgtttattaatttagtatatatacaattacaacaaatagttgcttaaagtttgaaaaaggtcacatataattgtgccaatgaataatgatatgtccaaagcttctataaaaattaaaatatttagaattctataaaatttcattttgattcatccaaatcttgtataccaaagttgtcacgacccgagccctaggctgtggcagatgtgtaatatccataacttgggtggtcaaaggtcacactttgacccttgtaggaaaataaagcttataaatgatccttttatttatattacaaaatactaatttaaaagaatggattaactcctatattaataaaaatatattagtaataaaaatcaggaccactcatcaatataagagaacagtaatatccccacagttatgtaatcaccaaatagatagatttaataagtcaataaaataccaaaataatacctagcatccatcatttctcatttctaactagtacatagctaatttaagtcatccagaccatccattggttcttaaatacaaaatcagtct

SEQ ID NO: 271297 - DNA, 756 bp, Cannabis indica
tgttgttttaagtttttctaccattttttagcaaccagcttcgcatagtcaactatgtcgaatttgtcgttttcacattctcttgtttttaactctcctacttcttctaattggtgttccaatgtgtatgattatgttgttgcggtgttgttttccagtattgatgtgttgttttcgagcattgccacattctcttgaaataattatattctttttcccattgtccattgctctttatgagaactggtatagattctatgtcctgtcattttttacaatatttcatttacgtggcctttttttcatattaaaataacagtaaaataacactacaaaacaatcacaaattgttttctggtgtttttttattcttgggcttatccctataattagcaataaatttgtgttactaaaaaaaaaaaaaaaaaaactttaaaacaatcttgatttttatattgtacattattaatcgtttcttaggaataatatatgtgaatatttttctttttaaaattccatgtatacttaaacaatttcaaattatattgttttaagtttttttaatgttcagatctaaatttgggtgtgttttttctagttttttaaaatttaaaataatgtgggtttaggtgtgtttacctctgttgtttctttctgctgtaaatattgttgttcgttcttgatttgttgttaatttagtaattttttctcttcactagattttatggttttaccctggtgtttctatgattccgg

SEQ ID NO: 271298 - DNA, 1486 bp, Cannabis indica
atcattcaaaaaaaaaaaaacaaaagtgtcaatttaattttttgcaaaacaccacaatatttactctttgttttttcttcaaattataaaacatggcaacaagtatttttttttccctgaaattttattaaataataaattcagaaaaaaaaagagagattttatttattcagaattttcatcttagtgacgatacagatccaatgaaaaaccgccacgtgtaaactcaacctaccagagtgcgagtagacatgactggagcgcgtgagaaagattcaacaactgaaatactgtcacgtgtggtactaacacgtttgtcgcgttccttctctaccttctctgcccgagtctcctttaaaaccccatttagtgagagaagctttcctcagaagctagagagagaaacaaaatcaacagagtagagagagagagagagagcttcgatcgacaatggcgtctagggtttgtatttcctttctcatttgcattctctttgtttcatcgttgaatgtgatttcagctgaggagactgaatcgaaagaatccgaaaaggagtttgttctcactttggatcagtctaacttttccgacactatcagtaagagcaaattcatcgtcgtcgagttctacgctccatggtatggatttttattaattttttttgttttgatcggtaattttgtggatctgattcctcattactatattgtatcctagatttacgattttcttgggaatttaatgtttatatttgaattatcgagcttatttgagtttttattgttgtgcatgcaatggtttaatgatccttcatgtttgccttggctgattcaatttgcgtgattttcttataaatatatacatatataaatgaaatgtttactgtttgggcactagagtagtgtgtttcctttattcaaatccatcgatttatttataatttatgtttaattttcattccccttttcttattttttttaggtgtggacactgtaagaagcttgctccagaggtaagaagcatttatataaatttatctacaaactcatactttttgtattatcaaattatctaaacgtcaatatctattacattgcagtatgagaaagctgcttctattttgagcagccatgatccatcagttgttttggctaaaattgattgtactgaggaagcgaacaaagaagtcgcttctgaacatgacatcaagggtttccccacacttaagatttttaggaatggtggtaagaatgttcaggaatacaagggaccacgtgaagctgatggtattgttgaatatttgaagaaacaaagtggccctgcttctgctgaaattaagactgtaagagatgccagtggtatcattgacgacaagaagatagtcattgtaagtgctcgctgcttatgttatacccttatattttttgcctcatcatccttacatggcatggaattaactgcttttgcatttgcaggttggagtgtt

SEQ ID NO: 271299 - DNA, 430 bp, Cannabis indica
atatatatccctacaactcaaaagtcacatgagccattatataaatacacagtaacagtcaaaacccaaaaataaaaccaagtatttattaaaaaacgtaactgggagaagccaaaaaaaaatgcatgtaaatgtatatataacccaaaacacaaatatccatttatacatatatatatatatatacatacacacacaaataaaaacacacacaaataaaaacgtgagtaccattctttttttttggagagaacgtgagtaccatcttagaatcaaacaaaataataataaaataacataacatcttcctttcatacatatatatatacacacaaatagaaactaggaatcaaacaaaataataataaaataacataacatcttcctttcatacatatatataggggtgcacgacgggtcgggttttcgg

SEQ ID NO: 271300 - DNA, 864 bp, Cannabis indica
ttttgtaaacttttcccattttacagtatattttttttaattccccctaattgtttggggtaagttgaaaaatgcctcttttattcatcaattaatcaaatttacctttaattttatatttatttgaaacatacctctttttatatgtattgtacccaaaatacccttacataagagaatcacatggagagtatcttaaagtgacaggggtaaaattggtacaatgtttaaaaaaagaggtaaaaatgatagaatttaaaaaagaaggtaaaaataaaagaggacaatataaaaagggtatagagtgtaatttcctctaattgttttgaaattcttcacttgcaaggacagacctgagaccacaatacttaagcccaatccattttgggaccaaacatttcacaaatatacgcatttctaattcttctagccaaagaaaaaaaggaaatacgaaatacgaaatatcttctgcctccttatctgtccaactttctcgttcgtttcggtttataggccatagctatggctgccaatctttctctggcgcccaaaaccttactatcagctccccaatcctctctctcacctcgtcttcatcaattttctcctcaccctttccgattcgtctctgtgacttggtcttccactcgctctgctactccaaagctagccgttcgggctgcgaatgacgccgattactcgtccaggagaagcaacaaaaacaatgagcagagggagacgattatgttgccaggctgtgactacaaccactggctcattgttatggagttccccaaagaccctgctcccactagagagcaaatgattgagacttatctcaacactctcgcaactgttctcggg

SEQ ID NO: 271301 - DNA, 1164 bp, Cannabis indica
acttgattgctcaggagaaacctgacacgtcccggagatgccttaacgttatttcgagcttctgggagcatatggggttccgtatgccttctccaggagctacatcctggaagctaccttatagcataaagacttagcaaatattttggattgtacattgcttgatccacgcgtccttattcggttggtccacgtatatttggaaaaatcaggggcaacaaggtcgtattggattgtattatattaaattgtattttatgcaatatttttatgtaaaattatatgtggtattaacttttatgaacacctaaatatataatattttagtataaattaaagtttgacatagtattatataaaaatatgatatataattcaattcaatataatacaatacgatctaatacgacgttccaaataagctcaaaatatctaattttttcacatcactccaattgaagtaggtaaaatagaacacgtgacctaaataaatatacaaacaagcctattagttgagtattaattttagagctgtgtcaagcattatcatatgagaaagtaatgtaatatcttctatgataattaaataaatttactcagttattatagattttatttaaattaactacaaatacttgttataaccattctaaaaaaattataataagccaataacatatgataatctgatacattttcgtgatattttttctttttatttttgaaagaacattgtcgtgagatgaacaccacaaatatcttttaacgtttcactcctcttaattgtaacattgtataaacgtgattaattaattaattaattaattaaattgagtgtactgatggacataatctaactcaacctaattattaaaaacaaaaataacaataataataattattattatattattatatataattatctatacaatctcacaagatataccagctcagtaaaatgatatcaagatattttctcaagtaaaactattacaactaattaatttaataataataatgaaaaattgaaggagcaaagcactctgtcactctgtcactctatctctctgtctccttctttctccattgattcaagctctcatcttcagagtccagaccagataccattccttctttctctccttctctccctctctctct

SEQ ID NO: 271302 - DNA, 796 bp, Cannabis indica
tttcaaactatttttattgcaccaagaaccctcacgatgcatatttacactaaagttcaaacctgtcagcaaaaaaactacaaaaatttacaataaagtggatgttataaagcttaaaaccatgtgcaatgattctcacatgctagttaaagcctataccccacaaaaatagaaaaatagtttaaataacaactttatcctgccccaataacctcaacaggtcaaataaatgtgtacacctaacacaatacgttcaacccaatttaaatataaaactccaacaagaaaaccatcttcagtgaatgaaaaagaaaaaaaagagagtaaaaatttaagaaccattttcagtaaaatagaaagaaataaaaaagagtaaaaaccatttcaactcactcagattataaataaactatcataaatcaaggagaagggaaaaggaattgtacctccaccatccttgtcctccattgtccaactaatttctaagcacctatactgtcgtctcttcaagttttatgaatttagcttaggaatgagaatcaattagagtcgatatggacaaaattgattggattttagtacttaaactggtgttgtcttcaacatttaagggtttaggtaggatgcgatttagggctttgggtatggaggaattgagtgtcgagagaaatagttctgaattaatgttttctaatttttaaattatacatttttttttgtttttgttttaactctaacaatttaattaattttaattttagttgttagctttagtttttaatttattttagtcatt

SEQ ID NO: 271303 - DNA, 1734 bp, Cannabis indica
aacccatgtgaaggcctaatagcagcccttgttctcttctcttcatgcttgagatcacacgaattcaagagagaagagagagagaaaatttcgaaatccttgtaagatgagtagtgcccacacacatcaagtggtacctcaatcatagtatgtaagactatggaaattctgcatcaaagaaggagaaaagaagatccaggttcagttggtgatgctctgctacagaaaggaatcaagggctagagatctgaacggaaggagtcatattattccgctgcacccaatgtaaggttttctaagtttatatgtgtttattttcattgttttagaattcatattaggttgttaatcaaaaatacttgttagtaaatcttgatcctggtaaaataattccaacatgaatgaacccaaagcctttcttactgagattgatgacaatgatccacctcaggctcactcctccactactgtccctgactttggtgttgatcatgactggtacaccgatacaggggccacgaatcacattgctcaaggcatggaaaactttgacactgaaattccctattccgggtctgaaacattagctgtgggcaatggtaagagacttcctattactcacctcagtcatcctttcttaccatcttctagttcttcccattctttagagcttaattcaattttaaaagtccctaatattaagaaaaatcttgttagtgtctcaaagcttaccaaagataataaagtatttcttgaatttcactcctcttgctgttttgttaaggacaaattcacagggaaagtcctgcttaagggaagggagaaaaatggcatgtacatgctctctcatcacacttttcctcagcctcaagttcagattgaatgccatttagcatctaagcaacctagcaacaattatagttgtcataatagtaaaatttcctcatccatagtttgtaataaagagacagttcccactgtctctactacttgtaatcattcagacagtaataataaaaatgcttttattgcttcttctatttctcatgctcctgttgtcttaatgtagcaaaaaccatagatgttaataaatggcattcaaaacttggacaccctggtttgcacacactgacaagagttttatcccaattgaaatactcgggctccattaaaaatcttaccttttgtgcagcctgccaacaaggcaaaagtcacaaacttccctaccctatatccaactctcgagcctcccaacccctagaactaattcatacagatgtttggggcccctctcatatagtctctaaggatggttatagatattatatacactttattgatgactttagtcgatttacttggatttttcctcttcatgtcaaatttgaagcttactctacatttcttcaatttaaaaccttagctgaaaaacaatttcaacttcccataaaaaatgtccaatccgactggggaggtgagtataggtcttttgcttcattcctcacacagcatgggattcagtttcagcacccatgtccacatgaccatgaacaacatggacgagcaaaaaggaagcatcgtcacatcactgaaacgagactcactctacttgcacaatcaggtttgtccttagaatattggtggcatgcatttaacacagctgtttttaccattaacagacttcccacatctgtcattggcaatattgttggaagttattttaccaggatctta

SEQ ID NO: 271304 - DNA, 1977 bp, Cannabis indica
caggatataaagtcaagaagacttagggcataggcagtgccggttatttagggtgaaagtctgcaggacataggtactaagataataccatggcagtgttggcctaaggtgaaagtcagtaggactaaggtactaaggcaacatagaaatgtcgaggggcgaagagtcagaatgaccgaggcattagttcaacatctacatcaaagtgacatttggaatggaggaactgtatgcgagtatgcggttagcttgcgagctatatcttgaagggtattcctctaagagagaagtttttcccaagttgaagtggaggagctcactaattcatgtgtttgaataatcagggtacttgttcagttttggtgcatgaatttagagggaaacaataaaaaagatgggttgttcagtgcgaagacttgcatgattgctgtaagctacagatagacaatatgcaggggcgtaggctgagatcaagactgggctagtttgtggcatgttatgggcatgttttgtgtttatggggacactgttgttttatgggacactgtaagccgaatggttcagagagcatataccgatgggagatagcagattgtgatgacttcaatttttaagaggatgtgctacactccatgggtaattctgaatagcgtcaatggtacaactccccccattctgtcaaaaccaaaaccaggggaaacattgcttctttacctttccctatctcgacacgcggctagctccgtattggtgcgggagtaaggaaaagcgcaactaccaatatactacaccagcaagaccttctcaagagcagaaagtaggtatccagtaatcgaaaaattggcttgggccctaattatcttagtgccatatgattgtagtaatgacgtcgttcccattaaagagggtactacataaacccgagatatctgggaggctgatgaaatgggcggtggaactaagtgaattcgatatacaatacctccctcggactgcaattaaaggacatgcattggcagatttcttggtcgaaatagcactagaacctattccctgtgaaggggattccaacaaaaagattggttgttaaaagtagatgggtcgtcaaacattaggggaagtggggtgggaatagtactattatcgccagaaggggagatgctagattaattgataaagctgggattttgagctaccaacaatgacaccgagtatgaggccttgatccacgggataaagctagtcaaggaaatgggagccgatagagtattagtccagtcagattcttaattaatagtccaacaggtcaggggatattttgaggctaaagaaccaaaaatgatcagttatttggctcaagttaaaaagttggcgtcaacttttgaatatttttagattagtcagatgcctcaagaggcaaacatgcatcccgatgctttggcaggcctgggatcctcctctcctctccagattgcaagaacaataccatttgactttattcgagaacctagcatcacgttggaagaagaagtttaatgcgcggcaacaccgacagagacactgagggactagatgcatccgatcttagaatacttaagagatgataaattcccaccagacccaaaagaggctaggaaaattgtgttaagggcctcaaggtacacgctactgcaggaccaattatacagaagatcctaccaccgaccctacctgaaatgcgtaagaaagcaggagggagaactaattctcatggaggtacatgaaggtgagtgcgacagtcgtttaagaggatgagtaaccgctcaaagaattcaaagacaggggtactatggggcgacggtccaagaagactcgacgaactactataagagatgtgagaaatgtcataaacacgccccatccattttgacccctcgaacagagttgacaacaatccaaagtctgtggtcgttcatgaaatgggggatggatatagtg

SEQ ID NO: 271305 - DNA, 346 bp, Cannabis indica
tttaaatggttagaattagaaaattagcgtttttgagaaaatagaaatgaaaattgttaaaactacaaaattccaagtggggcccattaacaccttggccggccacttgaagagggcttttccaattaaaattttcattattttaatgtcaaataattactaacctaaacctagtggttgcctataaatagaaagtgatggctcacaccaaaataagattttattcagtaattcaagagatttcctttcagaaaattgagccactcactttctctctatagccgaccccctctctctctcttttcctcttccaatttcaaaataccctaagtgatagagtagtgcc

SEQ ID NO: 271306 - DNA, 974 bp, Cannabis indica
gtccatcaaccaacatgacattcttcagtctaggaagcccttcgaaattgagagttcctatccctatgacttttccaacaagaccgttaccaaaagtaacttcttcacactgcattggtctaatgttctcaagatttctttttcacctgtcatgtgtctagaacacccactatcaaagtaccacatgttagtagcaatagttttaaaacaagaagaacctaccaagcatttatttttgacaacccatttttgtttttgtaaaacatgtttatttccaaggtaattagatttaaacatgttttgcatagtgatgcacttaggtcgaatgtgaccttttctcccacaaaaatggcaaatagggatgaaacgtcttccattccctttggaattgtcaaacttaccgtgctgcttcttttctgtaacagcagagtgtttcgctgaagtgacagaatcctgcgaggtagaaacagttcttccagaaacaaaaatatcagatttaacaaaagtggtattgaaatcagattgagtagaaccataacctagaccagtatgattagtttggccagatttttgaatcttttcaaaaatgttggaacctggatttaacattttgacattctttttaatgttttcaagttccttagtcaaagaaataatttcagactcttttaaagacagttcagattcacaacatttaatttttttcttccagatcattaatgttgttacacaagtctttattatctttaaccagggaacgattttcagcacatatttccaaccacttaccttataagattcagccataaagttctcattaatttctgactcatctgattttgatctaccttcttctttgttgtcatcgatcgaggtattattcatgcacataaattttcctttttcctacaaatttcttgacaaaacacttgttagagcaattttttctttttcatcttcactactttcagaat

SEQ ID NO: 271307 - DNA, 592 bp, Cannabis indica
aatagggtcccagtcagtgatatgccattttgacgcttctgttttgacaactgatagctttctaaatgccccttcattaaatgcagaccaggtgtagcagtatgtgcagtctggccaatgccatacctcaaagaattaacaacatctgcatgggatttaatcttggacgtgatagtctcatgaattgtaggacgcagtctttggctgggcaaagaagaaaaatataaaataaatcattatcaagtgttcagtgtatttaaaaacttttgaatataaaagctaattagcaggccaacttaacttaaattaaatttattagagagataggggagacatacaaaacgatgttaaatacagataaaccaacccagagtaaaaatactatgcagaaaaatagatagcacataaaaagcactagcggggaaaagatgggggatccagaataatgtacactagaaacacactaatttcaaatgcaagatgccgtcattaaatataaaagtatagcaaaaaaattaaagaaaacagattccataaaacagctaacaaaatgtaagatatttcacgtactaataattcagcgtgcaagaag

SEQ ID NO: 271308 - DNA, 1104 bp, Cannabis indica
aaataataaccagttatattcagtaattcaatttcaaattaacttgcatacacatttactcaatattatacacaattctggtactttataaagtacccctttaccactcgttaatcatgagctgaatatgtcactatcgttgcccgataaagcaaacgataagtaagaaacccaaccgtagtttcaagggtaattactcgtaacggtagtaaccgttcccaatccctaggttataacctaggctcaacatacttttaattagaatgttgataataatcaagatatagtcattcaaccataaacaattaacaacatatggtcttaccacttttcttattaccttagttcagaactcaaacgtacgggccgacctgagtggaaaaagatgagcaatcccgatcctatgtcacaacaaccaaaactcaataaaaaccttaatcaaatttctgataatagactctaattctcataatcggacacaccctactttccctcggatcaaactaacttaaacatctctaaaacaccctgaatttcactccagaatatacctcgaatcatatcggacttgaggagaaaaaacccaaaatcccccctgctggccaaaccggtcgaccgatttgccagttgcctgaaaaaccggtctgggcagccatggggatttctagtttttcaccctaaaaaaccgatctaacctccaccaaaccttccagaacagtttaatatagcaaatataacataaccaaacaactaattcatcacaatttatcaatttgctcaaaattacactttaaagtgaagaaaactcaactttggcttcaacaaaccaaatcaaattcaagcagccatagagaccacttaaaaccattcccagcatgctcaaaaacctaccctaaacacaccccaaacctagtttaagtcttacagcaacaaagaagtaacaccctacttcaaaactaactcaaaaactggtgttctcaatccaaaaagtaggaaacctacctcaattcacctctaggctgacttgggattgaaattctgcttgaaaaggaaggcttgctgaagaaaaatccccaagggtgggctggctttggcttgctcgaa

SEQ ID NO: 271309 - DNA, 839 bp, Cannabis indica
gttaagcatattctgaagtacctgaaaagtacaaggcattatatgttagtctacaagagtggtgctttaaatcctgtaggctataccgactcagatttccaagcttgtcttgatgacaagaagtctacatctgggatggtatttactcttgagggtggagcagttgtttggagaagtgctaaacaaaccgcaacgtcaaactctaccatggaggtcgaatacatagctaccgtcgaggctgctaaggaacttgtatggcttaaaaagttcttctcaggacttggtgttgttcctggaatggaaaaaccattggttttactttgtgaaaacgctgaagctatagccaacagtaaagagcctcgaagccacaagagaagcaaacacatagagaggaaatatcatatcatcagagaatatgtggcaaaaaggggatgtactggtagagagagtggatacagaagacaacttagttgatccattcaccaaagttttgaatgtaactacatttgaaaagcacagactgaatttaggattaattgaaatgtactgatagttttatgttagtgcaactgggagtttgttgggctttgtgccctaaataaaactctatttcaatgtaatcttttctattcaattatcaataaagaaatagatttattttcattacttatttagtgtgttatttggttcatgtgatcatttatttatttatttgatttataaattcatttcaatccttatcacattgatactcttgtttattgtctcgtcaacacagtggaaagtaatcaagattgtttgattacaaggtttaactgataggataatctacaatgtag

SEQ ID NO: 271310 - DNA, 703 bp, Cannabis indica
taaaaatggtataacgccctaatttgtatggacgtcacgagtgtaattttataaactagtttaacactaatagattaattaattattaaaaatcgtgataatattaaaaacttaattaaaataacattaaaaaatagacattataatggcataaaaacgtgtatcagggacccctagttataaaaagttttacaaaataactatatacgatgatgcctacaaaaacataaaaccaaaatacaaagtagaaaaagcccaaaaaaactcatgacaactcagcacgtaggccggtaaggtcaatatgtacattgctggagaagactctcacctcatggttgatttagtttttctttgactttacctgtaccacatagcacccatggatcacaaggactcagcaagaaaagtaataataataatcacatattttattattcgaatattatcatttatatacaatcaaaatgaaaccatcacgaattgttcatacgatgaaatccaaatcactaccggcatgtgtcacgaataagcatcagtatacaggtatctggtaatacaaaaccattataccaataattaaaatcatattcatttaataatataaattatatatattactttataaagtaacaatcttcattatatcacattgcctaatcagacaagtcgaggctttagtgtgataatcctgtattgcattgcc

SEQ ID NO: 271311 - DNA, 1388 bp, Cannabis indica
tcaataaaaaaaccattcttggacaatttcttattaaccacctcttaggtcttagcacactgtctaataaccttataatatttatatataaaaatatatatgctgagtattgacagagatggaatgggaaaacacaaacacgtggagaaactttgttttagaaaaggagtggagtggaacactataaatgtttttagtttctttgagaatagaagttgcaaaaggacacaaaagtgacaactgttctattttttttatatattttttttaattttggaactctctttctgttgcagaggttttttttttttttttttttcttattgaactggttggtgggatagcaaactggtcttgagagtcacacatgggtcaacctcggaagaacttgagaaagaatctttgtagctaaacaagcaatacttgttgttgattcaattcagaataatatctccttctgtgtctgttactgaaattggagagagccccacaatgaaagagaggatgtccatctcagtttattttcttcttcttcttcatcttcttttttttttcgtggctgtcatggtcaatagaaagtgagaggtatagtgtgggacctttgcctctcattactctctttctccttcctatttttcatttcatatgcttaattatcttggctatagtgtcccatcatctttggtaacttgtcatttaaaacattccaatttttgtaatatttttaactcttgagtttggggccctttcgtgaatattttaattccaacgtcgtaaattgaattttatttttgcaggattatcaaattagtctttacatgattgctaaaaaagtcttgggcaaagctgaagcaaggaggtttgtcggcttgaggaggcacataagatggttgaaagggatattgcaacgaatttcaaacaattctgcatgtttatttcggctactaattttgactaattgtaacaggttggtggttttagcagttctgtaaagaatcactattttttttttttttgccataaaaaaaattgatgtaacaaagtgttcgaaaccaatgcacacacaacttgttaatctaatgcaacatatatgtaatatgtactaatgccccttttaactcttattaagggtaaaaaaaacaaaacttttaagaaattcactttggctagagtgatctggttctggctggtgaaacatttaaatccattttgacattttattttcttcatcaatgacacataacacagttgagaaaaagataggaagaaatagggtgaggtgaggtgtgaggattatatgtatatgcatgcaaaataacgtggagagttatggttggtcatcatttaatccttatagtagcaaagagaaaaactcccaagtttgtaaa

SEQ ID NO: 271312 - DNA, 693 bp, Cannabis indica
aaagactgaaaaagaaaatattacatgttacataattagtattagtatatgtttttttgaagaatgtatgaaaatgaagtaaaaattaaaaaacactcacttaattggtcgccaacgctgaagtttttttgttcattccatgtttgggtgtaataggcagcatttggaggaatggtccagcctatgtggtctcctacggtatgttttgctgcagctgcagtctctgtaaagatgaccaccgtaaggacgaagcagcagatcaaaccagttaaagctctatccattattactattttgggcaagtagaggaagaatataagattcggtgctttttatagagaaatttggacaatatctgtttttgtgctaaaaatataagggatatttagctagctacgtggatggacctaatcctacatgcacttcacgacatggaatggtatgtgagtgaagcggtggcacaaaaaagatatatatctctccctctctctcgaagttactctgtttataggaagtaaattaatcagagaagtaaagattggagaaaggtgataaaaatggtattataagcataattatagtgcctagattgggccagtacagttgtgtttgggaaaagcaagaaaaaagaacggcataattatggaaaaatctaattgagtgtttgataaatttataagttttttttttttt

SEQ ID NO: 271313 - DNA, 1013 bp, Cannabis indica
gtaaaataatttccaacactaccctcatttgcccccaccaccgggagcacattgtgctggtggctggcatcaagcccgagacttccgggacttaccaccggccgccccgggacacggagacgcccaatcacaattacggaggctttggagcttggagccaaacgcatttgatgaccggggctatgcttcctctccaggattatttcattaatttccttgtatttgtcggccttgcgccataccaacttattcctcaagcttaccgcctgctctcaggcttgtttattttttactttgcccggggctggggctctcccagtccggcagagatattgtatttttatgaactcgtttctgtccctaagaagggggacaaacttaaggacgacgtttatggtttccgggcccatcctttgaatgagggcccggtccccttcaaccaacaaaaacacgtcaaggagtatcgtcaccacttcttcttctcctccaggttccaggatgtggaacacccggagcttctcacggagtgggttaggatccctccttatgagtggactgcacctactcagctcttccttcagcgagccaagaccttcgccacatatgacaagaaggcccttgaggtcggagggttggtcacgacagagaattgtcagaaggccaagctgatcctggggcatcaatcggtggatgactccaatctttccaaggtcatctgcccgagcgtaagggctccagccgcggagaaggtactccgggaggaaatcatcgccacggcggaagataagtaccaaaagtacctcttccaaaaggcccaggagcaggcttacgccaaggcccaggcggccgccgggaggccccttcgtattgggagcccggtggagaggagggcccccagaccaaggcctacggtccaggtgccgaatactggggctcccgatgccagcacttccgattctagtaagtcccctttaacgaatacattacgtccctcccgttcgtgaatacgctag

SEQ ID NO: 271314 - DNA, 1524 bp, Cannabis indica
ttacctcctgtatgattgccacaaatacccccatgtacctcacgtagtatatagtcgcagtcttccccgtcgatacacttgagtaatggctgactaaaacttctgcgatataaccttccatcgtatatgacatatcgggcagctcgcactcgcagctttcttgcttccatcttgccatcaggtaagatgcccttttctagatatgcgactattggagtcatccaggtgacttcttgagtggtatctatttctatgatcgcttcttgatttatcgttgggtgagccaatacatctaccggaattacatcgagcaattcggcttctctggttgaggccaaacgggccaatgcgtctgcgtgtgaatttcgagcacgcggtactcgagacacgattactcttttgaatttctgcatcagttcgcatacaatggctaaatacttaaccaacctcccgcctctggccagatattctccattcacctggcacactacgatttgggaatcgctaaaagcctgtaaatactcgattttcatctcgagagcgagcttcaatcctgcgattaaagcctcatactcggcttcattgttagatgcagaaaattcaaaacgtaaagcagcgtgtaccttaaaattgctgggactgattagtaagatcccgccaccagaaccttcgctatttgaggctccgtcgacgtacaacgtccatgcttctccattggtcatagcagtgtcgactttgtcgtctatgagtgccacttcggtgcttgggaattcgaggataaaatctgccaaggcttgccccttgatcgcaattcttggtttatacttgatgtcgaattgactcaactccattgcccatttcaacaacctccccgacgtctctggttttgctaagacttgcctcaaagggtagtttgttaaaacttcgatactgtgagcctggaaataaggtcgcaattttctcgacgatattaccagggcgaacgccaatttttccatttgaggatagcgcgtctcagcatccagtaatcgtttactgacatagtacaccgggtattgtcgtccttgatcctcgcgtattagtaccgaactaatcgcatattctgatactgctaagtaaatggataagacttcgccggtcatgggttttgataggattgggggttgccccaaatgtgtctttaaggcttgaaaagcctcctcgcatttttcggtccattggaacttcttattgccttttaaaatctaaaaaaactctttgcacttatcagaagatcgcgatataaagcgatttagagcggcgactttacctgtgaggctttggacttcttttggcttagttggtgatggcatctccaccaacgccctgatcttcgcggggtttgcttctattcctcgttgattaaccatgaatccaaggaatttcccggagccaactccaaagacgcactttagagggtttagtcgcattttatatcgacgcaatatatcaaacattgcctgtaaatgggcgatatgatccttc

SEQ ID NO: 271315 - DNA, 709 bp, Cannabis indica
atcaatctcttttcttttaaggtttctcggtctagcaacattgaaaagttcattgtttagtgagatttgtatatccggtcttaaaacataaagcccttgtcccatgtgagcaacacataattgaaatccattacgagagatagtgcaaacaatactcgaaaaattcaatttataaaattgtgtttgtaaacatgaaacactaatcaagtttctactaaagtttggaataaataaaacattttctaaaattaaattatttttttgaaacttgaggcggactcttactttggcttggaccaatactaactcgccatttccaactttaagctttaactcctttaggtgtagatttttcgaagtttcaagcagctgcaatgaagaacaaacatggttagtagatctagaatcaacaatccataaggatttgtcattctctaaaacacataatacaaaggcaaatgcattaccttcgttcgaattatttagaagcttgggacatcgttcttcctaatgtcccttctcattacaatttcaacattgaagaatatgactatcaattgtacttgaagaagcagctttgttagaagcttcatgcttaatccttttcctctgattaaagtttgcagaaccaggaggtggcattgcaatcagattatgttcatgagctcgtaattctgcttcgagcttatccatgttggaagagttaaaa

SEQ ID NO: 271316 - DNA, 2320 bp, Cannabis indica
atatcaaaatagaaagcaatctacatagtcaatagacaacaaaatttggtccattaaatataaaacttcttgtagcacaataacacttggtaaaaagaagaaaaacaacaaagaaatctgaaacttcctagctctcagtctgctccctgagccttctgatggtgctcctgaccgtaacagcacttgcggtactgcaaaaaaataagaaggaatggataagaaactaaacttggaatattaatcctagaaaaggtataaattaagtactaacttgagggtgtaggctcctccggctttaactttgccgcagtctttgcagccccaaattccaacagccttcctcttcactgcatactacaaaagcatggaagttttcattagatgatttgatgcatctaaacctagttttcgtgtatgcaataccggaccaaggattgtacgaaatcagggataagaaatctacctttccgcaaaactcgcagaagtacttgctgtgctgactgacttccatcttcttaatctgcttcctcaaactagcaccataacgggtacctgaagtaaattaaggccatcattaacaccattaatttagtgtatgtgatagaaaaacaagagtaagcggtaaaacaaaaatcttcaatcataaacagaacaaaatggagagtttagattatgttgtcactattgcaggtcttagaatgataactagaattcttctttacacagtaaagaaaacctcaattgaaaacttgtaataataccccattattatttataatgcaaccattttaagataatttaatatcctaccttccatcatcttttaacaaatcaatttgttctaactcacaatatcaggataattcaatgaaacataagataacaaagaaaaacaacttaccatatttcccaacaataccggccttcttggttctcttcgtctgcatatacaacaagaataacagagttaaaaaacttcaccaaataattacccagtttacaagtcctgaaagaaaattttctcatctaaatatttcacatgtttaacaggccagtaagaaaaagaaaagaacaatttaaattaaaaaaaaaaaacaatgaaataatattaccaaatctaaacccgaaaattaatagcatcaaaacattagaaaaaaatcctacttgcgcaacatttcattgtccaagcaagctcacactccattttcaaaatatttaagtatctttttggtggcacaatgtagcttagagaaaaaaattcacacgaaaactaagattttcctcaaatatttacaaatgataactaaacaatccctgtttttctattcagtccattctttctctcctataattctcataacactatttcaataaaatttcaaacatttctaatagcttaattaatagcctaataaatccccaaaacaaattcaagatctaattaaaattaatgtataaatcatgcttcgtaaacaacaaattaattaaagctatacacataactccgaataataacaacaataaagagaaagagtaccattttggatatggaatttggtgaagcaaaaaccctagaaaactcggagactttgagcggccaaagtgaagggtttacattttcagtactagcttatatattagactcccaaatttgcagtcggaggaaggaggtaagagttgccctaaggtctatgggccctcaaggtttgggcttcattagatggaggcacatatttagagatattgctctaaccttgggcctatgaataagtcaggcccaaaactgcgacggccacacgcaactgcagcaagcgcgttcttttcgtttgcttacctcacgcctcacgcctcacgtcacgcgttactctatttccctaagcatgcattaacgcaatattacaaaaatttacaccttatttgaatttttctttagaagaaaaatattggttttttttttctctaattttttttgaacaattgcttgattttgtaaaataacaattgggataaattaacttttaattacataaaaaaacataaattcactttttttcttttttattgtgtacttgcgatagatcaaatctgaagttaggaatgaagtttagtgatgattaatgatgttttgcgatgtttgactacaataataaatatttgcgtatttattgatgttttgcaatatatttgcaatatgagactaaaaatgcaaaatacattgctaaatcacactcaagtttttacaatgattaacgatatttagcgatgtaccttctttttagtcttatctagggccgagaatatatgagcctaaagcgaatta

SEQ ID NO: 271317 - DNA, 1173 bp, Cannabis indica
aaacatgcataaatccataacttgaaattcaagaaaactaaaaaggaagttgctaggagcttaccttggcttgaatacactatgatctttctagaaaactcaagatttcatgaaggaaaatagaaccttagctggttcttggaggattacgaaaagagagagagtttgagagagaaaaatgtgattttttgataatttgatattttataaaattaaatgataaagaaaaaggttttattttattaaaatatcatatttaaaaattaatcaaaaattagattattaaccttaatttaagccacaaaaagacaaatcaaaaattggcaaaatgaccattttgctcctcccacactaaaaaccataaaagatcacttaggggtattttggacaactctaaaacttctactattcccgacattcctaatgcctaactatactgtcccgctatactaaaaatactaggatatgattctaacagccaaacaccgcattccgatattgccgggcacaaaacatgcaaaattatgaaattctaaatatgacacataaaatacattctgaattcaaataaatcatcgtaaataaataattcaaagctaacaaacaagtttcataattaaaccttaattgtctgctaatttctaaattaaagctaagcggtctttacataaatcatctgaccgaatcatatataagacacgcacttcaaaatttagacatatattgttattcgtatttttgaacaggtgacacatgacataaaaaaaaaggtaaagataatctcataacctcactgattaaaatccccccaataaaatcccagccacggagaagcttcattgattcaggaacaagtcgagactgaaagataagtggatgtctaccacatcttactcacgcttctcggacatggaagacatattactactccaaaacctggagtgccccaaactcaaagtctgcctaactgataccttgatagatactcaaagggcctatcgcggatgctgactgcccaagggtatcgcgaacgtctatcttggatgcaacctggatcttccaccgatggttatgccttttctgacaaagaatcagatcttgttccctgtgtcagaacatggtagtgtgcacctcacataccttttcgccagacgcttattccaggcattactt

SEQ ID NO: 271318 - DNA, 529 bp, Cannabis indica
aaaaacgaagattgctggataaagaacgagcagtagccttgaaagatgaagttgaaaagctgcgcaacaacaacttcatcattgaagctttttacccagcttgggtcgcgaaccccgtactcgtacctaagccgaacaagaaatggcgagtctgtattgatttcacagacctcaacaaagcatgccctaaagactgttttccacttccaagaatcgatcagctcgtcgatgcaacagccgggcacgaaatattaagcttcatggatgcttattcgggctacaatcaaatcaaaatgcatccgccagaccaagaacatacaagtttccggacagatatgggtctctactgctacaaagtcatgccgtttggtcttaaaaacgccagagctacatacaaaagattggtcaacaagatgtttaaagaccagatcggcagaaatatggaagtgtacatggatgatatgctcgtcaaatcaagaaaggcgtggggcacatagacgacctagacgaatgatttaacgtcctcaag

SEQ ID NO: 271319 - DNA, 654 bp, Cannabis indica
tatattttaactccaacttttacattacaccacttttttaaattttaatatattttatttatttcaaatatataatagaaaaatttacataaaaaaacaaaaaaaaaaaaaataatcttttattacaattttacctttacaagggtgagacaacttttatacctctttagttattttatttaccaaaatacctcttgtacacataaatcatatgatgttgatgtcaatgttgttcaataacactcactattttccctctaatttttataccatttctccatgttatttagtttttctttcatttcagtttcattttgaatcttctcaacaaaattaaaagaagtctctccaaaaaattgatttcctacgatcttcaactaccattgaagcttcaacccatattttttttatcttctataattttttatgtagatggctatcactcattcctcctcttctccatctccttctatggaaaaacttccagttaaacaccctaaagcttcaaaaatgggtttgaaatctatttccaaaaaaaaaagagaaaagaaaaggaaattagatgaagatttctctgataatgattttgttaggccatacccaaacagagaaagactcctgctaagaaaaaatctaaaagcatgaaaaggagtg

SEQ ID NO: 271320 - DNA, 604 bp, Cannabis indica
tttttcttttagctttttcatttagaaattgcttagatagttcatcattggatagatagtttataaatcatttgcttatgatgtcactcaattttttcctataaaattgaatggcgcagatgactatattctagatattctatccggaaatgatataaatcctcgatcttatagaatctcctacttgtatatgcttactaaaggcaacttaagcttagagttagattagtagtggtagtccaatctagaataaaattcgagaaatatttgatataaatttaagtccttgactttaaattttagattccaaatagaaattttaaatttcaatttccagaatacattgaacaatatagtataactttcacaagtttttaatatccattttctagttaatggatctaaactgtatattaatgtatggaatttgagttttgtactttatgatcagaacccactgggactattctaaaagctctttgttgtaactagacctaagtcatcaaaagataataattacaacaataatatatctatggcatttgcatcttgttcatagtggttttgtagaagatcattctctgcaaagagtcaatatgccaat

SEQ ID NO: 271321 - DNA, 698 bp, Cannabis indica
ttaaaaattacgatttttaaatttaaatggcaggtgtaaaaaaaagataattaatttaattatttctttttctaattttggaaattatattaaattaattaaaatatcagccaaataatctttttatttataaaatataataaaaagatctcaaatctcaaattcatcacaaaaagtggtaaaattctaaagccatacaaaatggcacaaaattccaaatgagctcactaaaattaatcttggaatattaaagaggtcattcacctcaccaaatttcaaagaggtcttaacctcataaaaatctcaaaaatggtaattttacctaaaaattaaaaagtgcactaaaattcaaagccatagcaaattaaatggcattccaaaagagaggtcattcacctcataaaaaattaaatttggaactacgtttgacttgattcccatgaaaggatacgtaggcaacttagttgctaagactaagtgcagtcgccaataccgcaaaatggtataaaacacaactctcaaaattccataaaaggtcatacacctaggaattttttccaaattttcgaaatagcaaaggattcctgaaagtggtcatctaccggaatccgtatatccaaattctaaattactatattctgaactacaagtggcttgatccttcacaaagaagggtatgtaggcagctcagctaatta

SEQ ID NO: 271322 - DNA, 1608 bp, Cannabis indica
gctggaaacagtgaccacaccagtaaacggtttgacaaagttccacttagacattagacttggttggtaggaaggaccttcttggtgatttgtgagttggtataggccatctttaagtgtcccttgtagcagcaccctctttgactccagatccttcacaaaacaattttgagccaagaattcaacataaacattattatcatgtgtgagcttggaaatactaagtaaattcttagcaatgttaggcacatgtaaaacattcctcaaaattatggaggtattatcaacagagggtattaggcttttaccaacatgggcaatatcaagtttattgccattaccaacagtcaatgtctcctcaccattgtaatcagtcttgttggtgaggttgtttgggtcggctgtgatatgattgctggctccagaatcaacataccaagctgtgtcctccaccatctcaggagtagctgtaaatgtagatgcaccattgctattgttgctggtttgtcctcctttgttcccactgctggaaccattcggatctgaacccatatacgactcatcatagtgattgtagcaatacgtagcactgtgactgtatctcccacacacttgacatatgggtttcatattgccttgattccttcctccatgacctctgaatctgcccgatcctctgcctcctcgagcctgacttgagttaccacgatttccttgtccatattgcccagagttgttggatctgttgcctgcaaaaccagggtttctagttgcagcaacgttagcagagggagaacctgagacaagttgtttagaggacccaaacaaagttgttagtctatccaacttgctgtcaaaactcaggagtatatcctgaagttcttgccaagaactggatagtctatcttcaacttgaagaacaataggcaagtattcaatgtcaagaccagagagaatagtggagacaagctgtttctcaggataaggatccccagcaagagctaaaatgtctgcccattgacgtttttgacgaagataatctgccatggacattgttccctttctgtaggtctgtatcttagtacgatattcatccatttttacacgtgagtgtgctccaaatagtgtctccaatgcttgccataagcttgtagacgagtcacaccccatcacttctgtggctatgctctctgtcatagagccatagagccaaccaagcaagagttggtcattcacaatccatgattcaaactcaggattaataacagtagcatcttcacccaaagatgcatcagctggcaagaactcgaccagtctgaccctagtaccatttaggtacccatccagtcgatgaccacggactatcacagataccatggtcttccacaaagtataattgttcctgtcatgttttaaagcaaaaggttgagtaagagttgtacccacatgagttccgacgatattagtagcaggagctgaaaactgagcgacgccactggctgcgcttctgactgtagatccttgttctccatgcatgggagtttgctctgccatgatttacacacgcgaacaccaccagtgtaaagctgctctgaatccaaagtttga

SEQ ID NO: 271323 - DNA, 1015 bp, Cannabis indica
aaaaattaactcaatctttgcttagtttcattctaaaccaaaactgcagtgactactactgtggcgaacttaagcaacaagggtgctggcggttgttgactcgctgcaaatcaataaaaaaaatggtccatcagcatcaaaattaacaattggagcatctttcaataaaagtaaacaagaaatatgagggcttctacaaaaaccaactgcaacagaggctctctttcctcaccttaatttagctaaccataaacactgacacactatattatcaatctcttaaacaaacccagtgaattcaaatatataaagagtaaacaatcaagtcataacacttccctattaaataacaatttcaagactaaagatccaaacataaatgaccctttgttctgaaggttaataagcaacaagagacagttcgaatatccaataaagtaatagacacaaagaatagcattgcagaaagtaaaaaacaagatatgaacttgtagacattgagtaacaaaagtacttactatttccacactggtggaagcttcttggtcttcttgtagtaacgtgcaagtctgtgaattctgctctcaaccaaaatcaaacgaaacttggaatccttgtccttcctgttcctctcaagatgcttcctaatagaaactgccttcttaataagtgatacagatcctcaggaatttcaggtgcaagacctaacaaacaaaaccaagttcattaacacaaagtaaacaaaggctacaagctcataatcaatcattaaccaaataatggtattcatataagaaaacaacaacaaccttaataacactacaatcccagttaccaaaattaaataaacagaaaatcagaaaaaaattcattatctaaagttaagcaaaccctgaagttattcaatgactgaaaacaaaggttctaaaagtatctaaagttatctactttacagtcttgaatgaactcataaagcaaaaacactaagaatgattgattaccgtgggccttaaga

SEQ ID NO: 271324 - DNA, 3702 bp, Cannabis indica
actgagtctgcaagcagtattatctcaactattgtggggaccatgagactgtataatcaagcttccaataagtagatctagaatttactaagtaaattctctaacttattaattcttccttgcgccactatagatttggaactgcactcttaattatatagaatgctctatatgtaccaagatatagatacgttatgaattatccatcgttctaatccaaatagtcaaagatcctctatagatgatctacatcgaatagggataaatttaccgttctaccctttaatgtattttatccttaaaacacttagctacctacaaatgatatttcagtaaactaatataattactgaaatgaggcctcaatcatttatctctattaagccaagcttgaagaaaatcatcgtttcacttctaaatacttatagaagctatagattctatatctataattagcgctcccactcaattgcactatcatgttcccaatatgtaagtattctgtcgactgagctttaacgaacaactctaagaacataaataatacagttgagatcgaacctaaccatatcaagattaagatctattgacctaagatcaactaactaatattgacttagatagatataacagtaagtttatgatattttatccaagttcaacatcggtccagtccgatatatactccatacatccgatcctagcatacttttccaatgccctagaaaggacataacacttatctaaggtgtaagtaagctcttatcgttaagtatcatgtcagtctaaatccagtgtactgacaaatcatgggacctaaactttaaacatataattatgattatattccactgtgttgacaacactataatcatgaataaccatatgttctggatttaatagaatttatacattaaacatataatcgtaaaataaatcatctgaaccatgcaacattaaaacaatttctgatcttttattaaatagtaaatatcattatattgaaattaattttatttaggacacaaaacccaatattctcctacatttctctttatttgttgaagatgatgatgctcttaagccaatattgaaagaagaaacattagattttggagagaagacaattggctcaagatgttcttgagaaaactccctagtattatcacttatcctaggaagaaatgagactagattcaaacatggcttcctctttcttggttgagaacacttatgaacttgatctgatacgtctatttggtcataaaataaagtgggaatgggctcaaatttgtcaattggagctagcccataagttcttcagccaagctaatttcttttgcatacgtgggccaaggaaaatgtatggtttttgggtatttatggggttgccttgatttgcataacacaacacttttacattctggattctctgtttgtcaaaaaccaagataatatatatattctttttcgttttaatatatgttgatgacttagtcattgccaccaacaattataaagctgcaattaatttcaaaaggcacctcaactctatgttccaattaaatgatcttggccccctaaatttatttttttggccttgaaattttactcagtctaatagtggcattttagtctctcaacgaccttttgccttgtagcttctaatagacacatgcttcttgggtgctaaacctactccttcttcaatggagctaaataacaaactcaacaatgattcatgtaatattttcccttaacttaccacttactgaagcataataggaaaattaatctactttacaatcattaggcctgatctttcctttgttgttaacaaacttaaccaattcatgactgtctcgctcaaaagccttacctcattgcagctcatagattgctccaatacattaatggcacttcaggccaagaattatttttctactctaacacaccatcacaactcaatgcttatgctgcttccagcctctctgataacaacatttctctctttctcaaagtctcctctgatgttgattggggtacatgtgtagacactcgtagatcagtcaatgactaccgcatctttctaggagattctctcaagtttgggaaatcaaagaaataacctacaatatctcgttcctctatagaggcagtatatcggcttatggctaatgctacttgtgaggttattaattggatcattgttctatcgaaggattttcctatttatcatcggctacttgctactctatactgtgacaacatcaccattcttatctcaggaacaatctcatgtttcatgaacgaacgaagcacatggagatcgattgtcacattgttcgggagaaacttcaagatgagcaactcaataagcttcttcatgtatcctccaaactcaatcttgctgaccttttaagtaccaaacccattttcccttattagtttaaagaattattgtccaaaataaatattagaaactaattgaggtgttactttggttagttatatagttacgaaatttcatttttaccgaaatatagttatttctctcttccattaatattttaatatattattgaataattgttattaaaaatactatataatgagcgccactaatttggatgccaaattttttgaggaaaaattagtcaagtgaatacattgatatagtcttttgatataatatatatttgctacactttttttttttttgaggaaatgtatatttgctacacttaattctttttctttcttttttatcgaaagatgctacacttttaatcacatctattatttagcgatatgacattaccaacagtgacttttaacatttttctatatctaccaatactgatgaagaaacaaggctgcgccaaagaaagaaaaaaaatgtcagaagcttttcaataattcaataatggttctgtaataatatctggcaaaaggaaaaagaacacttcttttttcttttgagagaaaaaaggaaaaaagtaacagcaaataagaaatatctcaattaaacaaatgtggcaagcaattatcaaaacagtagattagttagtacagtccaaaggcattgatatttaaataaatagaagaaactaaattctcttcataaaaaaaaatagaaaaaaaaaaagaaagaaaagaagaaaaactgaattctccagtgaactaaaatttaaagttataggatgtaattaggtacattacattacccaacaaatagattatttggtttgcagatttccaagctttgcgtacgtacgtggcaatagctgttcctgttttatttatctaattcattaccaaaaaacgtgtctctacaaggaattaatcttttaattaattaattaattattgaccaaatttcacaagagtcacgtttatatacattagttacaaatacttattggagaagtaaaaaaaaaattgggggaataatttgtgatccatttctatatacaaaaggaaaatcatatggataattagtatgcagtgctagaaatgattgtgcaaccccaaacaaagatgatcaacaaaataacttattaagcctcggaaaaacagctcttatatattatatttatatttgctcttttaattagctaattaactagacataataatgatcgaaaatgtgacataaaataacataattccaaacgtatacgaaattggagatcacgaaaa

SEQ ID NO: 271325 - DNA, 915 bp, Cannabis indica
tcttccttcagggctaatgctcgttctttatccagtagtctttgctttttttggactggccagaagttgggatcgatatttagaacatgtgaaatgatagaaggatcaattccaaccatatctgcatgtgaccaggcgaaaacatctagctttgctcttagaaattttatcaattttgattttacttcgagcaacaaaccctttccgatttttagttttctggtcgggatatctagatcgatctcgatctcttctaactcttctacaggtccaacattgctacttgaatccccaagtcgaggatccacaacttcatccccgccttaggaaattccttacttgggaatgtcttttcccttgtctgtgctctggctggaggatacttccttcttagccttggccactgcaagattgtaacattcccgagcagactgctggtttcctcatagacaccctaccccattctttgttggaaacttcaggcagcagtggaatattgatgtgacagcctttaagtcatacagggctggacgacctagcattacgttaaaagctaaaggaacatctaatatcaggaactgtgccatgatagtcatgctcgtcggagcttgtccaacagtgaggggtaggcgaatctttcctagaggtgcaactccttgtccggagaaaccatagacaggctggagacatggggttagatccttaaggtggagtcccattctttcgtaagcagttttgaacaggatgttggaggaggctccattatcgatcatggttctagccaccaatttattggctatctggacttccacgaccagggggtcgttgtgtggaaatttaattttgatagcgtcttcgtggttaaaggttatggttggccctcctgcccgtggaattttgggctttctttcttcc

SEQ ID NO: 271326 - DNA, 2152 bp, Cannabis indica
actggaaagtaattgtgacagacatgtgacagaaactggtttaaccttgcttgctcactcagatttggattaagttattggtggcatgcattttaatgtgttgtttactccattaacagattgcccaatcctgttatcggaaacatcaatccttatgagtgcatgttccaacaacaaccagattacactatcatgaagacttttgggtgtgcttgctttccccatttaaggccttatgctcatcataagttggagttcagatttgaggaatgcatctttttgggatacccttcaaagcacaaaggatatttgtgtgaaaatgttgcagacagactctttgttgccaaaaatatagtctttaatgatacttactttcatgcctcttctaagtctagcactcaacaggtatccctattcactcaacctcttttccaactgctcaattttttactactgatgttcatactagtacttgtgcgttctattgttgtatttgagtctcaaatctcaccaactcaacaagttgttgttccaaactctgcacaagactcatcttcctcagatgcatcctatgcctcccttgagtcatctaaattgccttaatctagtgatagcaagaactctatttcaccagtcaacactattgcaactggttctgcagcctcctcctcctctgctattcctgatgttgcagaaccacaaaagactcataccatgacaaccaggtctcaacatggtattttcaagcctaaagcatatctagcaatcaagcacaaattggctaagttgcttttgcctcgtgaaccaaagtccttgaaagcagcacataatgaccctacatggaatgctacaatgcacactgaatgcactgctctcaaagctaatggaacttggacacttgtaatatatgagcctcacatacatctgatagataacaaatgggttcatcaaattaaactctgatgcagcattgattggctcaaatcaagactgattcccaaaggttatctccaagcacttggcattggttatgctaaaatgttcagccatgtagttaaaccaatacgagtgagaatggttctcactttagttgtgatattcaactggtgagttagacaacttgatgtgtataatgccttctttaatggcaatcttcaagacactatttatatgactcatcctcaaggatttgaagatccatccaaacctaatcatgtgtataatttaatttacataaagctatctatagccttaagtaggcccctagagcctaaaatgataagctcaaaaccaatttggttgtcaggggttttataacattaaggcaagattcttctttgttcatctttggtactaatcacaatttagtcatcctacttgtctatgtagatgacatcctcataacttgtcctaacactcaacttatcaccaaacttgttgctgatttgaacaccttctttgaactaaaagatcttggataggtacattattttctaggtgttaagattcataaagattcagatagtatgtacttgtctcaaagcaaatacatcactgattttctagtcaaagtacaattagagggtgacaaaccatattcttgccctacaagaattgctcagaaactttctttatctaaatggactccctttgaagataaaaccctttacagaagtacattaggtgcactatagtatttgactctcacaaggcccgattttgccttcattatacataatctatctcagtctcatactagtgtatattgggaagcttgtaaacggctgctgagatatctgaaaggcacactatctgaaggacttttgcttcgaccaatttctaggctatctcttgaagcttattcagatgatgattaggccaatttccttaatgacaggcattcaaccggtggttatactatattttttagacttaatcccatctctaggtcagctaaaaagtaacaagtaattgctcgatcatcaacaaaattagaattttgggctctggctaatactgcagcataaatcaaatggattctctcccttctgactgaacttcgggtttcacttgcaaatattctcattatatggtttgataaccaaggtgtaatgccccgatttcccgagacgtcacactagctagtccgttt

SEQ ID NO: 271327 - DNA, 760 bp, Cannabis indica
gagaaaaactagggtgtacctcaaaatttcccaaccggcagaccggttgcacaaccggaattccgattctgagaattcctgaaccccatccagaattccggttgcacatccggaattctggttcctcgcaggaatcattcaaaaattcataactccctcaaatcaaatccaatccaaaccaagccttcgagacctgtttaaaataccccaaagaacattaccaaagaaatagaaccaagcttcaagcacataaacacatttcaccattggaggttcaagattgagttcaaaaactcaaaacttgactaaacctccaagaagccactaaatcatacataactcaacctatttcaacataattaaacaccagaaaacactactcaacaatagcagcaaccacagcaacgaaaatcaacaatttactttgaaaatcatagcttttgaaccaaaattcccaaactttaaacaagagcaacaagcatgcatgaaacctactttaatccattcaattcaagcataaaaatcacagaaaacaacctagaactacagcagcaacaacatcttcaaaattaaacatgcaactaccaacatttcttaattttcaagaattttaaagagaggaagagtaagagctaacctagcttggaacacaacaaaacttgaaatatcaaggaagaaggagcaaatcccagctgctcaaaggggccgaaaatagagagagaatttgagagaaaaaagatttttcttttaactttgattt

SEQ ID NO: 271328 - DNA, 1579 bp, Cannabis indica
tgttcagttttgctgtagcagaattaatttctgctgctgcaaacgcttacagtttttatattttcttatatacaactgacatttgcaaaaacaccgtttttcataatattttaagaaagatgcgaagacaaagttaattcatgattattaagtttttaaataaaaatgattagattagattcaatttgtttgcaatctctatcataacgaagactttccttttcactgttaatatatcagaccacatcaaaatataaccagatcaaatgagtaaaaaatatgtataattggttttcatgaacacaacacttactgaaaaatcaattacaaacatacttgttgagaattatggggttccatctcaaaaccaattggcaataagtggagtagctcatgttcttatatatgactcaattctctgccgtttattccacgttggacaatgtccacaataatactgaattaaaacaccagtaaaattggcagaagcaaagattggtcacaaactatattaggaaacaaagcaaaaatcaatcaagagagtttcataaaggaatgagattttcattctctaaatgctatccaaccaaatctcaaccgattttcatttgaaaaatactatggttagacgcaaagagatcctaaccgtccattacagacaatcatgtttggttatttagcaaaattctctttatattatttttaatattcttgattaataaatatattaaagaaggaaatacattagaaaagtatataactcattcttttgtgactttctaactaattgagttagcattctaaaatatgaatatggataaaatagaacatgattgagccatgtatcccataaaaaacaaaataatatgccttcctcatagtttgatgatggtgaaaaaaatctataaaaacaacaccgaatatccaagagagcttattaactttggttatccattatgtagttttaaatcatagaagatcatacagcacagaatttactgcaaaatttagcttatattttataagaattataggataaatttcaatatacaaaatacaaaagtcgagacccaaaaaaacttaagcagaccaaaaatcttaagcataccataagttgaagaagcaaaaaaatagtatacaggtaattcttctataatttattaatttcttaaattttaattaatatgaaaaaattgctaaaagagtaacataaatatattttaaattagcacttagttcaagaggcacttaattgaataaagaggcataacaagtctaatgtcattttagagacagattgcattttagttgttcaagttattcttagttcggtagctatgccttctatttttggtctatatgttaaagattgtcaatttattttatcttctttaagtaatgttgctattggtcatgttaaacggtctgctaacaaagctgcacactgtatggcacgtggtgcttgttattggtcaggtcgtcgttttactgagagcgatgctcctattgctcttcaggcctttgtattagcggatgtttctgtctaataaaaattattttcattcaaaaaaaaatatat

SEQ ID NO: 271329 - DNA, 1783 bp, Cannabis indica
agcgcctttgtaagtttaggatgtcgtccacccggtgggggtatcatgccaaagaatactattttttccacttgggccatttcttgggtcggtcccggatgggccctggacctcctgcacccattcccctggattatttagcccacttgtcctccagttggtttctcccatcggacagctttcttggggatgaagaagccagcattgtagttcaagactttgctagggttgaattagagagtctaggtaggattagctttattgctttcttgttgggcgcatgccttcttatggttattctaacactttgtttatttctttgttgcagcagccaagccaatggaagatctcctggctacccttgctgaggcctacagcccggacgcttcactgccttcggcttcatcccaactggtgacccctgggaggtcatcgtccagtgcccccttgggcacaatagtcttggtagacaaagaaggggaagttgaggaggaggagggcgaaattgcggccgcccttgagcgcaagcagaagggttaaatggttgaggtcgagtcttccaagcggccctggaggagggacactccggctgttagcaccgactcctggattccttccgaagcggaggagtacactatgccgcatgacgttattctcaccccggtccccgcagacgaggaaaggcaaatgctccgcgttgctaaacataactacgccctggacgagttcagccggggacatgctgaggtggaggccctgaagaagatcctgcgggaggagcaacagaacaccttgcgcgaggacgccttcaggaatccttgggacctgaacatggacctcctgacggactggttcaaccgcttcgccggtcctactctcgcccccttcgcctctgagatgaccagccaattcatctcccatctaacttaattcccagccaagagatacgctgcttttgcctcagtgaactcggtttatcaggttcaggatatcaatgctgcctggctgcggtgagtttttgcgattcattcctttcttttatattttgtcttaaggcatctgatttcattcttgtttcttttttttttcttagattactgcagagactgactgtctctccaagaccctgattgatcacggattcgtcatgtccgaatttgggggcatggacgaggccgtgaagattttgcgggacttgtcagctgagaggagggcattccaggaggaggcccaacagagggaggctcaggcggaggcaaagcacctggaggagctgaaagcggagggcgaggctacggccaaggctaagcgcgagttgcgggaagccagggagtctatggatgagatggccgccaagttaaaatccctggaggagctgcaccaggcggacttgctgtcgacggccaacttgaccgtggaagtgaaggagctaagggactttaaggaccaagccttgaagaaggctaaaagggatgagctcctaactcccattgtctgtaagcattgcgtcaagcactttgacgatggtgtttacatggcttgacagtcgaatggccagagcatcaagcttgacttttatcccaaccctgaggaagctctcgttcgcttctgggagaagaagaaaaggcttgacgctttgcttgaagaacgcaggggccctcgtcttcctccccccatcgattaagccgaccagttcaaccagttcaccactacatctattttttcttttctttatatttacagtctcttttcctttctttcagacaatttaattattatcttc

SEQ ID NO: 271330 - DNA, 994 bp, Cannabis indica
aaggatggtggtgtggattaactaataaagaagagattggtaatgagtttactggttttctgggtgacattttcaaaaacccgcctcagggccctctggaaagcctagactacttaatccatgatcatctctcccctttggagcagtctgagcttgaggtgatcccaggtcacgaggaaattagacaaacgctgttctctatgggaagcttgaaggctccgggtccggatggtatgtcagttctcttcttcaaacactactggaactctgtgggacaagacttctgtgatgcagttgtggactttttccagtcagggaatatgcatagaggctttaatgctacaaatattactctcattcctaaggtccccaaccctaaaaaagtatcccagttcagacctatctctttgtgcaatgtgatttataaggtgatctcgaaaatcattgcaaatagaatcagagtgttcctgcccagattgatttgtcctactcaagcagcttttgtcccgggccggaacatccaagataataatgttttaatccaggagatcatacactccttcaagaggaaaaaagggaaagaggggttttttgcaatcaagattgacctggttaaggcgtacgacaaactaagttggcaatttattgaccacgttctgcgtagtttaaggcccctgacaagttctgccactgggtacgccagtgtatcacaacaacttccttcaacctttttctcaatggaaggaaatttaacagtttgaccccggagtgtggcattagacaaggagaccccctatctccgtacatctttactgggctgctgaaatcctctcgcgcatccttgagcacgcccttgataacagtaccataagtggtataaagctaagcagagagggccccaaactctcccatcttttctttaccgatgatcagatcctgttggcagggcaaaaccttgaagaagcaagggggtatgtggcattgcctggaaaaa

SEQ ID NO: 271331 - DNA, 2242 bp, Cannabis indica
ttggttctttgacagaggtcgcaaacaacataaggttctagacttgagtgaattgatcaatcaccttgaggacaaggtgaatttcgggcggccggtaatgttaggccttaggattagtaaggtgggctagcatatattaaataaaagggtaattgagtctttgtattgagggtagtgttttggagggaatacaatagtatatatagaatgttaaggggaattgagtggtatgcaatgtttgagtaaatctctatttgcaccaaaggggcctaagggctcctatcatttgtaattgggtttctaatacattcaatatacattttctattgttttgctactgttctattcctacttttgctactgttttattgaattcttgagtgtggagttctcgggtcttatcaaaatacaaatctataaacaaaaaatattaaattaatcatacttgaaataaaaaaaatcaaaactcaaatcaatctcaacaaaaagttactaagacagaaaaacagatgagtacgctagctgaagaaaaagaagaaatttagttgatttggttatgttaaattgaattttttattttagtttaattttatgctaaaatggataatataaataaataattaaatagttaatttttatattttttattttaaaattaatttttacttatatttttaaatttaaaaacaattaattaataaaaataccataaaatatatttttattaactgccacatagtttttcgacggaatgggcaaaaatctacaagtgctacagttcgggaatatttttgctaagcaaaataattcagagggcaagaatctacaagtgtaactcagagggcaagaatcacatttaggagtgtttggtataaggggtgattacagaaaatattatgaaagagaatatgattgattgtaaagttataattgtgttaagttatgcatgagaatgtattattatacttaaggttgtttattgtatcacatacaatggttttacacccattcaaatccaatccaattatatattgaatgttggatttctctaaaatccaatattataggctcaaccaaaccgatccaataaatcattggattggataggcttcattgatgaattcctgtattggatcggatcaatccaatacttttgatctaatattttttttagaggaattgtatccatctaatatttttaaaccaatattaattagattgattggatctatccaatccaatctaaaagtaaaacctaatttttcaggctaatatattagttcaaaatattacaacccaatataaattcaacctaatcgaatataatttaaaaaaaggtgattatcatataattaaaggaaacccacttagaaactgattagaatagaaaggaatacgatacatttacatatatataatacaaaaaaaactaaagaaaacacttaaatttgacactaattcatcaaattaatatctgacaaacacaaaaacacataattcacaatctaatatgtatcctgatttttcaactcactaaattaactaatcaattagacaaaaatgaactaattaagtcacacaggttttttggatttaactatgaaaaatgaaatataagagaaagttaaaagacctgagttagtgccgtttgcgaggaagaagatgtgtcttcgctaaagagggaggagctgtgtcgcttccgtcgttgatgaagatgccgtcggcaacttagggaggaaatggccgtcgtcgtcagcgagtgggggagaagatgctgtcgtctccgtcgtcgtcaaatcgctgggcagcgaatcaccgtcgtcgtcgttgggcaggggcaggcggcttcaaagaggagtgaggtgtgagagagaatatatatatatagagagagaaaggtctgatttagggttttgtttttttatatattatgtaataaaataaatgagactccctttaaattaaatatttgttttgagattcaaaattgatctacttaaatagtatgataaaaatgaaaaaacataatagcaaaatctagagtaatttacggcaaaacccccttaactatcaatttacttgcaaaaaaccatccaacctcatattttggtgggaaaaccctccaaagtactattctgtttacattttaagtatgtcgtttgtccagctcctaattttgcccacgtggcaatgacaagtcactaaaaattatcctatgtggccatatttttacaaaataaaa

SEQ ID NO: 271332 - DNA, 1548 bp, Cannabis indica
tgatggaacattgtagatagccaattggttgtattgagcctggagtggaaacaattaaagacaaatgatggaaccttgtagagccagtgagatgcattgagcctgaaaatttaagaccctttgctcttaaatagcagctgtcagaaaggtcatggctgaagatgatcttaaggcaggcatgccaagtaagctattaggtgctttgtttgtgggggacctcatatatctccaaaaacttgtggctatttgtgaatcattctttgtctttagccttcatttcatgccttattaagctataagtccacactccacacccttgtgactcatacttccaacctgtagtattattaaaatgcaaaaatagaaagaaaagaaaaaataaaagtgaaaaatggaggagaaataatcagagacgtattgggtgattattacttcttggtgagtaatgggaacactatgcatgtcttttgtgtcttgaattttttcttgcaaaatatggaaactgagtgtggttgttgctggagctagtgggttacttttaaaaaaaacattggctaaatatagagtgtgatcaaatcacgccagtcacttttagcttaattgaacactcggtcatattttcattgatgggatatttgcttaattaagtaatgaattatttgattttcttgttgcataatttaatcaaactttaatactgtattaatcatgttgattcaagtggtatttgtggggagtactcttcttatttttattttttttaataccaccttagctaatatcttggagctcataatagaaacaaaagtttattgtctttattttaatgtattttttttctttcaatatttagattaatataaagcttatggccggccatcacatcatgtgggtacatttcaaattcaacttttgagttataggaattcaacttcattatttatgctcataatcagtggttattattatacataactacataaaatttaaatatatttattaataatttaagtaaagcctactaacctcaacctcagaagatgtggtggctgaggaaggttcttagcaaccacatgctcatcgaccaattataatgtgtctattaactccttttttataatttcaaggttcgtttagtgttattcataaggaaccttggtataaaatatgaatcacttgggaaggaaaatatgaaaaagtatgaggtgggccttttgattcatgtggtggagaattgttgagtgtttcaagggattgtttttgtggtgactaatgataattgtgtacttgataaaattaaataaatatgatttttttttcttttctgaaaaataaatatgaatttaacagccagatcattctctgctgtcgttgactatgtattatgtgaaaatgaagaaagaatttatttaccgtttatttactctacaaccaaagttttattttaggttgttattttagctaaattttaaagaattattacataaaaaatataaatttacactttatttaaaaaagtactttcataaggtaaaaacaacatttata

SEQ ID NO: 271333 - DNA, 640 bp, Cannabis indica
atccattttaagggggtgcattgtagaattttcctatgtattattatcataaaaaattgggatgccatatcattttgtataaaaattgggataacattttccccctaagtccgcatgagaacttcttgctcgcacgtggacttatttggccaccaagctggtcagataagtgacacgtgtttggtctttgtatcgctcttgatccgatgtgactgaatgaagattcgattctcttcaatatttggtgcatttaatgttgccttgagatttggagctcgattatcgcattgacagttaccgtatactgcatgtcgttgtacatactttccaacatatatgatgattatacgtttttggaggaaaaatcaaaatttgaactttgaattaccatattactcctctaactgcctatataatagttaaaaaattattttatactcttttagccattttcactctcaaagaaaattagtgcaacatttattttctctctgaaatcttcgaagaactctctaaccgaagctcgatctttagcattcattcaagcacattcaagaatacatgcattattattttaaatttctctgtgaaatcttgaattttgaaacgcttcttcaatgattcgagactagaaatttta

SEQ ID NO: 271334 - DNA, 674 bp, Cannabis indica
tcaagctacaaggaaatcatcagttcacttttatatagttatagaatatatagattccatatctatgattagcgctcccactcaattgtactaccatgtttccaagatgtaagtattgggatgatttattttgtcaactttaacgaacaagtcaaagaacacgaataatacagttatgctagaacctaaccatctcaggattaagatctattgacctaagatcaactaagtgatactgacttaaaaagatataacagtaagtttatgatatcttttctactgtcaacatcggtccacttcgatgttttactaatgtcctaaaaggacataccacttatacaagtataagtaaattttattgttgattatcacgtcagtataaatccagtgtattgataaatcataagactaagtactttgaagcatataatcacaattactttctactatgataacattagtgtaattgtgaataactatatgttctggatttggcagaaattgtatatttgtaaagtctttttttggcaagttagttgacaaaatattttttcttttatggtaagattcttgtgcattcaaaaccgatttcttaccttgtttattcggattgtagttgccacttttccttgtttggaaagttgcactttcagctgaactttcctttgttgaaa

SEQ ID NO: 271335 - DNA, 757 bp, Cannabis indica
tctcttccatcatatccatccttctctcaaccatttcaacctccttgaggtagtttttatggtgctaatacaactggtcgaggttcatccaagacaaaacctcagtgtcaactttgtcacaaacaggggcatactgttaacaaatatttttacaggtttgacaaaaccttcactagtccaaagtgttttcagccattccatggtggatctgtaaatatggcagaaatacaggccatgctagccactcctcagactatcaatgactcaagttggtaccctgactcaggggcaactcatcatctcacaccagatgtcacaaatctacaaaacactcaagaactccaaggttcagatcgaatttacattggaaatggctcaggtttgcatattcaacacactggcttttctaccattcaatctcctttcaattctcaacaactttatttgaaaaatcctcttcatgttgctgctatcactaaaaatctcatcaatatcaatcaatttgctaaatataatcatgtctttttgaatttcatcctaatctcaaagatcaggtcaatatgaagactttgttggttgggaatattgaatatgaattgtacaagtttgatcaaccaactacctcatttcagtcaagcctcaatcctactgctgtgtcaaactagcactcatttcctattactagtgacgctacttttcaatgctttagttccttttccaatgtacctacttccaatttcaatttgtggcataacag

SEQ ID NO: 271336 - DNA, 923 bp, Cannabis indica
attccttcctgatatttttcttgaatctttgttgatctcccttagccaaaccaggctctgataccactgtaggattttactgttttaaccctacaccaacaaagccaataatatcagtcttaaggtcagaattgacctttccttgtctaagtaatacttagaccaatacgaccccgtattaaccccacgacaccaatcttgatgtcgtatgaaacctttgattcaaagactcaatagaagagtctagaatcccagacactcagacacaattcactcacacactcacaaactcgaaaccctagcagagcaagttctctctgagaacttgctcgaatctagatctgaaacccagattcacacccatacacaatcatagtttagattagatgaaagaaaaatgagaaacaaggagagaaaacaccagaatttgtttcagagttcacccaaatctgggctacgtctctgtcaagctcttctcagagatgaaagcttgatatccactatcacaaggtttgtttacaaacagtggagcttcctgtcacagaaatcgatcaggtaagctcgatttctttctttacagtttatgtttttgttgttttctttgtgtttgttctcgatctaactctcttcttgtcttctttgtgcatgtactgctttttcgagcttctcaccatgagatctggattctcatggttggatcttggagctgaagactcaaactagggtttactccttctctctctctctatttcttttctgatctgtattctctgttgtagatcttaggtttttctgcctttgatctgtgtatttataaggttgtagagtcggttgatcaaagtcttagtagttagttataactaactactaagtcttgatccactagaggcgaagccaccctaggatcgagtcttatttgcttt

SEQ ID NO: 271337 - DNA, 616 bp, Cannabis indica
aagatgaagcatatgtaactaaaaatacttatggtgtgttgatttctctttttatgctttaaagtttatggaattttcttctttaaatatgtctttcatctttaatatcatgcatttttgattgttagcacatattctcactttgttcttcattgtgtaaaaattataatttactttgattaagtgtggttcattagattgttcacacctaattctttgaatataaaaattacatttttacctaaaaataatatctttgatttgttgtagtttcattaacttgtttcacaactaatgctttgaaattatgctttgacaatactttgtgcttaaatggaaaatatatttaaaaaatgatagcttgattgagttcaactatcaagaaaacttgggagtcaatacactattaaatatgattaatatatattgtggattctaaagcattaataatctttcctctaccattcaatcatcaaatcccttttaacttgtttattttaaatcttatttattttcttttcttttatcaaataaatctcatcaattatttagagctaggttagagtttaattaatttggagtttaaaaagttgctcttagatataaatcaactctt

SEQ ID NO: 271338 - DNA, 589 bp, Cannabis indica
tgaggaaaactactcctctaatggcgggctcaagcttgcccgagagagagaaaaagaggagttgaagatgatgaagttacttagcctccaagtaacttaaagaataaaattttctcctcttttttctttcttttctatttctatttattttttaaaaagtctcagcccataaataaaaaaaaaataaaagtataattatttaaagaataattaaattaccctcaaagctaaaaaaaaatctctaaaataacctacgggcatttttgtaatttcactaatccctcaacccgacatcctaataaaattctaacctaaccccaaatattctcaaaataattcttccattaaattcgtgacataactaaccacatcgctgaatttccaaaattaccggacccgaaaagtatttaattttcaaaattgatatcctcagtactcacatatcccagtataatctccgtaattaataaattacgctatttatttcattgtgtaaattctcaaaaattaccctaaacaagatcataatcttacttcgttaccaaaataattacatatttaataaaatatgtctatttaaatattattt

SEQ ID NO: 271339 - DNA, 701 bp, Cannabis indica
gcatcacacattatttcaaaaggaacattccaatcgggaggacgaataataggtgcactagttaaaagggattttaatttttcaaaggtaacatggcaatcattatcaaagacaaaagtattttcttttccaagtaaataacataaagggcgtgaaattttgctaaagtattttatgaacttctataaaaatcggcatggcctaagaatgatctaatttcttttactatcttaggtggaggaagttttgaaataagatctacttttgctttatcaacttctattccttgagatgaaatcacatgacctaagacaattccctttttaactatgaaatgacatttttcccaattgagaactaaatttttttctttgcaacaaattaaaacaagagaaagatggtgcaaacaatcatcaaaagaattcccaaacatagaaaaatcatccataaatacttcaagatttctttcaaccatatcagaaatattgcaatcatacatctttgaaaggttgcagaagcattacaaagaccaaaaggcatgcaacgatatgcaaagattccagaagggcaagtaaaggtagtcttttcttgatcttcaagggcaatgggaatttggttataatacccatcaagaaagcaataataagcatggccagctaacctttcaagcatttggtcaatgaagggtaatgggaagtggt

SEQ ID NO: 271340 - DNA, 810 bp, Cannabis indica
atggtgcaggtaaggggaaagcaaaaggttgagcagccatgagttcaagggtcgtagcagcaatgtacatatcagccgcagtgacttggcccagtgaacaggtagctccgttttgatagtatttttggattgcaaagtttatgttgcaaaaaaaaatcaataaactagtttgtaatattttgaaaacagggggtccccatagttctcattacttatcttttactataaagaagtttttatatgtttgattttaattatcaagaatttaattacccacacttttggtataattatatagtatttaaataagaattttataaaaacacacacgtggtgtccctgttggacagggcgttacacttaacaaatcttgaatctagctcaagtaggctatcatctttttgccttgggttgtgtattcacttagaacatgatttatgactagtaagtcgttgtgtatgtccaggtaatcagcccgtatctcgtgttctagcttggggctaacaataagagcttcacattcaaccgcattggttgaaactgaactttatagccccgtacaacatttccccctaagtgccccatgcctgcacctggcaggtggtcaatgcaccttctaggttgaattgtcttgctcttacttttgctcttgctcttacttcttctctggctcttacatttctcccgaatcttgatcctaagagcagtataagaacaataacataaacactaaggcctagctgaacaactaggctctcacaaaaagaaccctctcctcacatataagaaaatatgcaaaaataaaaacta

SEQ ID NO: 271341 - DNA, 889 bp, Cannabis indica
agaacccttcatggacctctagcataatttgcttagctttagggtctgatacacaccttaaataaggcatgctgagtcctcttcgataaagaatttgtccatcatcacataacggtgagcttgatactgaatccttctggacagtgccttttcttggggcaactcaccttttgctatgtagtcgatgatgggggccatccagctggattcttgcccaaccgttgttatggcttcttttattttgatgcttggctctgccaagcgttccacaggtaccacccccagtttctcgatttcgctatctgaagttaacttagccagacaatctgcgtgagcgttcttttctttagggattctttctactttatagtctgcgaactcgtggagcagttcccggactattgctacatatgcggccattctttctccgcgtgtctgatattctcccgacacctgtttcactaccagttgggaattgctgtagacttctactattttagcccccacagttcttgccaatctcagccctgctatcaaggcttcgtattcggcttcattgttagaagctgagaagtcaaaccgtagggctgcttggagtcgaagtccgctcgaagatatcatcgcgacccccgctccggatccattctcgttggaggctccgtctacaaataccttccacgctgggaccgaaggtgtgggtatgtttgcggtagattcagcttcattgcactccgtgatgaagtctgctagcgcctgcccctttatggaaatgcgtggaatgtagtgcaggtcaaactggcttaactccattgcccatttgaggagccttccggatgcttctggcttttgtaggacttgccggagtggatggttggttagtactttgatt

SEQ ID NO: 271342 - DNA, 717 bp, Cannabis indica
gtgttcgattgtgagaattagagtcgattatcagaaatttgattaaggtttttattgagttttggttgttgtgacataggaccgggatcgcctagcttgttttccactcaagtcggcccgtacgcttgagttcagaactaaggtaagaaaagtggtaagcaccgtatgtggttaaatattaatggttgaatggttatggccttgattattatcaagactttgattagttatttgttgagcctaggttatgacctagggttggaaacggttaataccgttacgagtaattactcttgaaaccgcggttaggtttcttacttatcgtttgcttcatcgggcaacgatagtgacatatacagctcgtggttaacgagtggtaaaggggtactttataaagtaccaagattgtgtgtttatgatattatgtaatgtgtaagcatgatgacatgagattaaattgatgatcattttcagttattgtctatttcacttttcttgctgagtctctgtgactcacaggtgctttatggtgcaggtaaggggaaagcaaaggttgagcagccatgagttcgaggtcgtagcagcaatgtacatatcagccgcagtgtatcggcccagtaatcaggatgctctattttgaaagtattttgggagtacaaagtttatgttgtaaaaacactattaaaccagtttgtgaatattttgaaaacaggggga

SEQ ID NO: 271343 - DNA, 1152 bp, Cannabis indica
aacatgatcaataaaactccaacttagcctatcatacgctttgacgaggtcaatctttatcgcaaagaaaccctcttttcctttcttcttattaaaagagtggataatctcttgcaccagaacattattgtcttgaatattcctaccggggacaaaagcagcttgagtagggcagatgagcgaggggaggataggcttaattctatttgcaataattttggagataaccttgtacaacacattgcaaagagatatgggcctaaactgattaggtcttttcgggttttgcactttaggtattagtacaacattcgtggagttcacacccttatgcattctacctttgtcaaagaaatcctcgacagcatcacagaaatcttccccaacagattcccaatagtgtttgaagaataaaacagacatgccatcaggtccaggggctttatgattgctcatggcgaacagagtacttttaatttcttcccgggaggggcactccaccaccccagcctggtccgcaagagaaatcttttccctaaaaaggtggccacaatccagcgggcttgcattgctagacccagcaaaaatattctcaaagaactccaagaattcctgaccaattagttctcgctcagatatccaaacattatttttgttcaatatgcactcaattgaattccttcttcctctaatagcagcagatagaaaaaagaatttggaacttttatctccatccttaagccagtcaattctcgccctttgtttccagtaaacagctttcctggttcttgcttcattcaggttccgacggatttcacattctaagttccaatctctagagccagcaggcaacgactgaactctatcaagttttatctccaaatcttttataacctcatcaattttcccaaactgcgatctcttccactgaaggagcgccactctagtagcaccaatcttcttaaaaacacgggcggggggccacagatggtgcaccgaatcccaagcattggcaacaacaagcttacttctaccatccctcgtccagttttcctcaaacttgaaacactttttgaacttggacgctatccctaccgtatcaagagacaacggcctatggtcagaagtactcgtctgaagcgaacagagaat

SEQ ID NO: 271344 - DNA, 639 bp, Cannabis indica
aatcatagtgcgaaagacggtggtagccaaacccaaaggagagaaggagatccaggcttagatcttgttattactctgcgatagaaaggaacaagggttagatatttgagtggaaggagtcatattatttcgctaccatcaatctaaggttttctaaactcttatgtgtttatttcattgttttagagaattcatatttagggtgttaatcaaacatacatgttagtaatctagatccttgtaaaataagttccaacaaggccacctcctgtacctacagcatgcagcatgatagcgacgttttgtctccttgggaccactttgtacctcaagccattagagcctataaatacccattttttagatgtgacgaggggttggaaaatcatacttgtaacaccatatttagagcaatagacatttctccattattctctcaatttcaagataacaatttgagtttaaatttcatctttatcttcatctcgttttcgatcatgacgcataagttgattttctggccacaagttggttgacgagttctcgccatccatgggaacgacaagcttttgtcgagttgttccttttcacacaatcaatacagaatccctagactctctcactgcctttaggatgtgg

SEQ ID NO: 271345 - DNA, 3639 bp, Cannabis indica
tgaataatttacaatatagaaaacaatgttcaaacaacctattttacacgcgtataaaataaaatagtcacgcgtgcaatacactgtttgaacgtaattttcggcgtgttaaacttttccaaatttcttaaaattttgcaggagatcttaaataactataacgtacatgaccatgagaaaaaatttgaccaaaaaattatttcggatgcaatgtattcattttaaagggatatgtaaaatttccaaataactttaccaaaatatatttaccctttttgcaattctgattttgttttggtgaggaaaaagttttctattcgataattggttaaagcattgtcgtgcatataccgtacatgaaaattaaatattattatatatactaaaaatctcactcccttttcaatacaaaaacgtttcttaccacgtgtcaagcaagggtttgctccttttcgctttacacagaataaaactggacatgggacgaaggacgcagcaacgacaaaaagctgaatattcttcttgtccagaaataaccttttcagaatcttcataccatttcaagtagcctcatcccaaataggggtaattaagtcaaatcacaacatctcattccagcttatatcaaatttgaagtccgccccttataaataaccctggtttttccctctccttttcgcttctttagtttctgtttcatcaaatatcaaaactaagaaagaaagagaagaaacaatctcaattcgaatttccatggcttgatgattaaatttctctctgtaatcgaaataactcggaaactctgattttcttttgtatctcgtagattatttgtgaagcgcgcaattggattcgggactgtaaagcgttttgttgtacattagtactggctgaagaaaatgttcaatcggagctgaaagattagggtttgaagatggatctggtgcgagtctttttcttgatcatgatgaacttgttttactttttagtggaacttcattttgtgtgttttttttattctcgtaacgtgagtcgatctttgggtttttaagcgaaatttcgcactgagtttctggttttctcgagttttcttggaatatccgacgttttcgaagtgagattgttctttaatcttctgaaaattttgcacaaaatttctgaaatgcgaaatgcgagaatctttatctaatcatcgtccttgtctgctgtttttttatgcggttttcgagtttagggaaaataaaaatattaaactaaaggcgattgttcatttattcctttctgcgagtaaacgtacgtacttaacttacagatgactaatttgtcgcagaaaatccatagactcggaaatgcggagctccgggactcgcttccggaatgtacattttcaaggtataatacatctccaaaggtcgtctccttgatggacgaagacgataatcagaacacgaagagcgtcgattctgaagtgaatctcgctcaagagagcataatcgaattgatttgccgagacgataaagttggactcacggctcagtcaaaacgagtgtatcagctatcttcggaacctttggaccgaagcatcgcatcaaagcttctccatctctgctgcgtatacgactcggtggactgcgcctcggcgttgctctgcggagaggttggaacggtaccgcttgtgaacgatgtggacgacgaaaccggcaaatctccgcttcacacggctgctgaagcgcacgccgcgcggtgcgtagaattactgcttaagaaacgtgctcgtacggacctcaggaccagggacggtcgggctcagcttgctttggagctgtctctttctagctcgaggtaaaatttctttgtcgttttcgttttaaatcattaaggtaaaataaatgcttaatcttttcagatgaacgctgcagaaaacttcctagaatagaatatttgccttttttctattcagtaacgttttcactatttacaaattactatttatgaataatttttttatgtattgtttagaaaaagctctttgttttttctttctctcctttctcgaaaactgaaaaagaatatcatttcatctttttgcgatttcaggatggatgtgacttggaaccctgacgattactccattgaggacttggtcgtctttcttggcgaaaaggttatccttgaaagagaaataaaattaaaaaagactggtagaaaagattttttttaagggatcttatcgtaaaggctgcttggttgctgagaaagctgtagtaacaaggaaaatataatgaaatttcagatcatttatgtatttatttattattgttttgcaggatatgaataccataaaacttatttgtgaaaaaacgaaggaagctgcagaggtggcgcgtgcaatggcggtcgaaggaggtgtagtcgctttagctgctatcctcgttgtggccgctgagaagattaatgattcgatcttagagtttcgggattctgattcaggttccaaggagaagatgactatatacgaatgcgtgataagagaggctttgtccttgggccgcgcaacctcgtcagtcaaagagagtgaggactctaaaaaaagaaaggttctgctttctgaaattgagctgcttcagctctttggtgttgttgctctcagccgttgtacggagaagaagcccagatcaccgtcaccactagtccaggcaatccaggttagaacagtacaagtttgtttatttatcaactagcataatttggtttaaataatatttgtattgctcattgttttgaaaaacggctaaactttcacttagattatgattgatagaaatattgtagaatgatgctatcccatttccaaaaatccaaccaggacaattttacttaatttacgtgaaaattttatttataaaataattatccaggattcaatacggggcccatttgttcttaaagaataaattattcgtacttttctttgacatgaaagaacataaaaattataagtgaggatctgtctaagaatatttgccatcagactagggccaggtttgataggatggatgagggagaggagaagctatatctttatgtttgctgcgataaaaatgagagagtcatctgtttatgaatagaacgaattcactcattcccaagttactatcacctcaaaacatacacacactatatttatgccactatcacctccaaacagaacagatagagtaatttgaattagtaaaaagctcttacctccaacatcagcagaagaataactgacatggaatctatctttgaaacaatattttaagaaggaaactaatgggttttggcaaattaggattataggaaaggaatagcgggagacctctaactagaggtgtctgattttcaaattcagagtactgggcaactgcatcgaaagaagccatgctgataaattgttgttaatatgttgtgtgtagtgatctacggcttgagttttatttttatttggataggctggagatgaagccgtcattgtgctccttcttaagacaagtatagatataaatgatgtcgatgcggaaggatactctgctcttcattggtccgttaaagcgtcgagggtgccctgtccagaggatataaagtctctctctctct

SEQ ID NO: 271346 - DNA, 605 bp, Cannabis indica
agagcaagagtgaggggaggacggtgatatgtcagaatctgctgaaaccgagtccgggtaatgctcggatccttcaccatgaagtactcatcagcaaaatgtcctattttgatgatggccttgtcatctgtgccggtcaaccacttgaagcctgactgagagaagtagaagtaccccaacctgccttgcttgggggtagaattcaggtcaaagaactaggcgacctcgtgggaagaaggagcatcccatccttgggaagcatagaggacgaagagggcgaataaatacttgatgcccttaggagtgatctgagtcgggcagagaccaaagaagtctgccacatccctgaagcatttgtgcaagggcatcatcgccccttgctggcccgtgggcccccgaccaggcacacatccccctatcagggtttgtgccacaattgtcgtgggtgggaatgtagcagtccagctcgcccaggtacccgtcctggtcgagagttcgaaggcgtgcctctgaaatcttggacggaggacttacccacctagcgcccaaggcaccctgcctcctatgaggaaccaccgaagcaagcttctcactgacgtagtcca

SEQ ID NO: 271347 - DNA, 1583 bp, Cannabis indica
tttaactggcatcaatttcccttgaactgacaaaacttttaaatttctaaatcacttacagttaaccaccgttataaagtaaattgatgtaacctatacggtagaggcaacaatgctcatactgggcacccagagctaaaatggaaatacccatttcctaattctcaactgataacaattaatcaaagatcattccttgatctcgaagtttcgtttctgtgtttggtagaaatcttaaaaatcttttcaaacacatcctgaaatatatgtacctcaagtatattctctgttttattgacaatcccttggcatgaaatacaatgcaaacatatagcgagtcgtccgttgctgatgctaattcataggccctcgtaacttttcccgtcattgtcgctaaggttttactcccaagttcatacgccactattgctcccttgaaatcatcatatcttcatacttggttaactcctctaaaacttattttaccctcaattacatagtttgttgtttaataaacaacctactttgtggtccaacattgaccgaccacttgactacatgcccattaaatagcatctcagtttataagcttttcccattctaggtgagcataccttttcatcattacttaataagacaatattttattgttatttcaatagtcacctcgtataccagattgaccgtctggtcaaatataaaagcattctcaatcattaccatatcaccatgaataattcatgtaatcttctttaccttagtgatacaactactctccctaatgttctattatacgttaccttagtaacatccatacttcaagcctccattgggccttctccccacggactattcgcttttatatacaagtgcaccactctggccacttcctggatcgatgactaacccttcaggctaacttgagtgttcccaacaggcttcactctaacttgagaatttcttgggaaaacttcctgaaatgaaatcaccccaggtcaagaacacctaattgtaatgttatttctaccaaaaacaagatacaccttgctattataggtagtctcaatctctccattcaagtcccctgcaactatgtagtcccatacctacataagttttagaatcatcatatatgaccttctccaagatgatgtgggattgtatagctcctcgtctattccttgtagatcatggggctctgactgtcacagtttgactcatgtcccttttaatctcatatttctcttggtagtaaatagattaacccacataattgtggcctttaattcacttaggattgcgggcactactcataaattgtcccactttactaatgctagatcacttctaaacaaaagattcttttctgtaaataaattagatggatgcctccattggctactcatgtcctatattccacttagtaataccagcaaatttaactcatattatcatttccctaatctttctaccctttcagatgagctaccactaaataacatacatgcaccgtccattcagatttttgatgtctctaattgaaaatacaatgtttaacatcaatatcaatcgaaatagcaaat

SEQ ID NO: 271348 - DNA, 762 bp, Cannabis indica
agggctttgttcctgttgaaccaaacaaaccaagcagtacaaagaaacaactcgacttcttttttggttagagatgtaaatatcatatcagcaatgtcatggaacaaaatctcagaagaatgagtaaaaatgtaatgataaaaaggcgtacctttccagactcttctaatgctccggcagtaaaataatgcatgtgagacagactcttccgacattccacaacggtcacactccggggaattaatgattttccttatggctaggttttttgcagtggggagggttgaatttgtggctcggaaggcaaagtgttttaccttggcagggagggcaaggtgccataggtttttccaccaaggcgagggggaggaggaggaaggtatgtcctgggggggagtggaagcaaggctgagatggtaaccggatttagccgaatagacccctgattgggaatgttcccatatgaactcgtcggggtgggggttcagggggaggggaatggagaggatttgctcgaccacatggggagggaagcatctttgcaagctaactaggtcccaggtagaagaaggggaaatgaaagaggctactgtatcggggacaggggcaagggtagggacctggcgaatacccgggatccaatgatcacggatcgtggaagtgttctgcccatttccaatttttgagattaaacctttgtgcaacaactcttttccccagcaaatgctccgccagacaaacgaaggtgagtgccctatcgaa

SEQ ID NO: 271349 - DNA, 623 bp, Cannabis indica
cctaataatttagggcgttacaagaagcctaccccagaccaggagctggatgtctatcggatgtctactgtgagacaagaagtgggcgtctcccctaaaagtgacacgtccacccatcgacataggatcatatatttgttgggaatgtttttccaggatctaaatttactaacaagtatattgaattaacatcctaaatatgaatatctcttaaacaatgaaattaacacataagagtttagaaagtcgtagagtattatcaagatctaagcctggatctctttctctcctttgggtttggttatcaccgtcttactcactatgattgagtacttgacttgctatgtgtgggcatggcactctatcacttagggttcggatatggtgaagaacaatgaaatcactatagaaggaactctctcatctactagttgtctgacagagaaaactaggttttatttggttgaaggcatcaagtggatgaatgagagcatcatgttccttttatagtgtttcaactagggcttagagcttaattatgtggattaaaaaagaataaaaaattgagaaaaaataatttctaaaaccgaccatacaaatgaccaatctctagttacaatttt

SEQ ID NO: 271350 - DNA, 526 bp, Cannabis indica
tcaaccctctttctcggaaaggaaggacagcttgaagtctgctttactcccaatgactctttcacccattgatattttcgagcaaaatctaagcttgaatttttgtgcaacttcaatcttctgtcccggaagtcgaagcttgcctcataaaaatttaacgtgactctcgcatgcacgttgtttttcgtgcaagaaagatcactaggggtacaatagttcttcttcaaccctccttcccagaatagaaggactgcttgaagtctgtcctattccccatgatgctttcccattgatcttttgaagaaaagtctaagcttgaatttttatgcaacttaagccttccatcatagaagtcaaagcttgcctcataaaaattcaatgtgactctcgcatgcacgttatttttgtgcaagaaagatcattcagggtatgatacatcttcaatcctccatcctggaatggaaggactgcttgaagtctgtcctattccccgtgatgctttcccattgatcttttcaagcgaagt

SEQ ID NO: 271351 - DNA, 1321 bp, Cannabis indica
ccttgactcagatggccagaccgagatccgaaaaacccgtaaccaaactcgaactaagactcgctaccctgacaccaacttggacccagacccagaccccgaaccaaacccggaccaaaacctggacggagaccttgactaggactgggacatgagacctaagacttgaacatggactaggaccaggaccgggacctgtacctgacctggtcctaaacgctcaccggatcctgagactcgcaacacagacaaggatccagaccctaacaaggacccgaacctaaacccagacaaagatagggatcgagacctgaacctgaacccgtaacgcgacctggactaaaacaaagactcaggaccagaccaggaccgtgactaggaagttgacccaaacctagaactgaactcgggcctagccccagacccaaaccctgacttgaagttgggccctgacacgtcgtgtacctagaccaacactgagacacggaccaaaactcggaccctatccaaaacctaaactcggacctagatagggatctagatatgaacttaaacttaaaccgaggcctggacccagaccaggatcaaaactcggaacctagattctaaacgagaccctgacccagacccagacctagacccgcacccgagacccgaactcgaacctggatctaaacccagacctaaaccgggatccgatcccgatcccagactcagacacagactcggacaaggaatcagacctcaacccagacctaggcccaaactcgaacccagacactgaatcgaaatcaaaactgggactaggacccaaaccggaacataggactcaaacctggatggggtatctggacttgggccacggaacccagacccaaatctaaacacggtactcggacctggatggggcacctggaccttggccccgggtcctcgactggaccgggacctaggactcgaacttggatatgggacctggacccaggacacgaccattagaactgggattgaaaactaggatccgaccccggacccgaaccctgacctacaatttgtaccgggacctgggacccgaagtggaactagacttggacccaagaatgtgaactagatctggaccgggggcttgaacctaactcgtagttcgtgttttgatatgggacccatacccggactctccaaccaagaccttgacccagactcagaccaagaacctaaccaagacccagacccgtaacccagacctaggtctgagtttgagtcttggtttgagtcttggaacatgaatctgactaagacccaaacccagacctgaactgtg

SEQ ID NO: 271352 - DNA, 829 bp, Cannabis indica
tgtaactggttttttttattggtatgtttatgttttttcaagagttcatacaaattttacgcctttctttcatgcaacaaattataataattatgtaaacataaaatatcacaaattctaatgtttaaaatagtccaacattaattcaataacaatacataatagtccaacacatcacgatacaaataaactaaaataacatttttaacctcggtagttgcaagtgcttctgttgtgccccttggcaccgcacttgctacaatttcgtgatttgataatcctttcaccgttacaagcagttcggttgttcttaattcttccaaccttttgcttcttgggtcgccctactggttgcttctcaacaggcactccaactgtcatgttcttgatgtcatcaggcaattcccaatcatcctcgtcaccaactggcataattgttccttcatatgtcctcctccaatattcagtcgtgtaatatggcgagcatagtgtgtacgcgctaatacttcgctcctgagatgcagcacatgcatgaggacaaggaaacttcatgcactggaacaagccgcaagtgcaagtatgttcctgcaagtccactacgccaccggtcataactgttcctccagggtgaacctgcaacgtgtaaggcccgcatgagtcaacgttcaaataccgacctttttcaaaatgcaatgtcaagtcctcctccatttctggtgctaggggtttcgtccacttgtccgctttttcttttcgtgaagcaaaccacttctggactttgtacctcaggaatgctacaccagcagtgatcgggaagcctcttgcatcc

SEQ ID NO: 271353 - DNA, 3336 bp, Cannabis indica
taaagttagtagggataaaaatgagattatgggagatgaaaataaaattaaatgggataatagaaaatttcacaaaataaaaattatactttaatattttaaaaaaataaacttaaaataatttttaaaatcactcattatgtttttctaattttttttctcatattattttgtgttaatttcaatatttattttaattttatttttatatttttatataaaaaaaatcatgcataatttttttattttttctaaaaaaaattcacatattttttatttatttttataaagtgcatttataaaattttagagtgcaaataaaactcagttgttaattttataagggtaaaaaaaaaaacatataaaaatatatgtacaaaaattaatttataagaagttgagatgggcaaataccccacataacaccctccatccaccctacaacaatgtacctttttttttaagaggtaggtcgtagaagcttcaataggttttttgttttcatttgtgaaaaatgcatttttttttaaaaaaaaaaaataccaacaaaccattttttttaatggaaaatgcatctttattaaccattaaaatccgctaccaaagatggtagcaagtagaatggaacagactccatatcgaaagtacaaccagaaaaaaatatagaagctcttgcacagtcatgacaaaatttataacgatcggttcgtagttataccaattttttttttctagagaaacttgatgataacaaaatttataacacaaaatttatgactaatgtttccgaaaaagctacattgttagcaatttgcaccaaattgtcgcttgaaatttattcaattataatttgagccatttgttaatttatttatagaccaagctattattatttatttaagttccaaagctcttaagcaagtgattcctttatgagttcgtggtatttaatacataaaaatattcaacaaatattatcatattataaccttatctcttaagatgcttgtaattatcatattataaccttatcatattatcattaaaagaaaattaaattttaatggtaatatataaaataatttaaatttagtataaaattagtattagttaaattttacaccacaataaatattaatttttatttattcttgtgttatttattaatataattaataattgtttttattttatttatatatttaataggtttttttatatattttcaataaaaaatttattcttttgttagatttttttataaaaaaaaaaagaagaagataattttaccttgtaatacattgaagtactattataaatttataccaaatataatattaatttattttttttgagttaaatttagcttttaattatacattattcattattcgttggagatgatcttgaagaaaaaaaagtgaatgcttacttacaagcacacacaagatgcttgttagtcttctatcttcttcgtgtgtgtgttttttttttgttttttttttttatttttttttttttttagtttttgtttatatttatttattttaattagcaagattgctttttagttcttattttatgagcatgatttatcaattgatatggtcctctttattttatttctttttgttagaaaaatggccctcctctttatggtttgcatcactcctctttagttagagtgatttctgacgattgggctttcagcccattacctattattggcccatatcaattacatttggagtaacatttgcaaaaaaaaaaaaaaattataccacatattcaaatttctaattttttacttttctactgtacggcgaattttttttttaaaaaatattacattacttttttttttaaaaaaaaatactgtataagtttttactgttgttctaccgttgtttttagttgttctactgttgttttaattgttttgttttattgttttacgattgttttataaaataacagtatttttataaaaaaattctatgtgacagtaaaactgtaaaattttgtctaaaatttagtatttttaaaaaaaactccaaaaaaaaaaaatggttttgaatagattatagatttaagcagaaataactttgaggaaattagattctataccctttttatattgtcatattttatttttactttcttttttaaagtctattatttttattttttttttaaacactttaccaattttacccctctcactttaatatgctcttcatatgactcccttatgtcagggtattttgagtaaaatacatataaaaaggagtatgtttcaattaaatataaattaaaagtaaatttagttaattgataaataaaagagatatttttcaatttaccccaataactttgaggagcctacttctaaaaatatattggcatgttccctataaatgatatttttaaaatagaataaaattgcgagaattattaaagtatgatactattgaaaacatgtttgtttttatttaggtgtaaacatgatgtgctatattcatggaagcctaaactcacccatattgtagtaagttggataggtaacccaacattatatatctaagttggcatacttgtaccatagtttcacttttaagaaatatatactactttgactcaaaaaaaaaaaaagaaaaaagaaaaagaaatatatactacttttcataatctataacttgttaccacatttcttagtttcacactcgtaacttctggaaaaataaatttaaaatactacattcaattaaacccagaattctaccgtatgcctattattattattgaaaatttcaatcaacctcataacattggtaatcccaacatgagattatggctcgctaattattattattattattaatattaaaaaaatttaaattagttaaaaaaatatcgtgcgactttttttttgtttaaaaaagatacatttattaataaaatattagacctcacggtcgttactaaaaatgtttataggaatagtagctacatcaagtcacccaaagtgtcacccaaagtggttatgggtaaaagcccatttggccacgttgtgagccataaagtaacaagttctagcagtaatatttgtataggtgttctacaaagtttggtaagatttggcttaatattgagtgtgttatgtatattttaagatcggacagggaattttagactgtcctatttctaaaaatatatttctaaaataagtcgatcatttttagaacagaccgttcgttttgagacttgtcacgtgactttaattttttttattttctcaatatttagggtatttctattctatctatcaatatggga

SEQ ID NO: 271354 - DNA, 1072 bp, Cannabis indica
cttacaagcagtttgtctcaactagtatggggaccatgggcctatataaccgaacttccaataagtagatctagaatttaccaagtaaattcactaacttattagttcctcattgcatcaaccatagaacttggaattgcactctcagtgatataaatgatccacgatattaattatccattgtcataatcccaataatcaatgatcctctatagatgatctacattgcatagagaaaaaattacctgtaataccctaattctaaggcacgctacagtgttttttcaaatgcagtgcaaactttgctaatcaaagaatttttcttgataaatgtgtcaaattaaaatttttatattaaatattaaactttatattatatccaaatatttacaagtgtcgggatcctgtttttaaacttctaaaacataatataccaaaatacatattaatcaggtcgctcagtgactacaaaatacaattcccaaatgtcccgagaccaaacactccaggtcgcgctgcttcgacatgtacaatctcatcctagctcaggttcactcctgttcagctttcgccttccctttacctacacatggaagcagaactgtgagtcgacaaactcagtaagaaaaggatataatatatcatataatttccgacttgtatttaggcgcccatacaccaatctacaaggctcaacagatgagtaagaacgttcaatactagggtacggccacaataccacatacacttcgtacctcactgtacgagtgttggtagggtttattagataccctgagtaccactgagtgatctaccacacacactaagtactttcccgtacttgtgccggtatcaatgtaatgtactctcaaataacattcactatgtcaatgcactctgtaccttaactgtacaagtgttggtagtgcaactaacactttaagcatgcatatacacataacatatacatacactgagatattgatatcacacattgtatgcagttcttaccttctttccagattcaagtgtgcgggtcgacctaaacaaaaattctcgtgctagatggatg

SEQ ID NO: 271355 - DNA, 3857 bp, Cannabis indica
taggggtggagaatatatggatatgcaattcaaagatcatttaattgaacttggaattgaatcccaattgactgcccctagcactccacagtaaaatggcgttgcagaatgaagaaatcgcacgcttttggaaatggtgaggtccatgcttaactattcaactctacctacgtccttttggggatacgctatgcagatggcaactgacattttaaatgttgttccatctaaatcagtccctaagacacctttataattatgtaatggttatataccaatgcaagttgttacaaccgagaaatctaccacaaatgatcctgtttagaaggtcacgactcctcatcgtagtgggagggtttccacaaaaccagctcgttatggcttggatggtggaatcaatatggtcgttggtgacagtattgatgacgatccattaacctacaaacaggcaatggcaagtctagaacgaaaataatggtcagccggcatggattcaaaaatggattctatgaaaaagaacatagtttgggaatatgtagatgcgcctgatgattatcatccaattggatgtaagtgggtctacaagaagaaaagaggtgatggtggcgaagttgaaatctttaaagctagactggtcgcaaagggtttgcaatatcctgagattaagaaaaatggattaacaaaccctaactggttaaatatgtattattatggaattatattattatataatttattatatgtgaattaatatgatatatgacatgttaagactccgttggtaagccaggagcattttagtaattttgacccgaaaagggtaaaacagtggaatttatattatgatgtgcttatggactgtattattatatagtgtacatgtcttgtcctttttcaggtgttttttgataggtcggcgcagtatagtcacaattgggaatttcgggccgaaccgggttcagggccgaaattcatttttgggattttatattggcattttattgttgagtgattaatttgaaattattttgagtatgtatgtgatgggtaatgatccttttgcccttggttgtgtgcttatgtgagaatatggccctaggggcaatttagtcattttagctattttatctattttgtgacaaagtgattattggacaaaataatgaattattttgcatttatttctcaaccctatgaactgacccccctctctctatatattcatctttctaattttgaatttgttgagaattgcttgggttggagcttgatttgtgggaatctttggtgcttgtttatatttaaatagctgttgacatttagatgttgaaaagcatgaaaaaggtgttgtgttggtcttgtatgcatgtggatagaattgattttaatctttatgtttatagcatgattgtgttgttaagattgtggagtatgttcttgctaacttagatgagattttaaaatgttgttgtgtatgaatttgattgaatactctcaattttatggttgatggtaagctgaatttatgattaggtatttaagttcttgggtatgagattttggtgatttatgctcaagtgtgtgcttattttgaataaggattaaatctgattttatgatgtatgtatgttgtgatttatagcttaaaatgtgtgtgacagctctttgttatgtgggttattattgtggaattatttctggtgtgtgagcatgcttttgactgagtttggggtgtgattgagcatgtttttgagtaggagaattgggattttctgggtttgaaacccaggggccgtggcctagctctctcggcgctgcagccccatgtggggagtgccgcggcctgcccttcgtttttgggcagattcgaactcgttgttcaaattcttgtaatttgtgattcggactccatttcgaaagttctatatatcgttggaaagctcgttttgagctttatgtgattatttggaattttaataccaattttatattatgtggaagtggatttagggattaaccctatatttttaaatcccaaaaattgtgactaggattaccggtacttggtcaggagcacccagggatttgaaatctccacatttgtaggacatcaggtaagatagtagtttgcacgtagagttaagcgcggtggcgctcatgttttatattatgtttgtgattaattgagaaccaagagtaatgttattaccctaaaatgagcggttatatagcctaggattataaccctagtaattaatgattttgggtgttatgtcatgctaatatgttggaatagagaattatgcggtcaaggcataattaaattagactaggtaaattagtaccttgagttcgataataatgcagtttagggttattaccctagaattaatatgaaggtaagaaagaaatgatgagcagtagcatttctaatccagtgaaagtatgatttagggttattaccctcaatagatgttattttgtgcatgttatgatatgttatatgagaaattatttagtatgcaagttagggttattaccctaagattatgtatacatgaatagggttatgcggcaaggcataatcaggttaaactcggtaactataaccgagataagccctactaaggccttattgtaaatagacgtgtgagcgtaacacgtggatctatgccagatagacatatataggcgtgtgagcgtaacacgcaagtctatattaaatagacaaatagtgcggtggcaccataattatgtgttatatatattgagattaagggttattaccctagtgattattaatgtgtaaatgatatgccatgttatatgtgtattgagattaaggattatacgtttaaggtataattaggttggactcggtaactagaactgaaatgaaccgttctaaggccttattgtatttagaattgtgagcgtaacacgtagatctatgccacatagacataaataggcgtgtgagcgtaacacgcgggtctgtgtcatatagacaaatgtaaaatggcattattgtatatgtgatatgatgattataattattgatattatattgtcttactaggcttggctcacgggtgctctgctatgcaggaaagggtaattttgtctctaatcagccatgagtgcgagagcttggcggtgcttgtacatgttcgggccactctagaccaagcaggttggggtctaccagcgatgtacttttgtgactctaatttttccacttaggttggctgatgaaaagacttgtaatattttgtaaaagatttttgggataccagaacatgtcacatttgattgtaaagtttaaagttgtttcaagttttattttcattctgttttagattaaagtttaaatttctccacttatctttcatgtaatcccgatttaggggattagggtttcataaatagttgtcatgacgtgcctaattgtagggcgttatagggttatacccaaagagaatgtgtggactatgaggatacttttagtccagtcaccatgctcaaatccatcaaaattgttctctccatagctactgctttcgattatgaaatttggcaaatggatgtcaagacaactttccttaatgaaattcttgaagaaaccatctatatggagcaattagaaggttataagcttccagggtaggaagagaaagtttacaaacttaataggtccatttatggacttaaacaagcttcccactcttggaacaaaaggtttgatgaaataattaaaacctacaaatttcactagaacaatgatgaaccttgtgtttaccaactcaaggataatcaagtggtagtattcttggtcctttatgttgatgacattttga

SEQ ID NO: 271356 - DNA, 2089 bp, Cannabis indica
caagtaccactctagtgagttaggtagatagacacagagagagagctaagtatctgtatgcagtcactcaagcttcaaaagatcttttgcaataacaaatcttctgtcatgttaggcattgtcagaagaaaaattaagcttctctgctctaggattcggcggctaatatgggggcggccaaggcctaaagttgtcatcaagaggcttggaaagtggaacttagaaggtcaacctaaaagaaacaacaatgccaaagttgttaaaaatgttcaactggggttgggccattctttctcaaaaagaccaatacgcatagccacatttaatgttgctatgttttctcttgcacctgccatttcaaaggctgataacttatcagccactaataatcatgaacatgatgattacaccttaaggaactcatcaatgattggtatgcaggccaagtctgcaaatgatcctccaaagagcatactaaaatcaccactgagcaccacaccggctagtcctgaatgtctttctaagcaaagaaatcacagtagatcaaacttgaaagtctccatcaacctccctgataatgagattacattggcaaacaataagctgcttactctcatggaagctgacaaggaattttcctcgaacactagtacgaatggccatgttcgtaggagctcggttccagtgagatcacctctatgctttcctgccagtatggcctcacactgcatgaattggtgcaatgatattgatggactccaaagcagcagaagcatattggaagtgctgagagaagttgatgcagatatattggctcttcaagatgtaaaagctgaggaagagaaaggtatgaagcctctttctgatttggctgcagctttggggatgaaatatgtctttgctgagagctgggctcctgagtatggcaatgccatattatccaaatggccaattaaaagatggaaggttcagaagattgctaatagtgatgatttcaggtgcttaaattttgttctctcctcatttttcttaacacacaagttaatgactaaacttctagcgaactctgaggctgtgtaagtttgcttctgaatcgattttgtgctgatttcaggaacgttctcaaggcgacaatcaacgtgccatgggctggtgaagtgaacttttactgcacccaacttgatcatctggatgaaaactggaggatgaaacagataggagctctttttcaagcaaatgatcctccacatatcttggcaggaggattaaattctctgagtggatcagattactcctcagagagatggacagacatagttaaggtagttaaggaatcaattttcatttcattcctttatctagttgactcatattgaaactttattccattctgaatttctctattaaactcacagtactatgaggacatgggaaagccaacaccaaaggtagaagtaatgaagtttctaaagggaaaagggtatacagatgcaaaagactatgcaggggaatgtgaaccagtggtcatcattgccaaaggccaaagtactacaaacacttttgtccataaccactttttcacttacatctattcatttatattgaaactaattgaactatgaaaattttcttacagatgtacaaggcacatgtaagtatgggacaagggttgattatgttatgtcatcttcagaatctccatacaagtacatccctggatcttactctgtggtttcatcaaagggtacttctgatcatcacttggttaaggtagacattgtaaaagaaagcaagtcatgtgttgaggagaatatcattaaacgacaacacaagttaattcagaagctggtaagtgtcacaagaagtagttgttcttcaaaaggtttgtggagaatataggcacataatttttagtgtcttcttttccatgtttgaacttcaaacaattatctctctatgcccaaggaaagtagacttagaaaataaattgttataaatatatataggtaaatgcaatcaattttgtctcatttttaaaagaagaaattgaatgtatccattagatgctttcaattttaatgtagtataa

SEQ ID NO: 271357 - DNA, 1467 bp, Cannabis indica
ctaacgatgctgacatttaataattttttatttatttttattttttaaaaaaaaaaacactttaggtggattttggtgtaaaaatttgcttgctgggttatgtaccgttgaggttatttttattaaacgatctgttaatatagtggcccatagctttgctagatcagttattttgtatcctgtaccttcaatatggagtctgttcctagtgatttgttaccttgtttggtaactgaatttgttagttaataaagttaatactttctagtaaaaaaaaaaaattctattatatagccatattttatatagaatagatatttgtatatctctaactagagttaatatatggtacgtaggtataggtgaagttgtaaaattggacagtaaaaattgaaagtgaacaaaaaaaaaaaaaaaagcagaggtaaagatgatcacatatatacatgtgtactaagagccttatatagctcgtaattcaaataatgtgtagctagctagttattcgtatatatatagcccatttaataaaaaaaaaattatatagtattatacataatgcaagtgtattatacaatcactactaaaatatatttataaattacttagattatttagaatttcctctagaaactattttgttaattttttttttcaatgatgtgactttttaattaaatgactataaaatttaaagacacaaattacaaatcataatttaaagagtaaatattctaaataactaattaataaatatacaataatatagactttcatgataggataactaattaaccagagtagtagagatgaagaggttttcaaactctatttaatttgtgtttcttttttatgtacactacttatatcactccaaccacaccacaaataactctttctatattatcactaacaccaactgcgatcaccttaactcctcccaccaatcttattactgctacaacgatagagaatgaactaacaacaacaataatagagggtaaactcgtaaaatatatattttctataatcactttattatttttatttttattttttaaaaagtacattttattaactcttatattaatttactgtgataggttaatgagttactaaaactaaaagatgttgaatttactaaaatgaaggagtgtgaaactcaattcgcgaaaatcttcaaaatcgtcatgattattgaagaatttctatttactcttcttaattttaaaccattctcaatagaatgtagatatggtcttgttaatgtcattattcaatacattatattatagtaatatctatattgagtgttttagtgttgttagagaaatttggtatgggagtattatttggaatactcttcgtattaaaattaagcaattattttgtgatcttactgttataatcattatggatgaagttatgatcatccaagtgtgtaggatgcgtaatattaagaaaaaa

SEQ ID NO: 271358 - DNA, 533 bp, Cannabis indica
tacatttctacatcttcttcccccttctcatatctgttcagattgtttttctttttttctttttcagatctgaatttttccctatatctatgtaacgagaaccccgccatcaacaaagcgtagtcccttggtttcaatctaaaaataatggtacaaattttgaaggtggtgataatcataccattgaataaaaaataactaattggatagtgataattaattaccatatttcacagtttcagattacagtgtgattggttactcatatttgcaacaatataggtaagtgagtacttataagttaaggaagtaactagttaccttttttcttaaattcaaactgcttttatttttttcatagacaaatttcatgttaactagttatccatgtgaccatgttgggaatgataaactaagatataacattaaaacatggtaaattgtttcttgactatgatctagaaaaataatatcataaatggaaaaataagattaaagaagaaaaaaaaaaatgaaggaaaaagaaattacat

SEQ ID NO: 271359 - DNA, 1628 bp, Cannabis indica
ataataaatagattatatataataaaaacatatatatatatatataaaactctcttcatcgggttggtcagggttagttcgggtagattgggcgggtaaagattgggtgggttatatttttgtcgggtttttcggtttgcatttttcgtcgagttatctcggtttagtttgggcgggttgggcggtttataaaaatttatgtacaaccctatttaaattgaattctatttttagtgaaaaaagcttaaaagattggattttggataatataataagagtattttataaaaataacctttataaaaatatttattagcaaaataattttataaaaaattttattaacaaaataactttttataattgtagaaacaaccataaattatattgtgtgactataaagtataaacgactattataatcgtaaaatgatcatagaacacattataagactgtaatttttgtcaaatttcatcagtaccgactctattattgtcttaaatagaacacaaataaaactcaaattttagattatttagtcaggatggaaatatgcattattagttacttttaaatcttcttttaataaatttaaaacgtagcatgtattgacgaaaatagaaaaaaaaatgacagttttacaaatattaagtatttatgccactaaaaaaattattgaatttatgcttacaaacttaaaactttaaatatttatgtcgttatttactttaaatttagtatctcaaatgtttagtttgaaaattttatcaagtagataacaagagagtgaaagttggttaatatatgaaaatagtacacatgatctgtgtgcctccatagatatgataagataacattatattacatgttgaattctactctcatcggagctctgccatgcacattggcggcgccgccaccacctccgaagatggagataaactccatgcccgaagctctgcaactccatgcccaaatactcaaatcaggcaaaacccaacaaaagagccttaccaacatcttcaccttctcagctctttcctccaatggcgacctcacttatgcccgtctcattctccactctatcccatcccccaattcattccactacaacaccatgatccgtgcctattctcggagcccccgacccaatccaaagctctacactttttcctctatatggctcgtaacagcccgacccgacccgataagttcacgtacccgtttgttctcaagtcgtgtgctcgattgggactgagtcatcaagggaaacagcttcatggattgatcgtaaagtcgggtttctgctcagataggtatgtgcagcattctttgattcatatgtactgtgcttgtgaggaagttagtcatgcgtataaggtgtttgataaaatgtctgagagagatgttgtgtcttggactgtaatgattgatgggcttgttgataatgatagacccatggaagcaatacaattgtttgaggagatggttgaggacagagttgaagtaaatgacgttactgttgtgtcgattttgagagcttgcgccgagacaggggcgttaagcgttggaatgagagttcatgaggttgtgaaggagcagaggattggtttgaaggctcatgttag

SEQ ID NO: 271360 - DNA, 799 bp, Cannabis indica
catagtctattccatagcaaaggcaaatataaaaaaaaaatattataagaaatccatagatagacaatagacagtttgatcaacaaatatattatgttaagtatgaagccagtaacaaatttatttcataggattttaaataccgagaacttgtacataagttaaatcaagtcctataaattaagaaaacactcaattgcaacaaaaatacaaagtgaaagaaagttacaaatcattgagcatataggacgatgttagactaatcttttacattcaactaaactcgaaagaactggacatcacaaggtattcattgtatgtgaatatggtcagcaacacaacaacacctaacaatacttttttctttgcaattaagtatcgggtaatatataattagatgtaataacttttgtagaatactgctaattaatcgtaaaacggcacctctaagcattactggtatttaatagtaatgttcttaattaattttaaattttgaatttgtttttcttcgagctgttgattagttaggtttggtcccaagactacataaagatatatatgcaataattatgttccattagttttgctatgtatgctcgtattttaattaattaggtcatctctaaacatttaattcatatatgaaaagataataaatatgtactcagggctgaaagccttctcattaaaggtcaagtgttgttattcagggagagatatatataataatatagagaaaagtatttttctgtcccctaccaacttcatcagtaaataagattttttttttaaaaaa

SEQ ID NO: 271361 - DNA, 1450 bp, Cannabis indica
cagatacagaaaatataaccaatgttataataacacctctatatcgaattattattaaattttattttgaacaaaaattaattcagtgttctatttgtaccattttagaaaatacagagtctattttatcatttaacaaaacagagggtccaattagtaactttcgcaaaacacaggatctaaaatggtatttacccttaaatttttttaaaaaaaaaattagaagcactcattctaattttttgtctctattacattttcttaatacttacactcaactattatatactatttctctttaattaataacattttgtaaatgaatcgtaattaatttttttttaacccttaaaaagttaattaaaattcttttctgttatacaaattacaaaaagataatgaagttgtgaaaactaagtaaaaagtaaacttcataaaaaaattaaaaaaaaaaaaacctaaggagttgatattaatttgtatagtgcaatgaggttgatattttatttttgtttttttgttttgtagttattttttagttattttatagttattttcttattgcctaggtattaataagggtaaattaatattgggtctcacacattctgatttaataaataatataaaaaatcgctaacaattcagaagatgtcatatattatggtattagacaccttaaagtactcaatagcaatgctctaagagcactcccaacaacttctctactctatcaatttttttttattttatatcaaacttttacattacagcgtaacagaatttttggtttaacagagttttttggttttctacgttatttttaatagaatatttcaattacttaacacagtattcttcatgaatttataatattattatatatatttaaaaataaaaattgttaactcttaaaaaatataaattaaacccttaaaatcttaactcaactccaacaatatgaacttctcttcaaccgtgaactatgcagagaacaaaataattgtgagtaagcttaattaatcgtttcgtcaaagaaaattgcctaattttgttactatcgacttttttggcttctttttctcgctatctctctctatagtatttctcagtattcaatcttcctaaaaatcacatgcattttgttctaaatttgtaataggtaacaaaactcttagttgtgagtttttctttcaattgatggtgaatgtttccacttgaatttgaattttttaatctaacaattttttgttttcatttttttagcagcgtttgacaagattcgaaattaaagaatacggaaagtggatttcggtggagttttggtagagtaggttggatcgttagagttggtggtaaagaatcaaatccagtttgggaactcgctaacgaatctggtctcaaaacttgctttttcgactacattaatgctcattataacatctacgat

SEQ ID NO: 271362 - DNA, 591 bp, Cannabis indica
aaacaaagagcaatcttattccaacagagatgtacagttaggatacatatagtgacagattacaatgaaacaaactgaacaattggttacaaccgagagtaacaaactataacagaatttgtaacagtaataactgtcactaacagaaatacaacagtatacccttaacacggcccctcaaggttacaattcaagtcatctatagcagaaggaagatcttgaattttaagcttggatcgaaaaagaggaaaacgttggctggagattgctttagtgagaccatcagcgagttggtcaatagctggtacatgtttaacatgaactagtttttgcagaactttttcacgcacaaaatagagatcaagctcaatgtgtttagttcgtgcgtgaagaactggattggcagtgagtaaaatggtactaagattatcacaccacacagtaggaggccttggaatctgaactcgaagttcggtgaagagggaatgaatccaagttgctcagcaacagtgttggccaaacttcgatattcagcttttgtgctggaacgagagattgtgtgttgcttttttggattgccattgctcaaag

SEQ ID NO: 271363 - DNA, 528 bp, Cannabis indica
ttcaagaggatgtacttgtgctactctgggttaagagagggttttaatgagggttgcaggcctgttattggtttggatggttgtcatataaaaggtgtacatccaggtcagcttttgacagcaattggagtagatgggaacaaccaaatgtttcctattgcatttgccgcggtggaaatagagaacaaagattcatggagttggtttctaaatctgttgagggtagatttgaaaattgagaactccaaccattggacttttatcacagacaagcaaaaaggattggagcaatctttgaagggtatgtgggatgaaggggtacccgaagccgaacatcgtcattgtgctaggcatttggagaaaaattttatcaaggtattcaaggataaaactctaaaagacctcttgtggaaggctgctagagaaccaacaattcgaaggtttgagggtgcaatggaggagattaaaaagatcagtaacgaggcttatgagtggttgatggctgcaggtccaagtcattggtctaga

SEQ ID NO: 271364 - DNA, 1009 bp, Cannabis indica
gaggaagttgaagaaggtaaagaagagcaatgggctcttcctgaggaagttgaagaaagtgaagaagagcaagaagttgctctgattcgcaagcgcaagggcaagatggttgccgaggaagtacccaaacggcagcggagagctgatactccggcccctggccctgattccgggatctctcccgaggtggaggaacacacagcgcctcccaacatagtgctgactccggttcctggagatgaggcgagacaggaactccggatagctaaacacaactacgccatggacgagtactcccgggggcatgctgacgtggaggctttgaggagggttttgcgagttgaaatgcaaaataccctcaacgattcgaactaccagaatccgtgggatctaaacttggaccccctggcagattggttcaatcgttttctcgggcccaccctggctccctttgccgcggagatgactggcgagtttgcgtctcagcttacccggtgtgcacccaagcggttcgctgcttgtgcatccttgaactccatctttcaagtccaggatctcagccattccctcactgtggtaagtatttcgtagtttacttttttcctcatcattttctcttaaggacttttactcatacttgtatccttttccagctcgctgccgaggccggccgcctttccaagaaccttattaaccatggcttcgtcctgtccgactttgggggcatggacgaagttatgaagatccttcaggattggactgctgaaaggcggatataccaggaggatgctgagcgccgggaggcccttgccaaggccagtgaggaagaggccaggcggagggagccacaagtggaggcgatgatccgggaggaggcccttcagagggataggctggaggccaagcaccaggaggagctgagggcagagggtgaggctactgccaaggccaagcgtgagcttcgggaggctagggaagccttggatgaaaaggctgctaaggtgaagtc

SEQ ID NO: 271365 - DNA, 507 bp, Cannabis indica
gtagacagtctttttcaagctatatgcagacggtttttcttgagttcatcgactttccctctcatcatctgcttgggagaatgacttaatggtttgcccctagtagcatttttgtaaagacaagtttgtaaccagttgtaggtttttcctatcttaaatgccttgtactgttttcatttgaacttaataccattataatgtaaacaactatattttgatcaaatatacaacaattttggttttcgccattgctcgtaatcttcttttttaagtagttagtaatctaccaaattttatgatttttgagcggttgtcaattctcacaattgcaattataatctgccttgagcaaactcaaatacactttaaggatcttatcactttgtatatttttaatttgctcgcatgaatagttatattatctatctattttctaggtttaagtacttatatcaaggcgtcgtgatgccacgtttagtactttcctagctcgcaagaaccgttagt

SEQ ID NO: 271366 - DNA, 1351 bp, Cannabis indica
ggatgttaattcaacatacttgttagtaagtctagatcctggtaaaatattaccaacaggtgtcccacaccagtagagattgagtatctttactcagttaaggtcaatctatcaaggaagaacgccgcagggggctttttctatcttggtactcattctagcgagcctaaaattattgtagacttgccaaataaagtatcctttaagaacaacttcttctggacatctggtctttcccccatcggcacaaccacgttttgcaaactatgtaagtgattgttctcttctttctcatttacatcaatctttgtttttcaagtttatgaccaatgttttgtttttttttttgacactcttgacgaggcgtactcctactcctgagatggttagtaggcacatgcgcctgttaactcttcccaacagtcttcggtcatgcgattccatttgagcaaggccaacttgcaatcggtggaccttcttgctgataaggaatatacttatgattacaagattccaattattcttcttggtagcagattactgtttttcctgaggacaaggcttgggatcgcttggctcaagcgaaataccttcgaaacactgccactagggaatccggtgaaggagcatcccaaggtaatcaatgtggttggtctcctactgtacatagggctaaacataatacatttgttaccttcctagactcccgccttaatttttatatttggaattcccttctcgtggaacgtattgctcataagtttgacagctggtatcctagattccacgtccaggttaactgtcatgagtcatattatggtatagccgagcaatacggtactatggaagatagggaaggtcatattgatgcgagctgggatttagaaccgattgagccttttgatatattcaagattacaggctgtagggattttagtggatattatggtccctatactccttcatctagtgatagctcgccttctactgaccttggtaaatcccttaggtggaaaattatattcctccctttttcttcagccttttaataattgaaatgccctgtcttgttttccagacatgggttatgaagatatcatggaccggaaggggaagaaaaggacaaccaaccttggagtccctacaactgccaaagtggttcctcctaagaggcaaaggaaaaccactgcccataagaagaaatcactggccgagcccatcgatctcaaggtttctgacaacgagatccaagaacaagttccccctttagtcgttttcgacaccaatgctcctcgtcctgaggtaacccccgctattgcttcttcgaacaaggccattgagaccttgtcgg

SEQ ID NO: 271367 - DNA, 567 bp, Cannabis indica
ctgttggacagggcgttatatttagtcacaataaaagttatttgtgattaatacatagtatatatttagatacaaattgttactaatttaatagtcacaacaagtattataactaaaaatacatttaatcacgacaaattatgatttttatagctaatacttttagtcaccaactttttagtcacaacataagaataatttataactagtcacaatttttttttacttttcgtcacaaattttgttgtgattagaagattttttgtagtgaaaattaataattatattaattgagtaataaaagagtaaataaaaaagttattgtgatgtaaaatttattccatactattttattttatatttagcataaatttttgcatgtgtttaatttagaccacattatacactaccattacaattcaattttataaacatggctaaaaaatacatatataccacatttataacacttcctcttatcaagttttatgttatttattgtgatattttcttcttcttttaaaaggatatcaagtattcttattcatgagctttctttctttcttt

SEQ ID NO: 271368 - DNA, 1269 bp, Cannabis indica
gcagagatgccttagcgttatatgaacctccgggagcaccctgagttccatgtgccttctccgggacctacgtccgggacgttaccttatggcaaaaagacttagcaaatattgtgaattgcttgatccacgtgtccctgtctgattggtccacgtatattgggcaaaattaggggcaacaacagtatttgcacttcttttgcagagttacatgcttctcttttacctgcccctacgccgatcctgcgagagacctggactcctcctccctaggattggataaaagtaaattgcgatgttagagtgggtttagagagtatgtgctcagctgttgtagctacaactcatctgggtaaggtgatttggattcacacatctcagttggatttctcggatgttttacgcggagaagctgaggcttgttgtctggctatctcattggctgcagatttagggtataagtatgttattgtggagagtgattcgagactggtgatcaatgctctcaataggaaagtgttccattgggcccttgataactatgtctccttttgtattaaatcttctccctcttttgttagtagtaacttctctaatgttagcaggaattgtaattttgtagcccacaatgtggcaaagtgggcgtttacccactaattgtacggttccattttgattttctctgtaccggaggaactactttgttatgaccgagaggtctaacaatttgcttagttaattcacgaatacgcttaattttcccaaaaaaaaaaaaaaaactaactatgtaaatattaaaaacaaaatagtcaacacggttaagacaaaataatctgaattcttgataagaataaataggagagaatattttggagtttaatagaatgctatcatctaaaacccttcgttttttcttggcctcactcttgatttcgataaccatttctgagatcgcgttcgctatggcggatcaatcttctgccagcactgctactgctgaacctgaatcagcggttcatattgtatacaccgaacagccccaaaacaacgaggaacctgaggcttatcatattcgaaccctagcttctgttcttggcaggttggtattgcctttctttctgtttgattcttgggaaaatttttgtttcgatgtgttcttattagataatggagttcccaatttcaatatgtacagtgaggaggcggcgaaggaggctctgttatacagttacaagactgctgctagtggattctctgctaagcttactc

SEQ ID NO: 271369 - DNA, 710 bp, Cannabis indica
atacctactcattactcccactcaacaataggtgtctggtctaaggcatactaaagcatatctgagacctctcactgttgatttaagaaattccttcatggccttatcttttctggaacagtagaaactttaccttagataaatgaaatctatatctagaagtcaaaaagcttctatagatttagccactagaaaagaaaatgcttcagcatcttactaaagtaagttgcttgcactagagtaagtaaattaccaggcataccacaagccataggtttagataatctcaaacctataatactaggaacaggaagttttgttaagtccattgaatagacttactaacgaaaatttcctttcttgtccttgtaatagaaaacttttggttgttccatatgaatggttttaaccatagttctcttggctttgcttcttagtttcttattctgacaatccattacttgtttaaactaataatggattttcatcacaagtgtcttccaagtcataacagggtgaatccttgaaactctgccactacgacaaggtaccgtgaattttgtctaagaatactaaatggtattgtcctcttcggttgtgtcaaaacaacagaggcagtgggaccatcttatacaaaataagataatagaaaacttttggaatcaagaaaaaaatatctcctctatgttgctactttgttttcagactta

SEQ ID NO: 271370 - DNA, 648 bp, Cannabis indica
tatttatgccataaaaagtaaacactcttaattttttttttttatattttgggaaatttttacatttctaaaacaatgtaagtaaacacatataaagtttcagaaaccatacagtgggtgcagcggaatattaatggctccttccattgagatctctaacctttgtgtcctgtctgtagaagggtatcaccaagatctaagcccaaatgtccttctcttgattctggattcttcacagccttacacactatgattgagttaccacttgatgtgtgtgggcacttactctatcagtcaaggtatgaaaatatgaagaggggaacagaagatagtggttcaaaattagggtatagaatagatggctcatgttttcctgaaggcaagaaatttcatcatctcttagtgtgagccatcactatctattaatagtcaaccacctaggtttaggttagaattaattaggcattaaaatattgaagaaattaaatgaaaaaaccttccctagtggtgagccgtaggatgtgggcccccacattggaattttttccattttacaataatctttccttattttctcaaaaatgacatttttccaattctaaccacttaaatgccaaaactgtttatttaataattaaaattaactat

SEQ ID NO: 271371 - DNA, 517 bp, Cannabis indica
gaccgactagggtgggggggggcaaacccaagttttggggggaagaacaaccacccaaattgagggggcatctcaacagtcatgactttacaccttcttcattaatttagtcccgatatttttgtgccacgtgttgctactcttgacacgtcatcgtcgttaaaatttgggtaaacaggaccactattacgtaccacattcccaattgggcgtttggtatgagatttagacttgatgagaatgaaaatgtaaaatttaattaaatttgaatgacaaggaatttgtgtttctaagtaagtctcactttttaaattaaaatgatggtaatgttaatcccttcaaatacatgaatttcatattctctccaagtctactctttctaactctatactctctcaaactcaaactcacatagcaaacacctcattaggtagcgtctggttatagaagaaatgaaagcataactagaataaaaatgacatttctattataaatattattaattatgtggatgtcc

SEQ ID NO: 271372 - DNA, 919 bp, Cannabis indica
tgcgggtgatggaccaacctcgcgtcactccccataaaggtaatgtcgtcgcattccttcttaaatagtttctcgggccgttcactatgattgttgacattggtgaacgacttttctttagcttctttggcataccgctcttgggacttgcgagagtctcctgcgatatggggtcctccaatgatggttaggatgttgcgaggtgctctggaaccactcgcattttggttttctcctttgtcatccgcttggggatgactttcctcgcccttcttatacttgtcgaactttcctctccgaattagctcctcgatttcatcctgcaagacccaacattctaaggtagtatgaccaatgtccttgtggtacttacagaattttttggggtctcttctgtcgcgatttcccctgatggggggcggcttcttgaagactccgtttctttcttcgattgcgtagatatggtctcgggggactgcgagttcagtatagttgacgaaacgaggtccacctttccttttcggcgaggattccttctttggaggagacttggccaacttcggacttcgctgtctccgcgggctacgtctccttgggcttcagcccctggagttcttccctcggggactgcgagatcgtgaacgcggtattggtgattggcgtttgtcttttcccttctctaactctgccagagaattctcgattctcttgtggggttcggccatggcgaagaattcgactaaggattcgggccttcgagcttgtaactccttccaaaagtcggtcctcggcaagatacctgttatcagcatgcaaacaagcgaagactcgggagccttctcgacttttgttacttctgcattaaaccgtttaaaatagtcttgtaaagactcaccaggttcttgtttgatgttggcca

SEQ ID NO: 271373 - DNA, 953 bp, Cannabis indica
gtggtaaaattaaaaataacttccatagaaatacttacgtttagtttggttccgtctcctttacgtcatctttagcccaagataactagaaaaaaaaaaaaaaaacaaattatgaagaagaaaaacaatttaaggattagtactttaaatcatcatgatatgaattaaaaatactatatatataatatagtatataagcattaataatttgcataaacaatacaccatattgtatgaataatattatttacatatggtgtattatttattttatttgtatataaaatgcttatatttttctgccataaataatataggaaaaataaataaataaataaatacataccagaaattatattgtatacttattttatttgttttaatttttacttttatttctatattctttatattctttaagatatattcatattaaaagtaacttagaatataactacttatttctttaaaattaaatgtgatgtgtatattctttattttgtataaggtggtcaaaggttgccaattgaattgtaaaaatatacgtattttcataataataatattgacataccggccaatcatcattaaggtggcttgaggattggtcccaggagaaataacaaaagttgatccatcaacaactcgaagtgaattagttccaataactttaaaatcaccatccacaaccttcccaactaggcatccctcatgataatgccaaatagtcgtaactgagcttcgacaataatcttccatacccgaattatttgactggtaattacttggcaaagtaggacccaagaacatgaaatccctagccccattcaagtccttgtacttaaatcgatctaaggattttgtttccaacatctcaccgagttttctcatcgcgctaacgcaacgagcaagatcaatcgggttagagaagtaatgtagttggagcaaatggt

SEQ ID NO: 271374 - DNA, 980 bp, Cannabis indica
acctctttttatatgtatggtactcaaaatattctgacataagagtatcttgaagccataggtaaaattggtttaaaaaaagagttaaaaataatagagtttaaaaaatagagtaaaaataaaagatgataatataaaaatggtatatagtgtaattgttttttatttgaaaaagcaaatttcaaaacgaatagaaaaacctcgattgtcgttccctccctttgaaacccatttaaaacacaaaaacacttattctcccctcataactgaccctacagttttctccaatgacggcctctgagtccttgctcttctgcatgttcttggccctaacattcgccataactctagaacagccatcgcttccagagaaccctgtatctgcaccagatgttcaacattcctctcttctagtcgaactcgagctgctcaagtccaagattgcctcactaggtaatcattatgttttcttggttttgaaaagaattttttttacaaatgtacggagtgtatggaaattttgaattgttcttgtattattcattattttttgttaacttctggattcttgcgatggtgtgtggaaaatcggaagtaagagacgttgagttttgttatttaacgtgaagcaagagaaggattatgaatattcttctccagttgataagattttttttaatgaaaggtgctttttaaaatgtttttgatatcattgcaaaaaatcttgtgtaaattaagagttaggtacattatgttaattttaaaaataatttctcaaaactcatattgaaaaaaattacaaatcctagtttttttttttttccaaaattgtatttttttatttttatcgtaaacaaccttttcatttctatgggctttattattattaatattaactattattattattatttttctattttctactattactctttaagatgtatgatttgtgtttttgagttttcatttggcttttt

SEQ ID NO: 271375 - DNA, 1075 bp, Cannabis indica
ctatagaggaccattgattattaggtttataataatggataattaacagcgtatctatatcgtgaaacatatagagcattctatataattgagagtacaattccaaattctatagtggtgcaaggaggaattaataagttggagaatttacttgttaaattgtagatctgcttattgggagctcgattatatagtttagatagtttagcggccaattaccttttactttataataaataattaagcaattaactattttaactactctattgtgtgtactcttaggggagattgtctttctcccttatgttgtgggtaaccaatagcccacgatagcccccttaattgtgagttcggtcagacggtgacagtgatccatgcgtgtgtagttctcaagtacctattctcacaaactaggtacattttgggtcctcaatagaaatgtcaaagctgcatctttaaaaaaagtgttattatcccacacgggactctctccagtatcacacattgcacttaggggtatttatggtgcaggtggtgtggattatgacctatattttaacccaagccacatatgtagttttgtaatttctcaaatcgcaactgaatcgtaagatcttaaaactgcaaaagtcacactacgaaaaatacagtacaatttaagcggttacacaattcattatcaaatattataaatatttactaagatttttagaaactgattaattagagcttaaggaaaatatagagcaataaatagtagacaaatagactttttatgaggttcagacgttaataatccctagtctatgagtcccttatattagccttgctggcgagtgtttaagtattagaagtgtttacaatgataactctgtattcttcttgtttctctcaaagaagaaagctttctagaaattttagcagaggttttgtaagtaaaatttgttcaccctctacatataaaaaatagaggcatttatcggcacacatgtgggtaagggcataccctttacctgttgggttttgtgcactaaataaaaactcatttcaatataatcagatttactagtaa

SEQ ID NO: 271376 - DNA, 1092 bp, Cannabis indica
tctgaacggaaggagtcatatattccgctcacccactggaaggttttctcaactttatatgtgttattttcattgttttagaattcatattaggtgttaatccaacatacatgatagtaaatagatcctggtaaaataatttccaacagttccttccaatgtctactccatacatccgatactggtaaattttactaatgtcctggaaaggacataacacttatccaagatgtaagtatacattatcgctaattatcatgtcagtctaaatctattgaactgacaaatcatgggaattaaacttttgaaacatataatcatgattatattccactatactcatgacactataatcacaaacaaatatgtatttatatatgttctacacttaatagaatttatacattaaatataatcatgaaataaatcatgtgaaccatgcaacattaaagcgatttctgatcttatattaattagtaattctgattatattgaaatatgttttatttagggcacaaaacccaacaaactcccacttgcactaatataaaataaaaagtgcatttcaattaatctcaaaaccttgatatctagatcaagtgtagtatgtagtattatctctctaataggatctgacagattgtatatagtacaacctttctccaccattacatttccttaatcacaaaatccttaatattgtgaaattcctctctatatgtgtactcctctagggatactagattctttactttttggcaactacatttgtgttagtcaggaagtgacactagtagttaattaattattggtacaatgtcaaaaactgtatagaactttccacaggcggaataagtatctttcctgcaactttaatattcagtctcactggtagagtaatcaccatctcatcggtagactttctagcactaacgcaagtctagaaacctgatttggtgtagtctaagagtattaaagtaccacccttatcaactaacatatagttcctcttcttaatcttaagctttacttgattgtcttccaatgttcctttcatggattaatttgatacctactcattactcccactca

SEQ ID NO: 271377 - DNA, 721 bp, Cannabis indica
aacacactgcaaaaaccaaacatgaaaataacacaaattaaagcaattaatttctttgcaaaaaaaaaactataaatatattaatttatattgtcgctaaaattaaaataataataatatattattaattaccgatcctcttgtggtgtccattggcccttgatgatattggatttgttttgaaccttgctagcttttctagacctttttttcttcttcagaccatggccaacaacaacagatgatgaggatctttttcgtaattccttttggtcatcagcagctggtgcagaagcagctgtggtcatgcatgagaagtggtcatcggccactgtcttggccaatcccaaattttgaaagtttaaggtaccgggctgcacaggagaagaacctgcggaggcctgatacccatagaattgtgactcggcagtggtggtaccactgcaagccaaaccatgtaggaccccattttggttttgggatggaaaaaggagagacagctgatgaggatgacgatgagtaagcagattcaaaggagacatggctattagtgggtgttgaaaccccataaaaagggccagaagaagcagatgtagccatgaaatgaccaaaaccatgctgagaagacccattgattgggacctcatcatggttttattagcatgatgttgttgatcatcaaaatggtggttatggtaggatgaaagctccaaggtaggaa

SEQ ID NO: 271378 - DNA, 1395 bp, Cannabis indica
gaacacttggctatggtgtttcgaaagttgaggaaagaggagttatatgtgaagcgagagaagtgaaacaactacgctcgtttctcagtctagccaattactatagacgatttgtggagggctattcggaaagagtagtacccttgatagagtggttgaagaagggtgctatatggacgtggtctgagggagaagctttttgaagtctgaaagaagccatgtttgaagatcctatattgaccctgctagatgtatgcaaaccctttgaagtacagacggatgcgtacgattatgctttgggaggggtactcatgcaggagggccacccaatttgagagccgcaagcttttcgaagcagaaatgttggcagttattcattgtttacagacatagaggcattacttgttggggtcaatgtttgtggtgaagacggacaatactgctgttagtcatttcctcacgtagccaaaactgactcccgagcaggcccgatggtaggacgactactttgagcacaaggcaggatgtcttaatcaggcagctaatgcccttagtcgtaaagcagagttggtggctctaaaggtgttagcgggtatgtcagctagccaagtgggtacactaatcaggagcgcatcaaggagaacctagagaaggacccagttgcaaagaacatcatggctctcacaagaaaaggaaagacaactcagttttgggtagaggatgacctcatgtggaccaaaggtgggcgtttgtttgtttcgaaggcaggcgatctgaggaggatgctgctgagtgagtgtcattacacgttgtgggcaggtcatcaattgtggcataggacacatgcccttttgaatcatgggtgctattggccacagatgcgaggggatgtggtggactacacaaggacctgtctcgtctgccaacaagacaaagtggagaggcacaagatgccagtgttgttagaacctttgttggtcccaagtagaccatgggagagtgtctcgcttaatttcattacaagtctgccaatgactagaaaattgaattcgatcttagtgatcgtggaaagattttcaaagtatgcaaccttcatcccggtgtcgaagcagtgtccggcagaagagacaactcaacttttcttcaagcatatagtaatgtactagggagtaccccagaatatagtaagtgaccgagatcgaagattcacaaggaccttctggtctaaactatttaagcttcttgggtcataaatgaacatctcctcgagctaccatccacatacagatgggcagatagaaagattcaatgagatgttggaggagtatttgcggcactttgtcaattccaactagaagaattggcaacaactactagacgtagctcaattttttt

SEQ ID NO: 271379 - DNA, 552 bp, Cannabis indica
ccccctcccctaacccttcttcttcttcttctcaacagaacaccccccaaacatagacagatcattccaaatctttggagtccccaaacccaacaagaaaacgggaacatgttcaaataattaagaaatattcaattaaacaggttatgagcattaccatatcataatccaaactaagaaccttcaaaccaatattcacactattaaaacgaattcaacgtttacatcacattttccatcacacaatcatggtaatccaaatcaaacaaaagtaatctaaaaattatacaagtcccatggtgctattgaatcaagcaaagaaagaagagaagagtattttgaggttgagaaatcctgtggtcatgttcaatcggactagggaggggagggccgaagctggcccgaatgggcagagtagcgggagctggcccgaatgggcagagtagcggcgccacgcagctgagagggaaaccagagatagggggcttgggagagagaagaaagaaagtgttatggtttttgagggccagggaccttgatagggtccatttc

SEQ ID NO: 271380 - DNA, 865 bp, Cannabis indica
agaatcaggatagggacctgggaagcagaactaggactgggacatagtacccgacccagacctgaacttgaacgtaggacccagctcgtgacccgacacagaaaatgcaaacagactgggacccgagattggatccggattttgatgcaaggcttggacaaaacccgtagtcggtgtctggatttgggagccaaccctagaccggaaccctgacaaggaccgcaccccacactcagacctgaacacagtcccaaacccaaaagtgaccccaacccgtaccatgtgacccaaaattggaaccaaaatcgggaagttgaccgggactggaactaggacttggactttgaatcattactgaaattggacctatatccagaaccgtaaccggactaggacccggactccaaatcagacctagaccagaattgggagccggagccggacgcagatcccaacccaaatctgtactcgggacacgaacgcaaacctgaactcagacccaaacatggaaccagactagggacacagaactaggttgggacctagaatcgcaccacagtctcgatcccgaacccaaacttagaaatgggacctgggacctaaaccagaaccagaccgagacccgtgatagtgatccagatcttgactcaggtttcgggtaacagggactggaacagaccagtagtcggtgtctagatctctaactcaaactaagaccagaacccagacaaagaaccaaacccgaacccagacctagacttgggacccaaaattagaacctgaacaagaatcacaaaaccaggaccctagaaaaagactaggaccccgaataggacccggagccagacgtagaaccgaacacaga

SEQ ID NO: 271381 - DNA, 560 bp, Cannabis indica
atctgaactaattaaaaaaacatatattcttgacacactctctctctcccgatttctgatcatcttcatcttctccatgaagcctagctagctgccgccattattgcaatatcttctccttgaaaccccgcaccagtcccttggttctaacggagaaggcttcgcgacattggcagcaagttcgtaacgacgaaagcttatggatgatatggggagaattttctgaatcagatctaaaggtagaagaagatgaagatgaagatatatgtttacgtgtattttgccgtaattaattcttttttctttctttatttatttattttttataaaaatgtaaaaagtagaaagatgtgcaaaataaaaacttatattttaagtatgtgtggcttttcaagaaattgcagcatggctttggtcacacttgactccatcaccttcactagctagctctcgttcgaacaacacaatttcatcacatgggaaaacaacctcacctaattcaccacctaatgttatttagatggtttcatcaatcaaaacaaaagaaaaagaaaagtata

SEQ ID NO: 271382 - DNA, 1553 bp, Cannabis indica
gggtcctcccccctctcttgtgttatctgttttcatgtaatgtattttcaaaaagtataaatttttaaaataatattttttttacacattttttgtaattatgttatttttattgtacgtttatgaaaaaagtcctattttattttcttcgttgctttggtttattttggtttcgtatttatttttatttttgtaaagccaaatttgttagtcttgtcttcaatttgttatttcaatttattatttgactaggttaatttataactttttaattttattaagttttgatgtattaatgaagttttattgattattaattttaatttactttgatgtattttgaagattatattgtatcatgcctttactaatttatttttgtgtaagttgtgacttgttttgtatcagtttgggtagtatgcttatgtgctcaatgtggcttgtttaataccatatatgacggttcgttttgagtttatcataagaatgatttgatattggcagtgacaccaaatccgctccacatatatcaaagataagtaagttttttctttataaattaatattttggaatattttttaacatatagataaaaattctcattttcttatgaatcagtattgatgatatacaactctcattttaatttaacattttttttttataaataaggaaactttgtattgctcaaaacatcaattacatcccatgttttttgtacaaaaccaactgctatacactataaaactaaaactttacaaaaaattacaagttcatcacccattgcttgtcaacttcctttgtcctgcttggcaataccccttctattcttcttttactctcttgttgtactctgttaacaattaccttgacttgccattatttttggttccatagtacatcatttcgtgccccccagatccgatacaccaaagcagccaacatagtattcatcatgcttctccttgttgctgatattttcttgagtttgctgatatactgcagcagtttctgcaattcaactgcttttgttcctcactgcagcttcttcttcaattctgttaggcatttgctgctatattcacatataaaaaatagatgctctatagattcatttcccttcccacacagtaagcaagttaaatccacattcatgtcatacttgcttattctatccttaatattaagttgtgtattaattaaattttatatatttattttatataagtgcgtttttatttcactcacttgatgatgctaagatataaggatttcaaaagctatcaacaaaggaagaattttttttaatgagctgggggtgctgtttgattatgttatagctttattttctacattcctagggacagttttattccatgtgactcgtaataagaattatgcagctctagtttggcaaagcatacacttcggttagacgatgaattatactggttcaaggagcgtgccaccactgattatagattgcagcatcgggatatgaaaaaaaaatgaaaaaaaataaagtagggcatctgaccatcgggccgaccat

SEQ ID NO: 271383 - DNA, 2197 bp, Cannabis indica
tttttttaaatttttgaaattaaatttaacattttaattcttttaaaatttttttttaactattgcgtatatatacatatattaatattacatttatataaaatatgagacaataatatgtaatggtatattatatgctttcttgatcaatttatttttaagaaaataaaaaagagtttatacattattaatattatatatagctattcatagtttttttttttgaaaatttaatttctttaatattattttagaagattaagggctcgtttggtacgtcgtataagggtcgtattgtattaaataataaataacactatgtttggataaagcaatatattgtattaattattacgacaaaaaaatttaatataatgtatgttgtattatttagtacataataaatagtgtgtattagcttgtattataatatttactaaagatttggggtcaacaccaactcggacccgaatccggacccggacccgaacccggacatgggaccgggacccgaacccggaccctgactcggacccggacccgaaccgggacccgggacccgggaccgagaccgagaccaagacccagaccgagacccgaactcggaccctgacccgggactcggacccggacccaaacctgagacccatacccaggaccctgacccggacccagactcaaaaccctgactcggacccaaactcagacccgaacccaaacttggacctggacccgactcgttgttggtgttggggtagagtttattaaaaatatataatctttacacaatttattgatacatgtcaataccaacacatagtattgtatttaataatactagtacaaaattaaaatggatataaaattataagttaatattaaaattctaaaaaaaaaaaaaaaaagtacaggtcggatcagattcgatccgaataagtcgagtcggatctgatctgatccgagtatctgatctagcaaggcgggacggggcagatctttatataatctggatcaagtcggatcagatccgacctgacccatttacactcatattaaaaacacttgatactagttcaagtggccataaaagaatacgtatgttcgaggttttgtgttcaagtggccagtatcgagaagttctcattatgcaagtgattcatctacggcaaaagtaggaggctattgacacattgttgtgttagagagtctcacattgataatatagaaattaaatatcatatataagatgaatgaactactcttctcattgtcaattgattttgagatgaattctcatgtaccttaccatatactcacttattctattaccttaaccatatacttccgcattcttacatgttaaaattcatgaattctcctttaagacaaaaaccaagaaaatgatagaaaacgattaaaattctattaactaacaccaagatttttaaaaaaatatatataaaacttatctagtctgcactgtgaattaataaccaataaaatcctgtgatataaataatatgatattgtaacagtcacagagcattgatacatacactatatagtatagtgtatatgttatattcgtagaacattaataaaaagggatcgatcatcatcacaacgtagtagtgtccagcgacagagaaaaatgagccttgtgagatgccagtaacaccatagttttaggtcttccatgaccatggaaactttgctacccaaacttggtgaattaaaatcccagttaatgtgtctctcccaatcgatgtccatgtcccacttgtattgtcctatctttttcctatgttcgacaatgtatgaaaattacatacggcacataagatgcatgagctactcctcacagtcaattggttttgagatgaactcatacatcttacaattataacatcctaagagcaacaaagatgttgaactgcaataaaattcaaagaaaaattgcaagtctatgaagatgcctggtgggggatgataaaggggataaattaaggaatggaggaggttatttggcaagatgttaatttactatatttataatacacaaataaataaaatattataaattatataaatatgtgtgctatgtgtatatataaatgaaaatggaaaaaaaaaattgaaaattacttcatatattatttttttatttttttaaaaaaatttatggtttgagtttcta

SEQ ID NO: 271384 - DNA, 707 bp, Cannabis indica
gcttgacaaaaaaggaggctgtcatcagcaaacagcaagtgtgagattggcggagcatgcctggttagctagaacccattcagattggccattgattgttcttgatgaagcaagcgagataatccttcagaacagattaggaaaaggtatggtgaaagtggacagccttgtctcaaacctcgggaaggagttagagatcccgttacttcaccatttaacaaaaaagtgaaggtgttggtggtgaggcagcccataatcagatttacccactttgttgcaaaacccattttaaccatgacctcttgaatgaagcgccattcaacccgatcaaaagctttactcatgtcaagtttcaaagtggcaataccagaccgacccgctgttttatttttgatggcatgcacaagttcaaaggcaacaaggatgttatccgtaatcaaacggttaggcaagaaagcactctgagtttcggagatgacatgaggaaggacatgcttgaaacgaccaacaagaactttggttactagcttggagatgacgttgcagaggctaataggtcgataatcctgaaccctttgtggatttttaattttagggataagggtgattatcgtcttgtttagtctagtcggatcaacaccatcattcaatacactcaaaacagcattagtgaccgattcacccacaatggaccagttttgttgata

SEQ ID NO: 271385 - DNA, 1047 bp, Cannabis indica
atccgtgaaagtacaataacggggcaaaatcatatccctatgtatatatattgaatggataaaacaaaggttaagattgcggaagaactaatcaaatttaactaactaaaataataataaactacgaataaataaataaacctataaatataataatacttccaaagctacagaatgcgaataaaaaaaaactacagatacatattgtattaggaagatatagagtttttgttaaatatacatgttaactatatgcatacgccaattaaaaattacagcactttaataagtttttgagaaaaaataaaaagatgtttgcaacaataagggaacactatatatattattgtataaactttcaaaaacactcttacataccctttcaaaaaacaaaaggagagagatactataaatatttatgtgtgcattaatagcccttgttgagtttcttatatgagatgaggtggcgtgtgatatgcccgagcaaaatatctggcaagataaagaaaaacgtggcagttaaatatctgaagaaaagtggtcaaatccatgccatacaccattcattattattattattattattattattattattattattattattattattattattattattattattcatagatgagtgaaaatgaaaaaagcaaaagtatatatcttatatattatataaagagcttgattacaagcaccatgcatattaacaatgtgctcttacaactttatgtcactttatatttttattttttaaaataagattatattattattattattttaataattgaaaaaaaataaatgtgtacatatatgtatagtgagttattccaaagtatttttttatatataacaacaactaaactaatatctaacctttgtataaaactgttaaactgttaaatattgattatatatatataaaaaaaaaaaaaaaaaaaagccataagcattttgatgaagatcgatattacatgataattacctactcaaaaaaaaggatattggcatcattctaggatgctacgaggtaat

SEQ ID NO: 271386 - DNA, 664 bp, Cannabis indica
tttaattttttgaaccgtgggtctgacagtcctccatatgggtccaatggtcggacccatcagacccactgcttttttttttaattttttgaatcgtgggtccgattctcctccatttggatccgatgggtaccatatcggaccaatcggacccaaagcctttttttatttttttaattaattattcttgtaattaattattatttattattttatgattaatttattttgtattgatttattaatatttgtgttattaattattcttttataataattattaattattaattattattttagttaatggttttaagaattattttatttattattgatttatgaagtattgttttattaattgttaatttttttattttttattaataaaataattaataattattgttttattatgaattatgaattatagttttatttttttattatttttattaataattgttgtattattaattattaattattgttttattttttatggttttagtaataattattaattattattttattatcaattaataattattgttttattattaattattaattaagatttttgttgtaaattataactgtattttttaaatgttatgtgacaggttcaactattaatgcgtatgttatgtataatggtgtt

SEQ ID NO: 271387 - DNA, 1121 bp, Cannabis indica
aaatctttcgacttaagtgcggcaagacatcgtctaacgcatttaacatccctgccatacttgatggctgccttgacttcttgatatgcgattggaagtgatctcaacagaatgatggcctgactttctttatcaactttgtgatttatattagccaaacctacaataatctcattaaatatatcaatattttcatctaaagaaagagaagaaatcattctaaaatcgtataatctttctagaaaattaatcttgctagaaattgatggctttaagtacaattcttccaatttatcccaaactccttttgtcgtcttctctgcgatgagttttcttcgaacactatttgatagatacttgatgatcgtatagtatgccatctcctccatttttggttttttctctggtttcttgccaataacttcttgtctccaagaaccttgaaaattttctagtgccccgggattccttttagactttctctccatagtgcaaagtccccaattccatcaaatttttccaattccaatctcgccatcgatgacattcaaagtttcttcaagattgtagcggaaagaatcttgattctacgttcttgatcaaataccgagctctgatttgtgggaaaattacgtctgaatgtgtagaataaaatcaactaaactttaaaaaatcaaatatttagcaataacaagattatcaaatcgtaaacaacaatcgacaagaaaacaggggcagagtacgtaaaaaccaaaaacaacaaaatgcaaaaaataaagaaatcaacacgtaccaagatatatattggttcaagttcaataaatcgatgtgatcaatggctctactccagttctagaacaccaccgtaatccttctttattgattgaagaagaataggtacaatacagttgagacgagattctttattgagtcctcacaaagtgtttcaactctcacactttttgccaaatagtcttcttcatctatagaagattcttcttacaaaatccaaacacaatctttctcttttctctgaacctctctctctctacctctcatatttctctcttaaactctcaattcttagtcgtacataaatagataagcgaaggtgatattta

SEQ ID NO: 271388 - DNA, 1168 bp, Cannabis indica
cctacatggacccaaattctcagatcaaagtaagtcttgacctcgctatgatcgtacacaaatttggctagagtagtcttcccaattccacccattcccacaataggaatgatacgaaggcgtttctcctccataaacaactccttcattaaagcaagcgtctccttttccctcccacgaactttaattcttcgataacgacgaactgaggtagtcatttctggttctctttcagtggaactacttctttcaaaggccagtgctttttgttcagagataatcacatctaactttttgttgagctcaatgattttgcaggcagttgtgatcttattaatggttattgagctagtagatgatggtatacatgagaggcttattaacttctttgaagaacaatcggtattagtagtgctttgatcaccagctttgtggttctcagcaatggatttgaactcctcgaacatgctatcagcctcgtagcaaaagtcttcaaccttatgcacccattgcttaacagacacatcagagaactggatttgatcggcaatggtgagagcagtttggacctgtgcaagtttgaatgagagcttctcaacttcctccatgacacttctgcctagttttcttagttgattagtgaataactgctgcacaagcctggatatcataaattcagccatgcttcaacctctttaaaaattagaaattaagaagattggtggattgatatatcacgaacaagtgaaaagattgaagagaaggagagaagaatctgtaacttttatatttgtgggattaaaatgaaatttattacaaacaagaagatgcattccacatttccagtcgtgggaagcacctctaagaaaactaaaatatatttttgtattttggacttcaaacaaaattaagaaaaaaagagggtgaaattaattatattatttgcatgactatactatactaatgtggcacgctaaagtctacagaaattacaagtataataataagtcatgattgatcaagttcttttaaaaaaaaatgctagccaaaattggtaggttagaaattttttttagtaaaataaaataataacaattacgtatattagataataaggggcagcaaagtcaactgaatattttcaatttattttaataaagtcagatta

SEQ ID NO: 271389 - DNA, 4685 bp, Cannabis indica
ttattggaattctttgatcatgatctagtctctaccattcttgctattcccattggtgatccttctcttgaggatagtcttatatgtgagcatcatccctctggttcctttaccgtgggttttagctaaatcttcaatttcttttcctgcatcttccaatagccaatctttggttcgttggtggaaggttctctggaaccttaagattcctcagaaattaaacatttcatttggagggctttccatcttactctcccagttgctcttaatcttttccatcgacaaaccttaaccactccttatttgtccttctattctggaagttctgaatcagtgactcatgctcttttagagtgttctagagcttcttttgagtggagtgaatctagatttgagaccttttacttaaataataactgtcataatgtccgtgaatatattcttagaggttttgatactctgcctaaggatgatttaagaatctttttatgcattctatgagaaatttggaatcgtagtaatattgctctatttgataagaaaaagcctataatttctactgttgaatttcaggttgaagctctgttacaagattttgataaaactcaggattgtaatgcaaatcatttgggctagaattcaaattcaacattggatgaagctcaatgcaggtcgaattcagatgatgaccattcctttgcatcagattattttaaacttagtgtggatgctgccgtggacaatagcagaaaaaaatagagatgggggcagcaattaggaattctagaggagaggttgttgcaacattttcttctcctttgaatggtaacctatctcctcttttggctgaagcaaaggcgttggttgctgctctcaactggtgtatgattgttaagttccctttgtgtattgttgagattgattataaagtgttaataagtaaagttaagcatagatggaaagataagtctgctctttcagacttagttagtcaaattgtatcctttctttgtaactttcctacagtttctgttaagcatgtttctaggcagtttaatgttgttcctcataagttagctaggacagctctaggacttaagagagaggttatttggaatggtaatgttccaaatcttgatatattgtaagtcgtactcatttcttatcttcaagttgcaatatatagtctctttttttaaaaaaagaaaaacatcttaaacataatctccataaaaaataggctatttaggatatttgccccctgaattatgacacatgcataattgtaccccctaaacttttcaacccgtttaaaatagtccctgaacttttcacactgttgtataatggtactttcgtcaaaaaaatttcatttttgtaactgaacgatgatgtggctttttatcttatgatgtgggatgacaacaaagcggctgacgtgtataaatgagaccacgtggccatttattgggaaaatgtgaattgaaaaaaaataattgaaaaacaatagcaccgtgtttaacttattttttttttaagaaaaaaaaagattgaaacaatgataaaaataaatatttacataaaataaaaataagtaaataaaggttaaaaagggaaaagtctcattttgggaaaagacttcaaaacacaaagaaagaaattatgggaagttttagggttgttcactatagattaccagtggtggaaattcgccagtgatttgcaggttggtttcaaggagaatggggaagggtctgaaatgtttagcaaagaaaaagggaagctccagtcatggtgtcactgagatactattttatgataagttctctggtttcttctctctttcttttttttttttttttttgtgaagacttttttagcatgaaagttaatttggtttgatttggtgtgaagtagatggaatattaaatagctatagaatgtctcatttatcaacttttacttaaaatattatttattttgtcttgtcttattatagtcaggaagcacatggtagtatagtgaaaatgtctaagactttgtttgcttttcttgggtgtggtatatgttgagcattggtttgtgtgtgttgtatttagctttaactatatccttttttcaaggtccactgttattagaaattacatattatactctattttgtcttgtgcagagccaaactctagtatattctctctaaaagtgcatcacaagggtcaattaaaattgataggtaacactcttacttactatggtggggttttaacgttgtgcactatttccatgttgataaaatgactatatttgaattacatggtatagcaaaggacttggggtactcagatccacttgcacgtaattattattttaagtgggcaaattgtgtgactttagaatgtgtaaaaagtgacaatgttttattggagaaagctcaagcatctattaggattaatcgtgtgctagagtgttattctgtcaactagaattgaatgacttacaagcttcaactgtaattggacctcaacttacggctactttgggggaggtaaatgtgtcacaagttgaagaggttgagaatggtctcgatgggcctcatttgggttgtcaaaatgtgagacaaattgatttatgggctggtttggttgaagacgcaaatgaggctgactttggagctgattttgggcctgaaaatgtgggacaaattctattgggaggggctgatttaggagataatttggggccacaaaatgttcaaataaatgctaatgatgatgtaggccaaccagcatatttagagactaatttaattgcttattggaaggtgaaaatgctgaaaaaaaatgctcatggtgatgatgaatttgcctcaaatttagctgatgatagtagtgaagataatggtcacaatgatgattatgtggctgacgcagaatatgaacaagaggatgatggagtggaagttgatgagatggctgaaaaaaaatttgattagtagaggtaaaaggcctatagagtttgatttaggagatgattcatttaatgacaatgaaggtgattatgttgtgcaagatagctcaagtgaggatgaagagattagtaataatgatggtgaaggtagtgcttttcacaaaccaaacaaaaggtgtaaaaatttcaagttacccgagcttcttgaatttaaggctgcaattgacatggtcaaaccagtctttgaaactggcttatcttttccatccggtgcaatatttaagtaagcaataaaatattattcaatacagaatggtaaagatatttatttcaagaagaatgactctacaaggattagagcaaaatgtagaggtgtaaattgtccacgggtttgctttgcatctaccgttgatgatactcccacattcgtgatcaagtcatttaacgatgaacacaagtgttgtaggaaaaatactaacaagtttgcaacatccaaatggttgagtgattagtatttagaagagttcaagattaatgaaaatttgggggtaaaggcattcatgcaagaagttagtaaagagtatgtgattgacataacaagggataaggcatacagagttcgacttttagcaaccaaaaaaattaaaggaagctatgaagagcaatatgctgctctatgggactatgctaaagagattaagcacaccaatacgggttccactgtggaatttttgacagaaccgggtgagactgggaaaccaaggttcaagaggatgtacttatgctatgccagactaagagagggtttcaatgagggatgtagaccaatgattggtttagatggctgtcatattaaagggattcatcctggacaacttttaactgcaattggtattgatagaaataatcagatgtatcctattgccatagctgtggttgaaatagaaaataaagactcctggagtttgtttttaaacctactgagaattgacttaaaaatagagaactctaatcattggaccttcataatagacaagcaaaaaggattggaacaagcattgaaaggaatgtgggatgaaggtgtacctgaggctgagcataggcactgtgctaggcatttggagaagaatttcatcaaggtgtttaaagacaaaacattgaaagacttattatggaaggctgctagagaagtcactgtaagaagatttgaaaatgtgatggaggagattagaaaattgaatgaacaagcttatgagtggttgatggctgcgggaccaaaatattgggctaggtcgcactttaggactcatcctaaatgtgacatactactgaataacatgtgtgagggatttaatgggacacccactatattggcagctagagatagaccgattttgtctatgcttgagcgtattcagatgtacttgatgcaaaggcttgctaagaatagacaatcaattgtaatgtgggaattgcaccaaaagcagtcaccattcttgagaaaaataaggtcgaagctggatctcatatacccacaaattcatttaatgacttttaccaagtgcaaagcatgtatggctcgatgtactcggtggatttagtatcatgggtgtgttcttgcagaagatgggaatattagaatattgtatttaaggaaataattttctatttaaggaaataaataaataattgattttctgataaatgaatattttata

SEQ ID NO: 271390 - DNA, 493 bp, Cannabis indica
tcaaacacgaagccgagtatgaagccttgatagcagggatgagattagcaaaggctgtgggtgctcaaagagtagaggtctacagcgactcccaactggtcgtgaaccagatgttaggagagtatcagacgcgcggtgaaagaatggccgcatatgtgacgatagtccgggaactgctccacgagttcacggattataaagtagaaagaatccccagggaaaagaacgctcacgcggactgcctggctaagttagcttcaggcagtgagattgaagggctgggggtagtacccgtggaatgcttggcagagccaagcatcaaaataaaagaggccatagcaacggttgggcaagaacccaactggatggcccccatcatagaatacataacgaaaggtgagttgcccaagggcattgtccagaaatattcagtatcaggctcaccgttatgtaatgatggacaaaattctctaccggagaggactcagcatgc

SEQ ID NO: 271391 - DNA, 955 bp, Cannabis indica
aacagcataataaattatttaaatagctatgaataattttcataatttatcatgattaactgctaatttccaaattaaactaagcggtctttacaccatacataaattactcaaacaaaactaatttcagaacacttaaataaatattaactaaaaaatcttacaatactattatgagtatatttgaatctaaaaaatgcccaaaacaattacaatcagtttctgtgttcgaaactaacgaacccaatcctccatcgacaatgaaccaccatgaattgaacctaaaaaataacagactcaaaacaaataaaaaaaatttcataatcaatttttttcaatgaccatgatgaaccccaatcctccatcgataatgaactaccatgaaccccaaatctcagtcgagaaccttgaagctctgatgtttcgtcatccatgaacagccctgaaactcgatactctgaagccccatcttcaacgaaccgccttgaaactcgaagcttcatcgacacgaaccttcgtcgagttagggaaatagagaaagagagatccacagagagacgaagaacacaaaaaagagagacaaaggtgaatctgagatctatcatacaaaacagaaaataaagtggaagatttagagcttataggggcgaagatttcggttgtttgttttgacaattggtcgttgtagttaatttggatctgggcagaagaaaaaagagaggaaggagcagtaggcaaagagatgaaagaaagagagaggaggcgcagagatgaaagagagaggaggcatggaggctattaattttaaaccctaaagttgtattttatatatttttcttttcttttcaacaattatttttttaaaatgtcctttttccatcgtataatagtgtcttcctagaaaaaattaataatatctgtgtttttttaattagggttgagtacatatagtgac

SEQ ID NO: 271392 - DNA, 1320 bp, Cannabis indica
taccatttttttttactgattttgaaaaataccatatttttttctaaataagggcccaaaatatttttttttctatggcccactaaaagtcagggccggccctgcttaaaattaaattaaattttaaagtttatgtagaaacaatttaattattattaaaataatattttaatattgaaaaattgttttaaagtttcttaaaaaaattaaagttaaaatataaaaattaaaaagtaaaaactgagaattgatcatttgatattcagacttgaaataaattttttagtcagtactattactctaaacatttttatttaatattttatctatatattcattttcttttcataattttgggtttggaaccgctaaacgttcagagattcaaatcacacatttttcttgtcttatcttaaggtcaaccctgagtcagaccattatagtatcgaacactattagtattaatacttaaatagttatttcttttgtttttcttaactaaatagtgactctttgtggcgtttggttgagggaaatgaaatataataaaattaaaaggaaacaacttttatttttttttctttggttttattttaaaaaattgaaatatcatttcattccttccaaccaaacgctacttaatgaaatgtgtgttatgtgaatttgagttagagagagtagagttagagggagtaagcttagagacaatatgaaactcatgtgtttgagggattaacattaccacaattttaatttaaaaagtgaaacctacttgaaaacacaaactctttgtcattcaaaatttaatttaaattttacatatccattcctatcaagtctaaaattcataccaaataccccattaagtttagagaggttgtgaaacacagtgacaaatgtaagtaatacaatctgtaaatttaataccaaacaaatacgctatacagtttttttaagcattggaaaagagagattcacacatggaactaaactgtgattagaacatctagttttaaaaaagaaaaactctaaaatattttattgtttgattcaaataaaaaagtacacaaaataattggaaaataaaagagagtagttggattcaaataaaggagagtagttggggttggcagttgtcacatgtttaaaaggagggaattattatttcatacaaaatagtcaatagtctatataataactcaatatataatatgacattgttctcatgtggggaacgtatataataactcaatataataactcaaaatagtcaactatataataactcaatatatagttggatttcactgatgctttatg

SEQ ID NO: 271393 - DNA, 589 bp, Cannabis indica
ctccatctccgagaacatcaccggcgattgttgcagccattaacaattggtctttgtaccaacttgatatcaataacgcatttttacatgaaactgtctacatgacactcccaaagggatataaaccaaaaggagacatccctccaaatgctgtttgtaagctaaacaaaagtctttatggcttgaaacaagcctctagacaatggtttaccaaactcagcaattatcttttatctactggatttactcaatccctttcagatcccacattattcattaaaaatcacaaagacactttccttgctcttttaatatatgtggatgatatagtagttacctcaaatgatgacaatgctgttctttcctttaaacagcaactaaactctgtgtttcaacttaaggatcttggccctttgagattttttttgggcttggaaattggtcgatcttcctctggaatttctgtatcccaaagaccattcaccctacaacttttaactgacacaggttatttaggagctgcacctgcttccaccccaatggaacccaatgttcggctctcatccgatattggggaaccattagaaaa

SEQ ID NO: 271394 - DNA, 4561 bp, Cannabis indica
agagatggtgaaataatgagaggggtattttagagtttaggaaaaagtgatcatatttttctaatagttataagtattagtttaaaaaattaatttaggtataaaagatggatataaattcaaatttccctattataatgacaggagaaaaaaaatgcttgctttgacttgtaatgagaatcaagataataacatccagcgtgcctgcatggtctttttggtgtaaaatgtagtgttaaacgtgtaatcattcaggtatgaaattcatcaaaacattgagaataaattgtttgattgtaccaatacaacaaactaaagcaaaccaattatatttgatatctccaaaatgttagcacaaaaaagataacttgtacagctttctcacttttcacaaggcaggtataatataactctcatcaattcccttgaacaggttattgaaagacaaaaaattgcaaactccatgttcttcttatcttaactttgaaaaatcgaaagaaggttgatctgatctaatggtgtcaactaagagttagttttaagtgttcccatttccataaacaagtgttgagagtctctgaattgttgaatttaaacagataaaatgttaggtggagattgtggagaaccgttttcaagtaagaagcttcggctacaataggatctcgatgtacttgaagaagaagcaagacatctcccatcgccgctgtagaacatgttatcattcctttgtgttttgcctttacttgttctcggtcttccttcagttccatcatactcttcgtcttcaagagcttctgcaaatccactatccatggggtctgaactttcatataacatccttaagacctgtttaattgaaggccttgcccagccttccttttgggtgcaccatctcactattgaagcaattgtttgaagctggtctgaatcaaaagcaccttgtatccttggatcaatcagatcagatagccttgattctggtacctggtgtatttgtgaccactcaaccaaattcttgcaattatgtactgctcgtcttccagtcactatttccagtagtaaaacgccatagctatagacatcgcttttctcagtcagctcttgcgtgactacatactccgggtccatatatcctagagtcattacacatttatcactccttaccacagaatataaagcattcatatttaaggagcaacattttttttcatctaacctggagttccccgaacttcggtgtttacaggttcaaaggaaatagaaccatctatcgatgcatgtgcaaggccaaaatctgcaacctggaagaaaataacagaaataaactatattcaaaagaaaacaatccgaattaataggaaaaagttcattcattttcatttttagcacaaaatgcacaaacggaaagagcaaattgttattcatatgcattcgatcgacatgctaccttggcaacaaaattcccatctagtaaaatgttgctggacttaatatctctgtggcacagaggaggattgcaatagaaatggaggtactcctgcaggtcaacaaaacagataggaaattaaagatgtgtatcgccattaagtgaaggaagattttcaaaaagtttacaatcacatttatccagaagtaagcatgattccaagaattaccagagcattagctacatcaattgcaatttgcattcgtctttcccaacttaggggagttctatttggagctgcagacagatcagaacacaatcaccgtaagttatggcgaccaaagtgcataatttcaaaaaaagggaaagtgggaagtaattgaataagttcatttaacatttcccaaaccaaataactcattttaagattgtgttttgtatgtcagtaaactatgaactcatttgtaaccaaaaccttaaaataatgagaaaatgatataaacaatccctcccctctttacaccctaagcaattagaatcaagaactgtagaagcatacaatgaagatgatccttcaagctaccatttgccatgtactcatacataagaaacctgtcatgaacaaaattaaacatttaacttcacagctgaatcacaagttcaacaaacagaagtttagacagagaaggaccgacctctcgtttttatcaatgcaaaaaccacgcaaggcaacaagatgacgatgatgtagtctagcaagaagctctatttcctggcagaactcatcttccccttgctctgaaacttcgttcatttgctttactgctgccactaagccatcattaaaatgggctttgtacacagttccaaatcctccttgtccaatcattgtattgaagttttccgttgccttctttatctccttataactgaattttctaaacattgatgaaggccctgcatgttaatttatcacgttaccatcctaaaacaaatgatctgttttctttctctaatcattgttagcagcaagaagcatataatcaagagaaaccaagaattacaccttcttgtaatttccgtgcaggacgaggaggatggaatgactttgaagatgtcttgtccatattttcacagtcctccagttcttttctttttctacggataagaaataacaagaccacaagcatcataacagcaatgactgctactgctatgaaaataccaggaattagtgtaaggtggtaagaatgatggtgttgatttaggggagctgctgtcaagttctggcttggattatcagcaactattggagttggagaagctcctggcgttatcaatggtggagatggccctaaacaatcaacaggattccaataataatagttggaaatatctcttcagattatacaagaaatttgagtgaatttaacaaaacaatgaatgaacattatgaaacatcaaagcttaatggatgattcacagatcaacccacgatttagaacaccatgttaattcaagacacattataaactcatttgaaaagtaaaaacatgctaaacaatggccatggaatagaaacagaaatccaacatgtagtaaatataaattcatttatgttccaaacctataatagctggaggaatattgagctcctgaactccaaaaaaacagcgtgcaatgtcaacagctgatgtattatcaacttgactggcaaggctagtaaaagtagcatcacggcaagtgctcactgtcaaattatttaccgttcctaccagatgacgaaggtatgaaatgccagagtttaaacaagtgtggcatctactttcctctgaaagtggtaccttgcaattttgtgcaacatctgaaaattttggtgactgcagcatctgagccattgttgttcggcccatacagtcataattaactagaacctttgttccaaatccacaaaaagccgatgcattacgagaaactccatgtagttccaatgttcgtgatatggactgaagacaggtatcagataagtctgaaggaacccctaggttgccagtttcattcgcgtagcgagcaatagaaactgcaatgaatgcatttatatagcggcaacatttccctctgtcatctgggtttgagcataaagaggctaccagagtaaagtttgatccactcaaatctaaaggacactctgcaaagcaggttttaaggttaataatgaacaatgcaaaacaagattatacaataaaagtacttaagtcaaactaagcacactactaaactaaggtcatgggtccaagcaatcaccatttgagctagaagtagtactatgttataaaggaaaatgcagtaactaaatgagaaaatgggaaaggaattaaagacattaattcctccacattaatgaatatatttctgtagatttcagaaaatcaaaatgcaataactaaagatgttcttacatagatttgaacatgccctttaataacttaaaaaacaaaatatactccaccaagcaatacccagttccacataactgcataagcaatatgctctgataaaaagggggtcatagaacccacaaagccaaaaattaatgtacattttgatgcccactaactcttaagacaaatttaatgctaaatgaataaaaggagcaatcaaaataaagggcataagcttgtgctccaaaaacaaaagggcaaagagatgaaacaggaaatgaaggaaagttcaaatctttaaattacaactaaacccagaataggattaaaatgaggtaaatgaggaaacaataataaataaatgcaacttattgagtaattaaaaacaaagaaaagtaaaatgggaaagagaccaacctgccattgttacaggaatcaggtgcatacccaaaaacgagacaagacccaacagagaggcgagaccgtagaccgccatggtcgagacaaatagggaaaatttcagtgacccagatagaaaaagagactgaagaaatgtgggtcaataatggaatataagaatgcgtgcgaattagaagtagagaagagcaactgttactgaacaactagccaaatattgcttcgagagagagacttttagttagttttctttgggaagagagagagagagaga

SEQ ID NO: 271395 - DNA, 744 bp, Cannabis indica
taatattgatttaacactaaattaatattttgctttaatcaacataatattagttgatttaccttttttctttttttttttttgttaaatcagtaaggaaaaggtaaaaaaaattaagttcaaatagaagtatattgatgatatttgttatttttatatagatttacatgctacaatttttctttacccagacaaaggtgagttctactttaggattgaatcaagctaaattgtgatagttaaagtagggcttgatagcatgtgctcaacagttgttgttaggaaccatcttggtagggtggtttgagttcagacatcccgtgttggcttttttgatgctctttgtggagaagcggcagcctgttatttgggcatttcgactgctaaggaaattggtgccaagtttgtaattgtactgaagagtgactcgatggtagttatcaatacgctcaatggggaaggagtctcactgagttatggaaaactatgtctcattttgtaatagttactatcattttgttttttagttgcatttttctctaatatcaacagagattgtaattttgttgcccataacgtggctaagtaggtgtttacccacaagacgtttggggttatcccgttaacttccattccaaaaaaatatattttatataatgaccgtaaggtctaaccagttctatctatcagagtaacgtttttccttaaaaaaaaaaaaaaaaactaaaaaaaaaaaaacaaaaa

SEQ ID NO: 271396 - DNA, 806 bp, Cannabis indica
aaaaaaaaatacttttttactttaaaaatattacatatgtttgaataattttcaaagtttactactataatttttttttttgacttaaaagactcgatacttttaatttcttaaggcccgcctaatttcaggtcggccttgaatgcaccctataaaaagagaggaaattacactctatacctttttttatattgtcctcttttattttaatcctcttttttaaagtctatcattttttacctctttttttaaaatattgtaccaatttttgcccctgtcacttcaagatagtctccatgtgactctcttatatgtcagggtattttgggtacaatacatataaaaaaggtatgtttcaattaaatataaaattaaagctaaatttgattaattaattaataaaagtggtatttttcaacttacccctaaaaaaggtgtatcaatacaccattatctctttcagtatttaggaaaaaatttagtcaattttttttcatagtcgcatatgttatagttattaaatactgtaaaattttgagaaattcagaataatttacaatatagaaagtaatgttcaaatagtttatttcacgtgtgtataaaataaaagagttacgcgtataactgattaatgtttaaatcttgttttcggcgtgttaaatttttttgaatttctcaaaattttgcttgttgtcttaaataactacaacgtacacaactatataaaaaattagattaaaaagttctcctaaatgtcgaaacaaataaaggtacattaatacacctcttttaagatgctgcatatt

SEQ ID NO: 271397 - DNA, 1334 bp, Cannabis indica
acattaaattatctttaaaacggtacctagatcactgaaaacggacatacgaggagagagatatggtagttttatgaaaacctatttctctgaaaacgaaaataaaacatacttacgaaaaacctacatccaaccccaacattaagagacagtaaaagtttttaccttagaaatcgaatactgtgatagaggcttcaatttatgctatgctgtaatttggtgtgatagaggctatgagagatttaggaattatctaagtggagagaaagaagtagagaatgaaatttgtgttcatcgtttcattgaatggtaaaaccatatcgtatatattcaactgattagataaaatctaggaatttaaaatttaaactcagctatacctttttttttttaaggaataaaatattgattaattactaatataaaattcctcataatttaaatttaaattcaactaagtcaaatatcctaaactaacttccccattcttctctcactctcacgtgtccctctctctattcatctattactatagcctttaacaaatatatatattttttattatcaagcttatacaaaatatatatatattcctattataaataccactagtcttatttatttaataaacctatacgtataaaatagtatactaattttatctatattcctattacatgtataacaaatcttatcacttaatcatacaactatttactaataacttattctctaatataattaatattaattaatacttaatctaattaactatataattgtacttagcaaataccaataatattcatattttatttaatgcaacaataacatatcaaaacacacaataatataccaaaaataatatacttgtactggatattacatgtcccctgctctggcacttcagccttctaacttggcctatttttgcctggcgaccttgttggcagaaagggctactgtggcacatgctggtgacagagttggaacaggtcagggcgacaaaccttgacttgtgcgccaccaatgagaccctttgggttgagctcacttacgcaagtttcaaattgggggcttactgcaggccaaccagcacatggaggaggaaatttcatgccaagcccacattaatcaattttgaaggtcgttcacgcctttatacggaggctgtggagcggatgtctggcgcaagtctgtcctcttgtcgggcggcgtccacactgacctctggcatgccctttttttaaatctatttgtgtgtttttttaagtatatctccctttaataacacttttttatcctcaagtgacattaatctttgccctggctgc

SEQ ID NO: 271398 - DNA, 517 bp, Cannabis indica
tcacacgaagagtgtatggtcctttacaaaatataacaacagtgcgtgacaagagtaaccctaacccagaggagggaagtctagacgtattaagtaaaaactcaagagaatacatttccagaaacttcaaacacaaacccagaaaaacaaacagatagtaaagcacgccataaacacaaacaataaagtgagggatgcgggaaacttacaatgaagggttagaactgggggatttgttgtcgatcaaactagggaatagactgacagtagtgagtgaaggttagcaaagaaatttgcaaagtgttcgaaggttttttcttggtctgaggattttttctctctggaaaactcgaacaaagttggcgaaaaatggaaagtaaccaaatgaaggaaaggtggtggcttttataggcaaaagtgcatgaggaacaggctccatcacctaccaatcgaacggctggggaggcgcacgattcgaattcccaagaatcaacggttggattggttcgtaattaag

SEQ ID NO: 271399 - DNA, 960 bp, Cannabis indica
caacaatacaataatagtgggctttgggttggacattcacatattagacctaaataaatataaaaattagtatttttataataatgtgcggtgcagtttgaaccgtatattaacaatctaaaaccgcaaaccgcaccgcactgtgcggtttaggaaaaattaaaaccttgaccgcaccgtaaagaatttcaaactgtattttttttattgatgcagtgtgatacgagcagtttaagcggtttgataaacacctttaatcatggtcatatgaagatctgtgtggctctttcagcattgtctgagctaaattacagcttatttcctctttaatttttttttttaaaaaaaaaaaagaaaaaaaaaagatgaataaaaaattatatatagtggttttttattttatatttgtagataaaagaagttaggtgatatctccataaattaatttattatctgttgtacttttgagtttttttttcttttaaatatatataacactgtttgtaaaataaaattgctaaaacatatttttttagtgtcttgtattttcttcggtatcatattattattattttaattaaatattagatctcatataatttaagaaaataaattttataaaatattactaattaatagtcagacgtattagacaccactggtactgttgtgcctagtggtattcatcaaaccgctgaaaccatccgcactgcaaaaaaaatgcgatttgaaattctttgcggtgcgatttgaattttttcaaactacgcattgcggtgtaatttgcatctttgaattgttaatatgcggttcaaaccgcaccgcaccgcacattataaaaatactaatttttatatttatttaggttcaatatatgtgaatgtccaacccaaagcccactaattcttgtattattgaacttaattttttaatatttattttcaaaccttatggtatttt

SEQ ID NO: 271400 - DNA, 507 bp, Cannabis indica
catcatgctcttgattttggtccttttccacattcaccacctgttttccaataccagctgccattttgtgggaacttttattcgcaccaatctccctatttaatatatacactatgtatccattgaacccacaaattatcttctttatttgctaatgcccacacgtacttgtataaagcagcttgattccattctggtattttcctgaagccaacactcccttccttctttggcactactacaaaaatccctttttaagttcatcaaagttggactatataagtattactagtctattttatgttggacatagtatcaagggacataaaaaaagtatttttctagtccaataatattagactagaaaaatatttctagtcccactaagttgaacgtaaaagtcggacacaacccaaacttatatatctagtccaattttattagacttgaaatactattaatttaattttttaaaataacattaaataatttatatattatttatat

SEQ ID NO: 271401 - DNA, 1212 bp, Cannabis indica
acttttattttttaacaaaaatacgaaggatttacttttttcctttgtttgttattttcatgttgctgactataagcaatagtaaaaataactatttatacttaattttaaaaaaaagtacaaaaatacaaaatataatttcaagtattttattttagagaaacttagaaaaatactgaaatttgggttgatttttataaaaatattatcacacggaaaattttttaaaaatactgtatttttataaaacaatagtagaaaacaaaacaaaacaaactaaaaacaataatagaaacaaacaaaaaaaacaacagtaaaaacttaacacagtacacagtataaaatttacacaattatttttttttaaaaaagaatacagtattttagaaaaaaattctaccccacagtgtaacagtaaaaaagttagaaatttctagtatgtggtgtaattattcttttattttatgtaaattcccctaattccgaaagtccaaactcagaagtgaagccatcgtatttagtttcttttgaacctgtaggcacagcccattgtgttgtggcaatgtgaactaaccattaatataagagaagttgcaaatgactacaacaaaagtaaatggcagagatgtaacgaggttatatcacaaatctctaacaagttagatctaattcttcggaggaactgccttaagactttgctcaattcattgttcgagtagagaattgctcagagtaaacacagtatgattacaaacattacaaaaatcttatttttagtacaacaaaaaaaattgtgattaaaagtgaaaaaatagagactaattataaatcattattcttatattgtgactaaaacgtatgtggttaaatgaaataattacaaaaattacaatttgttgtcactaaaattaaattagtgacaacttgtatttaaatactacgttattttagtcacaagtaacttctttgttgtgactaaaagtcacatttactcaaaaaaaaattatgttaatactaaacagttggcaagaataaacttagctcgagagtaaatgaattgtaaatctttattgatagaattatcatgtagtaaagaattagatatgtctaagaatatcactcaagagtaaattttttaattacattttcacaattatcatgtaattatgtatctcacactgaaagatatcacttcaagagtgatactctcat

SEQ ID NO: 271402 - DNA, 2003 bp, Cannabis indica
gggaactttcttaggttatgcctaggaaccaaggagtatagaatctacattttcaggaagggtaacccaaaggttgtgattgctagaaatattgtttttaattagttgaattatcctctgattcaggaaaaataggaaacaaagacaccgcaaatgtggaagtggagtagggaatgaagctcccagaagaaggttcacaggtagaagataatgtggagccggaagacaatgcacatatgtaagcttctgtggagctgaaagaacaagataatgaagaccaaacagaggcattggaaggattcagacagacaggtcaagaaggttatcagttcgcttgtgatagaacccgaagagaaattcatcatccggcaaggtttgcaaaagcaaacataatagcatttgcactggtggtagttcaacataaaaaaattgaagatcccaaaagctatgaagaggaaatttcaggtgcaaacaagtataaatggctccatgccatggatgacgagatggattcactatagaagaacaagactcaggtagttgtgttgatgccagagaacaagaaaattgtggagtgcaaataaattgtcaaggtaaaaaagggaatcaatgagtattagtgaggttcaaagctaggttggtggctaagggttttacttaggaaggtatagactatattaaaattttctcacctaggtaaaatacaagatgatgaggctaatgctatccttggcagcacacttggactttaaagttgaaaaacttgatattaagactgcttttcttaatggattcctggatgaagagatctatatgaagcaatcacctaggtttcaagtggaaggaaaaagagttgaattagtgtgcaagcttaatagatctttgtatggtttgaaatagtgtccaagacaatggaataaaatattcgatacatatatggattaaattgggctcaaacgatttgcatatgatcatttcttatattttaagaatctagagcaatctacagttgtgttcttattgctctatgtggatgatatgctcattatgagcaaagataaattaatgatacaaaagtatgatcaaaagtatcaaagctcaagctcaagagaaaattttagatagaaagagcttggaccagttacaaaagatacttggtatacaaagtctcacatatttggaaggaagaaactattagcttaaagcagtccagatacatcaaaaaaattattcagaagttcagcatggaagatgcaaagtacatccattctgttagggggtgtcaaagtaataatgtcctaacagtataaaagagaaagaagaaatgaaggatgtagcttatgcaatgattcttggatgcttaatgaacgtaacggtgagcacgagacctgacatagctcacgctttaagcatcctaagccagttcatgtccaattcgagaatggaacaatgaaaagcccttaaatggttattgatatatttgaagggcacttgaaattatggtctgacctatgagaaagcaaaaagagaattgtaatggaaagggttcatggatgcgtactacacctcaaatagagatactagaaaatcaagcactttatatgttttcttgacaaactaaaactgtataagttggaaggcctagtaacactctgtggttgatctattaagtccaatcttagtgaatacgccttgaaagtttaattaattagaaaatatatttatggaagaatattaattttaaaatacacaatggtataatggtatgttaattacaaatttttttttgaaagtgtatttaatttaagttcatattaaaatgggatattattaaattatttgtttattttatttcttttttttttttcaatttaaactaaaaaatgataatgttggtaaaattattttattaaaaataagacgataaatacttacgtatttattattttatttactatatatagtggaataatagttctcaaattaaatgttttttttttttg

SEQ ID NO: 271403 - DNA, 723 bp, Cannabis indica
ttcaattacatattaatttcgttgttattttatgttgtaattttttgtttttaaatcttaaaactttaggggttttattcatcgttaaattctctttccattgatatattatatgtattaaatcattgtgtatattatgagaattttaagtttaaaatttcagggtttatataattctattatgaaattttaatttgtgttttttgattttattgtttttgatcttcacttcattatagatatatcattattaattgtttatcaatattcttacacgatttatttcgtgttttgaccgagattgatatcacaatcaattttttttatgttcttcaattttcggattagtttcattaagatctagcattgttttacttgtttcatcccaaattgaacccataaatagagtagaaattcaattccgaacagaacccctagttttctcgtcgttttcgtcatgtttttggccagtttcttcgtctcgacccgactggagagaatcgggtcgcgcgacccactttcagacccggttcaaggttgaagacaaccatcctgccagcgaagcccactctcgacagtgacgcgtgggggcacgtgcgctgccgtccgacatcgattttcgatatttcttttttccagcatgcttagaatttaatttctgatttttctatgatttttaaataattttttgactccgttaaataattattattattttaatga

SEQ ID NO: 271404 - DNA, 611 bp, Cannabis indica
taggttgggtccgagtcccaagttccaatcccaatctgagtctggattcagttctttgtctaagtcattggttttgatcttggtcttggttctagtttgtgtccgggtttgggtctagcattgggtctgattctaggtgtgggtttttgagttcgggtccgagtctatgtccgggtttgtgtccaggtctagaccctaatttgtgtgtaggttcgggaccgggtccaagttcgggtcccgagtgcgtgtccaagtttgggtctgggttaggatctctatccatatctaggtccagcatttcgatcacagtctgtgtcttggtccgagtctagggtcgtatccagatccctatctaggtcaaagtctgtgtttgggatcgggtcccagatttaggtccaggtccaagtctcagatccggtctgggtacacgagcgtgtctaggcccaaggtccagtctctgtttgtgtctgaggctaggtttgtttgtggttctaggtctgggtctgggtccaggtcacggtcctagtcttcttttagggtcctagttccgcgattcttgttcaggttctagttttgggtccgaggtctaggtctgggttcgggtttggttc

SEQ ID NO: 271405 - DNA, 1413 bp, Cannabis indica
tttcttgagtgttcttccttaagtaaaattttcatcccctgaatagtgaaattgtgccactatttataagagcttattatatgaagaatgatttcccttaatctataataaataaaataggaaactaaattaattctataactacaatgcaaagaatggaaaatcaaggcttattgcctttattctctgacctaatcccacgaatgtagggattatcttcgtgccttggaagcaatgatgcttatctctaaaattaccaactcacacatcctgctcggtgcatgcaagttgatcatgcgatcgtgtcttggtcggatgtcccttgatgactctgttcagacatcctgctatgcgcggacaacataaaccttcttaccaatctttgagggcttttataagtataacttttccacatgtaggaaaatatgagacatgtgtcatccagcttactgtcaacgtcacacgtcatagtgcaaaaaataggataacatttgctcctaagtctgcgagggaatttcttggtcgcacgcagacttcattttgccatgcatcttatttggatggatgacaggtgtcttcgacggttgaggttgatctgacgtgactttgactaagggtgtctgagcattaagtatctcttgaaagctgtacctcgaatcatggattagcggctgagtgacagtgcatgcgtgatggttgtactttttgcaatgagtataacgttctctttgggggaaatccaaatattcgaatttaaaatagtttatttcccttttttgactgcttacaaaaggggattaaagcttttggtaatccttttagccattttcactttcaaagaactagagcaaaaatttctatttaagttttccctcaaatcttcaaagaacttgctataaaactcttaacgttatccttcgagcagatcaagaaagcttcaaaaagtgaataagtcatttatccttttgcttttagatgattgcatataaatatgcatattatttctcagtttctttgtatgaactctgctttttcttgaactgttcttgacgaactgtagaatagataactctagggtttggaactttaaccatcgttgaactataacgtctaattctctaattgcgtatcaattttggcctaaaattgtttatttccacttgttcatgagattctagaaaataccaggtaccagctgaagttttgaacttctggattggaaattctaactctgaatgtgttggaagttattttactaggatctagatttactaacaagtatgttgattatattctacaatttgccaccctaaacatgaattcctaaaaaacctaatagaattaattagcaacataattaattttcaaaatatatgaaattatttttttccatcagattattttgaaattaat

SEQ ID NO: 271406 - DNA, 539 bp, Cannabis indica
ccaaaagaatgagaatcaactttctggaagagatgaagagatcaacaatatcaaaggagtgaaattaaaaggaaaatttcgtggcaaatctacaagacataaaagtgctcttgagaaagctacaaaaaagaaaaaacaagtaaaacaccaaaagttacctacacatgaggtaattttttcttttttgttctctctctttctttttttttttttttattttttttctaagtagtatttttacaatatttgtctttatgttatatgttcagggtaattttattggaaataagcaatttacttttgaagactcctttactcaagctttgccaaatttacaatcacatctctcagtgccattacactacaaccaatccttatttcatgttaaccaagtaagcatataagtctaataattttttttttctaaagcatacatacagaacattttatagggtttatattaatatacatgtttttttaaatgtagcatgagagtgagttcactcataaagattcaagtacaacaaccagcatgatgg

SEQ ID NO: 271407 - DNA, 644 bp, Cannabis indica
acttcaaagtgtgaagatgactctttttgccaaagtccatgacataggctcgtagtaaatcttctaataccttaatttttcttcgtgattgcccatcaatctaagggtgaaaagttgtactgaactttagctttgtacccatagctctctgaagacttacccaaaattttgatgtaaactttggatctctgtctgaaacaatggatttaggagctccatggagacgaactatctccttcacatatagctcagcatactgatctattgtataggtaatctttactggcagaaaatgggctgacttcgtgaaatggtccactatgacccatactgaatcatacattctcgtggttctaggcagaccaaccatgaagtccattggaatatcctcccacttccgttcaggaggggcgaatggttgcgataaccctgccagcctctggtgtttagctttaatttgttgacaggttaaacactttgatacgtactctaccctatcctttttcatctcatacaaccaaaaatagggttttagatcctgatacattttggtggttcccggatgcaatgaataaggtatagtgtgggcttcattaaggatttccttcttaagctcaacattatcaggaacacaaacttgagct

SEQ ID NO: 271408 - DNA, 999 bp, Cannabis indica
tttgtaaaaataaaatatctcatcaccaatatcaaaatgtctaaaaaaaatagagagactacaaagaatcacaaaatcaagcatcaaatgcattcacaccacccactagatccctagctctcaataccaatcatagaaaataacatccaaaatagggtagtcgcatctgatattcaccataataccggggctcagatttaatttactccctgtatagattctaggtctttcacctacaggtgagtgcacacctgatgacacagagactaggtcgtgaaacaacaatatgcaccgaacatgatcaacatggctctcatcagtataaccaaagcaggcaattaataagcataacaaaataacatattccttttcatttttagaaaattcggcagcataacggttgtattttggatgaacccaaaaatcataacctgcataaatatttctacaaaaatatatttggcactcagtgccccagaacagtcctgaaaaatatgcagattaagttttcaatttttcaaacaatttgcaaatcataaaaatttacaatatgtctaatgttatacaacacatctaaaaatcaagtccaataatcaagttgagtctctacctctcccaagtcgttaaacattgtccaaaagatgatcttaagctttcaagtcccgagctccaattgtttagtctaatcttagatattactctcacctataccaacaaatggttaaataattatcatcatcgcattctacattcaaaaccgagtccaacgacatataatatgactatatttaaaattttgaggttccgaaacctcacctaagcggtgcacattaactatcggtggctgtaaaaattggtgtatcggaaatgtcaccgaaaattggggtagtgtatatcaaaacaacctccttgatgagtagatcacacccatgccgacagtttgtttaaacagtacacaatgtcgtcggaaagtcaacggagaggggcggagctacaaaa

SEQ ID NO: 271409 - DNA, 617 bp, Cannabis indica
aaaataatttccaacagaataatgcctgcaccgtccaccatgaagtactcatcagcaaaacgcccaattttgttgatggccgagtcgtccgtgcccatcaaccacttgaagcctagttgagagaaatagaagtaccgcgacctgccttgcttaagggtggacttcaaatcaaagaaccagccaaccttatggggagaaggcatatcccacatctgggaggcgtaaaggacgaagagggcggacaggtacttaatgcccttaggggtgaactgggccgggcggaggccgaagaagttcgccacatgcttgaagtattgatgcaaaggcatcaatgccccttgctgggcatgggcacccgaccaagcacacatccccctttcagggtttgtggctcaattgttgtgggcgggaatatagcagtccaattcgcccaggtagccaccctggtcgagagtccgcaggcgcgcctcagtaaccttggacggagggcttacccacctggcgcccaaggcacctttccttctatgaggaaccgccgcagcaagttccttagtgacgtagtccacgccctcaaccaagacgtctctatcatcgtcaactggctccccagcctcatt

SEQ ID NO: 271410 - DNA, 1090 bp, Cannabis indica
gggacaattgattttggaaactgctgaccaaattactttgtcatcctcttttggtccattagttcatgatgttcgtactcttctcttatctttaaataatgttgagttgtgttttgtcaaacgatctgcaaacaagctggctcatgttttagccagtattcttatttctctccaggttgtgtgcttcaattggagaattgttccaacgaagtgcgttctattgttataaacgattgcgagttaataaagttgctaagtttattcaaaaaaaaattatgtcaataaattaatttttatttaataccaaaatatatattataaaatacaatgaataacaaatttatattgtaaaaaaatatatacattaattatagccattaattcatctcaataatatttttaaaaaatatataatttttttatgaacaaaatataattaattaatataatcaattcaaacaaaaaagttatcatatattataactcataagtatattcagattatgtgatatgagttcaattatttattgttgacttgaggatggtctaaggcttcttcgctaagtgggtcttactcgtcttgtactatgtccatattttgagcacaactccctcaatattaatccgatttgagcgattcaagttgctatagaaaactgagaagaagatctacaaaggtgagatgtccttggccgagtgacataggacgagagtgcctatgtaggtttggatacaatcataacctacacatagtgaaataactatgagtcgacgacctcaataagaaaagcaatcataatacaatcatatatctgacttgtaactgagaggacatacactcagttattataagtctactaacctcatctaacgcgtaaattgagatctgaacattcatacctatagtatgattaaccataataccaacctaattccagtactctagtcccatattgatgttggtagcatcaatctatactatacaatacggcctaccatactagatatcagtatcttgatgcaactatatgttaggtttatgctctaaataaactccatttcaatgtaatctattttattcaacatcaat

SEQ ID NO: 271411 - DNA, 886 bp, Cannabis indica
gcacagaattaaaaatcaccatgtgagctccaagctttgagttcaaaactcaagcttgactaaaactcactaacatgcaacacaacctgtttaaatctactcaaatatgcatatctaaacctctgcaaacaacagaaaacaaccaccacaaacacagcaacaaaattcctcattttaccatgaaaaccaagattttgagtcaaaattccaaacttgaacaaaagcaactaatcatgcctcaaaacctattctaattcactcaatcaagcatgcttaaacttctgaaaacaacacataattacagcagcaacaacaatccaaaactaagcatgcaacctatcatttttcttcaaaaattcaagaaaacttaaaagaaagctataagaatcttactaaccacttgagatcactaaatcttgttaaaatcagcttgaattaccaaggaaaaatgccaagttttgctgctcaaggaggggccgaaaatagagagagtttgagagaaaatggtggcttttgaaaatttcctttttctttaaactttgataaaatgaacaacatagtatttaattaattatctcagccaccaattaataataaatgctgaataaaatatttctaagtccactaaaggacaaaaaatacaaatggggcaaaatgaccattttgcccctccacactaaaataacataaaagggtactaaggggtattttaggaaattctaaattcacgactaatcccgaaattcccaatgtctaaatacactgccccaatatactaaaatactacattgtgattctactgagccatacaccgcattccatgttgtcgggcaccgaaaatgcaaattatgaaatttcactataggacataaaatgcattctgaat

SEQ ID NO: 271412 - DNA, 946 bp, Cannabis indica
aattccctggttgggtgcggaacagttattcccagtctcttacacaccaggcgcaatttcatctataggaattgtttcaccattcccgacgctcgccggctgtccaggattaacagcaggcggaacccttgtgttccctaggttctgcgatgcaggatccaacgtctgtgaatttgtcggatcagtcaggcctctgcgagtttgcaccatcgtattggcgattggatgttgaataaagagcgattcgtgatccttctctcaatgaaagcactaaaatgttgaattcgcttttagccaacgacaatgagtctattttataagcgataaatgatttacaataatgaatgtatgataaacaataaaaagacacaggaattttatagaggttcagccccgagcagctcggtaatagcctaatcctcgttacttgtattgacttaagatcaaggagaaagattccttttcttatagctcttacaacagtatctctgaatatataattcttagatagtatatttagagtatagtcttagctcaactgcttttcgactgatccttttcctagtgaacatacatcactatttataggtctagtaaggttggggaggaagagtttcccctcttgttacaatgcgtataaataaaaagatcgtgggatcaatgctgagtgcaaggatcgtgggattgaggctgaatacactgatagcgggatcgtgtgtatgccatatccacgtaaactgatccctgagttatagggattgtgttgatgactcatgatgcgaaagttgaattcgctaagtgtttggccattctgtgcggattactgaatacttggctttgggcatgcctgcgaggcctcctgctcggacagtgcttcccgagaagatgttcctgttggaatttattttaccaggatcttagatctactcacaagtatgttgtttaa

SEQ ID NO: 271413 - DNA, 1564 bp, Cannabis indica
tttgttaaggacaaactcacaggcaatgtctactcaaagggagagttaaaaacagtctgtacatgctgccccaacaacatacttcagaccccgatctggaacttcaatgtcacatggccactactttgtcatctgcctcagactatactgagtccaatgtccctagtttagagtctaagagttgtatatctcattgtacttcagctgttacaacagctgccccatcatgtaatcctactgctataaataaaaatgagataaattctgatgctcccctttgtctttacaccagttctaatggaaatactgatgttaatatatggcactcaaagttatgtcacccagcacctaaaatcttggccaaaatcttgtctaaaataaatatatcccacaaccttaaaactcttagattctgtgaggcatgcaaaatgggaaaaagtcataagttaccttattttcagtccaattctcgagcctctcaaccacttgagttgctccatactgatctttggggcccctcccatgtcacttctattgaaggatacaagtactatatcatctttgttgatgatttcagtcggtttacatggatctttcccttaacagtcaaatctcaggcattctctatcaacctagagtttaaaaagcttgttgaaaaacagtttgaacttcccattaaaactgtccaatcggactggggaggtgagtacaggatttttgctaagtttcttactcaacatggcatctcatttcaacacccttgtccccatgaccatgagcaaaatggtagggtcgagagaaagcatcgacacatcacagaaactggactcactctccttgctgaatctggtcttgacttaacacactggtggctagcttttcaacattctgtatatgtcattaaccggcttcctacacctgttattaatgatctctcaccatatgaatgtttatttcacaaggagcttgactacagctttcttaagcccttcggatgttcttgttatccacacctaagaccatatcaatctcataaactcgagattatatcagaaaggtgtacattcgtgggctattcgatgcaacacaaaggatatttgtgcagaagtccaacggggagaacgtatattgctcgcaatgtcatttttaatgagcatgattttcccaacaaacatgcatcaacacatcaacaggtacaacaatcacctccatcttatttcctacaacttcattttatactcctcctctggaaaatgttgtaactaactcttttgttactgatgctgttacacctactgttggtgttgttgctgcaagaaatcccaacaatatgtctcctgctcctgcaaccatacattccccagctgcaaccattcatccgccacatgaacccactgcccaagatgccaccataaatgaacccaatgcacccaatgtttcagctgccatttccaccaatcccatatcccaagcaccatcttcattctcccaaatccccacacctcccattcttcccactcctactgagatatccgcccctacaccacccacaaattatcaccca

SEQ ID NO: 271414 - DNA, 1448 bp, Cannabis indica
tctctgtaaattttggcagagttttcttttcttccttttctccttcctctgtctaatttctttatctcccttttttaaacttcattttttacgatatatgttatctgatagtggagaggtgagtggtgggtagttatgagttagtggagagaaaaaaatgataaattattaattaattcatttttttcaatttgaacgattctttctctttttttatttatttattattataatataataattattattattattattattattattattttattttaataataaataaaagaagaagaaaaaaaatgcattcaacagccaccaatcttgtaagattccagtgaatcttgatactaattgtagcaatatatctcgtatctctgcccttggtttttgtgcttctagaagggtccatgttctgaattcttgaaaacgagatctccattgattcgagggaagatcatcaagcatgaatgtgttgggttttgaaaatctatttttcttagaaaataattagtttaattactaattaaaatatgagaatgaatataaacataaatatttttatatacagttaagtggattctgaaatcttaaccaaataccactaaaaatatcttttactgacatttttaccgttaaacactttattttatttagttcccaaaaatcttatgatttttgaaactaggttagagtttaaataatttagattaaatgaatattttcttcaatctcacgcaattctcatagcctcgatctcattttttacaatttctgcacttcagtaaagattcgtgcagttacaagttgatgaatataaaacttaccacttttagtactaatacctgccctataacccatcaaaacgggtaatccccaccccatttgggttaagtacccgtcccgctggttgaatttccgtcaattgctgattggggtatgtgagcttgttcaactggtatttggacattgttagttggcaatgatctattctagagcccaaaaggctaggcgttgttgtgtgtagctaccattgtatggagtagcaaactttcactttcaagctcttaatcaaaaacactaaatattgattagattttttgtcacctcaaaaagtagaaatgaaataagagagattaaagcaaaaaaataaataacacgcatatttttaaatggtatagttcaaaagtcaattatattatagatatattttgacagtttatagacttgagaaacaaaatatgagatccatttacaaaagatgtttgatccaatcaggggttaataccaaacttataaggcatataatttatgattagtcttgtattgttatgatgtgacaagcactagttacatacataggaaaaaagtgaatgtgtcttgtgtgaacactgattgtatagatcctcttagggttggctcaaacagtttgagggtcttgagcg

SEQ ID NO: 271415 - DNA, 504 bp, Cannabis indica
cctactactatataaagggcaagatacatacttagaacttacgatgcaattacgctcagaagtactatagccataagtcctctatcttttcatacttctcacctgcaaaacttattataatgttgaagagagcctagctagaaattacaaagtcttagcttgtaatctgcttggtattatctcaagagtaaatacaactaaaagggagtaggccattacctaaacaaaaggggttgaacctctataaaatttatgtgtctccttatatttattatcgttccacatgtggtagtcgtaagctacgatctaagtcagactctaagtcgattgactaagtccacagtcaacactctctcttttttttttctctcttcttctgtcttcttcccaccaccaccatcataacagaaccaccaccgctactatccaccaaaaccttcttcttcatgaaacctaaatctattacattagtctctcacactccaccattctctctctctctct

SEQ ID NO: 271416 - DNA, 1439 bp, Cannabis indica
cataccactttacttatagataactaaaaaaaaccaacaccttaaataaaactaacaatatatggctcgacacgtaacattcatctagtattaacaaaaatatattgaaattatgcaatagcttattggacatagaatacaatagactagtttaataaataagaacagtatataagttactagaattatcactgacattttcaaatgaaagtagcaactctcaaatattctctcctagtagatattgttgaatattatgcacaataaaccgaacttgcacattttttatacgacattgagtggtgggctaaatatcagacggatttgtcagttttgtaaattttgaaggaagatgatgtttcatttcctgatgatagtgataggatgagtttagttttatatgatgaatcatatttatctacagatattcaaaagagacagctaaaatcaagctccattctctttcatttggtggaggatgtacagttcttttatatgttgccttcattattgcagttttgtagtagtcggcaacatagtcataaggtcttaattccctttttgcaaatacacctattgcatgtgcacatagtatctcatcttgttggaaccttctgcagctgcatgttttgtcaagtaggttgattgtaaaattgcctttttcttggacctttacttagcataggattgttgtgattgctatgacttgttgatttattgaaaaataaataatgtgttagaaactgattttagaacattttcaagaaataagtttttttaattactgatcttttttatgttttagttttattacctggtatttcattgccttaaccaaattttctctaagtagtgcttcaacttctgatgatacttctataaatatttcatgtgtttcactatcatttttccacactcatttttgcacaaggcttctaaagcagtcaatcattgttgtaataggtaatgatcttgtagctaggattgctgaatttattaattatgctaagtcatcataatgtaccttcttgctgggcagtggctcctggtccaaacttcatgtccgattttctcgaggtatggtcttattcttttgtcaattttgtctatttctgtcatgtagtgctcaaatgaggtcaacttgtatgtcgttactgcttttacgaagtttgttgtcagatcatctccatgcactccaaagtttgctttgatgttgtttaacaagtggaatatgcatgctccgtggaagtggtttgggtagacattgctcaccgccttttcaatacttttatgcctgtttgatatgattgtcaaccctgctcatggaaactccttttaatgagatcagtaagtaagcgtatgataaataattttttttcaaagcataatcatttatttttattttgtggaaaccagtttctatttttttttatttatta

SEQ ID NO: 271417 - DNA, 590 bp, Cannabis indica
gttctataggcctaaaagtaggtaaaattaccaaaagttttaaaaaaaaaataggcaaattatgagtgtaataataagttcaaaccatcactttatatggtgaaaaaataaaaattaaagttattatatctaaataaaagttttgtaaaatagtacttttaagagactatattaaagcttcgatcccagtatctgttatacttttagagttttagaggagtgctagcaataaagtccaatttcaaaatcttgctcaagttggaaaggcttagtccattatactacatattgttgacctcaaaaagtgatcaaccgacaacggcgtcgtgcgatctgatgcttgtcacgtgtatgcacaaaaaaaatgaaaagtaatagacaatatgatttgttatagaggtttggcccccttgtgatagcgggtaatgacctactttcctttagttgtattataccgagtgaattacgatctagatcgctatatgtgggatctactatagtaccattaggattacaatgtatgaatcaatactagggaaaactcaagtgttggaaaacctagggtaggtgtttgtgtgtgtgtgtgtgtg

SEQ ID NO: 271418 - DNA, 1064 bp, Cannabis indica
aatacacaatagatacagcccaagacaactcctgacaactcggcacgcaggccggtggagtcaatatgtacattgctggagaaggcagtcacctcatggcagctctaacttttccttgctcttacctgcaccacatagcacccatgagtcacaaggactcataaagaaaaacaataataatgattatatagtttattattcaaatattatcatttatacacaatcagaatcaaaccattacgcagtgttcataagatgaaatctaaatcactactaacatctgccataaataagcatcagtatacaaatatctagtaatacaaaactattataccaataataggaatcatatttatttgaaaatataattatacatatatgttacctcataaagtaaccatcttcattacatcacattgcctaatcaggcaagtcaatgctttagtatgaaaatcctgtattgctttgcctaatcaggcaagcccgtgtcatagcctggcacccatgtatcgcataactgcatcacctaatcaggtgagctcgtgccaaaaacttgcacccatatattatataattgcaccacctaaataggtgagcccatgccataatctggcaccaatatatcccatcatctaatcagacgagcccgtacctacgctcggtacttatcatatgtcactgacggccgtacctacacccaatatgtcgctaggaaaattgcatcacctaatcaggtgagctcatacctatgcttggtactcatcatatatcattgacgcccatacttacgcctaatacgtcactaagaaaattgtatcacctaatcaggtgagatcgtacctacgctcggtactcatcatatatcacagacgcccgtacttacgaccaatacgtcgctgggaaaattgcatcacctaatcaggtgagcccatatatcacatgcataatatcatcacattatcgatacttaaccaatcaatcttttcattatataaaaatattaactatatctcaatattaatcaattcattgcaatactaattgtattacatacagcgtactat

SEQ ID NO: 271419 - DNA, 1300 bp, Cannabis indica
cctggcgacatgctacttccgacgactttttctagagtttgctgtccggtgccagaaaagtcgccgaagtagctaccagtagtcggaaaagttgtcggagttgctgctggcgctaaaaaagtcatcagaattgacattgtcgctagcaaaatcacccagaaagtagtttcttcatcaagaaacaggttttttcatcaagaaaccggtttcttaatcaatttcttggtgattttttcaataattttttcggtcgacaatgccaattccaacgaattttccggtcgctaacagcaactctgacgaactttccggcaccgaccagctaatcatgtctttttctagcgccaactgcaaattctgacaattttccggcaccagtgacaaataaaaactgcctaaacaaataaaaatattaaatatggactttaaaaacctaatttatatatatgacatatcaaatactataaaaatacttataaacaaaaaatatcatataaattagtcaaatttaaaagtgctaaacaacttttaaaatcttaatttattattctagtcacaagatagtgattgctgagcagagagaggcccatcataggatttaactttaatgggccttgaaccagcagtttgcaatctgaacggccttaggtgtttctctcttatacttgtatttaccatattttattgaaagatatcacaaaatatagtttaattaacgaaataaggactttataaacaagaaaaaggtacatagtttcagtatggttaatggaaaaaaaaaaaaaaaaaagtaggaaaatatgtttcagtatagtttcagtatgagtttttatatgatttgtgtaaaaatatgttttttttttaccaaaaaatttcaaatattttacactgccaaaaatatggttaaaatattttgttgtacaagtgattattctttttaaaatgtgggtaagcaattgattgaattttattttcgttactgtaagtaaaaatttataactgaccttatataattatactgtacacaattatgaaaaataaaattgaaccaaaaaagctctcatagttaccataatatacagtagaaattctatctaagaatattctactcaagaataacctctaatttattatataaaaaaattaagggtaagttgaaaagtacccctttataatcaattaatcaaatttggcttcaatttttatatttatttgtaaacatacctctttttatatgtattgtacccaaaataccctaacacgagagtcacatggagagtatcttgaagtgacaggggtc

SEQ ID NO: 271420 - DNA, 683 bp, Cannabis indica
ggtcttcatcctccaccttgatcccaatattctctaaatctaggatcactttattgaaataatccaaattcttatcccaatttttgtcctcctaacgtggcagtgcttacgtagacaaaatcagtgtcacgtggcagtacaactcactaataagaagaccaagtcagtacctaagcaaatggagaccccgacactcaaatgggcatcaagtgacagaccagcttcctcacagaagctggccagccacccttggcttgccctatggcctgctagcctctagactgcaccatggccgaccaaaagaagctctgtagggttctctgtgcacttctacacgtggacaacatcatttaggctgcgaattgggccctacaatcccaatagaataattgaataatatctatgttcaagggcactttggtcttttgtaattaattaattaactatgcaaatatcctagggttttaagtgtaaattagggtgttaggcttccagtataaatgtcttaactctaacctataaaacctaagtttagtttaagcctgatactagcctccaagctctaagcctaactctgatagctctattcttcttcactttctctcacatgcccatacaagcactctcatcacttgagattttccaatcccgattcatactttgtatacttaagggtgctatat

SEQ ID NO: 271421 - DNA, 922 bp, Cannabis indica
ttttatcatatttgggctgtgcgaaatgcggtgctttggaaggaagagcaggtcggaaattgaccatattgttgcagggataaaagagaaattaagaatgagactaataatatttcaacctcagaagttaactagcaaagatagagattggattcaatgcttgtaaaggattgtgcattttacagactgtatactgattgtaactagaatacttggaccttttcaggtgccattaggatgtacaaaaattggtttatgcaatacacatttctcatttatcaaaaattggtttatattataaaaattgcgcaaaaaaataaataattatacaattctataccatttattaaatatttataatttaataaatgtttacaaaaaaaaaaatcatcatattcatattaattatataaaagaaataaacataaatatttactattttaacatgttaattatttttaattgattttctaaaaaaattacgcataaaattaaatataaaaatgtataaattaatatttatattttgatatattactaaaataatagatttcttaaaatttaatataaaattaaaaacatttatcttttatcttcatatattagaagttgcagcatcaattgttagtttaacgtttcgtcttcttcaatggtgttggtttttttgtttagacttcgccattaaaacaataatgatggtggtgataaaacgagataatcaaagggaaaggcttttagatctaggtttttggaatattttaggttttaattttaattatattaattttgattctccatctttttcatatcaaattctaggcttttagatttgggttttcagaaaaaaaaaaaaaaaaaaagttgaagagttgtattctttattttaatttaaaatagttatttattaaaatattttatttgg

SEQ ID NO: 271422 - DNA, 985 bp, Cannabis indica
tctgctccgaggatagagaagcgaagtctaggattttagaaagagtagtgtaaatataatcagaaactgcctgatcatactgtttcttcccattctccttctcgacctctaagtagcgagtcatctccttgatcttcgcctgagagttcttggcctcgagctcagcctgctccttagccttgcgaagttcttcaagctctttgtcctttctagccgcctcttgtttcagcctcttcatgttctcctgaagctgggcattgtgcctcttcagcgagtcagcttccttagaaccagcagcaacagctttcaggaacagggtcatcaactgcgaagccaactccacagaacgcggaacaagctcctcagaagggattttctccacattggatatgaactcctcacccacaaacttctcctgcatagccagaaaatcgcgggctcagacagttggctcgatcatgactttcttccccttgtcctgcatggttttagccagcttcttggaagaatccgcggcaagagtagctacaacatcgctcttcctcttctgggcaataatgggcgatgtcgtcgctgttccaccctttggcttgatttgaaggacgggcccggacttcaaaaaagtcatctctgcgaggataaataaggataagtatggataaatttcaaggcactagtttataaacataagatatgttacctgggactggtcgagaagtttgcttggagaggcgtttgtctatccgctcttgtgtctctcagatggctctttgtatactggctctctttgaagactcgcgttctctggaatcagctggtgttctcgcagcttggcagttgtacacagtaatcgccagtcgcgatcttgtaccggaaggctcccgagaatttcagctgtttctctgcgagttgcgtcaagtgaaggtcgagctggtctatctgcgagaacaaaaagagcgagttagcatgagatctcaaagtaatt

SEQ ID NO: 271423 - DNA, 876 bp, Cannabis indica
attaatgattgtaaatcacatcactgatgtaatattttgaacttcagttgggaataaaataatcatttccttcaacaagtaattgtaaagcataactctttaaaattacttgaagggaatatatgtatgatcaactggaatttatctggaaatacataataaaatgcaaacccatcacttcaaaaaattgaaaaaaaaaaaaagaaaaagtttttaaaaggtcctcgaccaaacctttttgacgaaagaggggtcgaatcgttataacgccccgatcaaacctttctgacgagaaagggatcaaacaactataatttttggtttaaaatctgacgagaaaggaaaatcaaaagttataaatgagatgtaactcataactcacgcataaagctgaatactaacggctcgtgctaaaggaaagtatcaaacgagacatcaaagtgtcttggaaaaatacttaaacctaacacgtgggtagaagatctaactactcatgtaagcaataaagatatatacaaagtgacaaggtcattgaaaatatatttttgcttgaaataagatcccttctgaggatcgcgaggcggaatcaatgactgctcgcaaatcgaggatagggcagaagataagttgctcgcgcgtaaagtaggttgttaactacttaacgttagagagaaatacgagcaatggatacctctaataaattttatgcaatgattgtttaaattgtgaatgaaacacaagcaaacaaccacatgttgaagtctaaacttaaaaacatgaggtattaaaaagaaaagttggccatccaactttgcaaatctatctttacaaaaagtgccaacaggggcaaacgattgtctcggccgaaaggccatt

SEQ ID NO: 271424 - DNA, 853 bp, Cannabis indica
ttatttcatagtgggaaatattttagagaaaataaattatcgggattgagcggggttatggaattgaccattttacccctagcttttgaaaatacctaagtttgatttaaagggcattttagtcttttaaggggggattaggtggctgattgtgaggatgacacctagtcattatttgggcagcaaaggatttaatcaaatcctttttccaatttaggaaagtcaaaaaagaaaagaaaaaggaaaattagaaggaaaaagccattttctcttgaactctctctctctttctttcggctgggacaaaccaagggcaagaatcaattttcttttccatttctctgagttttcagcaaggattcaaggggggaaatcaacctaaggtaagccctaatgatcctcttctctaattttcaagttttgaattagttgaagtagtgaaattgtgttataggagctgttagggtttgatatttgtttggttcgaattctagggttagtatgagttgagtttagcccatagcagctggttttgaggtttatggttggttttatgcaactttgaacattgagttcaaagctttaagctttaatggcaagttgatatttattgtttttttctgtgaaatactggctgggttttattgtgtatgcattgaataggagctctggaaggtttcatggcaattggtgaagaattgagcaacaaatgaaaactttgggaaaaactagtgcaaaccggctagccggtttgcagtgccacaaaaaccggctagccagttttggcagggttccccgagcctttcattttctcaatttttgccatttcgatgcctcggttgggtgtttcccc

SEQ ID NO: 271425 - DNA, 1370 bp, Cannabis indica
aatcgggttcggttacacatttttaatattcgaaatcctaaaacccgaacccaatcattcgaaaacctaaaaatccgacccgtgtgcacccctaatctaaagtcattttttccaataaacttttcgatgtcaaacttggcatttcccatttcttcttggatcgatcttcaagaatcttgaacctttgaattcgattcttaatctccaagctctgctaccacctgttgagaaacacctataatcatctgcatacatacacacacatacacatagcaaagaattttcaaagaacacacacaaaagtaccccacataaccaaagacacaaccatacaaacttgagctctgaaaaaaatattgttttattaatttagaaatgtgtttttacaagttgagaattttacacttggttctctatgatagaacatagagcctaatgggatttatagccaactaaacactaaagtgtaccaactgtcataactatcgagatgttagttatgacagttggacttacagcatagaaaaaacaaaagattaaacatataacaaattgaatacacatttcaagacatataatctaccaatttacatattttcatcataggtaatatatattttttaaaatctactcttgttacttaaaaaaactatacctcctggcttaagaaataaaaattaatgtttgaaaagcataggtctcgtttggtaatgcttttattttttaatgttttaatcacaaaataaaagtaaaatttttatttttaaaaataaaaatgtgttctgtaaccacttttatttttaattttaaaaatagaaaataaaagtgtgttctgtaaagtttatttttatttttcatttttcgattttatttaagtcgggtctaggtctggaatcgaattcgcgttcgggtcagaggtcgggttcagcgccagggccgtgggagggtatttgggtccaggtctgatcggagtctaaaatatcgattaagaaaaaaaaattatttaaaaaaaatattgaaagtgactttttttggttttaaaattttgattctcaaataaaaaattaaaaagtgaaaaacaattttatagaatatattttttgaaaaatattttcacttttgtaattttaaaaacagaaaactggttaaaaaagtgttaccaaacgccactgtagtaattaaactaaattaagatataattgaagtatatctggagttcttaagccacgtggcacattcggatgggctgccttaggtggctcaggatgaatataatttgtttattattgtaactttttttcctcgaagtttataataaaatgttgaatatagcctatccattctatgcatgaaaatatagtataaacata

SEQ ID NO: 271426 - DNA, 1026 bp, Cannabis indica
aaagtcatttaggcaaaatgaccattttgccctccactaagtcaaaaagtcctaaaatcacttaggggtattttggtcaattctaaaatctcaaatattccggaaattcccaatgtctaactatattgccccgctatactaaaaatactaagatgtgattctaatagccaaacaccacgtttcaatattgccgagcacaaaacatgcaaaattatgaaattccatatatgacatataacatgcattttgaattcaaataaatcttcataaactgataattcacaactaatatgcaagtttcacaattgaaccctaattatctactaatttccaaattaaagttaagcggtctttacccaacctatgctcgctaaacaagaaaccctcatgcctataaaacttaccgtcactagatttttcacaagcaccataaatctccccaaaataatggtcatcaggataaagttccttaatgtgttcaaaaccaagttacttaacatcaagagtagagattaaggcatacctgtgagaaagggcatcagcaacagattcttcttaccttgtttctactgaatgacatatggaaatgtctcaatgtactcaacccatcgtgcatgtctcctattgagcttgtgttgcccctccaaatgtttaagggattcgggatctgtgtgaatcacaaattctttgggccacaaatagtgttgccatgtttctaaagcgcgtattagtgcatacaactctttatcatatgtggggtaattaagtgcagccccacctcgcttttcgctaaagtatgcaaggggtgtctcttcctgcataagaacagtgctaatacctataccagaagcatcatattcaattttaaatgtgttagaaaaattaggtgaagcgagtactagagcgtgagtaagcttgtgtttaatcagttgatatgcctcctcttgtgcttcaccccatttaaatgcaacatcatttttgataacttttgtaagcggtgttgtgatggtgctgaaatccttcaca

SEQ ID NO: 271427 - DNA, 1274 bp, Cannabis indica
cctacggtttttataaaaaaaatcgcctctaaaagtaaatttgcaataggcgagtatttttagaccctatagcttccctttttataaaatgagttgaaaaaaaggaaactaaaaactcattttatggtagtggagagatcaagtaagagtagtgtatgtggattcatagtcaaaaatatgggaataaaaaaatatatcataaataaaaccataaaaatgtaaaattggtaaaagatcataatctaaataaaaaaaaatatatatgctataaaaaaaaaaaagtaaacttttatactattttcataatttgtgtaatttttacatttgcttatatatggtgggttttgtatatttgtcttccccgatcccttcaacagccacttcaatcaaaattttcacaactctcatgatatagtttccttttatcgtgtgttcattaaaatccctattttaatttagcaagttattagtgttcatcttataccttacctacgaaaatgacgataaacgacacaaacaacaaggaaaggtcaattgttgaaaagacgattgttaattggtgagcaacaaaagagatattcataaaaagaaactctgcaaaattgcatgaaaggggagacaggtgaccactttaattttatttgtttccatatttttgttttaataatttcctttggattgtgtttaatctaatggttaaaaatggtgtaaaaaatatgtgtccaatgaacccatcgatccctatatttatatataatatagattctaataatgctaataaaattagcaaataaatattttatgtaattgaccaaccactatgctatattgaaagaaaaaaaaagataaagagtgttgctaatactctttaaattaaatatactaaaaagatcaaatagagataaattaataataagtttaaaatattaaggtcaaataattaaattccaggaactttcataagagtatacgaattttcttatacagctgtactttgaatatagcttagcttactttgtacatatcgcatgcaaataattataatttataataaggtaaatagcaggtactaaagttttaagtttgtaagtggcataattcaatgtttatctttagcggcataagtacccaatatttgtaaaaatgtaatttttctctaatttcgtccgtacaaactctgttattttcttaaacagatcacatataaggtctagattcttgatcattgggtctagacagaaacatgtaatatccgttacttcaaaatgttcttt

SEQ ID NO: 271428 - DNA, 1309 bp, Cannabis indica
tttatggtttgacaaagtatgcctttcgattagacaataaactattcaagaaagttatcacgctgtttgaggatgtttgcattgtaattcatgagtgattataatgttaaaaaaaaatatgattacagaattatgactataattatattagtgcataataataataatactgacatatattgctggaaattaataatttctgcactagaattagatttttattcctcaaatcttgatataataatatcctttcaaaagttatcatgatacaatattgatatttgatcttacgccggtgttctctccaataagtaagaaatatttaattataacatttattattataataaaataaatattaagctcgtgctgaatagaaaatagtattgtatatatcagtactttaattatctgtatttctattcccatattcgtagctttttcctaagtaccttcctgttgctatagagttttgaaatctagacttatgccaggccaaccacgttatgtcaacaataataaattagtattagtatttcagtcttacatataactgcatatactcgcgggaaaagccatgataccgacaatcaaaagtcgtgcatataaatactaagccccatgaaaccgacaatatatatatccacacttatcatcaaaggcatataaatactaagccccatgaaaccgacaatatatatatccacacttatcatcaaaggcatataaatactaagccccatgaaaccgacaatatatatatccacacttatcatcaaatgcatataaatactaagtagtagtacgtgttagtattatcattaatttcattcaaacaccacttactgcaatacacaatggcttcttcttttcattatttccttctcttcatcatcaactcttttctttttctcaattcttgcatagccaaaacgacaacgcagcgtcttaatgctctagttctccccataaccaaactcacttccactaatgatatccaatacatcacccaaatccaccaaagaaccccactcgtccccgtaaagctcgccttatatctcggcggtgactccctcgtcgtcgactgcgaggacctcggcttcgtttcctccacctacaaccccgcactatgcggctcagctgagtgcacctttgccgacgcgcgatgcaacgacggcatgtgccctggcattgaaaggccaggctgccataacaacacgtgccttctccaaggctccaatccatttacctccctaggcagcgtcgacgaagtcggaagcgacgtcgtttcggttcaatctaccgacgg

SEQ ID NO: 271429 - DNA, 1169 bp, Cannabis indica
aaaataatttccaacacatacttataccttttcctcttacttagggtgtttagccaagcgcgaaggaaatcatcgtttcacttctatgtctagatagaagctatagattccatatctatgattagcgctcccactactaacatgttcccaaaatgtacgtatcacccagactaaaaggaggtttaactaacaaatcaaagaacataaataacactcttgagatcgaacctaaccatgtcaggattaagattatttgatctaggatcaactaggtgatattgaattgaatagatattacggtaagattatcatatctagtccaagtttaatattggtcccttctgatgcatactccatgcattcaagacaagtttactttaaccaatgccctgcaaaggacataacacttatccaatgtgcaagtaaactacattgtagattatcatatcagttaaaccatgtgtactgataaatctaggaatatatttaatcacataatcttgattactttgcactgtactgacaacacaataaacatgaatatcaatgtgataaggatttggatgaatttataaatcaaataaatatataaatgatcgcatgaaccaaatgacatactaaataagtaatgaaaataattttgtttctttattgatgattaaataaaaaagattacattgaaatagagttttacttagggcacaaatcccaacaggtccatcaagaccatgggattgtgttgcctcggcatgtcgcttctcattgagattactacttcgacgaaagggattaaagatggatagatggtgttcctaaaagtggtgacggtctaggtggagatccatcatcgctcaagtgttaagtctttttttacctagattatgggttttgatttggttgtaatattaattttaggttttgtttgtggttttggattttgattttttatgatattggatttagggtgatggtagtttaggttttatttttgtgattttgggtggtggctgtggttttttttttaatttctgattttaggattcaagcagtgtttgtggtgatactacgtgttgggttttatgccctaaataaaactcatttcaatataatcaaatttacttattaatatagataagaaataacatttaatgttgtatggttcacatgat

SEQ ID NO: 271430 - DNA, 814 bp, Cannabis indica
agagtagttcattacccatatacaagggggccaaacctctatgattgttgtgtgttcttatttattctttgttcttaactccttattggtgaataatcaatgattatctgactccaaatcagtttactatttttccaatcaacacaatggagtagcaagaaatatcattaaaaaaaatagaagtgtgtttaaaaagaatatatatatagtaataaaaaaaaaaaaaagacaaaaatctcacacataacaagagagggggatctattaaaataaataaatttgttagataaataaaggagaatatttaaaagaaaaacatgtcaggcacacagagaaagagagtgtgagtgagagacacatagggagcattaaaaaatatgtttcaggcgatggcaaagacagtaaacatgaacaaattaacattaaatatgtggcacatagtataaatgtaataaaacaacttatttaagtattaatgatcaaaaactttttaagtttttttttaaaaataaaaatactaattttaattgtgttgacgcagtttttcgtcaactgatctaagaagattgtaaaacataagaggactgcgatgaactaatttggctaaatacaattgcaataaataaaaaaggaacaccatggatttatagtagttacacccccactgtcgccatggtaatggggcgtacatctactttattttttatttaattagtatccaacacgctagggttattttcttaaagagtgtgtgtataatttgtaccaagaaaatgtacttggtgaaatctgtaatcaagacttatgagcacaa

SEQ ID NO: 271431 - DNA, 750 bp, Cannabis indica
gtctaggtccaaatcccaatcgatcaagggcttggtctgggtccgagatcaagtcccgagttcaagtttgcgttcaggttcgagtctcagtcctagtctgggttcgggaccaggtccggcattaggtctaagctcgagttttagggcttggttatggtctagtttgggtccgagtcctgagtttcgatctaggtctgggttccaaggcctaggtccaagtcccccagccaggtccgggtcctaagtcccagtctgggtccatgtttgggtttgggtcgtagtcccagttttgattttgatttaagtgtcacggtttaggttcgggtccgggtttgggtcgggttctaagtcctagtccgagtttgggattgggtttgggtacaggttcagatcccggtctgggtctggggtcatttcaggtccgagtttgggtcctaggtgcgggtccaggtctgggtctgggtcaaggttcatatcaggatccctatctacgtccgagttagggtctgggattgggttctaggtctaggttcgggtctaggttcaagttcgggtctcggtcctgttctgggtacacgaccgtgtctaggcccgagtttcgatctcagctaaggtctggggctatgttcgagttcagtcctaggtctgggtctaggcgcgagttccaaatcccaatctcgggtcttgggtcccggtccttgtttcgttgcccttgtccctatctcgattatgggtctaggtcctagtttt

SEQ ID NO: 271432 - DNA, 911 bp, Cannabis indica
tattctgcttaaataattgaaaatgttcaataacaaaaaaaacaaattaaaaataataataagtgatttatagctaaaaagtagaacaagaaatcaatgaaaaacaagatgcatgatttgtcaatcaagcctacttctactacaactaagaagtcagtataaagttgagagtgaagagaaaggaaatcatcaaattaatgaagcaccagcaccactatcccacccaaaaacaaaatgctgaaattacatgctttatgaaaacaagtttttacatgactatagtcttttgcattcaaagtgcacttgtattctatcttaaactacatataaaccaaacaagaagataaaccggtgcctaatacaactcggtgtagaatccgtctaaagaaaattagtcctccagacagagagcttaaaagcaacagaacccgagtaactattctgctctggtaactcacggtaaaatgaattttcatatcataactctgttagtgtaaattacctaaaggcatgaataaacacaacccaccatcataaactcaacttccaatctaaacccttggctgaaaattagtctctcctacactacaaacacatgactactaaaacaaatattcaagttaactttcacttaattcttttagattttgaccatcccatacaaaacccaatttagcgggagctatcattgaaaaaagaaaagtgacaatttcagtaagcaaatcaaatttcccgactatcatagtaggattacgtcagtcaagcccccaaatactaacaataataaaaattaaaaccctaccaaaaccacaaagggaaattgaaccaatcaagaaatgaactttaaacacaaaccaaaaacctaaaacccaataccaatagagtcactcgcacaacaaaaactaaaaaaa

SEQ ID NO: 271433 - DNA, 546 bp, Cannabis indica
gtatagttctcaatcccccaaaaagattcgacaccttttaagttcttgatcacactctcaaaatcactctccaccacaacaaaagaatgatgcattgagaccgccgtctccaaagctaacagacaagccgccacttcctcgataagagcgtcagagaagtgaagtttgtagttattttgtatatggtagttattttgtcaatatattttaaaggataaaaattatcattataaatttaatattaaaaaataaaatttattacccttagtatattccttaaaaaattggtggaggtagttctcattttcttttttcccttatttaattaagttgtccctttcctaaatttaataaattaaataaacaataaatcctctacaattgatgttcattgcttattagtaaacatgccataagataagaagaaaaaaaatttagagggatggaattgaaataatttttattttattattttcttctattatattttaaaatattgaaataaagtgattattctattattttggtagaatgattattctattt

SEQ ID NO: 271434 - DNA, 1474 bp, Cannabis indica
actctgcctggccttggcagtgtccagcgcgccgggagcacagaatttttattaggcatatccggcttggaagtcaaaaagcacttccaatgactttggaagtcataatcaattttcttcttcacttcttcaaacctccactgagacttgttgtgaaacatatcatttctgaaaaaccataagttgtggtatagcactgcagcatagagaagaaattccaccttggggagtttggactcatcccctttcccccccccccccgaactccaaggatcaaatagccatttaacaacctcctcaccggattgcagagggatgttttcaatctttaggttccatttgctggaccaccaaaattgcttcgtgattggacagagggagaagaagtgagccccatggtctgaattgtccaaattacagagaaaacatttcccacagctataaccgaaaatgcttcccagtttagagctgaaaggaagacagttggtggcacacttccacaagaagtgcttaagacgttcatggataggagactgccacagatgtaaatacatcttgtcctggccaaatctggtaccatgaagatcccagtaagccgatttgagagagaacataacattaggagaggacttccactgtaaggtgtcattctctgggagatcctctatgctacaccttgatatggcttccatagttgctggtttgaacatgcactctaccaaggacatgttccagcgaatagaatcactcccaatcagatcacaaaccaataaacctgactcgatcctaagattcagatccgaagggccaataacgacaccattcgaacaagaccaagagcaatgccacagctcagcagtggaattcttaccaataagccacaccccattttccttaatgaagtccctagttttccaaattccgcgggcaacaaaggatgctccccaaggaagcgttccagaccagaaactctgagaagaacaatattttctcgccaacaccttacaccaaagagaattgttgttttgcaccaaccgccaccccaatttcgccataaggcagaagttaatgtcatggaatttgcgaattccaaggcccccacaacccttaggtttgcaaatcgaatcccaactcactagagagagaaagcggcctccatccaacgaacctttccaccaaaattctctaaccatggcatctaaagtgtccgtgatatactttgggagaaggaacaccaacatagtgtaaattgggatagcagagaccacattcttgataaggaccgttctagccgtttgggagagaagcctcgccttccaaccttccatacgggtcctaacattgtcaattatgaactgaaaatccttaattctgtttccactcacaaataaagggttaccaagaaacattcatttccatccataatatcaaaacccagattctcagatatctctagtgttggaaatattttacc

SEQ ID NO: 271435 - DNA, 464 bp, Cannabis indica
aattttatcatgagattgacatccaaagtatgatgaatcgaagtccttggacttttagtaggttcttgttagttttcaaaaggttgcagcgggggaggatccaaggttggttgtcttggatgaagttgatatgtgggtgcaattgcatgatcttagatcggggtttaaaactgctacggttgttaaggatgtcgccaactatattaggaagtttgttcagtcggatgaaaggaatttcatgggtttattggcgggattatcttctatgttcgtgtgactttaaatgttacgtaagccattgaagagacgtatgaagcttcgctaatactgtcgggattgagttctggactaacttttaagtatgaacatctccccactttctgctttatttgtggaattatggggcattccgaaagtttttgcccacggaggttcgaggttggagagggtcaaatgatcaaacc

SEQ ID NO: 271436 - DNA, 749 bp, Cannabis indica
gctcaactcctcacccgagatcaattgagcaagtttctgagtttactctcgaacatttgcccggtttgtgagagtgacatagaaacacactcccatctcttctttgacagtgtgtttgctaggaaaacttttgctgaaataggaagatggttgggttctgcggattggccgattgatgctgagcacatcagcattggtgtatccggggccccttcatttcaagaaccgagtgataaacactatttttgaaggagcgatctacttgttgtggaaaaatagaaatggttgtatatttgatttagtttgtacttctcaatctagaatcttaagtatgactagtaccgcccttaaaaagcaggataaatacattattgatgtaattaggggctggtagctctgtcttttggctgctgccgtgtttgctttcctgttggctcgttgagcctttgttttgtattgcattgcttgttttgaataaagctccttttgttcaaaaagataaataaataaataatgaaaataaatatatactatagagtaatttgcggcataacttctttaagtggtcaggtttttgtaactaactcccaattttaaaattttagttgtaaaatctcctaaactccttttatgttagcagtttaacatttccatctatttttagctgttagctgccatggtggaatgtctacgtgtacccagtgtacacgtgacacaattttattagtccacgtaaataaatatttaaa

SEQ ID NO: 271437 - DNA, 592 bp, Cannabis indica
gttataaattgattaatattgagacatacttaatattgttatataatgaaaagattgattggttgagtatcgataatgtgatgatattatgcatgtgatatatgggctcacctgataaggtgatacaattttcctagcgacgtactgggcgtaaggacggacgtcagtgatatatgatgagtaccgagcgtaggtacgggctcacctgattaggtgatgcgatcctcataacgacgtgtagatacggcgtcagtgatatgaaaattgccaggttatggcataaaatgaaaccattgtagggtttcctcctgacgtagtgtagatacggacgtcagtgacatatgataagtaccgggcataggtacgggctcgtctaattaggcgatgcaatatattggtgccaaagtgtggcacgtgctcacctgattaagtgatgcaattatatgatatatgggtgcagatttttggcacaggctcacctgattaggtgatgcaactatgcaatatatggatgccaggctatgacacgggcttgcctgattaggcaatgcaatataggattatcctatttaagcatcgacttgcttgatta

SEQ ID NO: 271438 - DNA, 463 bp, Cannabis indica
aaattcatgatcttggttcaatttggaaagttttatttcttgtcctgatctgttgctgcaaaacccgattctgatgctacaaatcaggaatttttttaaaaaaaatttgtatagctagaaaatcgtttttgtgctgtctcaagggttgttatgttctataaataggacctagagagcagccaaacatttttttttatcaagaaggaaaatacttcattaatcaagaacaaacaaatacaaacaatcaagcaagggccaaacaacccttagccgagacaaacaaacagctaattacaattgaataatctgtaaaaacctgctctcaactctattcaatcttctattttttacattttgaactctatatcttactatacttttaatatcagcaacaatgcgagtgtccttatgcgaatacccctcaaaaacacatctatttcgattaatccagaggtagtagcag

SEQ ID NO: 271439 - DNA, 713 bp, Cannabis indica
ttttataatttttaatttatttttgtaattttttaattattttttttattttaatttttaatttttaatttttttttcctgatttattaattttttttaatatttataatttttttaaaaaattaattttacgtggaccactagaaacttgccacgtgtacatgtagacagtccaccgtgacacttaactgtgatttttggacggaggtgtgcagagtaaaacggaaccgaggtttaggtagttatgccgccaaaatttcaatttgtgtggttaagtgttacaaatcgtaaagttcaagtaatttagctgccaatatcccttaaaaaaataaagtttgagtagttttaccactaacatctctttattaaattaagaggtgtgaaactcaacattaagttgcaccaagggcaataatatggggtattgtagtgcttaattgcttaagacgctacttatatttttcaatatttaattctgtatatatttacttgaaattaatcactaacgtacatcgtaaacatgctccttaattaacatatctataccagcccctgttcgggacttatacttaaggaagcaatccttggtgtagatcgtagagcatcttttatgtattttttacataacaaattacaaatgatcagacgaagtgatttgatgtcactgcggcaatccaatcattcttctgtctttttattccaaaaaaaaaaaa

SEQ ID NO: 271440 - DNA, 533 bp, Cannabis indica
tgaagaaaactaatcgcaaagaagatgacgaaaggagtatggaacaagttggaagagttatacttaaaaccatcaattcttagcaagattaatttgctagaaatattatacggttttaaaatgatttttttatttctttagattataatattgataggtttaacgagataattgtaagaatgactaatataaatcacaaggttgatgaagaaagtcaagccattatcttgttgagattgcttccaatttcatatcaagaagttaagtgtaacgtcctattcagaggaacgccccgtgttgtgattacaatctactaatcccgttaatcggggtctaaaagctaagtgatttgaaataaataaataaataataaacttaattaaataaatagcttgcaattaacacacacattttactttaaaccaaaataacttaaggttacatatccagaattccgttaaaatttgtttttaaaatattacaagttattttgtaaagcccgcttagttaatttggaaattagcagttgttta

SEQ ID NO: 271441 - DNA, 505 bp, Cannabis indica
ggtgggtttgttggtttgttggtctcgagccttgttcgcctggttcgtgtgggtccgtgaagagagcgagagagagggaaagtcttctaagcgagagagagggaaagtcagagagcgagagagagggaaagtcagagagagagtgaaaagtttattttaggggtattttaggaatctttttaaattagtggaatcaatttgtacaaaaaataaaggagtctaaattttgatatgaggtattttattagggccaaaatatgaaatttcccaattaaaattatatatgaaatgctatatgaagataaataataataacaacaacaaaagagaacttataataattcatagtaggtgcaaaaatcacaaaaagtcacgcggcaatgaagtgaaagggaataaacattcgaaatatgtgtttcttgtgtaatttaagggagtaaaaattataactttttctttcatatgtaatttataatgtacaaaagataaacattagggtgctttt

SEQ ID NO: 271442 - DNA, 1988 bp, Cannabis indica
atctaaacatgcaaactcctagatacatgagaggaccaccaaggataaacccttgacaaattaatacacaaccaccaactgtaggccatggagtgacttctcctctaattgggttcacacgaggcatacacgaaactaggaataccagtacagcagtcgaccaaaccactcctagcattgagatcctatccaccaataacactcaaaggcctgttggagaagatactaaactttaaaacctgcgagatgcgcttgggcttatggagggcgataacaccactttgcaccatgattaggaggatctcctaacatctatcaaccttgcctttgacgagcaaagacatcaattcatagaatggagggatcgggaaattgaagtcatgagagctcaacaagcagccattgataatcattcaaggcaggccattgtgttgatcagaagggcctaccagattaccagttagcaactagtgactgattctagtatccccctaagcggctcagaagggtatatagctaatcatacacacagactcataatggccagccgtccaatctaaggccacaattccaatttgtgggccaaatggtggatagctagatcctaccagactaccccctaggaagaggtactcaaccaagtaggtcaaacaccaagaccacttgtgcatcgatgtttgattagctaggcaccgtgcatgaccttagaaacgatctaaattgtagaaggggactagacgggcaaaaaattccactaaccatctagccaaattattatgtccaagatccagttcaaagagatctcaatgtgacacacgtcgatcagcaggctgtccaagttcatccacttgtgcaagcataaatagatcaacttaaaacatggtacaaggtttgactgaccccaaactcattgacctcgaactcgaccgggcaagaggatcacccttttcacctaaaattgatgctcttgatctaccctaaagtttaaatgctagtatggaagatgtacacggaaaagaagatcctttatctcatttgaaataatttaagatgaaaatggatttgcagggggtaagaagtaatgtacggtgaaaaaaaattttggccacactagcagagcccacctaacaatggtatttccaatttccttcaggaaagtttaattcatggatttctttctcatttgaattcaatgcatagttttcctcctctcattagttctcttcacacctagaagactttgtagaagtgaaacaaaattctaggagaacctctgagagccaatatcagcaagttcgtgactgaagtaacaaaagttaaggtgctaactgaggagagaagattagcaaccatactgggggcattgaatctctgggagaactctattatagccacaggttgtagcttccgacacacctcttacaagactgcccaataaccccgaggtaaggaataagcagttacgccaaaagatgcagttaatacagccccctgcaattcccaaggtaaagtagatagacaggaagtggaggagcatcattagtaccatcatacttgcagaccatcgatgaactgatgagattcgagcacgtgagctttgaccccaccttccttgactattttatttatggtatggtacgtcttcctattcaattaaggaaaaaatggcagcttgcatctcgctattcttcagtgaaaaggaaaaacctaattccatcttgccccttaaattcatgggaaatgatgccctttttggttaatgaacagaatcaaagccattgtttaaagcaacctcaatcaaggaagctgatacatcagcctgatattgcccatttattcgattttcaccggggcagcaggaacaaaaaatgaagagatcaagactcagtcctaaactctagaagcgaacggatgccctcttccagctcgagctcacagacctctcttaatcaattccaaatggaactaaaaaaagattactcctttcg

SEQ ID NO: 271443 - DNA, 708 bp, Cannabis indica
taaaggtatcaaaaatgttttaagggaattgaataagaacaattatgctgacatttgtgcgcaggagtgccttgccaaagcaaaattagatgagtgccaagccttattgcagcagcaaccactcaatgaaaatctacaccagcaggagaaggaactcagaattcattacactaatgttttcaagagttatatgtcttttttgcagcaaaaagccaagctgaattgggcaagggcaggtgatgaaaactcagcattttttcacaatagtattcgagagagaaggagacataaccaagtgattactattgtgaatgctgaaggtgtaagaatggaagatccgaaggctattattgaagcttttattcagtattatcaagaacttttgggcagcaatgtacacgacaggaagagggtgcaacagaaaataattagagaaggagggactcttacacaacaacagatgagttttcttttgagagattacaaacatgaggaagttaaagaagcaatatttgccatccctggttgcaaggcgccaggtccagatggctttgggagttcgttctttcaaaaaaactggagtatcataggtgctgaagtagcagaagcaataatcagcttactcaaaacagggaaattgcttcgagaaatcaataacactactctcacacttgtacctaagctgaaatgccctaacacagtgagaga

SEQ ID NO: 271444 - DNA, 1082 bp, Cannabis indica
gtctttaatatattaaaattcatataaatcacatatattgaactatataataatataattcctccattatacataattatctagttagggttttgctaatccatttcttaatttcgggtattacaataggattcccaattgtgctaactaaagcactcaagcagtttttcccccaatattgcagacccaaatcattcaaatggatccaaagaggcacagatttaacaagttttatagcatccaaatcagtagtccaaggtctagtgattaccggtttacgattgaattgaatgactccatgttccagcacatgatccctggttgcatcatcattgaacttgactatggtaaatcctccattcatacacactatctgagctattcccaaatttccccacatccttcggataaacccttcaaacactgcaaatggagggttttcccccaaaaccatacaaattacagctgaactccaattagccgcctggaatttcacctcttcaacatcaatctgagcaatcctaaccccatcctttaccaccggctcctcatatttcaactgaacatcttgatccaaaggcttagctgtggtgaatgtccgccaatgactctgagagagagattgatgatcattttccaccatttttgcccaagattgctcttcacgtttctccttatctccttcgacagccgcctctgatgtctccaatcctgcagtttttccaccctcgttctcctctggcaccgtttctatctcagttaagacacagtctatctcagatcgaaattcctcattactctttgcccctggttccacactcgttgcacaatttgctggctttcggatcactcgacgcttcttcgccatggaagggagcttgagagaacatgcacgccttatattatgtgctatttaatttaattgtaaataatacaagaaataatcatataaaatttaaattattaacatgatttaattgaattttttaatgcaaagtgattaagacatgaaatattaatattaattattttgtgtggttattttgatgtatattcaatacaattaaatgatggtgttgtaa

SEQ ID NO: 271445 - DNA, 475 bp, Cannabis indica
tactttaaacaattcgttattaatcgcaaatgcttcatcttgtcttagaacataaagcccctgttccatagatgcaacataaatttaaatatcatttcgagaaatgatagaaccagaactcaaaaaatctaatttgtattgttgcaattgtaagcataaaacaaaaatcaagtttctactcaaatttggaataaataagacattgtctaaatccaaaattctattctgaaactttagttggcttttcctctagctctaactgataccatttcgccattaccaactttaagtttcaactctcaagattttaaataattccagttatcaagcaattacaatgaacaacagacatggtttgtagatccagaatcaagaatccagatggatttgttattctctaaaacacatgattcaaaacctaaagcattggaatcactgcttaactgtttttggattgttcttattgctggttcaa

SEQ ID NO: 271446 - DNA, 618 bp, Cannabis indica
aagtattttgttaaagttcttgaattgtttcaaagtcatgatacactaaatatatatttatatatatacttatctgactgaaacaatttcaagaatcctttgttttcttttttctttttatctatatatatctatatattatactagaaggcaactacacgtgcaaagcacgtatattttttttttgttaattcttttatttaaaaactttgatttataatatgatgtttaaacaaaagtattatttataacttttactacatatttgataacataagaggtttaatcaattaaaaatattacatcataagataagtttgttactttattttttaaaatattagttgtatgtaatttataatttaagatgaagatttagcaactttctctaattttgcttctttaatatagtatacattgaaatttttgtacttttgagtctccattttcttttaatcaacataaatttgtagtgtttagtacttagcttataataatttattgaaagtattttcaataaatttagtcttttcttaaaaaataaattttaaaagttgatatagcgaagaaggtcgagctatacataatcctatgatttagtcaatctaattttgtttg

SEQ ID NO: 271447 - DNA, 534 bp, Cannabis indica
atgtaagtatcaacatgaacgtatgagcaaaagaaaacttctgccttgtttttctagtcatttaagaatatcacaaatcagtaaagatggccattatcacataaaatattaaactaggttcccgcctagccctacaatatttactattaatagtttactcattataatattactaaacaataagatggtatttgtaataacatatatacataatatgtatatcactgaaaaccggttataacttatgtatgtatgtatgcatacatattctgagatcaaagctacagttctatcaattgctgtgctatgtaggtgctaaggaaaaacttgaatatcaaatcttgtgtgggaacaaattacatgtctacgcctgcccaattgagctacctaacagaatatagactttagcaagtgaattccacaaactttgtagaataaataatataaagtaaaaactccacaaaccaatctgggcataaggtttctacccgaaacaggtatttctcaatccgtaagctaaattaagcacactaa

SEQ ID NO: 271448 - DNA, 984 bp, Cannabis indica
acacaatacacatctatcttcctgcactatgttatcagctttcaaccttgcttttgttctcaaccggttttgcattgctagctagaaaatgtagcaatgcttgcgaacattgagccttccccaaacctctctatcccaggtgactttctgctgtacagggcaaagtaacttatacccttcagcaatggtatatcgggttccaacaaaccgctgaatatccatcttgcttttgatttggtccttagcagccgccacctgtttccaataccagctgccattttgtaggaatttatattcccaccaatcaccttgtttgatatacacactatgtacccatcgaacccacaagttatcttctttgtttgttaatgcccacacatacttgaaaagagaaacttggttccattccagtattcttctaatacaaaatcccccttccttctttgatgaagaaacctgctcccatgctacaagtcctgctccttgcatcatactttggctattcaaaagaaaagctcgacatattgcttcagctttgtaattactttctggggtaatttcatgatctgactccaggaagtgtgtatagaaagcaaaaccgagttgattagtatggcttttcctgcaaatgagatgttcctaaaactccatgttttgattctggctgccatcttttccgcaagtaagatacattattttcctgatatctttttagcacatattgggattcccaagaatttgaagggaaggaattgcctgctaaatccagttgcatccattattctctgaatttcagcctcttgcataccactatagtaaaaagctgattttgatggatttggttggagcccagatgtgagagagaacaactttaagcctagcatcatgaagtacacactcttgaaatcaccatgacaaaagacaagcacattatctgcaaagctcaaatggttgagttgtcagctttcacatctatcatggaat

SEQ ID NO: 271449 - DNA, 1420 bp, Cannabis indica
ggtggtaaaccagcagcaggagaattttttgactggtgttcctcggtttttctggtgttagatgcagatcagaggagacttttgattgctctttgttggtctctgtggaatgcgaggaatgacagagtttggaataacaaattggtgagtgttgaaagtatagtgttgttagcaagaacataccttaatcaatggcaaactgctcagaattctaatgttacatacccgaatcctggtctaattccaggtgacggtgctgagcaatggcagccaccacatggagatagttttaaggttaatgttgacgctgctatatttgcaaacacaactcaatttggttttggttttgttgttcgtaattcacaaggattattgatcgaaggggttaccaaacgtttcaatggttcggctacacctgaatttgtggaagctttgggagtcaaggaagccttaagttggatcaagcgtaatcaaccaactcaagttatccttgaaaccgactgcttagtgtttgttcaagccttgcgtagttcaattgatatgatttccatgtttggtcaagtggttaatgattgtaaggcattacttaaagaacttcaaaatgtttctatcttttttattaggcgatcagctaataaagtggctcataactttgctagagcttctttattctatcctgattgcaccttcaatttggggtctgtcccaattgatttgttacctgatttggtaactgaattcaatggttaataaaatgatgattttccattcaaaaatctagacttaaacacaatatttattgttggagatttttcatttgctctaacactactacacattattaacgtgagattctttaacatacgaatgagacataagttgtggcgggtttctctgctgattttgtgagtttgtacattttgtttctttctttactgttttttttatgtaataatttctatgatccacttctatagtttttcttttttttttggttgagaaaatccactttgatagtattggtttgtctttttttgtataatccgggtatgcctactctagtcacgtgaattattaccagaagagccctatgatatgaccacagtcatatccctcctataaacaatttcacgacaaatgatcctattgaaactaagcccaacttcaaggactaagtgggttgggaccactttatttcaaacataattttagatatttacttaaaaatttcaaagcatgaggaaaagaaaatgactctcttgtcacccaccggacacgtgtaacaacttcattagctaattttaacttaagtagtggtcaacgcccaaatttcttaccgaaatctgtccatctcgctctcccccgttcaacaaagcatcaccaaaaacactctacattacttaaaaattataatattttt

SEQ ID NO: 271450 - DNA, 1155 bp, Cannabis indica
aaaaataggcactagtggctggctatgaagtcgggcccaacaatagatagatttttgtaatttttctcaaccatttatctatttttcacaaataccacttttttcactttcaaccctataaatgccaaaagtatttatttaataattaaaattaattattaaataaagtatcatttaacatatttattaattagacttaataaagtcttaattaacaaataaaccttgaaattctatttcttcacaatcaagccataacttagtgaaaattcataaataacacatagtataattttagaattataattgattaattaaaatcaattaactgagtcttaaaagcagtattgtctcaactaatgtggggaccatgagcctatataaccgagcttccaataagcagatctagaatttaccatgtaaattctctaactgattaattccgcattgcaccactatagaacttggaattgcactctaagttatatagaatgctctatatgttcaacgatatagatacgctataaatatttaaccatcgttctaatcccaataatcaaagatcctctatagatgatttacaccaagtagggacaaatttaccgtttcaccgctcaatgtgttttatccttaaaacacttagcttcctataaatgatatttcactaaactaatataatcactgaaataggagctcttccatttatctctatgaagccaagctcgaaggaaatcatcatttcacttctatgtccagatagaagctatagattccatatctatgtttagcgctcccactcagttgtactatcatgttcccaaaatgtagattttacctggaccaacttgtggggtagctctagaacattgatctatggggtaaaagggatccacgtgctcggtccaactcgagttcattgtgcttctgaccggcacaccttggaacatgttctttagttcatccaactatgcctgcacggacggatgaaccttttcggtctcttggccgaccactattacattaggatctccttaacctggatcttgagcacggggtccgggctgagtggctggtggaacatattgtttgtctaaccctctccttctacttagattttccctgagatcatgaactgttcttagtctattaaataca

SEQ ID NO: 271451 - DNA, 1075 bp, Cannabis indica
tggcatttaagtggttaaattagaaaattgacatttttgagaaaatgagaaggaaaatgagaaaaatggcaaaattacaaagtggggcccaataacaatccatggccggccactttgtatggattttacgactttattttttcattattttaatgccaaataaatctaacctaaccctaggtggtttccaataaataggtagtgatggcttaagggaaaagatgatgcatctcattcctccagtaaaaatttcaaagcctccttcactaccctagccgaaaccatctctctctctctttctctcttcaaaaccgaagccatatagtgaaaatagtgagtgcccaaacaaatcaagtagtactcaatcattgtgtgtaaggctttgaagaatccagtttcaagagaaggagattcggactcagatcttggtgatactttgctacagaaaggacataagggttagagatctgagtggaaggagacattatattctactgcaaccattgtaaggtttctaatactttatatgtatttatttcatatcgttttagaagttcatatttagcatgttaataacatacttgttagtatatctagatcctggtaagataattacaacatattcatgttctttgatttgttagtgttatcccaaatttttcactctgacgtggcatcaaaagaatggtgacacgtggagcccgcttggagcatctactcgggaagatagaccgagcaggatgccttgctggcacatcctgagtaagatattcaacgatccgtgcagagcactcaacacttagcgaattcagcttttgcatcatgagtcatcagctcaatccctataactcagggatcaacttacgtggatatggcatacacacgatcccactatcaatgtactcattctcaatcccacgatccttgcattcagcattgaccacacgatctttctgtttatgcccattgtaacgagagagaaaactcttcctcctcaagtttcccagccctataaatagtgaggaatgttcactgggcaaagggagcgagacattaaaagtcgatacgcagctaa

SEQ ID NO: 271452 - DNA, 724 bp, Cannabis indica
ttgttcatatattgtcgtggaatgtttgtttgtgttatttataggttttgaaaattttgagtttacgttttcaagctgttatgctgccaaaattttggtagatagttagattatgtaaaattaattaatggtttaaatgaaataaaattaatttattattaagaataaaataacaaattaattgttgataaaaaaaataatatataagataaaacataaattttaaatatgtaattaaaaattttgtaaaataatattatatttttttaaaaaaagaataattttaatttaaataatgaatgattaaaaaataattaaattataacgtgtaacatatatggtgagtacgagatgtcaaagagtttacgtgactgacagtctgattgtaagaaaaaatagatagaaaatattgaggagcttggacaagagaaggcatacatattaccgcctgactaagtaactcagaaggtgtggagtgattgccttgcttactggagcacagacaaacaaaaggtacttaataaaaattttaattttagtaatgttttatattatatagtcaataataaataattaattgtaagaaaaaaaaatattaatttcagttaagaccagcaaaaaataaagaaagttgggggtgagatgaaacttcaaggaggcttgggatcaaagcctactgtatcacatcttgtcgctggggtaagtttatataatacattatcat

SEQ ID NO: 271453 - DNA, 3669 bp, Cannabis indica
agatgaagatagaaacttcactattaagcttcttctaacttatctaccttgatttctttcttttcttaattaataaattttaaaatcaaagtcaacaaaataaaaaggcagccattaaacactaaaagccaaaacaagggttttaaaaagaaaagacctaattacccttctaactaatgaagctagtcaccaactcccaagggcaaattggtcatttaccacaccccgaaaataccaactccgctaaaacttagcaatgatttcccgaataaattctaaattataaaatgcgactctctatggcccaacgtcgctttccacagcttccgaacacaatcacagaaattgagaaattacatagatagcataataaataaatatatatgcactcaaataaatttccataattataatattattgataataataaaatctcatacataaaccctaattatttaataattcaaaatattaatcatatgcggtctttacattaaagatcgaagaatgtcacaatagtttatacataattttttcttttagttaactaattgagttatttatcaactgtattccaagtttaaatttgcagcaaacaacttgtctattttatagcttcgcaaattgcaaccaacaccacccaattaataatcccaataaaataaaataaaataaaataaaatggtgcaatgtaaataatatccgatatgacaatgacaaacacttgttcacaaaaaaagcattttttaatatatttcccatccagttgtatacacgtacctatcatataaatatatcaattatatatttccccatcttttgcgttatgcatacttaatctctttgttctattatatataattataaatatactattgtaagtctgtaacgttttcctatagttaccttttaattgaggtttggttagaagtaataaaaatataactattagagactcaattactaatattttaaggccattttatttaagtaaccataagttgggcaacaattttggagtatataagagttggttcccgccgtaaaaaaaaggtttttattataattccctttctttgaattattccaattcatttttttttcactttaattcttataccccatgaacccttactctacttacactgccgctatagtgtttgtggataaggaaaatcagccactaaataccaatattaagagacccaatgacttactatttatgagaaaaatactgaaaatatgttaaaatatccaaggatcatcatcctctcctttgtcaagagaggagatattgagactctaacttttgattttgaggattctagcttttccaatgaccgaagtgtggtggttgttaggcaaccccgccattcatcataaaaattctcagttagaatgcacggggtctaggaaacccgagttcgttcaaacatttacgattgcttgttcaacaacaatcgccccatgttttatttctcatggaaactaaactatcaactaactctattaatggtatgcgacagaccctactctatactaatggtattgaatcacctcgcataggccttagtggtggcctaatgcttctttggaaagatgatgtggatcttactcttttaaactatggccaaactttttttgactgctatataatgtgaacccgtgtgttgaccagctggcagatggaggctttaagaccggggcctacgtgactgacgactggcaggagatctggcgtgtcacttgctttttggtcggttgtccatcacgtgtggtccaagacccttggatcagctcacggacggctcagattggtcaaagagctgatcgagagtaagctaaaaaaaaactgatctgatttattttttgaaaattgcacttttggcttcatttctctaatattgttttcaatttagtcccacattttattccacaaacacacctaaaaatacataaactaaaataaaattaaagataaataacatattataacaaaatacttataaaaatacattataaactataaaaataaaagaaagctaataaatttaaaaaataattaaaaacatactaaattaattaaaaattcaaggactgaacaaattttagtttaaaaaatatgaaaaataactctaattcctagagttatcactaaactaagagattgtattggcaaacaagctatgatggctactaggagctcgggtggatgcaaggcaaaaagcttttatcgttctctcatttgcttggacaaagttagataccataagtttgcttggtatagatttattgttccaaagcacaaatttattttttaacaagctattaattaccattagttggctcgagacctaattggcaagttcatgaccatttactctctaatgtgtatttatgccaaaagtagtcctgatgatgtggacataaatgtttaacacgtggcaagaaagaaaacatctcggagttgagtagtttcggatcatagcaagtcgacctaggaggggtccctagccctgcgtctaggttgactttgggaactctgggatgggggattgaatctttccaagttgtttccaacacactcactatctttcgtattttgtaccataaagacatgaagcatccaagttaagggcctgggagctgaaaacacacgaaacaacacctcaaaaatcaacccgggtgcctagggtttaaccctgtgcccaagttgacaacccaactagagtttcagtttttgggaccgtctaagtgcaaatgggtcaaaatttaaattgtgacatgaactagacataccacaaacatatttgcggtataagaattagatttggtgaactttcatttttgagcacccggagcacccagtgcatgggcacccagtgcccaagttgacaatttgccagcttgggccactcccaaacatcaaacttaaaatcttactcgagcatcttatttgtctttataaaaaatggggaaacgagtgttttagaggaagaaacaaaccaacctggaggccaaaacaagggaccaacacctaggttgacacttggtgctggcctagtgcctaggttgacattttgtaaactttggccaattttgatgagttttttcaaaaagtcttctgagcatattttttgttttcatcaaagattaagattcaagtatttctggggagcaaatggaacttccaagaagcttaaaacttgacccagcacccaggttgacacctggcactaggcccagcgcccaggttgacatattttcaacctcggctgtttctaatcttgtttccaaaaaagtgttgtaggaattttttccgtcattagaaataacaaagatacaagtaaacttggaagaaaacgacaacaataggggcatcaaaactaagcccaacgcccaagttgacaatcaacttagtgtgctggttttgatcacttaaatgaaaattctactctaggaattctttctaaaatggtcaaaaatagggtagtagacctcgccctcaagttcaagaactttggaagtgtcaaaacagcatcctagaagctccaaagaagcacatagtgcccagattgatatatggcctattgtgttgggttatgtttatttgattttgatttcgtctcaaccgctcatattattttgggatttttttatatatatac

SEQ ID NO: 271454 - DNA, 1147 bp, Cannabis indica
aaaaaaaatccataaccctatagtgttatttatttatgccataaaaaagtaaactataccctcaatttccatatttatgaaaattctccttttgaaatgaaaatggagtgtaaatatttttcgtatggataattagtaatttttcccccgaactttgacatgtactaaatcgtgtctcctaaattttttttgccgttagaaatttcccccgaactattgagattgttaaatttaaggacttttgtctaatttcattcaattttactgtttcagtgattgtttatgtactaaaccatgctccccagactttgatatatatcaaatcatacccctcaaactttgatatgtactaaatcatgctctttgaacttttatccatgttagaaattttttactaaaattagataaaagttcttaaatttaacaatctcaaaaattcggggggaatttgtaacggccaaaaaaattcaagggcacgatttaatatatgtcaaagtttaagagaaaaattactaattagctttttcgtatttatttatttattttacacatttttcctatttatttatttatttattttgtcggagaagaaacacagtgaagactgtattctctattggattttcttcaaagagaagttatcttgaccatttttatgaaatatgaatgatgtttctcaagactatttttttttcttctttaaagataattccaagaagataagaatgagagtgaattatgccttttatctcttttaataaaaataaaatgagattgaattatccaagtcggaacaagttttgccgtaacgctaatcaccttgtcttgtggacccattgagttgatttcactatataaattcataaactgtggataattaaagttttcatgttacgaatcaatttttaatttgaagttaaaccattgaaagtctgaaaaataaggactgtgacatcatcaaaatcaaagttgttggccttcttaaatggagataagaaactagattaagtgggttgtcaattatagcaacttttttcttgtaatatgagcattgttattaggtatcagtagtgtctagtacctttttaacatattacgttacgattgtttagcgatattttttaaaagttattatattaaactatgt

SEQ ID NO: 271455 - DNA, 914 bp, Cannabis indica
tggtttaatttttattctgatgtcaaattttgggttcgaattatatttctttgtttggttaatgaataattatgttagatttttttattttttctctaagtattaattattaataataatttatgaaagtaaaatagaatctagcttggttacagataaattaacgtatttagtttcttcataaacttacatgtttagtttgggtccattgagtgacactgtctattaaatagatagagatattataaataaccataaaagtttaaattgtacgatgaaaaataatgaaaacatgtttggtacaaatttatttttcaaggtatcttaattattctagttacaaaatttaaaaataaataaatggatacataaacattatacacgtacaaatttttgaatcataagtatatatattcatatattgtaccaagataatagattgatagcatggataaaatatacatacctaaaattatgttatttaagactcatcatccacctgccataaacatgagaaaaatattgagattttagctataaaactaacctataatattcttacagtggacttataaagtagtcttttgactaacataataattcataaacatatataagatgaaaagagaacgaaaaagaaaaaaaaaatacatggatgaacataatgtagactcaattgtaaagtaatagattgttagatctttactaaaaaaaatcactaaatataatcattcataaacatatatatgtataagatgaaaagagaataaaaaataaataaataatagaatgaggcttagatgagatagtgagctgagaatcttgaaatatatatatatctatctactagcaaaaactacgtgcgaggcacgtatactaaattttatgctagtttttttctatgttatttgaaa

SEQ ID NO: 271456 - DNA, 683 bp, Cannabis indica
acctgtgtgagatttactacttgattgcgtatacttgcgtagcgtttataatttatagcaacaatgaccaaccaaaatcaaggtaacttgcctagtactatagaaattaatctgaaagagcaatgccaaacaatttccttgagaagtggaaaaaaatatgagggaccaagggcagagcaacaagtggttgaagaggaccaggatcaacaggtaccaacaccaactcaagacaagaaaaagactactgaatgcccgtaacaaaaagaagactcacctcctatcagcattgatcatcatatcaagatcccttaccctcaaagacttttcaagaataagatggataagcagttttcgaaattccttgaaatattcaagaaactacacatcaacattccattagtagaggtcttggaacaaatgccaacttacctaaagttcatgaaagacattctatccaagaaaaggaagttagaagaatatgagatggtggcacttactgaggagtagtgtaatcctataaaagaaactaccacccaagcttaaagatatgggtagtttcaatattccatgctcgatagggggttcgatggaaataaaagctctatgttatttgggagcgagtattaacttaatacccctatttgtgtttaaaagactaagattaggagaagccaagcccacaa

SEQ ID NO: 271457 - DNA, 807 bp, Cannabis indica
ctttatgccaaattcaagaaatgtgaattttggctatctcaggtgtcgttcttagggcacattgttatcaaagatgggatcaaagtggatgtagggaaaatagaatccgtcagggattggctgagaccgaaaacagtgacagaaattagaagcttcttgggtctagccggttattatcgtcggtttatggaagggttttctaagatctcaacacccttaaccgagcttatgaaaaagaatcagcggtttgtatggtcagacaaatgtgaggctagttttcatgagctgaaacagagattgattacagctccagtactagctttgccttctgataaagaaaagttcgtggtttattgtgatgcatccagacagggtctggggtgtgtactgatgcaagccgaccgggtcatcgcttatgcctcccgccagttaaaaggattatgaacagcgatacccaactcatgacctagaattggccgcgatagtttttgttttaaagatctggcggcattatggagaaaggtgtgaaatttatatcgacaacaaaagtctcaactacttctttactcagaaagatttgaatacgcgacagaggcattggttggagttagtaaaggattatgattgtgagattctttatcaccccgggaaggccaatgtagtggtcgatgccttgagcagaaaaggtcccgggcagatagctagcatgattcagatctcaccttagttagcagaggacatggtcagatctagcattgagtttgtggtaggaaagcttcacaacttgacgctgcaatctaatctgtt

SEQ ID NO: 271458 - DNA, 517 bp, Cannabis indica
ttgggaaagtatgatgccttaagtactcggctacaaaggttattcgggcatctaatgcatctccacacttgtttggcgagaagagcttgattgaacaaccccaaatcacggaatcccaatccacccttatcctttggcttacataaatgtgcccacttacaccaatgaatcttcttgtccttatccgaagagccccaccaaaacctcgcagccatgcgatgaatacttgagatagtcttcttagataatcggaaacaagacattgcataagtcgggatagcttggactaccgctttgatcaacacctctttacccgccattgagaacatagagctcttccacccatacatcttagcccaaactttatttttaattttatctaaaaattctttcttgtttcggcccacaaaagatggtaatcccaaatacttcccatgattttctacctctctaacacccataaaaaaagcaagctgttgtctagcctcccaagccacattcctcccaaaacacactt

SEQ ID NO: 271459 - DNA, 1073 bp, Cannabis indica
aacatcacttaattaaacctcattacaaagaaaattaattatacaacctagtatattaaaatttgtcacagatacaaggtaaaataaaataataattgttacactaattgaaataattcaaaaatgaaatcatggatgaacaatatataattagtatactaatattatttatttagggagaaaaaaataataacaaaatgttgagaaaaaaggcaaaaaagggagtgaggaagatgttgttgagtgggaaagaaggagcagagttgtggtgatcatcgtccaaccattgattgtccatgctaatggttaccttttgaccgaagttggtgcagtcatcagcgatggtggaaatgaagtagcgagttgtgttgttacttgtcaagggaatatttactgggctggtcttgtagattgttccattgatagggtttcttatgttgcagctatcataatctgcctttgatacttcggccacgttatggttactacccctccatttgaacactgtttcaacattgaaataattaattaatgtcacaaaccctaccctcattaactaaacactttaaagtaataataataattacattttgacaatgcaaaaataaaaccaaatgtccttttgtgacggtcatactacatagttttcttgaaattgatccgtgaactattcaatttttggaattcgtcaaaaaacttaaattttcaggaactaattcgctaaataaaaataatggaacaactccaaaaaatttaaatattttatgaacttgtcaaacaaattagtctacgtataaatactagactagattattataagtaataggatataaaattaaaaaaaataaaaatagattaaaattaaaaacacattatatcaaaaaatatatatacataaatatattagttaaaaataaagaaaattctacaacacaaccttgaaaaagatacactaatacattcttatctgtttcagtatttaaaaaaaaaattattaatctgaattttttttatagtattatacgttgtcgttatttaagaatcctgtaaaattttgaaaaataaaaaaataa

SEQ ID NO: 271460 - DNA, 2326 bp, Cannabis indica
aaaaaataaacaatttaaaaaatttatagactataatttaatacatgttaaaagtttaaagtgaaaattataatttgcttactatacatagaaaacaaggagaagggcacttctgtaaattccttattttgttaataaaaatatccatgagagattgtataccaacaaagactgaaaaaaaattaaataccaaatataattaaatgatgatatataaagagaaaaggtcaaattataaagaagaagaataaattgccttattctaaaggtgtatagagatactaaaagtccaaaatttcctttctaaaaatttggcattggcatatatagggaccttccctcgttacatcctcctttctttcaaataaataaataaataaataaaaagtttcttaatttctgaggatgactttgtctgtttcactactttcccctcattattattttatataaattaataataccaccaacgagtctttccacttataaaacttggaaaacactaagactaagagagagaaagagaagaagaagagagagatagagaaatggccgcctctaaagaaagtactgttactgttatggtcttgttgtttttgtttttgttgggcgttattaatgttacagcggcagagcatgatgatcaaacgacgtcgtctcataatcaggttgttgatcataataagttgtcgtaataaatcgacggtggtgatgaatcggaataagtatgcttatgcaacgatgatgtatatggggactccaagagactacgagttctacgtggcgacacgtgtcatgctcagatcacttgctaaactccacgtggatgcagatctcattgttattgcctctctcgatgttcctcttcgatgggttcgagccatgtaagtatatatatatatatgtatatctcctccgtatacggctctccggcctcggagtattttaatttttatttaggcgataattaatattggattattaaacctaattaagattaataagatattataaataaatagaaactgaaaaggtaaggaagggtaaagtaaaggcgttgatatatagaaaactaataaagtctaacttatgatcagctaagggcaggagtacgttattacggtacgtgtgtataatctgtagaggaaatgatttatctgtttggaagagaatatctgtgtgtctgtgctgtaaagtcttagattagatggtcccgcttgtacccaataaaacctccactttcttcatcaacactctgatatatgatatgaatggataagtagtgtttttttttatctgaaaatatggaatggaatggggccaatataagtattattataaataaatattataatatatatatggatgccaaatggaatggaatgacatactccacgtggtatctgccaacgtgttctctgccaacgtgtctccttatttcaatttcatattataacaatggaatggacaaagtaacacccactttgccacttgtcttaacgaacataaaataagaatataccgtccatatattctatttattttttgtattgaataattttttgaagtgtagaccaaaaaaattgtaaaatattataaaaataactcaacatgaatataattttatatttatatttaaatttataaattttttatttataattatataatattatttctccttattttttttttaatattttactgaccatgtatataattttaaaattttacaaacaatcttaataaataaaaattttaggccataaattataaataatacataaataaagtatattttcaaaaatttccttttttttttaaatatatttacagaaaagtaatgataataattatgtaaattacgtacggttaataatattaatttgttggccttgaaatactcgtatgaatataacttgttgtaagtaacggtaatattaataagtagtattgagagtgtgacagatgataaagatgacaatttcatcattttcctttgttacatcaaaaaagatttttatattaatatatatttttttatatatatataacagggaagaagaagatggggcgaaagtgatgagagtggaaaatctaaacaacccgtacaagaaacagtcgaatttcgattggagatttatgttaacaatgaacaagatttacgtttggagtttagtggagtacgaagagttgtatgctcgattctgacaacattttccttcaaaaacacagatgagttattccagtgtggtcaattctgtgctgtgttcattaacccatgtatttttccacactggactttttgtgctacagccttcgatgc

SEQ ID NO: 271461 - DNA, 544 bp, Cannabis indica
tcaaatgcttaatcctggatatttttgaaaaagctcaaaatgcaggtcaaagaggttttgtaggcattggatcaaatggtttggaaagttctggaatcatgaagtttgtaaaatctagtgttccgacgaatcttcctgatgctgcaaatgtgaagtctgctgcaagagtttcacaacctgtcgtagcagaagcagtttctgctgcagcaaaatctccaagatttacaaaaagagtaagatctgaggtaaaaagatttgttcccacttgtcatttctgtggtaataaaggacacatcagacttaaatgtttcacgttgaaaaatatgtttaaaacaaattattttggtaatttggaaaaatatcaaaagaaacataaaagtttgaaacaaatatgggttaagaaaaattgtctagctggtttttctaataaaagtgctgtatctcaaatgtggtattttgacagtggttcctctagacatatgacaggtgacaaggactttttaattaacattcgccctatacagtgtggggaagtcacttttgg

SEQ ID NO: 271462 - DNA, 8713 bp, Cannabis indica
aataaaaaaattattttatataaattagttgagaatttaaattttaataagaggtatttttttttaagaatacaaaataaaatttcccaaaataaatcaaataaaatagggtaaatactattttggactttgtattttacaaaagttatcaattagactctctattttgttaaatgataaaataaaccttatattttcttaaatagtaaaaataaggtcctaaacttaattttcgataattttatttttaatataatcaatttgatggcaatttttaacaccggtagatacataaaatataactagttttattataatatttctagatcaaattattactaagttttattttgacaaaaaattaatttaaaattctatttgtatcatttaagaaaatataaaatttattttattgaaacagaaattttaattaataatttttgataaactcaaggaaaacacgttttgccgctcttaactacaatatgcaatatggttggttgattgagaaccgttaattatgtatacatattattcccaagctgaggccttctttacttgattctctcttctctatcttcaccagaacagaatattccatctccttccttctatgaagttaagctcagaccactcttatctcttactttgctaacctacaacaacaacaacaacaacaacaacaacaacaaatatggctttagcttttaatggcttaaccccacaaaccagagctctgggcttttcatggaggagattggttccttcacaaacgcaattctccacttgggtttgtcttccaaagaaaccaattgcccagaaaaccatttcaaattccgctgctaaaacctccgattcaattctctctgtctcagatgttgagtctcgccaaattgaggaggacaacactaatggaatcactcccacttccacttcgactactggtatgatttattcaaaccccaacttgaaatttttacggatttttttcgaaataatgtaaaagcaatagattttagatattttgtgtaaagattccaaatttcaaagcctatccttttggttttcattaatggaaatataaaaagcaaaggttttgaaggaaaataaaatttgggttttggttgtttccattttagatggaagattgtgaattaaatcaatatacttgaatttaaagcattgtaaaatgtggtaatttgttaatttgattatttatctttgttttatgttttaagcgtggatggaatttgccaaaaatgtatctggtgaatgggatgggtttggagctgagttttcaaatgaaggaattccaattgagcttccggaacgtgttgtaccggatgctttccgggaatgggaagttaaggtttttgactggcagacacaatgtcccactctagctgatccaaaagacaatgttgtttcatacaggttgattaagctactccctacagtgggatgtgaggctgatgctgctacaagatttagcatcgatgagaggagtgttggaggtccagatagtggtgtatctgcctttgcttatcaaccaagtggatcttatgtggctgtctggcccattgatgaaaagggttctcataatttgtttgagttggagcattgcttgatcaatcccgaagatagggagtctcgaatgagaataattcagatactccgtgttgagaatgagaagatagtgttgcatagtattagagtgtttgttgagcagtggtatggaccattcagaaatggggatcagcttggtggatgtgccattcgggattcagcatttgcttctactcctgccttaaaagcttctgaactggttggcgtctggcagggtccagctgcggttgctaacttcgacagttctcaggttttgagttgtgaacatattcatttattcttggttatgtttgaattggatcccaatttataaatccatgaataggttcactaaccgctaatgataatgttgttggtttgagtgtgtgcttgggggttggcatgtagatatagtttgcatagactaaaaagacagtttgttgtgtgtgtctgaaagatatcttagaaaataaaattatccatccaaatctgaacacatagctatgaaattcctcacaggaaacctctttattgatgatgaaataaaagaataatctagccttcaagatgctagtatctccaattacaaccttttttcgagagggctgctctctcctagagtctaatctcttctatttccaagctagtctaaatggggttgccccctctctatttataagcataggtccaatagaattaagacactaagaccactcagcctatgtacataaaagacttaagtatttcatttaacccttcgaatcaagatctccagttaaaaagtaaagtcccagttaaatcaatctaaatttgacacgtcagttaattttttatttattaaaaaattaaacctttaaccgagtcaacaaaaatagttagcttatttaatataaattaagttagttcacttgtcagaattagattagtttaacaaaatatgagacaatactttttattaggagatcttgattctaatccttctataaattgtaggttttacggtcaatgaaaataaagtttctagaactttatataactttttgcagctatctctgttgcttaagtaaaagataatctctttgactataaatgaagtaaacagcataattagtcaatgatttgaacttgtcttcttgaacacaggactttcttcaacaacttctagatgacagagataggaagtcagtaagagatgaacgtgacattatcttgcttccaaagcaattgtggtgttcagtgaaagcatgtgaaggtggtggtgatactctctgtgaggtgggatggctgttcaacaatggccgtgcaatcacatcagaatgcaccttctccagcaaagcaactttaaaggtaagttttgtttgaccaatcaatagattacacaagtattagaactagagttctattaggattgaacaatgctacaaaatcatagttttggcaacccaattaatctttttcaattcaatttgcaggaagtttcaatagcttgtgaaactacagccttggagggtacatagccccctcgatattctgtcaactaaaatctttgtttattcttccttttctccttaaaacacaatccaaagcttataatgacaatgtgaaacagcccatgtgcgtgtcatttgtaagtatatatagatatacatatacaaaaattctactccaaattcatagtattgtaatgtcatactcatatgctccatatttttctctgccagattctcttggtatttgtttgtactgtgagaagttgttatattggttactgttttctgtgtcattgtttgattctatagtaaaattcttctcatatattcaaaagggcatttacttttcttggataccagttttggtgtatatcttatctcctcatttagcataacggtcttttcagtagaatccaaactctgcagtctccagattatgtggctgacaatgtcaggctttgaatcattaatgagtcaaaaacacgtgacacaaccaaaccaacataaatcgtaccatcccatgttagaatatgacaaaaagaactagaccccaaaagttggaaccattgtaagcccgtgaacaacctcaaagttctggtaaacacaacaacctttctttatcatattattgaaattattgtattgcttctaattcagtatatcaacttcaatgaacagatttgaaacataatcatttcatagtagtcatctcatttgtcaccaaaaaaaaatctgaaaactacaaagtgaataagattggcaaaatatctgcaggtgaaattgctttctttccacatcatatatatttatatataaacagaaaagcctcaaaaatgaaacactgcaaaataatttagatgcttgaatagctatgacactactacaacactccataattcagaaaagcttacaacatatttcattattggtcatacagcaatataggcatcttagtgaataaaattctacataaactcccatcacaccccaccaaaatctttcagtgacatcatgatatgatgatccaaagtcttgggagagctgaagataattaaaattggttctcaaaatcctactgccaaaccacctcctttagctttgctgtacaacctaatcaatgagccaagaacaacagtattaaacttcaatatagatggaacatgttttctataaatagtgttttcgaaaacattcatgccggtattagttctatcgagtttagttatagatattgcaaaacaggtcaaactatatccttaaaagattatgttcttcaatgtgacctatctaattttgtttaatcatgtttgtcctattgattatatgactaaaaatgggaataatttagatgtttagtaaaagaattataaatacctgtacaagacatgaaattggatgctaatgagcacttggtggtgcatctctcatgcttatattcacactgttcctcatagttcgtcttccaattcctgcattgcccttctgcatcatggcgacaaattcaccataatcgattcttccatcctgcaggcaaaacaaacaacaatgaaaattaatgatgcagcaatggagtagcgtaaatctagtttaagtgttgaaccgaaacagaactaaagatcttaatgaaagacaacatcaatgttatgttacttacattatcttggtcaacttctctgattacatcttcaaggaaaacatcagtcatattatgttctgcacaagcttgctggagttcatcgacggtaatgtaaccacttccatccttgtcgaagtactgaaatgctgcaagtagatgttcctcgcgttctagtttgttaagatgaactgtagcagctatgaattctccatagtcaatagtcccgctgttgtccacatcagcctgtgtcattacagacagaacacaacatggatcaatgtcaacccgaaaaacatcaacttcttatcttattgagaagaatgtttaatgtcataactccattcacagctgttttaatttttccttttctaaatgtactttattttgtagcgagtgaaaggaaaggtggggcggagcatagaacatggaacattcatcttaccgcctccataagatcacgtatctctgtatctttcatggtggaaccatatctacgcagtccagctttcagttcatcaaatgtgatagcaccactgttatcagtgtccattgctgtaaacatttctctcagaccagcaatctcctcctcagaaaggctctcagctataacctgtcaatacataaaacaacatagatcatagtatcacattcatctctcacaacatatatatatgtgtaaatctgtttgtatctaaacttgtaagtgcacttaccctcaaagccattttcttcaacttattcattgctgagaactgtttgagccgagacatgacagctggatcgagtgctctatcaggagcaactccattttcgcaaatccaagggtgacctatacaaaggagaaaagttttacactaaattctataggaaaaattagtctccatcgatgaatcaacttcgaaaaacaaataaaacccgaacttacataatacttcatgagcagtcaagcgttctgaaggtctagagcacagcattttcctaattagatcttttgcactatcagatatgacaggccacgggtctgagtcaaaatcaatctgtcccttcaaaacagcatcaaaaatgccctgctgtgtttctgaatcgaaaagaatgaaacatttagtaaaaatggaagactcttctctcaatgctaataacaaaaaccaaatcatcataccagcccaaaatggtggcactccacttaacaatatgtacaatatgacccctgcagtccacacatctgcttctggtccatagtgcttaaggagtacctcaggagcaacatagtaaggacttccaaccacatcagtgaaaatttgacctgaaaatcagcatgaaaaatgagaggcatacaattcaaaatggaacatgattgttgtattgttatgtttttacctggtttgaagaatacagaaagaccaaaatcaatagctttgagagaaaaatcatcatccttattaaccaacaagaaattttcaggcttcaaatctctatgcataactccaagagaatggcatgcctcaacaaccccaacaataatcttggtcaattcagcagccttcctctcactataatgtcccctttgaataatcctatcaaacaattcaccaccagcacaaagttccataacaatatggacataaagagaatcctcataagcacctttgatggtgacaatattcttgtgaccagccaaatggtgcattatctgaatctctctcctaacatcctcaacatcctcctttgaaatcaatttcctcttggagatagatttacaagcatactcattcttagtagaattctcagtacataaataagtagtcccaaattgaccttgtcctaatttacgacccaaagtgtaaaggtcacgaatattagcagttttatgacccaaaacatagtaagtttggttatcaagacctttcctcatgattgtatctttcttgttggaagtaacaaaagctggattgttactgttacagttactgttgttattattactgttttctttggctttggctaattcttgagatgtttgttgttgttgttgggagttcaaacttgttgatgaatggtctgaaacagaacgattagaaggagtgttgcgtttggagatggaagcagattggtcctcaggctcgctcccctgaaagtatttccccctaaaagatccacggcatgtattgcccatgaaacaaaaaaacaaacctttttcactgtcttttcctactcatccaatgagttattaccattaatacactctgcaacaaaacccagattagattcatggtcaacaacatacataatacataaacaaatcccaaagaaaatgatgttaaaaagcctaaataagcagatcagtcacatgggttttcacaaatcttggaatatttctacatcaagagattaaaaaacataaatctaccttctataacatccctaaacaagaaaaaaaaaagtcaactttatatcacaaaaataccaacctaaggccaaatcttgtaaaaacataagattagattgataaagatgagaaatttaagctactttagatgaatatgaaagagggttagtaccaatttgcagaaaaaaagtggaagatgatagtgatgaacagagaaagaaccgaagaagaagaaaagggtgttgatctaaaaaacaataagacgatgaatcaagaaagaaatggaatatctttacagctacttattagaagaaaaaataaatattaataaaaaaattaatatttattacaaaagaaaatggagagagagagagaagaaggggtcgtttgttttgttgttattttaggattggtattgctgggaaacatcggaggttagtgctgaccagctaaccttctttctctctttagttttttttttttttttgcctttattgaaaaataaaaaattaattaattaattaaataaaaacgcggctttacaactttaatctctgcaaaaatcattatccaattctaaaaaaagaatgtaaagaaattaactttatatcaactgtagaaaaatagaggctaaagaaaaaatagaaagttactacttttcatggtgaaaactttaaacactaaaaaaaaagagagagaatttgaagagattaacgattttggttccttcctagaatgggaaatacgacatttgtggttagaaagacaagcgagtcttagcattgtcttaggttgtttttttttttggtcaaaattttgtggctatagttttttatttatgtaagtattattctaaatttaggcaaaattttgcattgaataagggtttattaatgtgattgaaacttgattaaattagataaattaaattgtctaattagttatttttttatattaatatttagtactttggttgtttagttttgtttaattttttttttattgtgcttcggttaatcttgtagttatccaaattttagttataattaattagtaaaaatatagatgttttaataagtaaaaggggtgtatgtcattttaattctaaatgtctagttagtttgagaaatgttaagagaatactttaaaagaaaatttatattctttaaaagaaaagagtaactaaaggttaaatactattttagaacaaaagttattgattgtatctatgttttgtcaattaataaaattgaccatatattttctaaaattgtacaaataagattctgaagtcaatttttgataatttgtttcttaatataattaatttgacgaaaattcctaacacgaaaagatgtagtatacataatcagttttatcataacacctctaaattaaattattatgaagttttattttaacaaacacagttcagagtactattttaaaaattacatgtctaatttattatttatttaaacaaataatttaatcagtaatatttacaaaaatataatatctaaatttatatttattccaactaaaattaaaaaaaaaaaaaaagtgataaccatctaatcatctacttccaatacc

SEQ ID NO: 271463 - DNA, 1255 bp, Cannabis indica
cagcaaggtggaggaagccaccaaggagttagaatccgacatgagggctcagtatccaaggttgttcaggttagatttcagggacagaatcctttaaggggggggggaataattgtaaagaccgcttaactttaatttagaaattagcatataaataaggtttaattatgaaacttgcatattagttatgatttattattttatgcagatttatttgaattcaggatgcattatatatgtcatatatgaaattttgtgtttttacatttttgtgcccagtaacatcagtatgcgacgtttggccattaaaatcacatttttgtatttagtagtagtggggtaatatagttagacatttagaatgtcgggattataaggagtaatggtctttgaccattttttccttaaagccactctaccctttagttatgttagtagaggtattttagtcattttgacttagagtttaggtggttgtatgttagggtggcagcttgccactatttgataaacagatttaatttatcttttctttgagtgtgatattaaacaaaataaaaaattgagaagaaaaacctatctttgacttcttcttcctcatcccttccaaccagcaagaaccaacaacaaattagagttttattaagcttattttgaggaatatctgctgtattcaagtgatagagatctaaggtaaaaccctagaacatattttgtcattttcataatttttcttttgttcaaacatgtaatttttgattagttgttgtttaggatttacatgctttgttgttattttatagttatttatgttgatttaagtttgttttggaggctgttgttgtgtttaagcaaggtactttgctctctaatggtggatttggattctggttatgttatgttgtttggttgcatgttttctttttattatgatgtatatagatgatcgaaaagttgtggtgtggtttggagtcaaattgagttgtgtagaagattttgagtttttcttgcactgaatcggtcgaccggtttagggggacctgtaggaaccggtcgactggttaatccccaggaagtcatgcagaattggaattccggttgggaaccggtctaccagttggggcagttttgggaaccctagtttttctcatttttacgataattagggttttgccatgttatttaatgataggaaaacttttagtttcaagtttaagtccccgaaaagtgatttagcgtgtcactcactagtttt

SEQ ID NO: 271464 - DNA, 1741 bp, Cannabis indica
agagagagagagatggataaaagcaaagtgttgatagtaggaggaactgggtacttggggaagaggttagtgaaggcaagtttagaagagggtcatgagacgtatgtggttcacaggcctgagataggagttgatattgagagagttcaaatgcttttgtcgttcaaggaaaaaggagctaaattagtctcagcttctttcaatgaccaacaaagcctcgttgatgctgtcaagcttgtcgatgtggtcatctgcgccatttctggtgtccatatccggaccaaccatattcttcttcagctcaagcttgtagatgctatcaaacaagctggaaatataaaggtaattaatttgggaaattttttaattaatataaaggacaggcggtacatatactgtaactatattacaatacacaagtcatatatataaattgagaagggcacccgtcttatgtgtcaatatcgctattggtctaactaaatttgtagtacacctcaaaaacatgtgttttagtactccttttatcatttttggtatctaaagagcttttttaattcatttttttttttaaaaaaaattcgaatagtttataatatcaaaaatcagatttaaataattatttaccatgcatataataaaaagtacaataaaatatcaaaatttagaattttttgcattgtatattattaagaatttttttaaaaatttatatgtaattctaaataattataacttatacaattatgaaaaaaaatattagagcaaattataatcttataaatgctaaaacagataaaaaaaaaacataccgaaaacctttataggcatgtagtactataatttttttctaataatagatatgacatatttaataaacattattacattattatgtgtgatatatgtgcctacaattgtgtctacataggactacgagtgttcatcaaactgtttaaaccgcttgtactgtaaaaaaaaaaatacagtctgaaattttttgcggtgcagtcgcggtttgaatttttcctaaatcgcgttgtgtggtgcggtttgcagttttgaattattaatatgtggttcaaattgcaccgcaccgcacattataaaaataccaatttttatatttatttaggtctaatacgtgaatgtccaacccaaagtctattaattattgtattattgaaacttaattttttttttcatatttctttcaagtcttatggtatttttgataaatgttgctcaaattttgttgtatttgtaatagtttaattattggtgatagtccaaaccgcaaaaatcgtaccgcaccgaaccattttttgcggtgcggtttccgcggttttttagtttcgcggtgcgggtgcggtttggaaaattagaaaaaccgcattacgggttaatttgaaaaaatgaacaaaaatagcaccacccacaccgcgaatacccctagatatagtactcaacaacgaaacataaaaatatcctatataaacaaaaggagttggaaaataaacttgaatataaaataaaacagaagctgcttgaatatatatatatatatatataaatatattgatataattaagatattggatgtacatgattaataaaaatttcttatacagtatatatatatatatatatatatactagatgatcgttacgtgccaagccacgtactattagttttatttaattattttagtttttattttaattaataattaaatagtat

SEQ ID NO: 271465 - DNA, 894 bp, Cannabis indica
gaatgccctatctttcaatttcaaaaaccgctcttgagcatccatgttggtaaacctcactctatcaagattagagcgacccctaggtgggttggatgatgaagctcccccttcttcactcactcttgacctttttggacccatgtcacccaaatttcctaactttcaagatttttttaaaaatttcggcagcacttccccttaaaaattcacttcccgggaattaattccctcacaatcaaacccaattctactcacacaaacaattttgaacaatgtatatagcaaaaatcccaaatatccaacaaactatccaaaactatccaacaattcacaaattcttcaataaaaattggattgggagtcttagaatcaatacctcaatgagaatcctcctttaatcatcctccattgtagaaagcttgaagttcttgagaaagaagaagatgaataagggtttttgaaatttttgggtgaggttttagggatttggggtttattttgagtgggaatgagttattgatgataggaataatagtttaggatgatatgggatgaagatttatggttagatgaagaaaatatggtggagagaagtattttcggaagtgtaggttagggattttgaatggggttaggtttgaaatgttagggatttggcctcttttaaaacctactgaccattctcgccgcggcgacatgaagcctcgccgcggccaaaatccgtgaaaattataggctttctgttagccttaaatggtcgcggcagcatatccccttgccgcggctagaattcgatcaaatagggggctttctgtaaggcttaaatggccgcggccaccctacatctcgccgcggccactgggcgaatcccagaatttttttttttttttt

SEQ ID NO: 271466 - DNA, 1303 bp, Cannabis indica
ctgtgtccaagctatccaaagtatttttttcatggtttctcaatttggtttacttgttcaagatgtccgtaatttgcttttagttttcccatatattaagtgtgttttgttaaacaatctgcaaccaagttggctcattgcttggcaagagactcttgtttctctacaagttgtgtgcttcaattggaggattattctgctgaagtacgttctattgttttgaacgaaattcttaattaattaatcctttgatcttattaaaaaaaaatactatatccccctttaaaaaaaaattctgccccgccccacctaattttaattaggatttttatcccctgaactttgacatgtaccaaatcatgccccttgaacttttaatgccattgaaaatgccccctgaactattgagattattggatttaaggacttttgtctaattttattcaattttactatttcaataattatttatgtactaaaccatgttcctcaaactttgatatctaccaaatcacgctcttcgaactttaacattcactaaattatgcccctgaactttcatccatgttagacatttttaccaaaattagaaaaaagtctttaaatccaacaatgtcaatagttcagggagcatgatttgatacatgtcaaaatttaaggggcaaaaattctaataagtaaatttttaatttgtcagatatattatggcactacgacctttacggtcgagcttgaacaaacttattagttcataatactcttcaacacttctatatgtatcattccactaaaatggacaagtaatataagttacgtgagtagtggatctatacgcaccgactcagctcactttttcagagaaatatatatatgtatagaagttcttatacacacagtacactctgctactactacagtagtactactagtcatgaaatatggagtatggcatttatggcatatggagtatggactagtataatggtctctagttttttctacctgtgcgcgcgtgcgacatagatttacaaactaaagatagggtatatgtcatgtcacccccacttctttattatttcacaaaatatcaaagttagtgctctaccctgccccccacaaatccttctttatgactcacattatataaatcttatatatatatatatgctcatataatatatatatatataagtagagttctcagtctcatattctgtgtacttttctttactaagctaatctactttgcattagaataattattctttttacccctgtacttatgacactatactattatgcc

SEQ ID NO: 271467 - DNA, 513 bp, Cannabis indica
atgagtttagtttaattgggccatacatcagtgtgtatgagctcaagcggctttgtgactctttctggtgactcctttggaaaaattcttcgagattactttccaaccaaacatccttcacaaagttgatctggttggttgatgcatggaatgcctctcaccatctccttcttctctaagagtttaagcccgccaaaattgagatgtccaatgcgtagatgccaaagtcatgatgactcattgtagcaggcctttaaatacttcggaacatcatgttgaatattcaagaggaacattctattctttgtcatgggaactttggcgatcaaattacttttatcatctcttaagaaaatattattttattttaagtgaataccataacctttctctagtaattgacccaaactcaaaatattatttttcatgttgggcacaaagtaaacatttaagatgaattgatggcctcttttttttattcaagcgtataagaatcttacctttgccttccac

SEQ ID NO: 271468 - DNA, 975 bp, Cannabis indica
gttcggcacctgaaccgaggctttggcttgggagctctcccctcagccgggctaacaatgcggaggggcttctcagcgatcgcctggcttctcctctcgactgggctccccacgcgaagtggcctcccggatgctgcctgggccttggaataagccttctcctgggccttccggtagagatagtcctggtacttcttctcggcggtggcgatgagttcgtctcggaaggtcttctccgcggtaggcaccctcacatttggacagatcaccttagaaaggttagagtcctccacggattggtgcggcaggataagcttggccttccgacaattctccgtcgtgactaggcctccaacgtcaagttccgcccggtcgtaagtcgcaaagacctgggccctctggagaaagacctgagtaggcgcggtccgctcataggggggaatcctgacccactctgtgagaagctccggatgctccactactcggaacccagaggagaagaagaagcggtggcgatactccttaacatgattttgcctattataagggaccacgccatcattagaagggtgggcccggaatccataaaattcgtctttaaatttgtcccccttcttggggacagaaacaagttcataaaaatataaaatctccgccggagtgggagagcccatccccgggcggagtaaaaaaggaacaagcctaaaagcaggccgtatgcttgaggaatcagttggtatggcacaaggacgaaaaaaactaaaaaattaataaaatagtcttggagaggaagcatggccccggccatcaggtgcgtctggctccaagccccgaagccgccatagttatggttgggcgtctccgcatctcggggcgccggtgatacgtcccagatgtcgagggtttgattccagccacctccacaatgttctccagctggtgggggcatgttagggtggaatgaagcttagccgc

SEQ ID NO: 271469 - DNA, 643 bp, Cannabis indica
acccgatcccaaacacagacttggacccagatagggatctggatacgaccctggactaggatcaagacccacactgggatcaaaatgctggaccagatctggaccgagatcttgacctagacccaaactttgacctgcactcgggactcgaacttggacctggacctgaacctagaccgagatcagggacaagacctagacacaaacccggacacagactcggatccgaactcaaacccacacctagaatcagacccaaagctagacccgaacccggaccctaactcgaacccagaccaggatgggaaacaaggacttagacccagaactgaatccagactcagattgggattggaacttcggactccgatccaacctagaccaagacccaggacgtgaacccacacccaaagcctgatatggacctagatttaaatccggatcttaaccctaactcagacttggactcgaactccgacacgaacacaaacccatacttgaactcagaattgtaaatggaactagaaccaaacaaggactaggaccaggaccaggacctaaaaccaaacccaaacccgaacccaaatcaaaacccaaatagagacctaaactcaaacagagactaggactggaacccgaacct

SEQ ID NO: 271470 - DNA, 3653 bp, Cannabis indica
aaaaaaaaaaaaaaccttaaccaagtggtgtggtcactggaatattcaagaactatgattcccaatatgcagtaaaaattaaaaaaaaaaaaaataccttagccagtggtgtggtcactggaatattcaagagcgccaaaatcacatttaagatcttccgaagttcatgatgatcttcccattcttttaaaagagaataaagtcgctcttgtaaaagctggagtaatttcaccattttcgacatctccaaagcatttgaatcctactccaaaaaaacgaaaaattaaagttaactcaaacagaacaaatgtatttcataaacaataaaaaataaaaaaccagcagttgctaaaccttatagaagttatatctgcaggcagccttgtgagatggaacaaacttctgcttgtgctccaaacaaagacgtagtaaatgctctggagctaaacgggcatccaaattgcacaacaatgaaccttctaagcctgaaaatacaaagttgtgagtaaacagtaataaggacaagaaaaagaaaaaatacatgggatacattaaaaagaaaatcacctctaacaatccttgtcccaatggtgtacgagtcaatgaaggaaagaaatcgatcttcgtcagagatttgataagcaccagactggaaagaagaaaaatatgtaaatagcaaataatcatcatgatcatcatagacaaaatcaaacatcaatgaaatctatgtatccatataatggacattgtaccatcaacattatcatatttctacatataattagataaacagaaattttgaactaaagaaattgaaattcccacttaaatttatcataacaagttcagtacatgagcctcatttttataagagacatagcaaatacagtataataacaggcattagacaaatgctcatattatcatcaaaatttaaatacatattcagctatatttccgagagctcacatttataataaggctattatcccaaaaagctggttgtgaatatggactacattgttcaaaacggattcctccaagggattacattcttcatctgaattatcttgttcattagaagcatcctcctgctaaatataagtttatttagcatataagagaaaattctcatgactaaatagatgaaaaagaaagaaagatgtaagcagcaactacataaaaattctcattaccttttcaacatgttgatcatcagacacagattccttccattcggaaaagaattccttcatctcggaagaactcccaccttcaaaagacttctcaagattcgatatatcaagttcgaaaatactagcaatcttaaatgcacgagtcctgaacttgtactgctgagattgttcttctctagttttagcttgttgaaatttcatggacgtccaaaaatctgtgagctttccaaaagaactatccaagatctgatttataatgcaatcaaattatcaacacaactgaattgtgagataccagcccaacagtaatttaaatggtgaagtaaaatataccataaaggatgcagagtcaatcatctgtgtacaagatacaaagtgtgctgtccggaaaagaatattctgatacagagaagcctccaggtgtgtacgagagatctgtcacatgtatataggatttaatcaatgaaacttgtaattaatgagatttgtacttagcttaactaagttatataataaaataaaaattaccgtttcattagtagtaacagcatcacatgaaaaagaaactagctcttttagtacgtccatatcagcagcacagaaatctgctgagacttctactttgtaaggtggaaactcaggcagctctctattcagattgatagatacagtttgtggagaagaagccaaaggaaatctcataaatgtataaatcgaatcctgccaggtccccaaagtcagttactgagataacaagaaagaagaaattactttagcaaaacaacaatattctggtacataccgtaaccacatttattttgcatggattaactctacttgagctacttttttcttttatggtagtcaaagcttttttctgcatgagactagaaacaactaaggagaaacccaacttcatttcatatactgcaacttggacaggttgtacaaaatcaatgtattctgggtagtcgtctgataacttttcaatgaaagcagtcgctgtattctggaagatgggattaaaaaaataagataagatacattaacgtacggaataaagtacaaatataaaaatataagcatcagcctaagttaatgaagcttaaatgcttcacaatattcaatatacagttaattagaaaatacaaggaaaattacctgccagttataccctttgtcaggaatctgctctaagctcatggtgtcaatatcactccataaaaactctgatgatttggaaaggcatgcgcaagaaactcattgcaccgatgttttaagtttttaaactttctatagtcggagcgaaacacaatctaaagcccaaataaaagcatagtggtcatttatcattagattaaaaagatgagacaaaagacaaaatatgagattcatacaaatagtctatattttttcaacatctatcttacatcaaatatgcaagtggaaataatgccatataatattaagccaatcaatatattaaggaaatcattaaggagttactagcatctgtaccacgtggactaactaacatatgatcgtctctggtcatgcagcatgcaaaagaaggaaagcatgattcttacagaagcaatcatctaataacaaaaaaaattagaacatttttatagaacctttctttgcagtcttctcttttccttttcaaggtttcccaaagtttgcacttgttttttatcagcttctcttgttgaaagccatccagctaaagagttgcattcccgtcgcacctgtttttggagaaaaaaggaagaggaatcattgaaacatcttaactcatacgaagactacttggtgatggcaaagggaaagctaaacttttagtaacagtttgtgtaggaaatgttggtagatccaatcagataataactaagattatcttggtgaatctggtcactatgatcgaaatttttgagacattagttgtgtatgatgtacactatttagtatctattgtgaaaataattgttattataagaaactgaacttgtattatggaggttattacatgagcaaagtcagataaagtacaataaaccagatgaaaacagtaacttgcatatatgtgtgtgtgttaaaaagaattagaaaaaaaaacccaagattacaggaggagaacaaaagatacctgaatttcaagattacaggaggatatcttgtcagacagctgtgaatccttataatggtatttcatagctggatccaaatcatcacagcaaagcaatagattcaaacgtaaaaccccaaggcgtagccaagcacggccagcattagagatgcagtctgtaaatgtaagcacaatcaatatgaagcattaaaataagaggagaaattgaagatgaatcttatctagaaaatatcctaggttcaaaagaagattcatgtctatatggaacttgtaagatctttttttaaaaaaaaaggattaagcactca

SEQ ID NO: 271471 - DNA, 987 bp, Cannabis indica
gcattgtaccaataatgaattaaatattagtgttgcttcatgaccaacacaaatatagttgccaaataataaagaatccagtatcccaatatgagtaaacatataaagaggaattttacaatatcaaggattttgtgactaaggagatgtaatggtagagaaaagtttgtattgaatacaacctgtcagatcctattacagagataatactacatactacacttgatctggacatcaaggtgttgagattatttgaaatgcactttgagttttatattagtgcaagtgggagtttgttggattttatgccctaaataaaactcattttaatataatcagatttactaattaataaaagattagaattcattttatgttgcatgaatcacatgatttatttcttgattatatatgtttaatgtataaattctattaaattcagaacatataattatttatgattatagtgttgtcagcacaatggaatataatcatgattatatattcaaaagtttaagtcccatgatttgttagtacactgaattgagactgacatgataatcagcgataaggtatacttacaccttggataactgttatgtcctttatagggcatggacaaagtatgccaatatcgaatgtatgaagtatacatcggattggaccgatattaaacttggataagatatcataaacttgtcgttatatctttctaagtcaatatcactggttagtcttaggtctatagatcttaatcctgagatggttagcttcgatcttaattgtattatttatgttcttcaatttgtttgttaaagtcgaccaattggatcttctcgtgacatacagattaatgacatggtagttcaattgagtgggagcgctaatcatagatatggaatctatagcttctatatttgtttagaagtgaaacaatgatttccttcgagcttgggttaatagagataaatgattgagatatcattt

SEQ ID NO: 271472 - DNA, 585 bp, Cannabis indica
agactcagtaagatatgcaaaacatatatataatcaatgctagtcaaactttatgctttagccgccctgagctcaacaatgagcttgccaaatgattaagaacgctcttaagggaagtacgacccctgtaccaaatgcactaaagtaccaaccctgtactcgtgttggtagagtcattattgtactcccgggaattactaagtgttgtaccacatgcacgacgtaccccctggtactcgtgttggtaacactgtatccacatcaagatcctacactatactaacactcttaaaatgacttaaacaattagtgtgagtagtgtaaatagtaaaaacatgcatttattcatatgtacgttattatgctatcttacctcgttccatgctcaagtgtgcagcctgagtggaaacgcagctcgacgctttacagggccctaaaccatggcgttcaaaactcaatgagagacacactaaaacacttatcggggatctaaaattgaaactaaggataaccctattgataaataggatgctaacaccctaaattatgcaaaaacaagaaaaactagggttcgggaaaaagccc

SEQ ID NO: 271473 - DNA, 476 bp, Cannabis indica
ttgaataagttttaattttttgtggttttattatgagatcatgagaattaagtttgattaaattaatgtttactatgtatgttgaattattacgttttaaattatgtcatatatatatatatatatattttaattaaatcaacttaaatggtagctaaaatagattggatggatccaattcaattcaataaaaaaccagccaatgcatctaatggttggaaccgatccaatccaatacattcattggatcagatcggatcggatgacttaattcgattggattggatcgggtgataaaattcaacatccaataaataattggattggatctgttgggtccaaatccattggatgtgatccaacgaacacccctagtctggcccaaagctttcgaacctagaacatgacaaggctcgaggatctctttctcttcgtgcattaatgcgttgcgcctaccaaccaagttcaagatgcta

SEQ ID NO: 271474 - DNA, 3585 bp, Cannabis indica
cattctcagataacaaacccaccaatcactttcatagaggaggatgctagacatgtgcattttcctcatcatgaccccttggtggttaacagagggtgcctaatgtcctggtgggtaatagaagcttagtgaacaatctgtctaaacatgcctttttagcgattggactcactaatcagacttgtcaccttgtcctatccaactatatggctttaatggggatgcccaaatgctaatagggaacaatgcaagtgcttacaagtattatacatttaaggtagtggattgccccatagtgtacaatgcaatactaagacgccatgtcttagtggatttgggagtggtgacttcaattggaacaattagaggtgaccaaaggagcgtaaaaaaattgttacaatgtctctaagcagacaatattcatggtctgggaggagacaccaattgctcttgggattggaactcaggcaaaagttgaacctatctaggggcctttgaggatgagttagatccccatgtgggtacagaaagagcgctcgagcctacggaggatgtggaagagttaacatctgacaataaagacccccaccaaaaccagtttaaggtaggaagaaaccgtgcctttagcagtgaaagcaagcatcatagatactgtcaagagaaatcaagatgtgttagagtgagccattttgatgtgacagggattgatcgcaacacaattttccatgccttgaacatcaataaggatgcaatgtcagttcaccaaatgtgaagagtattggacccagtgagagcaggttctttaaaagtagaagtggataagttgaccataaatgacttcctccgagaagctctgtatcccatgtggttggcaaacctaattctggtccctaagcccaacaacacatggagaatgtgcattaacttcactgacctcaacaagttgtgtcccaaagactatttccgtttcccgtagatcgaccaaatggttgaagccacgtttggttaccagatgcttagcttaatggatgtttatactggatacaatgaaattaagatgcacgttgctaatgaagaacacactagcttccaaatggataaatgtgtataatgctacaaggtgatgacattcagtttgaaaaacataggagctacttacaagagaatggtcagtaaaatgttcaagaattagtttgggaggaacatggaggtgtacgtcgatgacatgttggtaaaatcaaaaactattggggaacactgtataaacctcaaagaagcctttttggttctctgaaggtacgggatgaaactcaatcccaagaaatgtacattcggtgtctcctttgggaaatttctaggcttcattgtcagttcttgaggaatcgaagcaaacccagagagaatccaagctttcatcgacatgccttctccccaaaagcataagtaggtgtagagtgtcactaaaaggatggcttctcacagtaggttcatctcgaaatcgacagacaagtacatcttatgtttcaacgtgatgcgaggaaagaagaaatgtgaatagaccgaagaatgtgaggaggccttctaaaaactaaaggagaatttgactaagggccttattttttaatagtaatgaaaggggaagatttgtatctatacttggcagtgtctaaacacgctataagtgtcgccctagtgcgagaagaaggaaaagtatagctaccggtgtactacatcagcaaaagattgctaggtacagaatctagatattcattgattgaaaaaatgacctttttcttaatcacctcacaaaatcttagaccttactttcaagctcacaccataaaagtgttgacaaattaccttctctgccaagtgcttcgaaagctgaaagctttcgataggttgttaaaatgggcaatggaacttagtcaatttgatattcaatatcaaccgtgagtgtcaatcaaaggaaaagctctagccaaatttgtagtggaatgctccaagttagttgataccctagatgaatcagtcctgaagctacctacctggaaggtatatgttgatggggcctcaatatatagggagccagagcgggagttatattaatctccctgtaagggaatcaactgcaaaatgggctcccctttaagtttccaacttcttacaacaaagctgagcatgaagccatcttggtaggagtatgactggccaaagaaggttgagctcagcacatcgaagtgcacagtgattcttaattggtggtaaatcaagtatcaggagaatatcagactaaatgtaagaggataactgcttatgtcatgatgtctcaggaactactgcaagggttcaagggctacaatatttgtcaagtccctcgggattagaacttgtttgcagattttctagcaaagcttaccaaagacccaaaaatcatttagtatggagtagtccctattgcccacctagaagcttcgagcattgagacacgaggggaaaattccattattgatcactctaactcttggatatggcccatctatcaaatcttgaatttgagagagcttccaacagatgagctatcgctcgcaagattcagcatcaggctccacaatatgtgatactgaatggaaagctttattgtagagggtttcagtaccctacctgaggtgtgtggccagaatcgaaataagtgttattatacatgaggtccacggaggcttctatagggaccgcacgtctggatcaagtttatctaagaaaatcctttggcaaggctacttttggccaccatgaagaaaaattgtatagaatatgtcagaaagtgtgaacaatgtcagatatatgccaaggttccccgcgcaccaccaacgaaaatcaccctcatgagaagtccatgggctttcgctatttggggaatcgacttagtaggatcccttcttattggcaagggaggagtcaagtacgccatagtcgttgttgactacttcaccaaatggatagaaatggagcccatgaatatggttacctccaaaaaggccccagattgtgtcatcaaaaatatagtatgtcgcttcagttttttttataagattattttggacaatgggaagcagtttgatagtgatcacttcatcgaattttgtaaccaagttagaatcgtgaagagcttcttagctgtggtcagaccagaagcgcatagacaagcttaagtcatgaataaaatattgacgatgacgctgaagaaaaaactccaagcttgtaaagcccattggtcggaggagcttccactagttctctgggcatatagaacgatggaaagaacttcaatgaggcataccccatattcaatgacttatgggtgtgaggaagtcaacctattaaaaactacaatcccatctaaagctgaacatttgggtggcttaggccagctcgacccgtttttataaaagcccacttttttatgtgagctcgacctagcccataagcacgaattatttgtgttgggctagacccgtgccgggccttaatgggccaacttattttttatgaaatgattggccaatattttgttgggttttatgc

SEQ ID NO: 271475 - DNA, 983 bp, Cannabis indica
aatttgatgaagaacaatgaaggagattcgaaatagaagaaggaagaaggatgtctcaagaactttagttgtcaaacagaatgtaaactaggttatatgagttgttggataatgagactatcatattctttttatactatttcacctagggttaggattcaaattatatgaaataaaaaatgataaaataatagcaaattatacactaagttgccggccatatagatgggccccactagttataattatgccattttttaacctttatattttatttcacaaatgccatattttctaattttaattctataaatgtcaaaactatatatttaataattataattaattataaaataaaattgtcatttatattacttattaattagactccacaagtttctatattaacaaataaatcctaaaacctcttttcttcaaaattaagtcattacttagtgaaaatttcttaataagacatagtctaattttagaattataattaattaattgaaatcaattaactgagtcttacaagtagtattgtctcaactagtatggggaccatgggcctatataaccaagcttccaataagtagctctagaattcaccaactaaattctctacttattaatttctccttgcaaaactatatatttggaattgcactctaacgagtgctctatatgttccacatacactgttatcctaatttttgtgttctgccgtggcatcacacgttggtgacacgtggaatcaactccccatatgtgcccgaaggagatattctgaacagaacaccatatatacttgcacggacggagtcctcctagccgagcagtggacaatccgaatagcatatcaacacttagcaacttcagcacttgcatcgtgaatcacaaaggcaatccctataaatctggacaatcagtgtattctatatatttaatgtgtaatcttaacaattatagacattgtaaacaaa

SEQ ID NO: 271476 - DNA, 1202 bp, Cannabis indica
agtagttactatataaataggtatgtgaatttggattacaatttaaatctggtagctgcttcttgtattttcatataaatacaaaaaaaaaaaaataaataaataaaatactatgtataaatgaaaaaaaatcttcattttgctgcatcacttgaagaaatagacctcttctccacatcaactccatccacggcctggtggaaatacttctggaagttacagctgccccaaaagattaaaatttttgcttggcgagtgtttcatgatgctattccagttgcaacattgctggtgcgcagaaacatcattactgactccacttgttcgctttgtcgtcaagcttgggattcaattggtcacgcactctttggttgcaaatatgctcgagcagtatggcgtgcaacaaaccatcatttcgactggaacactgctccaatgatgcacaaaggtgattatttaactcaccttacaacattacatttcgtcagcgaaatgaagtttataatttgcagttgcaccttatggtgtatttggtctgaaaggaatcgttttgtacatggtcaaaaagccaaaccagctgcacaattagcatcttttcctaataactatatgtccaattaccgatctgctcaatctaagtatcagccacaacaaaattcagcacctcagtcttccacaacaacccctatcgtacatactccttggctgccacctaactatggcgaattaaaaatgaatgtggatgtagccgtggactcaactagcaatagaattggggtaggtgctgttgtacgaaatagcgaaggtcaggtctttgctgccctctccatgcctttaattagtaattttgcttcacatgaaatgaaggcaaagacacttttccacatttaggtatgggcttcacaattggaattccaaattggtcatattgaaacagatgttctatgattacaaatgctttatatggctaatctgtttgtattgcttcttattacgatcttattatagatatttcttgtcttctttccttttaaccgagtgtatcaattatgcatgtcaaacgtacggctaatatggtcgctcatagtttagctagatatgctttaaggttggatgaagcttgttattggatggaatattttcctctatctatttactctgttattataaatgatttagcagtttaatttataataagaagt

SEQ ID NO: 271477 - DNA, 776 bp, Cannabis indica
attacatgcaaaataataaccataaaaaaggggaaacgaagagtcaccactttgttttaaaacacgtgccaactaaagcacgtgcactcaaatctcgaaagagtatatatgtcgtcccacttcccaaagcaccctatttttttttttaaaaaaaaaaactcttggaatggatacgaataattgtatgcataaatgataggcaataaatacacctaaaggagccataactcccccaacattacttaaagtaggcataagacataggaagagacaataagagtaataaacacaagtctattcaaggattgcaaatacaagttacataaaaaaaggaatagaaagacatgttaaacaacggtcgaatacagccaaaaattacacacaaaaagtgacaaatatctaacaaaacctagaacttaggagttagaaacgttcgcggtcgggatggtgccagcagagtatgctcagagaaccagggatcacaatagaccctcgaacaaccctcctcagacaacgacggcaacccgtggggaagcgcgggggtaaaaaggagctccctcccttaagcactcttccatccgcctttcgttagctaaacgctccctttccaaatcctcatcccaggcccgccggttccgaccttgcgtccaacggttatcccggcatcgctcagcacgcaggcgaagggcatggaattcagcaagcacctttgtggcagcagatatattacgtcccttattctcaaagaaattctgcaaccactcttcatcagaaga

SEQ ID NO: 271478 - DNA, 2305 bp, Cannabis indica
tggaatcccttcgttgatgcccataccgtgtttgaatggctcttcgagtattattccatgtgatagcccatcaaatggtcaatatttgattctttatacagccatggggttaattacaatgggaattggtggctctcgttttacgatagcaaccatgggagctgaccaatttgagaaaaacaaccaccaagcaagattttttagttggtatttcattgtgttgtatgtgggaaatgctatcagctacattgttttggtgtacctaatggacaacattagttgggaattagggtttgggatttgtcttgccatgacagcacttggactaatttcgtttttgcttggaaagaatttctatcgattcgttaagcctaagggaagcccatttgtgagcatggctagagttgtcgttgcagctattcggaatagaaaattgtcactaactgatcgtgctttaacaaatacatcgggtatcattgttcaaacaaaatcaccaagtaaacgtttcaggtatatatattatatataaaatatccaactaaattatatattgtagaaataaataatagtaatgattaactcccttaaaatttcaaagtagtattaagggaaaaagaaagtcctcaaatttactgttgaattgattaaaggctaaataattaatatacaatttataagcattcaatggttgttaagtacaaattaaactaattatatcgccctgctgcaaatattatttataatatattaatatgcgcagattggaatatagaaatactataaaaaataaaaataaaaaaaaaaactaatcaataataatgcatgtcaatattttataaaataagctagcgtggaatttaataatttttaaaattaagtacatgattgtctgtaatcaataactaataatgtgaactttgttaaaaaaataataactaatttgaatcacttaataattaaaatatgtacatatttaaataattataatatgcttccacaataatattatttaaatgaatatatatatatattatatatattttgataaattacaccaaatatagaacttatccttttaccaaaggtttgttttttatttgaataattgttctgtcatataatgttgtgtatatacttatttattacatgttgtagtataaggtatatatatactatataaatgcacccaccaccaactatataattaaattggtatttcagaaagaaaaaaaataacaaacaactatataaattggtcaacattaatacgtattatattctgtacagtgactagctagctagcttgcatacaggtcttttataattagtagtaaactcattagtcatacttaactacacgtattattgtaatgttgtgtattttcctcctacaattattatatatgcatacacccaataatattatttaattccatttacatcaaggacaaaaaataattttatactttcacaagtttttattacaaatatatatatatatataatatactttatatatgcatgcagactcttgaataaggcttgcttggttacccaaaacgaggaacaaattaatagtggtagcacaaaatcatggaaactatgcacagttgaagaagtagaagaccttaaaagagtaatcaaactcattccattatggtcaaccggcattctcttaaccactaccattgctatgttcaatggcttatcaacaatccaagccctagccatggacagggaagtgggccccattaaaatcccagctggaacattcctagcctttactcttgtaacaactgccatctcaatcttcatcgtcgaccgttacctacttgacatgtggcaaaaattaagcggtcgatcgctatctccacttcaaaaaataggaatcggacacatcttcaacatattaggtatgaatcaagatcacctgttaaaaattattagtgttctatattgtgctaaatcaattaaagtttaataaacacattaattaatctaatttatattaaatatgttaactacttttgttgactcaattagaaatttaattttttttataaaaaattagctgatgtgtcgaactttgattagtttaacacagtatgggacaccaatttttaaccggagatcttgattctaataggtatggtggcgactgcaataacggaagcaaaacgactccacttggcacaagctaaccctgccacgtcagtcgtgtccatgtcagccttatggctcgtgccatgtttagtgattgtgggaataggtgaggcattccattttcctggccaagttgcgttat

SEQ ID NO: 271479 - DNA, 804 bp, Cannabis indica
atttatgaggtattgtttttttttaagttatatttacgaagtattgattaatgattttatttttaataaaatgcccaattttaatttttcgcccaaggcccccaaatggcttgagccggccctgattataattattaaataaatagttttggcatttataggattgaattggaaaatatggtattattgaaagaagaataagtggttgaaaaaaagtagaaaattgtaactagagattggtccttttcatattatgttatttttgtccaatattttattcttttttaatgcatataattcagccctaagccgtagttgaaacactataaaaggaacatgatgctctcactcatctacttttgacaatttaactattgcgttcaacctagatgagagagttccttccatagttattttacctcccttcaccatattcgaacccttagtgaaaaagtgtccacacatagcaagtcaagtactactcaatcataatgagtaagacggtggtaacaaaacccgaaagagagaaagaaatctaggttcaaatcttgataatgctctgggacagaaaggaattaagggctagagatcttgaacagaaggagtcattatattacactgcaaccaatgtaaggttttctaaactcttatgtgtttaatttcattgttttatagatattcatatttaggatgttaatgaacatatttgttaataaatttaaatcctagtaaaatattcctaacatctagaatctttatgatgctttgaataatataatctaattgtttagagagctttgatat

SEQ ID NO: 271480 - DNA, 1046 bp, Cannabis indica
aggtcggctaccacctagagccattgaggcttgagtatttcagccaatttcacagtaattcagagggtttcttctagggaaattcataagaatcgaagctcaaggtaaggtagttctcttctccttctttgagttttttggttttaggttaggttagaatgcaattttgttagttttagttgctgtgttgattaattttgtttgaatgttgattttgctattacttttgagttattcaagttgattatgggctatttaagtagttttttttagcctagacaaagtttcagcttttaagctcaaactttctcctttaatgccgaattctatttcagaggttattatttggttttattacttaaattatgtttgttgtggcctaattaggtggtctgaaaggtttgaatccatttgggataaaattgaatttttggtgaggttttttaggattcctacagagaaccgattaaccaattcgggctagccctatagaaccgattagttgtttccccaagcagaaccctaagaaccgattttccattttgggagtttggtttaccggttctagcagttttagaatcctagtttttttatgttttagcaatacttagggtattgtcatattatccatcgataggaaaacttttagttttgacagaaaaatgatttagcgtgtcacttatcagctttatgaatgttgtgactaaggggcctctaaactgccacaacattcacttatcagcgtgtcacttatcaggttgaccggcacacatgaattaggatcgaggtaagattagtataatgatatgcatatgtgattacgggtgtgttcgaaagtaactgtgtaattactaggtagggtaattactagggtggtaattacaaagtttaataattacactatattttaaaatacaaggtgtgtttggatatgaggtggtaattacatatgaattcctaatatcctgtttggcaaaatagttagtaattacataggaaaataatattttttagaagctaatgtttaatatggaaagtttttagta

SEQ ID NO: 271481 - DNA, 660 bp, Cannabis indica
caagtgaacttcgaaccagagattttaagagcttcaattttgactgagcaatccaagccgtagcatccactaactcactaggagtaactactctacagccagtcgatcatcataacaaaaaactacattgaaatctccaattatcagccaaggaatcccctaacagttaattgtagagagctccttccacaaatctactctctcatctatggtgttgagaccatacacaaaagtaataaacatttcaagttgagaaccaacaactagacagtgaactagttacttatgatccttcatcacttttacctgaacaaacgacttgagccaaacaactaaaattcttctttcacattgatcaccccgatgataatcccacccatgaagcatctttaccatcatcttatccactttattgttcttcaatttattctcaacaagagcacctagccctactttattaagctacataagactaatgatatcaccttgtttatcccttttattaataccctgaacattccaactaagtatgttggtgcaatccatctccaccctcgaaagataagttacacttttcaacatcctttccttgttcctacaaaatcttgaaagtgttttgaaccgaagcatgctcaaccactccaagagatcttttcacct

SEQ ID NO: 271482 - DNA, 4702 bp, Cannabis indica
gagaaagagtattttctaagcagacacagtgagaaacttgcgatggcttatgggcttatcagcacaggtcaaggaatgccaattcgggttgttaagaacctccgaatatgctctgattgccactcatttgccaagctagtttcacagatatatggccgcgaaatagtcattcgagataaccacagatttcacttcttcagggacggccgttgctcttgtaatgattactggtaatacatgctttttatcctctgaagaacttgcataatttaatcctaatgaatgtcataattcttataaattctttaaatggtcgtgttgtgtttgcatcttatgaatatgaatatgaataattacttctgatatagtattggattagtggagggagactgtttgtttaagctatttttttcttttttcacttttaaggattactctaaactaatcaaatgattaatgacatacttcatgaacttagttcagatatagtagaggggttgggccagaatttgatcggcccattcagaagtgggcttttttggttgagttgggccatcaaaaaacaacatttgtaaatgtgaaaaacaagtgttagtgctactagtactacctcttctttctgtcatttgtgcttttgtttttatacatagttaatctataatacatagttaatctataatttagtataataataataatatggtgtgattatgaggaagtaatgtatgtagatttttagtagataacttttagtttacggccataacatagcgcactgtgtagtgttcatcaatctttatctatttataataacatatttgattgttcaattagtcaaggcttttaagtaattggatggtcggtgcttttaacattactttaaacaccgattacgtacctactaatttattaaaatacaccacttactatttatttatatttacctatgatcatataatctggtcagttcttgtcacccatgtgaaaatatttattagtctggactctgacctattcctcctaataaatcaatctatctctttagtattatttgataccgaaaaaacaagtaaccttctgttgtatcacaatatttaatttggtcatatttatcatgctccattttgtattgccatgccacacaacattgtacagtaaacagtataatattataatagggatatttgggcgaaaatcttttaccaattataattgttacacgtatgattttaataaaaaaaaagtggcaacaaaagtacattattttactattttattgtattcgtatcattttttggttgttaactcagaaacacttgacgacatataattagatcacattatataagatgaaaaaatatatcgtcacgtgtttctgaactagcacttaacaagtttatttagtatttaacagccaaaaaatgatactactgcaacaaaaatgtaagataagatatttttacagccattttttttttattagagtcatatacgcaacaattgcaaatgttagtggaatttcaccacaaatagccctattataatataacatatcacattatgtgagtttaattagcattctcttttgtaatttttagagaattttgaaaaagtaggtaatgtgtgtagaaaactattttggcatgccaaattaaaagatgtatttataattaatctaatatagataggtgttacaatctagcatgaataatgacagaagtgttatgagcccctataataaagaattttccggtaggtaagtggggtggagggaggagagcaagcttggtgccgacacgggcgacatcgtcggcagtgtgggtgccctttcctcgagtcatggaggtttgagtgtagcccggacaaaagcaattggcgctcaaccctttcccctcgtaccgctttgctaatatctttgtgtaagcattcattgctagcttagacacagcgtagtccgtccacagatccggccaccctcggctcctccactgccccctcttcacatcttctagaaacaatctcaccattccatccacctcctcttctgtcacatcatctttctccaaaatctttcttatagtagggtttttcaatttctgaacatgccaataaataaaacaacagtataaatgttgagctcatatatattcaataacagtatgtatgttaaatacatcatgcatatataatttagttgcttacgttagttgagccaagtcttgaagaaatgttaagtaaacgaaaagtgttgggagaagagagacaaaacaaggggaagagggcctcagtcagtaacttggctccgtagaaattggttttaattactgtctcagcatgctctactgagttctctccgatgtcgttgaaagatactgctgcattgttcacctatatatacacacatacattatagcttaatggtaattggataaatattatgttataagtcggaagtgttgaaaatataatcacataataattgatttcaatgaatgaataaatattggtggagaaacatatataataataattattataattgggatgggaagacttcactttttggcttgaaattaatataataaaagtaataaggaagcaacacaaacaaacatatacaatatgaataaagttggaagtgatgtcaactttgagctataattatgttatgttatttatataatatttaatttttgttttcttaatggcgtctaatcttaaaataataatatatgaagagactaaatatattattttaagcatacacttgacaattttttaaacatgcaccctcgtgcgtgcatgaacttagctaagctacctatatttttcatcatattttatataattatttatatgttatctcctgaaattactagactctatagtcatttattcatttatattatagcttaactagtaaaaaggaaaagttttatttatttactaatttggtattgaagtaaggagtgctaaaacaagtttcaacacagcatgacataaattttataggttatagtcggaaaaattagatgcgaatcaaaaatagatcgatacgattacttgatgcgaaataaaagcgaattaaacataacacgatccgtttaacacggatttaatatgattttttaaataaaataaaataatttttttaataataatagaaaaatataaaaaaaaaatatttagtgattcaatattaaattaaaaaaattaaattaaattaactttaaaaattaaaaatatttttaaaaattttaattttattatacacatatgtaaaaaaaaattaatacatatatataaattttttaatagaatctaaatgaatcattttctctgcaactatatctttaacaaaacggatcaaagtgggttaaacacgacacagtttttacctaatacgaaatataaaaagaggtcacatttatatgaacacaacgtgatgagccgataacatgtttttccatcctaataacatgtttttccatcctaattaaagttgaatgagtattatattaattactcatctaactgagattcttcaaattcatttgtcaacatcgatatttacaataatattcttaataagggaacagctaatttaatcattggatggattatattatatgcaaataattttggacagattggaatatgtcttctatacttataataataattttcaaaccctaataaaattatttatcacatgcatctatctttttatactaattaattacttcagttaattctagcattaaaatcaaagatatgcagatcatatctgaaattatattactatgacattccagcccaccccaaaaaaatatccaagtttaaaatcagtaatttagtgtaatttaattaatattgattctcatatattttaattctaatattagtactgaataacaatgttgttgactaaatcaaatataaaaaaataaataaatcagcttaatcattattctgtaattttaaaatctgaataaataattagtgtttttgttgcctacataaataattaagcactcaataattaatgctaatagttttatataagtcatgtaattaaattaattttgaatggagaaggagttttcaaaagtggtgtgttatattttaatcaaaatgtatattaatggttactataaatattattgagaaacataagataatattattgttttgtaaagggattagaaaagaaagaaaaggtgatataaatccaaaaagaaaaagacaaaatacaaagaaataaagtagaagaaattagaaggtgtgttgtgttaaaaataaaatgtttgagaaagataaaggggaatttgattttgattttgatttgttagaatgaatttagttagagtacttacaagaatgtggaggagaccaaagtgttggttgaaagaggagacaaaggaagcaatggaagaagggtctgaaacatccaaacaaaggaagtgaatgttgtttgtgttaatatgtgttaattcagttttgagcttttctatggcttttcttcctttgtcttcatcccttgctgttagcacaactgtcactcccatctctgcaagcctcttcaccatcgcatacccaattcctttgttacctcctgtcactatcccaactgtctcgctactccaccacctacaaccacccaagattacttactaattattattaagattattattattat

SEQ ID NO: 271483 - DNA, 2466 bp, Cannabis indica
atctcaaaattaattagtgataattagagtaaattacttttagagcttcaaatgtagttttcaaaaacccaaccaacaagatcttattattcttcttaattcaatgaaataccacttgatcagaaaactgaattcgaaaatgggtcttgggtccccttgatttcatgatctcactgatgatctttgtttcattctggccttacctataaccatattgggcaagttttatgggtattctagacctcagcataggcccagttggtgatatggtccaaattttaggcctaagttgcttgatgattttggaccttggttcagttgttccccttcaacttattcggccactaatttacaaaacaaaatccttagtttcattttgtatttgttagtttgtatgaaagttacaatattttttttgcaaactttggatataatagtaatcatataatattgtaattaataatcttgtggtcaaacagtcccaacctaccaattgctgggtagcttgggtgtccctgagaagcatatatctggctctttaacctaccaaaactatatatgggaatatatctttcaaatatgtcatcctactcaacttttaaataccccattctactccactaaagtggtgtttaatagcaacattggattgttatagcaatagtaatgagagtgtaatgtactataaatctttaactgaaggaagagtataagagaaaggcattaaggtcatttttgcttttatataaatgatgtaaattgtaatggtgaataagtactgatattacataaatataaatatggagtttattagaaatatttctatggttaatgtgtaaaaaaataataccacatatataaaataaatgtgttacttttattattatcaaccggttctattccaatttaattttctcaaccatatatacaatctgaaatactaatagagttgtaagtagtgtaatacagtagaatttttatccaataatatacatttgaaactactaaataaattatattttaattaagaaattataaataattataatttagggattattattatttataatcgatttaaactatgatttaatttttatataaaaaattaaaagttatttgtaaataatatttttttagatagatattctactatgagtgttttatcgtaaagtttacaaaaactaaatcaatcgaagaattaattgaattacaatgatgatgatgactgtgttacgattacactaaacttataacatggtttaaatagtaatatataggatcatcgtgtgtcattaattataacatgcagctatttttaacttttacatgttacaaattaattataaaatatatatgttttttctttaagaaaaaaaaagattaaattaatgaagtaatgtcaattcatgaatatgcatgcatgagtatattttcaataataggagtttgcttagatcatttcacataaaagttatggaacaggtttcttcagttcatgaaaagccacaatacaaatgtcctttttccctttcaaaagtcaaataataaaacaaatctctacatcaatctatattcaatgtctatatatttactggaacgattttccccatatatataatataaatttaaatatatatcaaatcatttgtaacgtttttgatggagatatctaattaattaatttaatttctaacacaaaaacttttgttttctgcagtacttaaaagtaagctgtttacataatttgaccaacttgctccgaggccccaaatgtacccttctactacattaaaactttaataattaagcttgtttttcatcagattaaaaaaaaaacaagtgtgttttgaagaaagaaaaataaaatatattaaaagggaaagaaagtagaatagaatgtcaaaatttatttctttcatatttatattgtaattttattatattttcttattatttaatatatattttttttatatatactaataatatttggctcgcctcacttagtgccggatctatacctgggtgccactaatggtgacaatggaaggagatgacctaccatacataaaagtacataattactatttttctaaaaaggatcaaataaataatcatgatattttatttgctattgctatagatgtgtttttattcaaactactactactccttaaaatgtccaatgaaaaagagcctgaaccaaaaaaaaggaagaaaaagaaaatggcaaatgctgtctaaattattattacacttgcattgcactaaattaagtcggttgtcatcatcatcatcatttttaatcgaaaactcaactactcatcgccgcattatcatatcaaacatccacacaaggcaatcccacttaattggtgtactctcaaattcccattaatatgtacttaattggtgtacatacacacgtagagaaatgttaaaggtatcaatggtgcctaacac

SEQ ID NO: 271484 - DNA, 726 bp, Cannabis indica
cactatgcatacacttagaaaattcttcacaaagacatcattagtagcaccaaagataatatcatcaacataaatttgtactataataatgtctttggattttctttttataaaaagtgtattatccgctttacccattgaaaaaccatttgaaataagaaaagtgcttaatctttcataccaagctctaggagcttgctttaaaccatataaagcctttttcaatttgtaaacatggttagggtatttatgattttgaaaaccgggtggttgagagacataaacctcttccataatgtacccatttaagaatgcgctttttacatccatttgatacaagataaaattcttgtggcatgcaaaagctaacaacattctaatggactcaagtcttgctaccggggcaaaggtttcctcataatcaattccttcttcttgattgtaaccttgggccactaatctagccttgttacgcacaatgaccccatgctcatctaccttatttctatagacccattttgttccaatcaccgattgatgtgacggtcttggaactaactcccaaacattatttcttataaattgatttatttcttcttgcatagctagaagccaaaattcatcaacttcggcctctttaaaattctttggttcaatttgagaaataaaagcaatgaaattacacaagtttctaagggagtttctagtagtgacaccttgagaagg

SEQ ID NO: 271485 - DNA, 660 bp, Cannabis indica
gggaatagtgggaatttagaatgtccaaaaatacccttatgtgactatgactttgtggcttaagtgagggcaaattgtctttttgccattggtagtttgtcctttagtggacttagtttaattgatgttttatggtgatattagttgatttaagaaaagaatattaattcattttgaagaaattcatagtaaggaaagaagcaaaaaaagcatttctctgtcaagctctctctctcttttttggcccgccttagaacagcaagggtttgggtgtaattttctacttttcaagcaagattcttcaaggttttggagtggttaaactctaggtaagcttttgactttgttttcttgagtttcttgatttgtaagtatgtaaaagttgcatgctttgaggttttgcttactgtagctactgtatgtgtttattgttgttttctaaagcttaattctgttcagatgaatggattagagcaggttttgttgcatgttagttagatttaaccaagtttgagttttgaactcaaacttggagctttaatggtggattttgattctgtgtttgggtggatgttttgttgctttgaaaatgttctctacggtgtatagaacaggtctggaaattttgaattggattgagtttcatttggtcgagttatg

SEQ ID NO: 271486 - DNA, 793 bp, Cannabis indica
gcaacattcttcttaggctcttctctcttagcttggggacagtccctgataaagtggcccaccacgccacactaaaaacatgccttggctcggcactcaccaggatgatgctttttacatttagggcactcggggtatgaccagaatgaggaccctcggccttgacggccacctctgtttccccgaaactttatatttcctcctgaagctccgaccggaatgaggacccgcggccttgacagccacctctgtttccccgaaactttctatttcctcctgaagctctggaagcctcagccttccgcttatgctcagggttactactgtcgatccccttactgacattacgaccagcaggagggtttgatgccatggcggcatcctttagagcctgctctttcatcacttgctgctcgacctcttcagcgattaaggccaagtctaccactctcttatacagagtgtcatgggatgtggtaattttcaagtctcgactgattgtagcattcagtccccgaacatacttttgcttcctggtaaaatcggtaggcaccaaatcaccagcaaatttagataaccggtcaaattccagagtatattcagccaccgacatcttcccttgagtcaacttcacaaagtcttcctggtgtgaagtctatacagccacattatagaacttttcctcaaaaagtttcttaaactcatcccatgtcatcacactgacatcccgagtttgattcactatgtcccaccagacgcgggcatgatcttgaaacataaaggccgcacaatt

SEQ ID NO: 271487 - DNA, 2551 bp, Cannabis indica
tcgaacgctaagcgtgagatctctgtcatgaagaggttgcgccaacctaacatcgtcaagcttcacgaggttttggcttcgaagaccaagatctatttcgtgatggagtttgttaagggaggtgagctcttcgctaaggtcgccaagggacggttttctgaagatctcagccgcaagtactttcgtcagctgatctcagccgttggttactgccactcgcgtgggatcttccaccgtgacctcaagcctgagaatctcctcctcgatgagaacggtaacctgaaggtctctgattttggtctcagcgccattgccgatgaccagatccggtccgatggtctcctccacacgctttgtgggacaccagcttacgtggcacccgagattctcaaccagaggggatacgacggggctaagattgacgtttggtcctgcggcgtcgttttgttcgttttaaccgccggctaccttcctttcaatgatgggaatctcatggccttgtataagaagatctataaaggtgaatatcgttgccccaggtggatgtccccagatctcaagcgattcttatctcgccttttggagacgaatcccgagaccaggatcaccattgacgagattttgaaggatccgtggttcagaaaaggtgggtacagagctcaaatcaatttctacgacgaagaatccgaaccagtcccaaaaatgtccggggatggcgagcatgacccaaaggatctgagcttggccaacttgaacgcgtttgacatcatatcgttctcatcgggactggacctttctgggttatttgatttatcgaacagctcagtccaggaaggagaacgactcatctcgcaggagtggccggaaaagatcatccagaaagttgacgagttcgccaaaggcgagaggttaaggatgaagacgaagaaggaattcggagtcgagattgaagggcataatggtaaattggtgatgggtctagaggtttacaggttaaccgagaccttagtggttgtggaagccaagagaaaaggtggtgattccaatctttacaaagagatttgggagaataagcttaggcctttgttgtcattttctagctcttcgtttatggagtcagaagcttcaacttcgaattgttctttggatgaggcttcatcatcatcatcatcgtcatagccataagttggttcatcatatatatattaattagattacaaatttgctgcaaatttaaaataaaaaataaaaaatttggtcatggggggatgatgggttcctttttggatgtcgtttggtacaatattatttataaattacaatgtcgtctgatatgtcagagagagaacagttttaaagtttgtgcttttaaatttcagttgttaattttagtggggtggatggtggtggaagaggttaatgtatgtacagtgatttaagaggatgttttggaagaaagaaagaaaagaaaaaaaaaatagaataagttgtatgtatatataccttttgagtatgtaaacgacaaccggagagtgaagggttttgagtatgaactctcaacttcgactccttaattataattcaattttcttcatattcgtttacaccttttatttttaggttgatttcccattacagttttattccaatagacggagcatgttcgaaatgccaaaattaattcgtaattattattattattatttttctttgacaataaatgaatttttaatttcaatttttatttttagttgcagacttttgagtttatggtaggaaagaaaaatagaaatgagaccttttaaaaggatggtttggttgggtcaagagtaatactaagtatgatgagattctaagagtgtagacagagttcaatgagctgtccgtgtatgaattgaaccttgattttgattctttgtggttcaagcctttaaaatattagcagtctaatagttgaagccccactagtttgtgtgatcgaattagttaattaatttataatgtttagcatttaacattagtagcggtggattacggctggattgtttggtgcaggagagtccagactagactggccattattattttataaacgaaattattggttattgtgccaatttgttgggttagtaggagagcaaaatgtccaaattgagtaataatgtcatatgtgctgcatcggtgcatcactggccattctagtatgagatatggcgttgttcttaggaaaaaaaaaggtgacaagacaaagaagcataccgtactaccgtggtgtattgaatgtgaatgtggatgtgatttgcatggggattttatattataaaaaaaaaattaacaaaaataccttctgtaccgagtttttaatatttagttttttagattttatttatataaaatatagtcttttagtatatttttatattgtattcttgttattttgttgttaattttttgttatttttatattatcttttaatattattttaatgttattttgttgttgtttccttattacttttatgtgtctttcttgttgttttcttgtattttt

SEQ ID NO: 271488 - DNA, 1669 bp, Cannabis indica
cattgatcacacgatctttctgtttatacgcattgtaacgagagaggaaactcttcctcctcaagtttccagccctataaatagggaggaatgttcactgggcaaaggaccgagaattataagccgatacgcagtatactaaggctatattattatctaagaattatatattcaaagatactattgtaagagttataagaaaaggaaacttcttccttgttcttgagtcaatacaaataacgaggattaggctattaccgaactcctcaaggctgaacctctataaaatttctgtgtcttattatatctttcttatatattctcattacgacatatcgtttattgcttatcaaaaagacccattatcgttggctaaaagcgaagtcaacattttggtgctttcattgagagcagaattgtagattgctcttttcaacattcgacacgatggtgcaaactcgtagaggcctgtctgacctagcaagcccacagacgctggatgtgacattgtaggacccaaggagttcaagggttccacccggtgtcaatcttggacagacgggaagcgtggtgaatggtgggacaactcctattagtgaaactgtgcctggtgtgctagagactgggaataacagttctgcacacatccacgacgttcataacacgactattccaccaggtattaatgcccaaacgaccatcggagatgtaaccgaatcgcaaaatctctgtgctgcgcttggactcatgcagggtcatagcaatactctgcatcatgattaggaggaactgcatgctgcagtaaacctcacgtttgacgaatagaggcgtatgtttgccgaatggagggactaagagatggaagtgttaagggctcaccatgcggagatcgaagatcgtagtcggcaagctactgtgatgatacgaggagtctatcagactgtaggccaacaaacgccgagcgtcattcccctgggagaaacagaggatgacccgacgatgaatgcctcccagacaaccaacggtcagctgtccaatccccagtcacgagttccactcgtgggccaagagtaggcgggcagaccttgttcgggaattcatcaggaggagccatacctgacagttccattcagaataatggagccattccacctgtcaaccaagcgaatcaattgttgaggcaaccaggctcttctgtgttcgataggttgggaacgacccatgacctaagggacgatctaaaaaaaaagaagggggacagatgagcagaatactacaacgatcgtgcagcccggagcccatacttaaatccccgctcagaaagacgctaacgtaatccaacacaaccaaaacgccaatcaagccaccccatccgtacaggcccagctggacgaattgaagaatatgttagatggcatggccggacagcgtaacaatgatcttgagttagaccgtgctcacggaactcccttctgaccagagatcaatctcctgccactgccccacaagttcaagatgccaacatggaatatgtacactgggagagaagatcctctctctcatctcaagtatttggagatgcaaatggatttacaaggagtgtgaggggacgtatgttgcagactcttccctgccactctgttggcagccgcatagcaatggtatttca

SEQ ID NO: 271489 - DNA, 697 bp, Cannabis indica
aaaatgataagtgaatgtggtatttataggcttaagatcaagattctaaagccaatggcgataagaattgaaattgttaagtttgttagaaataaaaactaacttaaccaactcctatttgagcgaaatctccacgtcatcttaggtattaggacatccgagaacataagcgagcttctgaactcgcagaccaaagacactccctaatgatgcttccatataggatagagcctcctggattcgactatatggaataaccattccagtagggataactagccaactagaactccatcctggagtgagactagttatccaaaggaatggacccggaatagacatgatagtcatccgagaactcccttccagactcgactatcattctacaagagtctttccgagattggcaaccataagtaaataactttttcagaaataacatttgcaaaaatttttttatttggagaaactatacccacatcagtttttgaaaaaatctaacattttgaccaatggaaatgtcatttcttgtaatagtgaatgttagattaattaatcatttagatatagtaataaccaatgttttggtaagcggaatgagacttttatgtattcatgacatgagaagagaaaatggtgtctaaatgtagtgggttcattataattgcaaatgaagaaaatgtaatttactttttcc

SEQ ID NO: 271490 - DNA, 523 bp, Cannabis indica
tcggtcaaaccatgtcacataaattataatctatctaatttaaataatgccaaactaatatacattatttaaataacataacaatcataactaaataatgtgaatcttataaacacattatttacatacatactcaaataacaggaatcttaaaaatatattattcaaaatatatacatagcaatggccatgctctaatactgtaaacatacataaataacatgaatcttataaacatattatttaaatataaattataataacaaacaataaagagtcaggcagaagaccttagttaacttctcttttactattcccactcttcctatgaatgttattatatacagaaaacttacgtttttctacttaatctccttacatcgaatgtggagaaactagcgttgattgcgttacaaacttttaggaccaatactttgtggaaaaataccttaaaagccaatatgtaaccttgagttaaactcaatatatcataaacaaatatttaaactaaaaaaaaaaaaaa

SEQ ID NO: 271491 - DNA, 4665 bp, Cannabis indica
acaacttaaaatcacccaaagaaataaaaaaactaatcccagataatatactgctttacacaaggacaatgtcatagtggctgctttggtgttgataactgaagaagaaaatgcccccagaggtgccttattgccgttctcttgtgactccagtattagttcgaaccttgagtccagtttcacctgaggcaaaacaagagttaccttctacccacaaacattggcaaagaacaaaaaagatgaactttaccaagaaaaaagtcatcccttctcttgttttgatcctagcaaccgtttcgatcctcagacttattagaatcacagttacttcatattcttcttcttcttctccaccaccacctgcttttactcctctccaaaaagaagcatgtgcttcaccttctcaatcttgtactcaacttcacttacatgaatctatgtcctccacgaatcgaatagaaactttagcaaatatgacttggctgacagaaaaagaattccaactcctatcaaatctggtcactcgtagagctccctgcaacctcctcatttttgggctagaacaacaatacacattccttgcatcaatcaatgctggcggcaccaccatctttctagaggacgatcctgataagctaagaacaatcaagatcaagacaaagctcaacacgacaaaaatctacaaggttgagtatcaagtacctgcaaaagatgcatacaaactgctaaagcatgcaagaaaaacccaggcttgcacagcaagctcgggacaacttcaaatgtcgaaatgtcgactggcattgagaaatttaccgcaagaagtttacgatctaaaatgggatgtggtggtcgtggatggaccaagcggaaatgcaccagaagcaccaggtaggatggcagcaatatatagtgcagctgtgttagcaagaaatgggaatgaagcaaatgtagtagtacatgatgtagatcggacaatagagaaatggttctcctgggagttcttatgtgatgagaacttagtttcttctaaagggaaattgtggaattttaggataagaggtcaattgaattctacaagattttgttcttctgaaccagttatgctagtctaatagcttctctcctttccccttaagtttttgttgttttgaggtgtaagtacaaagaaaaacaaaagttcaatccatatatacaagcaagagaagcctaatacaattatacaagcatcaagcttcttcatgtacataaatcatagtaaaaacaagtattatgtttacctgattgctgattcatggaactggtaaactcaacacagcaccacatatcctcaatttgtcaaattatatagttccaaaaataaatatcattcacatttgccaatgtacaatatatggtgaaaaaatttaggataagttcgaagtgctatggaataaaagatctccccagtctcccgcggaaagattattacagattttgctgaccaacaggctacagaacttagccacttactacacaataggcctaaaactagttctaaattacagctatgttcgtgctaggattgctcataatttctacaaaattctagctcaatttggtctctaactgaaagatgtaggaggaacagctcgctcactcacatcgtaattcctcagcaacacagtcatttacttgcgtctctttgctgcaataagaacttatagcagttaattaaaggaacaaacaatattagcacatagtcaatatctttgagacaaaactatatacataaacacttatatcagcagtcaagacatcaaaaacaaaaacatgccaacttgttcataatcccaaaagcttgtcctaagcaaacatactgtatatcccattttgatccatgttactaaattgtttttatttgataaatcatgtaacaaaaaaaagaacttaaaatataacaaaaattccacctaatctggtttcaagttaaaacggatgcacaacagcatattttacatctagtgtgaatggaaaacaagcaatgaagtgaaaatttagaattaccattcgtttgctgacgtaaggttgtatctttactggctcttcatcctggttcaagttaaaacagatggcataacagtagattttagatctagtggtgtaaaaaaaatattaaaaagcaatgacgtgtaaattcagccataccacttgtttactaatgtaaggttgtatctttgccggctcttcatcctggtttcaagttaaaacagatgggaaaacagcagattttagttctattgctagtatgtgaagcaagcaacaacaaggatatttcagccttaccattcgtttgctaatgtaaggttgtatctttactggctcctcatcctggtttcaaattaaaaacagattgcataaccgaaggttttagttctagtggcagtttaaaaattattagagttagccctacattgctaatgtgtagaaataaaatgtcatatataacatgaatggactactcctctctagccaattagttttgagatgaaaccccatgcaccttaaacacacactttcaaattctaaacaaaaatcaatcaataaagtgagaaattagccttaccattcgtttgcttatgtaaggctgtatctttactgactcctcaagctgactttcaaccttgagtacattttgcttttcaaactcaaattctttcctagactcccttcggctacctgattgccaaactctaccaaaatttggaagccagtttgcatcacactcgtccttcacaagctctcctctcttttccatctccatctccaattttctcttttctgcccaagctgccccaaccctttttggtattcaatttcttggacttccctgatttacttgatgaagaaacaaagctacctaagtttggttttactccaacatttacttgacaatctccgaccgcttcaaaccaaggaggaggtgctccagacagtacatttcctccagtaacctcaggtacacaaatttgggtaagattctgcacacctgaataaaagaatcataagataagaattgttccatgaaaatcgaagaaaatagggtgatcaattttctgaaaaagaaaaaacttcccaaacaattgtgtctcgattttactgcaatatcggctattgaacactaagctctatataatgtgaatatatgtcacattaaaacaaaacataagactggaaaaaaagtgagaacaaaatgtaaacaaagaatgattacctgctacaccattcaaattcttggaacttgtaccagaatatgtcaccagaggtaaagaagagatagtatcttttgaatacatgccaacatttgaaacatccatgattcctgaatgggatacctgatactcatttgtatgattttgtaaaggcataacatcggttgaaatgcttggatcaaaaaaatggacattattatttgtataactattattatctacatagttgagttcagtttggatatcattggaaggtccaaaaactggtccatgagatgcttctttagatgatacagctccattcttcaatgatttacactttttctcccactgcaatgacatgaaatcacaaaatattaaaagcttagctttgagatcacatataaaataaagatacataattcttttcttgaaaaagaaaacttaagaaaatcaattaaactcagagaaaagtacagggacatatatataccttagtaacatcagcttttgtaatcctaaaattatcaatgcaatccattcctccaccatttttccacaaaaagtgcttcaaattcttcagatgacttacacttgccaagtgatgaattgcattactactgaaaaaacaaatttcatagcatgaattttaacaaagaataatagattataacaccaaatatcaagcaacattgtttggtgctaataaaacgacttagaattcaattgggaaagaaaactaagtcccctctcaattctattatcttcctacgtttaatattttcctcaattttctgaccacctaaacataaaaaacaaaaaattgaaaacattaataaaattctcaccaagcaaaagaactaccgatctcatcgatgtttttactgcaaaagacgcaccatacgcggttgtgagaggcctgttcagggaagagaattgtaggatttttcagaaagaagcgaacatcggagagcttggtctggaaccgagagaagaagtcggagagggactttttgtgggttgggaagtacttgtggcgctggccttgatcatgattcagtttacaaacttcgcagtactcgaattcggaaaccctcttcctcttcttatcgtctctcttggtagtcttggtttcagaattagggtttgatttagtctcggcatgccctacctccattatcgtacggattatggtattacgtcttcagacttcagtcttcttctccccgctgcaactcgtaataattaggatatttgcagctaagcccttaatatttacatttcatacacatatgaccctataaaaaaatgagaattactaaaaaatactattagtgcctaacataacatatcataccgttattattttaattaagtagtgatttcaaaaataacttttaaaaaaccaattatagggtgtcaactattaaaggtacta

SEQ ID NO: 271492 - DNA, 842 bp, Cannabis indica
tttgtcctcacttgcacgctcctcagaaacttaccatgaagtagccagagtgacgtactcgtgtataacagccattcattccgtgggtgtaagggcccaatggaggcttgaagcggggacgttacaacattattacatgacagtcgtgtgacttcaacccgataacaatttgctaaattttcatttacttcctttttcaaatttgaacaaaagccatcgggaaatttcacatctcttataaatttacataattggagcctatcatcaggtttaagaacataaggtgcatgcgatttcaacagcttctccctctcatcttcataaatctacaatcattctttgactcataacttcttcaaatcatgtcttgcattggtagtgtccttggatttatcattatcatccatttcaaatgatggctgaaggaagtcatccactatcggaattatctcgtcaattttagggtcatcatcaacgccatcatggtcattgactacattagtggcgctagattctgcttccccgtgataagtccacttctcgtaaccagcaaaaaaaccccaatcgaatgtgtgtgcttttaaaataggtaaagtttgaagcctattgttcacacatattacacaagggtacctaactctaccgtcacaatatttacatttcgaggccatctctaaaaatgcatttagaccattccaatattgtggacatctacgatttcgcaatgtgtccaagacttgtcgattgtcatctaaaattctataaaggcatataagattttatagtttaaagaaaaattaaatgataaaattttatgccattttatgatatcttatgctatt

SEQ ID NO: 271493 - DNA, 3502 bp, Cannabis indica
ttaaggtgcgtttggaagtaattgtgtaataactaagatagtaatttcatagcatagtaattacactctattttaaagtataaggtgtgtttggatatgaggtgataattacttatgaatttttaatatcttgtttgaaaaaatagttagtaattacacccaattcttattggggtgtatgagaattggatagtgtaattacgtggttagataaacacacaaattgtgtaattaccttcacttaaacccaattccaattctctgttggctttccaaacacgcccttaatataataatctgttaacgcggtgtttgttatccaggtccatgaactccatcgtctttacaaaatacaaagagacatgatgaatgaattccaaagcaaagaacaaaccaaacatttgatacctagtgggacatcccaatcaagtttgtttccgtctggattttcaactgaagacgataaaagaagttggtacatctcaaatttgtccggatctagttctgtttgtggtagaccttcttcgtctagcgctgatgtgattcaaactcatcaaagttctatgcatgagaggaccactttgtccacctatggtctcaaccaaaacagtgcaaggttgaaagattgtgaatctttggatttcaaatgcaagaagactcaaagaagattgtttgatcttgaagttcctgctgatgagtatgtagatgatgaaaccgaaccggatggagaagttgaaatgtcaagaacagaaagttgtcttattaacaatagtagtgaagttactctagctgcagataaaaatgtgttcaatcatactgatgataatggtaataagttgacatgtaatctgtatccaaggagaacccattacttggctgatctgaatgaacccatagaggttgaggaagtggcagcatcagcttctgttgatactatgggcgacaaaactcgacctgaatcgacacaggcatactcaggtaccgttctgcataagaaatctcacaataatccaaattacttatttattttcatggttaactcttaatccaaattacaccgcgttttactgtacttatatctattgagagataggttgaagggttttcatttaaactaacctcttgtatttgacatatcctttcagcccaaattgaaagtaagagatctatcagtgatagatttcatcttcaagatttccggaaaccatgtgacatgtctaaagctgaagctagtaaaaccaatgagtttgttacatgtatcccttctgatccgaatactgcagggaagcagattacaaggagaatatttggtgtagaagtctcagaagaaaataataattcgtctgtttttgctcctcccaaaggaattaatctacagaacatgtcatctgttcctaaatctgacgcagccaaatctgatttatcatccatttcatgcttcaaccagaacatgatttcatttcaaggtggtgctcaatatgatcctcaaggataccagtcaggtccaagaaatgagcccaggaaaatggaggcaccacaaggaggattgccttggctcagaaaagcaccacctgttaatagcaaatctctaaaagaagaaagtgaaggatctcatcagatgaaaatcgacttcacacaaagctattctaagcagcagtgcctgaaccaaactgacacgaggaggggtccgtcacagagtcctattcaggattcttggttgacgacgcgtggccatgatactgagcaccgaaaagctggaacaagtgactgctcaagtgttaaaaggattcttggtgttcccatttttgacttcccatcaacacatggttctgtttcatctgtctctggtaataatagtcctatcaatgttgggtcagtcaaaagtgatttggcttgtgattctgtatcacctagatctcaagagcagctcaaagtcatcgactcgaggaaggaagtcgagaaagacaggtcttatgtgaaacatgaaatagacttaaatgagtgtataaccgaggaagaagaagatcaagtgactccagcagtttcagttgtaaaacccacaactgggatagatttggaggctccagttattgtggactcagaaactgggattacttccgaggaagaatctcaagaaagcgaactgacaaagcctttgcctcatgataaaatcgatgagcttgcagcagaggctttaattgccatttcttcagttcatgtagattatctgcatgacgacagtgctacactcgatcttcaatcggattcttccctcgataattcccttctctggtttgcagactttgtcacatcgtatgacgagacaggtacaaataagactaatgtatgtgatgaagagtcagttcctgatgacattgatgactttgagtacataatactaaatcttccagaaaccaaagtggaagagtgctggtaccagcctcagatttcggagaatctagataatctgaaggaagaagacacaccagcaacaagaaggcctagaagaggtcacgccaggcggggaggcaaaagaaggatttccaaagagatgttctacctggtttggtgtctctgtcaagaaatgaggtgactgaggatctccagataattgaagggatggttagaaccactggcgggacttggcagcccagtttgacaacgagaaatggcggtaaaaatggtggtgggagagggaggaggaggtgtgctccatctcctccagctcccgtcgctgcagcttgcaatgtacaagctcaacaacctgattctaaggaatcgggactcgatgaaagtagccttactgggtgggggaagaggacaaggcgccccccgaggcagaggtgtccattgagtaattcgcttctccctctcaaatgagctcaaaaagagaaaagagaaaaaatattatcaatgtgagactcttatgtcgtcgtctcaaggtggtggtgattcttttatttttgattcaccagtcttgaatcggatcacaacaagtggttagctcattatttaaacagaatgttggtttgaataatcgagttaaaagatttacgatgatgttttattttgaaatcaattaatgatgagtggagtgactcgtatttttataaatgtgtcaaaaacgttctcatatttactcttgtctttttatgccaagaagttcttcaatgtaaatgtgtactcctaatttgacttcttagactttcttttctttggtatttttattaagtgaatttgtatggttcatcttaaataacttgtattattgaggagtagtaatcatgcttttatatcggatcaactactaatgtactcaatactcatcacatgatttttaagacacaagttacctatttctattgtaactatacatatattatttaagtggtacaactctataacacaaaacacatttaatgtaaagtaaattatatatacaaagtctttgagttgtaatttttagggtttatttttcttgagttatttgtggagaaactta

SEQ ID NO: 271494 - DNA, 1827 bp, Cannabis indica
tacttaatctattttttgagcaattacttattgtctcctttattgtctcttgatgcttcacatgttgcttaaatattggccaacatatctacattaaaaaaaatctaattgatgatccagctcaaaatagatatgaaatattaaatttggattgacacatggaatgggaattattattattataaattgtgtattgtgtattggtttgggaatgtgaatgggtttatgtttattatatagatataaagggtgttttttgtatgagagaccggtcatccctgaaaaatatttcagaatgtggagtgggcactccattaccacaaatgattgtatgtgcgcctatttcccttacaacaaatttccaaaaatattgttctcaaactgttttccagagttgtgctttgatcttggcaatgttctcgtggatttcttagaacctaacagtctcagccagagttataagatgtatcctcgaaataccaaattttagtaaattgtgaatgaagctagatctaaatcaaatctcctctagttttctagagtctcgagttgaagttgattaaatgttaagaaacattataatataatagatctatatcatgtacaaaatacctgatgtttcatctagtgcttctacccaatcgtctgtctgagggggtgtctgaggttgcagaattggtgtttccacaggcctttcccactgacttttcccagtggtctcatggtagtagtagaaagcaccacttgaggggtcttttgcttctacctgtaataaagtcaagaagttctagcctcgtaaaaggagaccataagagaatatactgaaaataaagatctcaaaacaacttgaaaaacaattgagttgggctgatattaagaatgttgacagctacaaacccaaaaaaaaaatagatatatatggataaaacaactaaagccccaacacaagaaaataaaagaaacaaaaattatatcttaaattttcattgttcagattcatttgtgaaaacccaacaatttgggccacattaaggaaataagagtttgtgaaggaaaaaaaaaacttaaattttttttttggcaaggaaaaaataaacccttctcaaggatgataaacaaaatgaaggcatagaaagtcaataaaatgtatgtaagaagttatcaaggatgacaagatatcatcttagatcttccaaaatccctaattatatcagtaaagatttcatgagaaggaaatagaacttttatatctccatgaaattcgtgacagcagaaaccattaaattctgaccacattccctgctcctaacccccaccagcaagaaaatgaagggaaaaacagaccaaacaataaaaccactttctttgtcagttaaaaatgacagaaaacacataatatttccggtacattcataaaaacaaaatgtttaaacaaagacaacaatcacttaacaatagatactcacccatccaggaggcaaggttgccttttctgtgactttagttgaactagtctccaatttctgaaatcaaacgttaaatgtatgtgttattaagtaactagggataattatttaaaaaaaaaaaaagtaactaggataaaaaaaaattaaaataaaacgtgaagaaactgaactaaaagcaatcagatggggaaaaggtagcaaagatatatagaacacatacataaactgagaaaaaaaaatatagttgaattttgtcatgcagggatcgaattgttgagcaaaggtcaccctccctccctcccttcctttttgagaggggctattaggagtgttagagtattagctgtatattaggtgtaaa

SEQ ID NO: 271495 - DNA, 652 bp, Cannabis indica
ccctgcaaatgtccttcctcgcacgcgcctaagaggctgcatgttcgtgcgcaactcgcatcttcaacccaaaaatccatttttttgggaatttttcacccaatttcaaaattttcaattttcaaactttaatatctaaataaaatattatttttaatatttaaactaaatatcaaatttacaaattaataatatttaatttaattaatagattattattaatttttaatattttgaggtttaaatttaaagaaattgattattatttttttaaaaattatggtcagattttaaaaatttgttaatttctttaatatttatatattatttaattataaagttagatatttcaaatcaaagatagcattgtctttttaatttaaaatattctttttaattataaaataaattagaaaatatttttttataattttaaataattatattagatggactaatataaatgtgtcacgtgtataatagtatatgtaagtagtccatgttagcaattaaatggatgacaccttaaatttgctaacaatttaacagtttggagaattttaccactaaaatttgaggttaaaaagttaagtgtaagtaaaatgatagttggaattggatttagtggcaaattactcataaaaaataatac

SEQ ID NO: 271496 - DNA, 561 bp, Cannabis indica
tttcctctcattaactcttactactatattggataaattattgcatagaatttttcacaatgaataataaatcaattcataatttctttaatttcattttcatcttaaataggaattacaggagttgaaaatatcttacttcaaaatatggaaagagaaaagaatgtcgaagctaccacatacattcttcgaagcattaacgttctccgtgaattgcctttcgtccaaaacctgcttccagaagatttgcgtagacgaaacattgaagttgcccatcaccatgtcgtgcaactccaagatgcattgactaccaatatcaacgttgaaaatgcccagaaccttgcacagaacctcgcccaaaatctcagagcagtagtcacacaccctgctccgaacgttgatcaagctgcacaaaaccttgcccaggtcgttgaagctacagcaaaagttgcccagaaccttgctcagaacctcttaactgcaagccttgcttacacactccaaacacacaactatctcgaagttgaaactcatcactccaatgcccagggagaccaaccc

SEQ ID NO: 271497 - DNA, 970 bp, Cannabis indica
gttctagttagttgtttatttttgtcttcaatctttcgttaaagtcaaccaatggatcttctcgtgacatataggttaaggacatggtagttcaattgagtgagaacgctaatcatagatacataatttgtagcttctatctagacatagaagtgaagcgataatttccttcgagcttggcttaatagagataaatagtttactcattttagtgattatattagttcacttaaatatcatttattggtagctaagtattttaaggataaaaacattgaagggttaaatttgtccctactcaatgtgaatcatctaaagatgatcattgattattaggattataacaatggataatttcatagcgtatctatatcgtagaacatatagagcgctctatataattgagagtacaattctaaatctatagtggtgcagagaggaattaataagttagaggatttacttggtaaattctagagctatttattggaagctcagttatataggtccatggtccccatactagttgagacaatactgctagtaagactctgttaattgatttttattaatcaattataattttaaaattagacgatgtcttatttatgaatttttactaatttatggcttaattgttaagaaaataaattttagggtttatttgttaattaagagactttgtggagtctaattaataaataatataaatgataattttatttgataattgattataattattaactaaatagttttgacatttatagaatttttttaataagtgcatttataggattaaaattagaaaatatagcatttgtgaaataataaataaatggttgaaaaaacggtaaaaatataattagtggggcccacatatggtcgactacttaatccctattttggctattattttattattttttattccatataattcaattataaccctaagtgaattagtata

SEQ ID NO: 271498 - DNA, 914 bp, Cannabis indica
agttgaaagaaagcattaacatatattgaatgtcactcgttctcttactttgaatctcgcttatctcttggatattagagttgttttattaatgttgctgtgtatttaatgaactgcacaccatctgttttacttcaatttaaatcttcctttgagttgttgtacaacatgtcaccttcttctgatcatctctgtatctttggttatctagcctatgtttccacattggacaactcaaggcacacagttttttcgagatctcgggcttgtgtgttcattggatacccgactagtatgaaaacttatactttacttgatcttgaaactcaccaaatatttcactcaagagatgtcattttttatgaacatatttttcctcttaaaaatacatgttttaatgattttttttctgacgctaatgtctcaactagtggtacatcacaagtcccttcccaagcagtggcactggtgcccacaatagtgcttattccaaccactgtccacccttcactgctgcccaaacaattggtcattctagccatttcaaatacaatagtactgtcaccactagtggttgcttcagcccctccgagtggccccaatgtcacaaaatatctatttatttgtccacctcatctccaagactgtctttatgaattttctacttcacatctcatctcaaatttcatctcttatgacaagttttctcctaatttttgtgctgccatttatttaagtgcttatttggtttcaaaaccaccagttatttctaagcttctaaatttctcgtgtggataaaagctatggatactgaaactattgcacttacagttacaaccaataaaacttagattgttatctctcttcctgctggccaccatttcattggttgcaaatggatatataaaataaaa

SEQ ID NO: 271499 - DNA, 4668 bp, Cannabis indica
aattaatttatttgttttaaattttctcataaaataatttttttttttttaaaaaaaaactacatttttacacaaattgtaaaaagtccataaaatgtgtaattttgacaaggatcagttcgatccaatatagcccaattcgatttagtgggtacttcaaattcaaacgggagccgccaaaattaaaggcccatataaaaatcagtttttcgttaaaaaacacgactttgaagtttgaacaaccaatgctctatactctcttccagatcggaaccaaatcaaaccaaaccagagaacccaagaaactaaaagcaagggctcatgggtcgtggtgatgggattttgggtaccaacgacagagcaagcttaaccagtagacggaaatggttgaagacgcgagagacatggcttgttgtcttaggtgttgttcttcacgctgtttacatgctcagtatattcgatatctacttcaaaacccccattgttcacggcatggatcccgtcactcctcgatttcatacccctgccaagcgactcgttcttctcgttggtgcgttgatcgttggactctacctgtttgttgaattgttgaaatgaaatgaagcttttttgttgatactaaatgcattgaacacaaaatgggtttgcgtttattcttggtttttcttttcatagcatgtaaggaaggaattgaatttgtgctgaagagtgttactttgggtcacagctttgtttaaaactaattaaaagttctgaattttatgtcattatatggatcgtatcgtagtgtttcttttttgaattttcataagggtggaatttgtaaaaagcattataaaaaaatggaatgcaattttcattcattccttagtttggtttcattttaaatattggaactgtttctctggtatgactattctattttgaaatgattggaaaaaccattagagatgagaaaaactttaagtatttattttttataaattttttatgcattttaaattcattctatttctattcccattcaaagaatttatgtgttttcattacttccaattaaacgcaaccttagtttgttgcttggaaaatgactaaatttattcatttctatgctgtggggatgaccaaaaaaacaaatgcagctgatggtttacgtgctgacaaattctttgagcctgattctggtggaaactatagagctccatttttaagaaatgtgattaaacagcagggtcgctggggagtatctcatgctcgccctcctacggaatcaaggcctggacatgtttccatcattgcgggtttctatgaggatcctagtgcagttacaaaaggttggtctttctttcatagagatgttaattgttttgtggcttcccattctgttagctaaagacactcaattgccttttcaggatggaaagcaaatccagtggaatttgattcggtatttaaccaaagtcgacatacatttgcttttggtagcccagatatagttccaattttctgcggggcattgccacacagcacctggaaaacctatcctcatgaatttgaagactttgcaactggtttgattacaatcttaaacaatttgtttcaagctcatattttacctccctggttctgcctatttcttcatgcataaataattgctcaaactttctttgcttcatcttaaagttgtgcttataaatattgtttcgatacttttgaattttagatgtttagtaaagatcattacttctatattaactttatcatgacagatatgaattgatagtcttaatgcagatgccgcctttctggatgagtggtcttttcaacaatttgagagcctttttaataactccaaacaagacccaaagttgaaggagttgcttcaacaggataacattgtcatttttttgcacctgcttggatgcgactcaaatggtcatgctcataaacccttttcatccatttatctcaataatgttaaagttgttgatgatatagctgcaagagtttacaaccttcttgaagattattacagggacaatcgtacatcatatatatttactgctgatcacggaatgagtgacaaaggtgagatactactcgatagcctttagttgttgtggattactttgcgcatcaatgcactgaattatatgtttttttggactttggatttcataaattgctaaaacctttcactaattaggcaagttacaaatcaacttgatgctcataataataatgataaatttttggtaattatggaagaacattcctaggtcaattatcatcgatattaaactaaacattaaatgtttggagttcaactcttcaaaacacttccctttggtttgtcttcagttactttttgtttctctatcacaggtttcctaattaatttctttgggcctgtgcactttcttcaaacaagtgaacacaagtggagcttaaaatagatggttagcatctcacctaaaagttttccaagccccaacacctggccacagactaagaatggctgcttgtgttcaatacacaaattatttccttgtccttgaatatggatgtgtcctgatttctcagaatatgataaattatttttctgtttacatttttgttgttagttgaaagacctaattatggtttatctaataggtagccatggagatgggcatcctacaaacacggatactccccttgttgcgtggggagcaggcgtcaaatatcccaaaccgatttccagcagcaatcattccgactgtggttttcgttttgttgatgaacatatgcatgatgcaccaactcctacagaatggggtcttcatgacttagaaagggtggatgtcaaccaagctgatattgcaccgctcatggttgtacattttgattccataatttttttttatatcctctttaagttattgatagttgagacttatatgctccttaacttctatggcagtcaactcttcttggtatgccatgtcctgtgaactcagttggaagtttgcctcgtgattacattaactttaatgaggtaaaattaggtagtttttattccttgagtgaagtttgttaattggaacgagaaaataaattttgaaggcttcagatcaattagtttcataacagataaagatgtctgaagattgattaacttatttttttctaaaggcaacagaagttgaagctgtgctagcaaatacaaagcaaatccttaatcagtttcttcgcaagtcacgtatcctcttgttaacttatattgagcttttcttttcattgtaattggcttgtaccatgagatttttttttacgtcttttgtggatgagatatggtactattttatatattattccttaacaaacttagaaataaaacagtcaaattcaataagtttcaagccctttaaacctctgtccgattatacctctatattggatcaaattgaggaactcatatctggtaaagactatgaagctgcaatgaagttagctgaaaatcttcggagcttggcattgcaaggactccattactttcaaacatatgactggctgatgctcatgagcgtaattagtcttggctacattggttggatgatctatcttgtgattcatgtactgcagtcttatacttcattgccagtacagcttcttagaaaggaattcacaaattaccagagagatgattacaaaaaagtaagctcttgtaagcctgaacttgttagctttatttatgattaataaactggaggaagaagcatacaaaaactaaaatataaatacaattctttgtggcaggttcaattttgtggatgccttttgatgggagtaattagtactctactgtttcttgagcgttctcctcctctttaccatgcgtacacaacaatgacagtatttctgtggacacaaatatttagtgaatatcagtttattaaagcatcgtggaagctgttgcatggaagaagagtttattacgccgctaaaattctagctacttgtgctgtgtcagtgttcattcttgaatttctggtatagaaattaagcattctacgaattcctgctttttccaagataaagtgacagtataaagttctaaactatgctatgttccaaccttgcaggtcaatagctttaccgagaggaagctctatactctgtatttcctggtagcgggggtcgtaggttctctatatctatacaagtcaattccatggagatctggaataccaatctttgtttgtgcggtgtgttggtttttatctgttttcaccttgatgccagcagaaattccagagaacacttatttagtgtgagtgtttctgtgttttttttcttttttttttttttagtggagggagagtaagtttgggttttagccagtgtgtgtcagtttttagaggacaaaaggcccatacgagaatctacagattaaaagcgtcatggctacattaaggattggtatttgaatagagaacaactaaggaatggattagaagttcttaagatttagtgtataagtattctagtgatgttttgctgttacaattttgctttcagaatagggagtggagctatgatcatcgttattggaattgcagcgaggtggcttgatctgcatgcaggagggaataaatatggtaatgtctctgcaatcatagaaaagaa

SEQ ID NO: 271500 - DNA, 458 bp, Cannabis indica
acattacaaacttaataaaattacaaaaggtttaacacacgctaactactagtatagttgaaaagtgttctaatattttataagacataaatcatacagtagcaattgaaaaattattacacccatttagtagatttctagctattttcaaatattttaataattattaatttttttcaaccaataaatgcttttttatgtgcagtggcttttgacaaatttgaagttgaaaagcgttatttctcttatctgacaaataaaaaatccctcttgttttcttttcactctgagttttctgtaagagagtttagcgtgatgaggtctgaattttgattattggagtggtttttaacgttcaacatttgatcatgacaaatagacgactttgtatgactcttttgattgtatgaggtaggaaaaggatgtcttcttccaatgttgtttcccgcaaaaatatg

SEQ ID NO: 271501 - DNA, 943 bp, Cannabis indica
tgatgcaggaggggtaggagccccgccactcaatggagtactagctgactccgacatacatccaactgggccctcagctcgcagtgccttctccaccatctcagcatagggggtctgtcgtcggtggtgatcataaggtcatgtttgatcttcacacttaatccgtccagatacttttccttcttgcgaaatcggttggcactattcccgaggccaacctcgccaaccgatcaaactaggtggtatactcagtcatgctcatgttttcccactgggttaggtgtacgaactcttttctcttggcacttctaacggcctcattataatacttcgcgttgaagagttcctggaacctttcccaggtcatggtggtgacatcatgaatctgagacaccatgtcccaccagactagcgcatcttcttggaactggaaggtggcacacaccaccctatcatttccggtgacacccataaagttcagtatcttggttatcaccgttagccactgctcagctttcatgacatctggacctcccagaaaaaccggaggtgcttgcttccggaacctttcatacaagggttccattctatttgtcgctactactatttcggcctgagcagcaggggcgggtgccacaggaacttctggcacaggcactgcaggagccccctgctgcctcaatctctaaatctcctgatcttgctcctctatcctggcttgcatttaagcaaacctagtctaccaattccgggcttcctgatcgtcttgggcagcctgggcagcctgtggcgggtcatcatcaccccgaccacgagctctgcccctgggacctctaccacggcccctagcatgcgagggaaactgagctccctgaccctgatttgaccctactgatggctcttggtgttccgcctgatgtccatctagtctgaacagcctgcg

SEQ ID NO: 271502 - DNA, 923 bp, Cannabis indica
ccaaacccgaacccagatcaaaacccagacagagacctaaacccgaacagagactaggactcgaacccgaaccttgaccgagacccaaacccacacaataactgggacctggacccagaatcaggatagggacctgggaaacagaactacgaccaggacgtactacccgaccaagaccttaacttgaacctaggacccagctcatgacccggcaccaaaaatggaatcagactgggacccgagatcgggatccagatctggaccaagggctttgacaaaactagaagtcggtgtcaggatttgggacccagccctggacccaaaccctgacaaggaccaaaccacacccggacctgaacccagtcccaaacccaaaagtggacccgaacccacacccggacctgaacctaatccaaaacccaaaagagcacccgaacccgtaccttgtgacccaaaattgaaaccaaaatgagaatttgatcgtgattggaactaggatttggacttggaatcataattgaaattggccctagatccagaaccgtaactagacaaggactcggactccaaataagacgaacacccaaattgggagccagacccagatccaaatcgattcctggactcggggccgaacccgaacctgaactcaaaccaaaacatggaaccatgctagggacaaagatccatggtcgggacctagaaccgcaccgcagtctcgatcctgaacccaaactcagaaatgggacataggacctgaaccggaaccagaccgagacccgtgacagcgatgggacctggaccagaagtcggtgtctagattttggactcagactaggaccagaacccagacgaagaacacaacccgaacctagaccttgacctgggaccaaaaattagaacctgaacaagaatcgccgaac

SEQ ID NO: 271503 - DNA, 511 bp, Cannabis indica
aaaaaaacatacacttttatatatatgccctaaaccattaccatttttgctattgcaatggatcacgtggatgatcattttatgattttctagctcgtttggccaaacttaattatgatatggattggcttatatatatatataattcatccaatagtagataatttcttcatgcatggcgccggcgttgtcttatcaagaaaattttagagttcatgtgtagaaaggggaaagaaattaagaagagtcttgtctttttattcaaaccttcggcgctatagctagctgtctcgaaaaaaaaaagaaagaaaattaagattcctttcagaaggctacatagctagatataaataaaaattattatatattgttcttaagatcatacaaatcaggttttaaacatggctagataattctggctactggtttgtactttcctcgatctttctatactaagattcaaaatatagatacttagaattattactaataaacccattgcatggtacat

SEQ ID NO: 271504 - DNA, 1332 bp, Cannabis indica
aggagggcttggatttttttccggattggcttcaattcctcgagcattgacgatgaagcctagaaactttcccgagtttgctccgaaggagcattttatgggatttagtttcatgttgtattttctgaggactttgaaaccttcgtccaggtcgtctatatgccccccaacctttctagatttgacgagcatatcatccacgtacacttccatatttctgacgatctggtctttaaacatcttgttgaccaatctttggtatgtagctccggtgtttttaagaccaaacggtatgactttgtagcagtagagacccaaatctgtctggaaacttgtatgttcttggtctggtggatgcatcttgatttgattgtagcctgaataagcatccttgaagcttaatatttcgtgcccggctgttgcatcaacgagctgatcgattcttggaagtgggaaacagtctttagggtacgctttgttgaggactgtgaagtcaatacagactcgccatttcttgttcagcttaggcacgagtacggggttcgcgacccaagccaggtaaaaggcttcaatgatgaagttgttgttgcgcagcttttcaacttcgtctttcagggctactgctcgttctttatccagcaatcttcgtttttgctgaactggccggatgttaggatcgatattcaggacgtgcgaaataatagaaggatcgattccgaccatatccgcatgtgaccaggcgaaaacatctaggtttgctctcagaaattttatcaattccgattttacttcgagcaacaaaccctttccgatttttagctttctggccgggatagctggatcgatctcgatctcttctaattcttccacaggtccaacattgctgcttgggtccccaagtcgaggatccacatcttcatcctcgccttgggaagtttcctacttgggaatatttattcccttgtccgggctctggctggaggatacttccttcttagccttggccactgcaaggttgtaacattcccgagcagattgctgattccctctaagacaccctaccccgtttttggttggaaacttcaggcacgagtggaatattgatgtgacagcttttaagtcatacaaggctggtcggcctagcattacgttaaaggctgaaggaacatccaatatcaggaattgtgccatgatagttatgctcgtcggagcttgtccaactgtgaggggtagccggatttgtcctagaggcgcaactccttggccggagaaaccatagacgggctgaaggcatggagttaaatccttgagctggagccccatcttctcgta

SEQ ID NO: 271505 - DNA, 573 bp, Cannabis indica
agcccatggcaattccaagatataatgctcataatgatgggtgggcctgagaaccaaggcccacctgtgatccgttttttgatccagtaatatcaacacaacattccacttcattatccacctttgactgagtcttatccccactgattgccaccttttctttccccatacgtcttctcttattatctataataagaagcaaatcattctcatttaaatcagctacattacctcctttgattttgctttgaccctccccagtatgctgcccataatcccttcctccatctataacgacatcatcttgatttcttcctaaaatcatgggatcgtgattgtcttcatcattatgacgatcaacttccatgattttaggcgagaaaggcgcttcacctccggccccagcagctcgtgaaacaccaccgccccccacagctccgccaacctcattccccgtccgtaaccactgtgctccgatcaagtaattcttttttttcatctgagccttcattccaatcccatacggctttggtaattgatctaagggctgatcaaaacgcttaggacagaaac

SEQ ID NO: 271506 - DNA, 750 bp, Cannabis indica
ttgtccctactcagtgtaaatcatctatagatgatctttgattattgggattagaacgatggttaaatgtttatagcgtatctatatcgaggaacatataaagcgttctatataactgagagtgcaaatccaaagtccatggtggatgcaatgaggaattaataagttagggaatttacctggtgaattctagatctacttattagaagctcggttgtataggcccaaggtccccatactaattgagacaaatactgcttgtaagactcagttaattgattttaattaatcaattataattcaaaaattagactacgtctagttcatgaatttttattaagttagggcttaattttgaagaaaagagtttctaggatttatttattaattaagagactttattaagtctaattaataaatatattaaataacaattttatttgataattaatttgaatatgtaaataaatagttttggcatttaaatggttgaattggaaaatgtggcatttttgagaaaataagataaatatttgaaaaatagaaaaattgcaaagtggtagggcccacatccatggttggccacttaagttaatttcaccattaattttatcaatttttttaatgccaaataattcgaacctaaagctagttggattcctacaaatagatagtgatggcctcaaattaaaagatgatgaattcaattgcgttcagtcaaattttgagccatctcttctttctattttc

SEQ ID NO: 271507 - DNA, 1648 bp, Cannabis indica
aaccaagaatcggtttcaatctcaacggtccccaatgtttcctctttatcaaactcaaggcctccttaacccctaccaattcagccatagccgaatccacacaccccactcgtaaaactgtgaagccttcaatgaatcgaccctgagaatcccgggccacccctgccgctccaaatcgaccatcacttgcaaagatttcaccatcgacattaaccttaatctttcccatagctggtttcacccaatgctctaagtccactcttgaacccgtaggaacaagtaaagaccccattctcctttgttgagcactctcaagacagattttagacttcaatatattttaaaatataatagcagatttatagaagcatggtaaaagaatgacagtgaaaatccctgagcaaaattgatttttgtttcagttctattatgagattgacattcgacgtgtcaatctcataaatacactaaacaattatgagatttatactaagtattactttttatttaagtttaatacttcataaatatactattcttatcagtgtattgtagctaaaagttttaaataattaaaacaataacatttcaaagtaataaaatagaacaaaacatcataaaaataaaaatacactaaacaattaagtattacaaattcaacatacaaaaaaattaataaaaatataataaatatttattatatttttcaatattttttatcatataaatatttttttaatatatataaatgtaattggattggatcgatttttaattagattttgaaattgacatccaataaccgatccaatctaattagaatccaacttttagcatccaatctaattgtaattggatattcaactttttgtcgtcaggaatagaggttttttgatgtagttacttgtagtaattaaattagattgaattggattggatcagttcggttcaattggattggattggatgatgtccacccctaatacatggtattggttgggagaatattaatgtgagttttcaattaaaagtacctataaacttctttaagatcaaaatgataattaggtggacaaaggtacttcatgtttctggcttcatctttggcatttgaatatttcctctaaggtcaagaattttctatggagagctgtcaccaattgtctacctacttgccttcatcttgtcacaaagcatgtggagatttctcctatttgtccagtgtgcaatttccaatctaaatctactagccgtgctctcattttttgtccatttgccctttcttgttggtgtaagtttagattttcatttgttttcgatcctggtggtggttttgagagttggttggagcttctgtttaaaacagcttcagctgatctggtgtgtaacattgccatgacctgttgggtaatgtggaaagcgaggaacaatgtcgtttggaagcaaacaattaattattctgttacaaaagttcttgcatctactaaagtagcttttaatcaatggaagaaagctcaaaataaaatctctccatcatctttgtgtctcggtaactaggctaatgcttctgagttttggtctaaattgaaagaaaacacaatcaagataaacgtggatgcaacactctttgaaggagagaaaaagtatg

SEQ ID NO: 271508 - DNA, 705 bp, Cannabis indica
ttttcgatttgaacaatactacttttcagctaaaattattttattttatcagtagaacttgtttttggctcagatgtttaacaaagtttagaaataattttctaagaaatacataacagtacaacacatgttcatgccacaaattaaaaatattttacaccataaatataaataacataatagtccagcgcatcacaatactaataaactaaaaatttatgttaaacctcggtaggtgcaagtgcttctgttgtgtcccttggcaccgcacttgctacattttcgtgatttgataatcctttcaccattacaagcagttcggttgttcttaattcttccaaccttttgcttcttgggtcgccctactggttgcttctcaacaggcactccaactgtcatgttctttatgtcatcaggcaattcccaatcatcctcgtcaccaactggcataattgttccttcgtatgttctcctccaatattctgttgtgtaatatggcgagcatagtgtgtacacgctaatacttcgctcctgagatgcagcacatgcatgaggacaaggaaacttcatgcactggaacaagccgcaagtgcaactcttttcctgcaagtccactacgccaccggtgagaactgttcctccagggtgaacctgcaacgtgtaaggcccgcatgagtcaacgttcaaaaaccgacctttttcaaa

SEQ ID NO: 271509 - DNA, 771 bp, Cannabis indica
tactaatcttacctcaattccgaattcaggtgtgtcggtcaacttgagtggaacgactgctcggcgatttataggctcttaaatcacatcgataacaacacgcataagtgactcgctaaatcacaaccgagacttaggtttaaaactaaaaccctatccactgcaacttaatatggtaatatcccaaactagcagggaatcaaccaactagaaacctgaaactgacacgaaacgacaagctgaaaaaccagttttcctccctgctgcaaaatctgggtaaccggttttacaagcagtgtaaaaccggttagctgattttacccagaaaaccaacaaagcttcaaaccctaaccaaatcgttttcaaatccaaccaagctttccagacttgcatttctcaccccaataaacatgttccaagtgataaaacaactatccatacacagaaacgaatttcaccattaaagcttcaagattgagttctaaaactcaaagcttcgttaaacctacatacaacccctaattcatacttaaaacaacatatctaaacataataccatcacagaaaacaaaaacaatcaataacagcaaccacaactctttaaaatcaaaatcatgcaaagattcacaacttgaagcttaagaactaaggaggaagttgcttagagacttaccttgaattgaaatcacaaagaacttgcttgaaatccctagatgaagtaacaaatccacaaacccttgctgggttctaagggaaaaacgagagagagag

SEQ ID NO: 271510 - DNA, 585 bp, Cannabis indica
aattttttttacttttagtcacaaagtttattgtgactaaaattatttttttttgtagtgatagagattagccccgattttgacaataatagcttactcttccttttacttgtattacccaagatcacaaaatatgaatttagcaaaatttttgtatacaattttggtccggatctcctccactatggtggaggggtttattatatttgtagagtacatcaaattaatagagttgatttcgtgcttcgcagtaaatcttgaagttgaacgagtttacatgattgaatctttaaggaccttgagccctaaaccctaaactctaaactctaagcccattaatgagaatcttgaacaaatttttgtgtctgtcggggttaccaattaagcaagtactaatcgcctaatagtgtattcttccaatatgagttcatgacgactcatacctcatgcagaatgtcgcatggctttttaagtaaccaccagggtcagccctaggcataggcagattagggtcatgcctagggcttactcattttagggacctaaataaaaaaaattaccttttaaaaaatatacataattttt

SEQ ID NO: 271511 - DNA, 633 bp, Cannabis indica
tttttgctgaaggccaggcgcttctgcagagcttacggtggtgtttggattctcaattgtctcctaagtttgtcttctcagattgtttgaatttggtatctaaagtgaatagtgattggcaagataattctgctctttctggacttgtgtctcggattcgattgctcttctccaactttccggatgcttctttgcattttctacctcgtcagtttaatatggacgcccatggtcttgccaaagaagccctcaggccgagagaagatagctagaggggattgttttggtccctctttttgttgcttgcgttttagtttcttcttttctgcagcttctcttgttcaaaaaaaaaaaaatcatgctaataaaattatatgtcatatcaagaaaagtataatagaaaatagaacttaaatattattttaaaaaaattatatactgtttcaccaaaatatatactaacaataataaaaaaaattattactaatatatatatactacactaactaaattatatactacaattgtatataataaattagaaactaattaaatattatttaaataaataatatatcatgcaattaaaatatataaaaataattattgaatgtatacagcatggcaataaat

SEQ ID NO: 271512 - DNA, 1492 bp, Cannabis indica
ttttttttttttgaattttttagtgtcgatttctaataatggcacaatgttattggcagtgagaaaattgcaattatttatcaatttccccacctgcattatataatttaaaaattagcataaaatatcaacaaaaattaaatagcaagaacataacatctataacaagtatacttgtattaaattgaataagtattataacaaagtactatatttatactaaaactaattgcaattacataagtatttcctactcaaaaacgttccaaagcttcaatgcattattagtttactgaattcatacggaataaattttgccctttcatcccgaactatgttgagctgtggtcaaatgatttatgttgtcatgttgatgaggaattaacctgagatgatcaattaaaaagtaatcaaaatcatataagagattaaaaaggagttaaaatctaatttatattattgacctgaaaatactatagtatagtataatagtcctattctatgatctcgtctaaaaaataattaataaatgatttgatacataagtacagaacactcctgcatcaaatcaaagaattaatttggtcacatattttaaatgcaacactgtaatatcaatgttactattagaattttgctaataatataataataattatatacattgaagaaacaaaattattccctcatcttcaatctcaattcactcaacccgaaaccatattgagctggtaatgagatgggtagtgtacatcagtgctccaaacaagaatgacttaatgtgtactacataattcataggctctagctcctaaaattcacttccacttcaatgtaatcctttattttctcttctataattctaaaacaccatacaacattctgaacaaaattcatgaaaaaccagatcactgtctttatcacacttaaatgaaataaaagttacattaaaaaggatgacaaataagttcacaaacaatgcatgcattacaatcttaattattattatctttattcttgctacaactaatttacttttctaaaatgagtttcttctaagccaaaagttgcagctatactatagctataatgacatttttctttccctttttcgtttacataaattgaaaagagttgtgtgcctcaaagtgagctccaacatttatcaaagactgaaaaaggcctctaaataatataatgaattatgcgatgactaacatggccaataataactgttgcccctgatttcgcccaatatacgtggaccaaccggacagggacacgtggatcagataatttataaatatttgctaagtctttgtatgccacaaggaaacatcctggacataggtcccggaggaggcacccggagttcaaggtgctcccggaggctcacgtagcactaaagcatctccatgaggtgtcaggcttctcctgagcaatcaagtcgcattaaatgctgcatgggaggaagcgtgttgggactgcaaca

SEQ ID NO: 271513 - DNA, 616 bp, Cannabis indica
gggcataaaacccaacactttacgcacaggtaaaccttttgtcaaccaaggaaatttcaaatggagttttttaggaattatttcaaccatcttcttcatttttagaaaatattgagatttaactatttctggggaccaaaaaaaatttataaacggccaaaattgggacccaacgcccaggttgacacttggggctaggcccagcactcaggctgacatagtgtcaattggggttgtttctgatcaagttcagcaaaaattgttccaagaatttttttttatcataaaaaatgaggattcaagcaaactccgggagaaaactataatctcgagcccctagacacgggtcccaacgtttaggttgatctggtgttgggctagacgccgcaattaacaattaacttgggatgttgccttcaattgcataaatatcaaatccaatctgaccatgaaatttgtaatggtcaaaaattggataggagaccttgtcctcaagtttagaagccttggaagtaacaaaaagaaaatccttggagctcgagagtatgtacccaatgcccaggttgacaaatggcttggttcatggggtttcacttatctgaatttgatgtcgttt

SEQ ID NO: 271514 - DNA, 749 bp, Cannabis indica
catactctacgtgctaatcactgtcttacctgttttccagcaatagatagagattccaaatccccgggtgctcctgatcaggtgccggtaatcctagtcacacaaattccgagatatttcacacttagggttaacccctgattccatacttataaaactcaatcatggcattaaaattcaaataatcatacagagcacggaacgagatttccaacgatatgaagaactcccaaatcggagttcggaatcaaaagttatgcattttcaaagttcgacaccaaactgcccaaaaatcatgagggcgggccgcggcatgccttgaccatgccgcggcacctgggaaaaaaaacccaagttccaccaagaggggcaggccgcggcatgctccagagcatgccgcggcatctgggtgcagaacccagaaaccagccaagaacatcacgaatttcagcttgaaaatccaatcttttccatcccaaaactcaaccaaacactcaaattaccaaatattgatgctaacaattaacaaggaaataaaaatcatgtttcaaataccaatttccatcaataaacccaagatttcagattgcatgacacacaaactcatgcttcaaacttgcaatactcaagctcaagaactttgagctaaaacccaatactcacacatattttccagcagcaaccaaccacaaacagcaaataaataatcaaattgaagcttgaaatacatccatgaattattctctaag

SEQ ID NO: 271515 - DNA, 563 bp, Cannabis indica
gaagaataagtggttgaaataaagtggcaaaattgtaactagaaagtggtacactttatgtgtacgacacttaagtttattttgcccaatattttattcttttttgatccatataattcaaccctaagccctagttgaaataatataaaaggaacatgatgctctcatctcttccacttgacactttgtcaaactaatgtcatcttgacgattgccttcaacctagatgatagagttccttccttagtgatttcaaacctccttcattgttcttcaccattcgaaccttgagtgaatgagtgccatgcccacacatagcaagtcaagtactcaatcatagtgagtaagacggtggtaaccaaacccaaaagagtgaaagagattctggttcaaatcttgataatgctctgctacagaaagaaatcaagggctagagatcttgaacggaaggagtcattatattccgctgcaagcaatgtaaggtttttttaaacccttatgtgtttatttcattattttagaaaattaatatttaggatgttaatcaacatacttgttaataa

SEQ ID NO: 271516 - DNA, 673 bp, Cannabis indica
ctacagaaggagcaatgttgccttggtgcaatttagtatggccttcaattagaaaaccattatgatctctaataacaatagcacccccaaatcgattttgtccttcaaatatagccgcatccacgttgatcttgatactattattctgaggtttaatccaacgctccgtcccatcacagtcttgaagttcagaccaagatgactcaatttgagttttttgagcgttttgccattgatcaagatagctttttgcagaagctactattgctgaaatattaatcggtttcccttgccaaacaacatcattcctagctccccaaactgcccagcacagtgcagcaacaagacattgtttttctgctgtcaaagtcttgaaaatgaggatacaccagtccagaaaagttgtccctgcagcagccaatgatgtcccgatgcctactctctcccagacttgcttgaccactctacaggtaagtaacacgtgagaaattgactcatcaaactcctcacacaagggacatcttgtattcaccgggacgcatttcgttgcaagttgtgcaagtgttggaagacaattagaaccggccctccacatcagattttttatcttcggaggcatctttaaagaccacaaacttttccaaaaagctgaagcatttatctcatcacacag

SEQ ID NO: 271517 - DNA, 910 bp, Cannabis indica
aaaataacattttctgtccttataatattttcccctggattttgatcttgactgagatctatgttggcctttgaaatgatccttcctgtagtgatctctgctcatgttgttgtcttttcctctggctaggtaagcttcatccttgacattggctttccccttagccatttcttgttctttggacttcaaggctccaagaacatcatcaagggtgagagtatctactccatacttgatcacaactttcaattattggtatgcaggtggcaatgatctgagaagaatgacagcttggctttcttcatcaacattgtacttcaagttagccaatcctataataatttggtaaaatgcatcaaggttatcatctaaagacaaacgagaagacattttaaaaccatataaagattctaacaacttgatcttgttagctaaagagggtttcatgtaaatctcttcaagcttgctccataattctcgagctgtcttcatgttttgaaccttccttcccactgtattggacaagtacattatgatagtgtagtatgcaaattcctccatatcttcaagttcttctttctgtaacttgtcagtaagttctttcttgggtttcaaagctttggcaaccttttgatgaacaagaattccctttgagctttctctccataggccaaaatcccctgtcccattgaacttctcaagttcaaatcttgctgctcctgtcatgactggttgcagatgagtcttaattgaatcttgattctttacttcctcaattggatcttgaacctaagctctgattttgttgtaatttcagcaacaataacatcaaagagatcaatctaaaacctgcaattaattgacaacatgaacagtaataacacactcaaaacagttagcaacaaaatga

SEQ ID NO: 271518 - DNA, 1194 bp, Cannabis indica
tcaactctggggaactcccagataaccgaaatgaagctcggaaaatgagagaaaggcagcacggtacatcatcgtagacgggatcatgtacagaagaggattctcaatgccattactcaggtgcgtcacaccaaatgaagctgcacggcttctatatgaagttcacgatggattctgcggaaatcatgcagccggacagagcttatcaaagaaaattctaaggcaaggctacttctggccgacaatgattgaagattcgaaagcctacgtaaagaagtgcgacgaatgccagagattttcaaagataccaagagctccgcccaacgagctgacgcagatgcaaagtccgtggccctttgccatctggggaattgacctaatcgggcaattacctaaaggtaaaggcggagtgcagtacgcagtggtagcagtcgactactttacaaagtggactgaagccgaaccacttgcaactatcacatcaaagaaggttcaagactttatagtgaagaacatcatatgccggttcggactaccgtacaaaatagtctcggacaacggcaagcagttcgacagtcaatctttcactgatttctgcgcgaaccatggcatcatcaaaagcttctccgcagtggcacatccacaagcaaatggtcaagttgaagcagtcaacaagaccctgaaggacacactaaagaagaagctcaaagatgccaaaggaaattggccggaagaactccccgaagttctatggtcataccgtacaacggaaaaaacagcaaccggtcagacaccattctcaatggcgtacggttatgaagctatgctgcccgtcgaactcgaaccaccatcccacagaaggttgacgtacgatcaaggtaccaatcacatactccttgcagaatcacttgatgaaatcgaagaaaaacgagcaactgcaaacttaaagttggtagctcatcaacaaaaagtagctcggtatttcaacaaacaagtgaaagctcagaaattctttgtgggagatatggtcctaagaagggtattcctaaacaccaaagacagcacgtcaggcgtactaggacccaactggaaggaccttatcaggtggtcgaagttctcgactccggagcatacaaacttggtaagtatgacgaaaaaatgcaactcattttagtaccacgatactggaatgga

SEQ ID NO: 271519 - DNA, 670 bp, Cannabis indica
gacctcacttgcgtgagtatactacttgattgcgtgcacttgcgtagtaattaataatttttgcaacagtgtgtaaggagattgagagtttgatggcaagattttggtggaaatcttcttggaaccaaaacaaaggaattagttggatgagttggtcccgcttagcgaagcataagcttgaaggagggatgggatttaggagtcttcgtgattttaatatcgctatgcttggtaagcaaggttggcgattacttattaatcctaattccttggtgagccgagtattcaaagctagatattattctcatggagattttttgaatgctgaattaggctccaatccaagtttcatatggaggagtttggtggaggctcaaggtgtgctaaaggccggacttagaatgcgagttggggatggtctctctattcgttttgcattggacccgtggcttcctagagaggagtttcccactcctacttctgatctttctatgttcaatgatcatagagttcatagcttatttaagattgggtgccgcgaatgggatgaagaggtagttcaggatgtgtttaatgcagctgatgcagcagttattttgggcattcctcttgctgctggagaggctcgtgattcttggtactggtttaaagaaagggctggtgtttactc

SEQ ID NO: 271520 - DNA, 1324 bp, Cannabis indica
atgaggggggtaaaattgggttttagtaaaatgtatcccactttacaaattatgtctactattgtattaggtgtccaattttattatttattaagtatacaatttcaaatttcccttatgaaattaataaaaaaaactaaggttagagaaaataccaattataacaataaagaaactattttttccacttaaataatttttatatgaatttttgttgcgttgtgaaaatcggctaagagtgaaagttatgatacatgtgttgtttatttaaatttaggattttattaggattaggaatatttataattttttataattttatgaaattaaattatacctctatataatagtaatattaatgatgtatttatgtaatttaatttttttagctatttatatatacatgtgtatacatatgtgtatagatgtattttttataaataaataaatatatgaagatttttatttaaaaaaatagtaaattaataaataaaagagaaaattatggagattaatgaattaatatttataatttgaataaaaaattaaaaaaaaatgagagaattaaggatataatagatacatgtatttgaagagattttagagcgtcatgtcatcgcttcatacttctcctttatatatatatatatagatatatatagattgtttaatatcaagatcactcttagcgcggctccaataaacatgcaaaataaataatgtaaaactaaaatatgactctcttagtaattaacacacaataaatattttttattatgcaaatcaccataaacgtattgtatttaattgtagtattaaatataatccttttacatttttttttattgatttgcataaaatataatgataaaattaatgtaaagttattattattgttgtattttaataaaattattaatttttgtatgatgttttgcaattgtatgttggagcactattaaaaattgctacaaatatttaaaaaaaaattaattattataatattataatttaaagaaagaaaatagagaagagatgagaattttcttagtatttttaatctaatggtgatctcctatttatacacatatgagccaaatattaggaaattgagaaaaagaaaattaagaaaaagagaatatggattacaattaatgataataaataaaatatttggacatccatatattaattaatatttataacatgtccctttaaatgtccataataactgtctcattaaaaatttcgcaaagaaaatctagtaggagaaaactcggtcaaggaaaaaagagtgcagtatgaaattactctccctcatttt

SEQ ID NO: 271521 - DNA, 1505 bp, Cannabis indica
attgaacgtctgtacaagaaaaggaccaggaactagtttcaagaaaatgtaacaatttaaatacaatcctatgatatttttttactcaaaataaaaaatatgatatctattgcctaggaccatgtcataatctatttagaagtaagagtaaaggaatttatattatacatatttatagatttggcctaaaagggcctcatcaaggatcatgctgatactgcatatttatgatattatagcaccatctcccatttatttattagtcaagccattacaaaatgtggcacttaaggaccaacccatagccatgactagtggacatgtactgacaaggttgattttgctttcctctgaaggttttgtttctctccaaacatgccaataaccaatagcaaagcaatcaacaaatgccacaccattctacagtagcaccttaaaattatttctaaaatacaaaataaacttttattactgactaaaacaaaaactacaagagagaggatgacaagctattttcaactaaatggaagcaagaaaaaaaaatacaaagtaatacaaaaacaaaaaacgaaatcgcgttgctaaataagtgttttaacatagaacaaataaataaataatccgcctacacttttagttcccaatcaatcattttttccaaaaataactcaaaaacttactagcaaactgacagcctcctattgtccatagttacaacttaaactaaagtcataatccaatccaatgattcactaaaataatagaaaatggaaataattggttgtatttttttgtttacctaaatcgacaagaattttgacaagatttggaaaaaagtcaacaaagaaaattaagattgactaattagaacaccaaaatcattagagaagagatttggatcactaaatatattgataatcatgttgctgagcaaagatttttgccatgcaaactttgtttaggaagcttagcaactattcatgaaattttaaccatgtcatctccttttatatgtagatttttcgaaaaaatattagtcaaagtagtttccacaaaactttggcacatcatactggctaaaagtcaagaaaactatgaaaggaagtttgacagagagaagattaacataccttaaaatgttccacagggtacttggcttcagccaaattgatttgaccctgcaacacaaaagattaaacacaacatattcacaaatgggtattgatagcagatgaagaaaagaaaattaatgccctatctaatttacgacgcaattttagattaacaaagggaaaatttctaagttagatttgattcatttggaggagaaagatttatggttgttttattcacctgtagaaaaaaagataaaactacctacttgcacccaaaacaaaaatatccaaactttagaaaaatcattcaactcaatcgaggattccaatgcggataattcaagtcatgtaaaggatgttctgcattaaaagtgacctgggatttgacag

SEQ ID NO: 271522 - DNA, 641 bp, Cannabis indica
aaaaaatcataactcgaccaaatgaacctcaatccaattcaaattttccagacctgttctatacaccctagagaacattttcaaagccacaaaacatccaccaatacacagaatcaaaatccaccattaaagctccaagtttgagtttaaaacacaaacttggttaaatctaactaacatgcaacaaaacctgctctaatccattcatctgaacataattaagctttagaaaacaacaataaacacatacagtagctacagtaagcaaaacctcaaagcatgcaacttttacgtacttacaaatcaagaaactcaagaaaacaaagtcaaaatcttacctagagcttaagcactccaaaaccttgaagaatcttgcttgaaaggtagaaaattacacccaagcccttgctgttttaaggggggccgaaaaagagagagagagcttgagagagaaatgctttttttgcttctttccttactatgaatttcttgaaaatgaattaatattcttttcttaaatcaactaatatcagcataaaacatcaattaaactaagtccactaaaggacaaactaccaatggcaaaaagactaatttgccctcacttatgccaaaaattcataaagtcacataagggtatt

SEQ ID NO: 271523 - DNA, 1127 bp, Cannabis indica
aaattagcattggaatagtcaaattcaaaattagacatgtatatgtaataaggaattatgtgaagaattatcattagagtcaagtcgtctataatgggagaaaaaaatgttaacctaagagtaagagatgggataggaatttgtaccctccattattattattattattaagataaaagaggcataagtacctaaaattttaagtttataggtagcataaatttaatatttattttagtacctaatatttgtaaaactgtaatttttatacagttttattagtacaaactcgttttgaatttatttaaaggaacattttaaaaataattgatactatatatttcagtctagacccaatgatctagaatctggactttatgtgaagtctatttaaaaaaataacagagtttgtactgacgaaattagagaaaaattacagttttacaaacattaggtacttatgccgctaaaaataaacattgagattataccacttataaacattaaattttgagtatttatgctactatttatctttattattattattattaagataaagatggcttattattattattattaagaagataaagatgggtttagaattagattagaataacttagaagaaactataattttttgaggcatattattatgacccaccatcaccaccacctttgtttgggggcaattatttttccaacttcaaactcaagattatatgcttaaaagacaagaatatcaccaaaaataatggggggcattttggaccataactatttataaacacatctaattaagtttgcccttcttctagctaggttgaattgtcaatcataactaaaatggtaaacaagtcacaactcataacaagttgaaaatgtgcacctataatttttattatttaaatgagaaattaatacctaaaaaaataataataaaagcattgtctgatcaaaaatgaaatagttcccccattatctttatcctattttccctgtgttaaacgtgcacctttttctttgctatagttgtgatcggacctaaaatttttattttgtaggaacttatttatcataaaaaaatatttatacttatattactatatttatttaattttgtg

SEQ ID NO: 271524 - DNA, 1264 bp, Cannabis indica
taaaataatttccaacaggttgtgcatttttaagacccgaaatccgaaaacccgaactcgaccacccgaaaactaaacccgacccgtgtgcagccctaactgctaccacctatgaaggttttcatcccaatgatggtttcaccatatcaagttgaccttcaagcataattactcccaattaaaatcgtattaaaggctttactgcaactataccttacaacacttggtaagtttgagtgttgttgtactaaagtaaagttcaaaatgttaagaaagaattattattgttatttaataatacaataaattgtatcaaaatcttaccaatgaaaaatacatctaaaaaaaaataaaaataaaaaaatgatcttaactacttactacaaaatatagtcattccttcatgataaataatggaacgtttttattaagcactattggtgtctaacatatgaagtagtgctttgtgaacattaataataattcaatgaacaccaatacacaattgtttaatgggttctaaatctattaatgttgttaattactgactaaatatccaataataattaataaattaataaattaggtaattaaagaactaatattgtaattaaaaattatacattaaatactccataattattaatggtactatttaagtaagaaaatgttcataattatttgacacaatattttatcacaacatttaacatagcattgaataatcatttttcacaatgcattggttttaactttggatatatacacatcatctaatttatacttatgattgaccagattagagaaaaatatgattctttggttaaactttttgacaaagttttgttacagaattatcaaatacaaatacaaaattaaattcaatattcaaatataaaagataacatgaagttttcatcgcatttacatgcttctccttagttcactttctattctcagcaaccaaataaaaaatgtgtatagagagatgaagaagagggagtgagaataatttttaaactaacgagaatattttatcctaaactaaactttgaaagatggagaagactatgaatgggaagaagattacggataatgtgtatggagagatgaagaagagggaggagtgagaataattctaatcaatttcaaaagttaatattttttcaaatatgtaattaaaaataattaaaaaataatctagtgccacccaaatattatgaaattccgtattttaatattcccagtttgattatttaattaa

SEQ ID NO: 271525 - DNA, 515 bp, Cannabis indica
tcaagattagatcattgatctaagattaactattggagatttacctaaaaaagatattatgataagtttacgatatctcttctactataaatatcagtctagtttgatgtatagtcaatacatatgatgctagtttactttactaatatccttaattagatattccatgtatccaaatgtaaataaaccccattgttgattatcacgtcagtgtaaatctagtgcattgataaattatgggactaaataatttgacgcatataattacaattactttctactataatgacatcactgtaattgtgaataaccacatgtttgggatttaatagagcttattattaacgaagattttcgttaactatatttaatcctaaattgtgatagacttgcacagaaattaaaagcagtaaggaaaaggtaagaacacaaaggttcttaagttgttttgcagttaaaattctgcataatccacgagtcaatcttattagatttttgatatagctctcaggcct

SEQ ID NO: 271526 - DNA, 1273 bp, Cannabis indica
actgatattttttagttgttctactgttgttttgagttgttctgttttgtgttctactggtatattataaaaacacagtatttttgaaaacttttacgtgacagtattttttttgtaaaagttaacccaaattttaatatttttgtaatttttttttttaggttttttgggtttttggagtgggtgattccgggtataaatgtgcacctggcaaaggacctttttgtaaaggaaaatttataagattctttctcgtaaatattacgctaacagaacccaaccaaaaataactttacaatttcatccctatcactatcaatggcagaatctaactaatttcattttcaggtcattttccaacctcttcaaaccaaattaacaatctttacactcaatcttcttctccaactatttggagatgaaatgccatatctcatcaaaataattaaataaataaataaattactccatgttgattacactttagtgtttatcttcaagaacgaagaaggcagagaccagtctttcacaccaaaacgcgttcgttcaaattctcttttccattccgcgtacgtatcaaaatctgataatcaaaactgggtcgatggaaagtttccattttgtttcgaagaggtggtacagtcttcttctgttctccatttcggccttcacaattcagcttcgattttctcaactgtatgagatttttttttctttctttctgatatttggtttaatgggttcaagtgtttgagagaagtataatctatttattcaggataattttgtgaataaaaatcttttctctggtgggagaacatggattccatggagtcttgttctgatcatctttatcctctaacaagtttacagattgggtaagtgactattcatattcattttctgtattcagctaagagtataccattcatatgagttcatccatgttttactgcttttgtttttttcatttctttgtacctgagtttgcatattacaatggctaattaggatttttttcttaacacataccaaatcgtgcctccgaacttgaaaagttcttcagaagattgttgaattaagagttttcattcaatttcattcaattttactaacagcagttgtatggacggaatacatatacatttacagtcaccacgttaggcttagtaaaattaaacgaaatttgacgaaaatttttaaatacaacaatcttaataacttgtggtaatttttaatagtctgaaaaattcaaaaggcacgatttagtaca

SEQ ID NO: 271527 - DNA, 593 bp, Cannabis indica
aaaaaaaaaaaaatcgtacctcatatttgtaaaatggttagattcgattttggttaattttttaatacaattaaattaatttttttttactgtcaatgtgctcaaaattgaataaaaaaaagaaaagaaaaattgatcatcctatttataaatagtttggcaaaaatcagatctagagacctaatttccaatatttttacaaaacacatgcatgatttaaaaattgacatgtattttaaaactaccgagttcaaatgggtaatatgatgtaggtaaaacacaaagtgcaaaaaaatatatattaatgttaaagttaacttacagatgatgttgctaggtcatttgtaagtcgtattattatggcactgtgacgaattatggtaggataataaccatgttccaagcattcaaaaatctctttattattatttgaatgagaaaaataagcatgcacaataagaactggtgctcccactgaaatccaaccattttcaatatattcttccaatgttggtgtgtatccactgtagtaccattttgcttcttgtagaaaacatctacacatatctacccactacacaatgaatatcatt

SEQ ID NO: 271528 - DNA, 1378 bp, Cannabis indica
ttttgttaggcgatcaactaatagggtagctcataacttttctagagcttccttatcttatcctgattgcagtttcaatttggggtctgtcccaattgatttgctaccttctttggtggcagaatttaatggttaataaagtatgattttccattcaaaaaaaaaaaaaacatatcatcccaaacattatcataacaaataggaaaatttacgacataaataattattttgttcaatttattgctattaaatacccaaagttgctattaaatatccaaaatttgaaaatgacgacaaaagtacttaaaacctcaatttctattatttctgttagtactcattttaatagttctgttaagtcctccaagaatgcgacatgtcgattttcaattggtatatattatcattaaaaattattaaaataattttaaaatgaaaaataaataaataaaatatttttttctttctttcttctctctcttctccgtctcttcaatcttttccttctcgacttccctctcgcccaacttctgatcagccttgggctctcttcggccattgacaacccaaacggaggccacttctagcttctccaactcccaaatgtctcagccccgagcctcactctctcgatcacctcaataggcgtccatgggattcacccgtcgatcgacccatatcggcctcgttcacctagtgctctagttctgctccaaatttgcgagcttgggctggaaggaagctcgatctgagatcagagcgagaagaaggaagctccaactctgtttgaatgtttcacttttcaaatgcccaggaagtgggtttcaagaatttttttttactagtatctttctagtctaggtttcaatcttttatctgagcaactctaccaactgataataattcacttgttggtttgtcaattcgattaggtgtttacttcatttttcatttaagttttgaaacttgaaatttgatggttttattttgtaaggatctttttgattgaataagcttggcttgttggttttttttttgaaaaggcttgttgattcatcttgacaaaagaagaaaaatgagttttttagtggcagcttggtaaaacatttaagtttgaaaaatttagtggcaggttctataggtctaattcatcttcaatgaattcatctagattaattcatctataggtctaagtttataatatcattacttgtatataaataaaaattgtattgatctagattttgagagttaataaggtttgttattgattagtgaaaaaattattagattatttacaccacatactaaaatttttatttttttttatatttttactgtagagtcggattttttttttcaaaaatactatattttt

SEQ ID NO: 271529 - DNA, 685 bp, Cannabis indica
atgaaatctgtatatcatgtgtgaaattgaataatagtggtcacatacttttagaacggacacacttataatcaggataaaattatatttgattattgaatagaatgtgaattgtacatatattttaatatatcgcaaattcattgcacatttagaatatttaaatatcattcccaagaaaataatgaacatacattaaattctatttcaaagaatatagattttacatatattagtaatgctaaaaacaaattaatatatacatattttattatttcttgaaatcaatagtttcaaactattgttggtataagatatatatatatacatttactacttaattcagtttgcatattcctaaaagtgaatatataatttactaatattatagtaaaatttattagtgatccaatataatctaatataatcaaagtgataaaaaataacaaaatgattatttgaaaagcttcttgaaaaagtcttaaatataattgctacttgaagtagttaaatatctttgtatgtacctagatgtatagtttttatcaagtcatgaaagtgacaagtcatgatatttaaactattgaatagtctattattgaccgaggttttcgacaaccagttaaataatatgtaagacgagttgtaggaagtttaatgcctgggatttttacgtggttggggc

SEQ ID NO: 271530 - DNA, 712 bp, Cannabis indica
ctaattgtcctactaatccataaactaaacatacggtcattacaattatcccccgattaaaaggattttgtccttaacatctaacatgaacaactctggatattgagtccttatgccagactctagttccaaggtggcttcctccaccttactattcctccagagttctatgaccaaagctatggtcttgtttagaagaacattttccttcctattgagaattcgaactagttgttcctcataggatagatttgaatgtagttctaaggcttcgtaacttaagacatgagtcgggtctgatacatatttcttcgatatttaaatatataatacattatgtacagctgataacgctggtggtaaagctagctaatacgctacgtgcctaatcttctcgagtatctcaaatggccctatgaacctagggctcaacttgcccttcttcccaaagctccttatacctttcattagtgaaattcataggaaaacatgttctcccacctaaaaatttaatatctctgtgcttagggtcagaataacttttcttcttactttacgaagcaagcatccaagccttgatcttgtctatttaggggtattcatccaatccaattcgtactattttgctcatagtgtatccaatccacactaagtgcagattttattttttggatccaatccaatccgcacaatagatcaaatccaatccaat

SEQ ID NO: 271531 - DNA, 805 bp, Cannabis indica
taaagttttaccattggagatgctctaatatacatatcactttctaaaaatactataattatgatctcacacattattatatatacataattttttttctttattaaactattatctatatatattgtacttttaattttttattgtaaaaaaacataccatcaatgctattgtgtgacatcaaaacaaatttcaagcattctccaatagtctaacatccttatattttaccatttaaactttctacctcatcgagcatcctccaaaacgctattattagggatgctctaataccactatgaggtgacttcctataattgctagccatttactaaaatttgtattgaaataaaatatgtgggaccccataataaattccaaaagcaatattacatacatcattgccatatataagcatttctctaaattaaaatacgtgatgtagaattttaaaatgaatgaatagaaacaaggagataattaatttcacgtatatcgaaccggtaacaaatatcaatgcaataagaattaaggaagataaaaggtcaccataataatattttcgacccttcacgtttctcacttttcaataaagaagaaatttattatagaagataaacgataaacgataaacgatatatacagtatctaataatatacttgtactaaaaaaataatattctaattgagaggttataactaaatagagttagattttaaaaaaaaatcaaaatataaaaaaaatatcaatgtaataaaattaccaataaacaattcttaatctatattatattagaattatttt

SEQ ID NO: 271532 - DNA, 855 bp, Cannabis indica
ttcataagttgtaatattttgattaagttattttaaatctaattatgattaggcttatgtaagattttaattgcctaatttcaaaaagatttttaagtatgattttcatttttctatgttttcaattcttgatttgactaaaacatagctaaattcattagctttgaaaaatacaaccaaggaagtgtgaatttcaaatatggtacacaacttttggagaaaagctataccaaaaataaaagaaaattaagtaaaattttaaactttgtttggttagggagaaatgagatgataggattaaaagagtggagaagaatatgtgtggttcttcttaccatgaaattttatggattttttttctttaattttatataagagaaaaatataaaaatttactaaattcactttaatttaaaaattaataatatggttaaaatagtgaaagaacaaatattaaatattaagtatgcaacttacggattaagagggaaaaaattacagatctactgttttcttaatatatttatcgatttggatttgtttaacaaaattatgagtggttgtttttttacgatgttcactactcatctccgttaaagattttaattctcatttcattttattcttattagggactggacaagaaatctccaaatggagcaaggaatttcctaatataaaaataaattttatttaaaaaaatttacatgtttaaaaatattaaattacataacaattaatatattacacattatttatttttattttttggaataaaaaataatctttattagacagaaacatccgctaaaacaatagactgaagagcaaggggaacatcactctcagtaaaac

SEQ ID NO: 271533 - DNA, 560 bp, Cannabis indica
caaggacccgaacccacacccggacctaaacccagtcccaaacctaaaagtggacccgaactctttacctgtgacccgaaattggaaccaaaaccggaagttgatcgtgcctggaactaggacttggacttggaatcataactaaaattttacctaggtccagaaccgtaatttgaacagaacacggactccaaatctgacctagacccgtattgggagtcggacccggaaatcagaccaaaaaatggaaccagactagcaacacagaaccaggtcgggacatagagctgcaccccagtctcgatcctaaacccaaacttagaaatgggacctggacctgaaccataacaagaccgagacccgtgacagtgatctagatcttgactcgggattcaggtaatggggcctggaatagacaagtagttggtgtctagatctgggactcatacttggtccagaatctagacgaagaatcaaacccgaacccagacctagacttgggacccaaattagaacctgaacaagaatcgccgaacaaggaccctagaagaagactagga

SEQ ID NO: 271534 - DNA, 1028 bp, Cannabis indica
tctctctctctctctctattctacactgaatcaaaacaaagttaacaaatcaatctatagaatatgaatgattttcaagtagactcaataacatgattatgaaaaatttcacttatgtatacaatctagaatttcaattcaattacgcccttgacaaacttcaattgaatttcattcagcttatgaaactatagaacgtaattaactaacaattgaaccactttatgcatgctaattacaatcatcaatccactaacccaaaatttcatatgcttgcaatacttactattctccactaatataaattaattcacaaccaagaattagaaggtctttttaggcttatagtgttaggctttcctatatcataagcttctccaatcatgtcatccagaatatttttcacacaatccaaatacccttttttctaatcacatgagagaattgtttttctttttttttttcaacaagattgcaataactttatatttatcttttctgaatttgacactggatgtgtaataccctgaaattaagaaaatggattagtaaaaccctaactagttaattgagtactattgtggaattatattattatataatttattatatgtgaattaatatgagatatgacatgttaagaccccgtaggtgagctaggggcattttagtaattttgacccgagaatggtaaaatagtgaaattaatttatttacgtgcttatggacaatattattatatagtatgcttgtgttgtcctttttgcaggtgtgttctgacaagttggcgcggtatagttacaaccgggtatttcgggccgaaccgggttcgggccgaaatacaattttgggattaattattggtattttatttatgtgggaatatctgaaaattatttgagtttatttgtgtgtgcaagtggctattttacccttgaagtgcttatgtgggtgttttatggccttgagggcaattgagtaatttttccattttggagtaagattcataaaagggattttaagcaaaa

SEQ ID NO: 271535 - DNA, 1976 bp, Cannabis indica
gaagaaggtggtgtagaagcctggtactccggttgctgctatggagattgctccagttacgcttcctttgatccaacaggaatcgtgtgcccattctgagatttttttggacccgtgcgaagagctagaaactgacttgaaggaaggagatgaaggtctaactggggttaattccaattctcgttctgtaagttgggtagaggaggtagagatgtcagattttcaggcttcggcaaaggatgcttggagcaaattcaaggtaaatctaatttgaaccccttcatctaagttggattatactgaacccataaaaattggggatcaatttgttgctaaacttgacctagaagaagtagaaattgaggcgtcatattggaaatctgcaattgtccgtatagtcctaggtgcgaaccctcccttcaaagtgtttgaaggtttcattaagaggattttgaggaacttgggagtggagaaaattgttaggatgcataactattttacattggtaagttttagggatgaagttaccagagatttagtcttagaaaccgaggtgtttcattttgacaagaaacttgtgttactcaggccgtggactacaaacatggatcctaatcaaatggtgaggtatgtccctgtttcggttagactaaatagcttaggactgcaatattgggggaagaacacattgagtgctttagttagcactataggcaaacctatcattgtggataaaagcactcctgagaggactatgatcaaatttgcctgagttttagtcgatgttgaaatttttgacaagcctccaagaactatatcatatgttaatgaaagaaaacagctagtggaacaaactgttgaataagaatgttttccttcaaaatgtgttgcatgtgctctcttgggacgtactgtagaaaattgcaataaaggcaaaccagttgtttggaagaagaagcaacaaggggagaagaagaagggcctgatggacaataaagggaaatcaggttctgaacttgtattacaacagcaagctatttctatcgtgagtaacacagaagaaaaattgcagtagtttcatgttgttgcaaaagaaacttagatggtggcacaagataatcataaggaagtggtctttgatgatgataactcaacaattaaggttacaaacaagacgaaagatgcagggcattggattactctacaaaggaaaggtctaaagacagtagtgaaattgagtattaaagccacaaatagcagcgattatgagattttaaataatgatgaagaggaggcttcgggttctgatccgacaacaattaatgatggatagatacaatattatgggttggaatgttagagggctgaataaataagataaataggtagatttgtttgatatgtgtaatgataataagttcattttggtgctctctttgggactaaaattagacacgaaaaagctcagaatatgatgaataatttccttatttggaattggtattccagtcaggttttgtcctatcgtattatgctaatttcggtgaataagtgttgggttttgtgccctaaataaaactaatttcaatataatcagattatctaattaataaagatcataaatcattttatgttgcatggttcacatgatttattccatgtttatatttaatgtataaattctattaagtccagaacatatgtatttgttcatgattatagtattgtcagcatagtggaatataatcatgattatatgttcaaaaagtttaattccctgattagtcagttcattggatttagactggcatgataattagcgataggtatacttacaccttggataagtgttatgtcccttctagggcattggcaaagtttaccagtatcagatgtatggagtatacattggaagagaccaatattgaacttggattagatatgataaatttatcgtaatatctattcaattcaat

SEQ ID NO: 271536 - DNA, 2900 bp, Cannabis indica
aatgcaagatttgaaaaaacttaataatttttttttatcaatttttttatgcattttaaattttatttcattccataccaaacgccacctaaaatcccgcttaaaaagttgtattctaaaccaatttaattttgacaagttaactaatttaatttatattaaatatactaactacttttgttcactctattaaaaatttaagtttttaataaataaaaaattcagtaacctattaaacttagattggtttaaacaccactatttatcaggcatcttgactcagttgtttaatttaatgtatatttacttaatgaagaacaagtgcaaacaaaatatcctaaagccatgtgacacatgtcctacacaaagaatcatcatatttctattgacaacaccacaaacaaaaagaaaaaaaaagatggatgacagctaataaagttgttcatgttcctattaagtagatagacatataaatgattgtgactgtcaaatacgtgttataaacattttcaaatcgcaaaaaaattaacttagatgattctttaatatggtgttgtgaaaggttgtcactaacctcgcttactcttctttgtattgcagcgtcgatacatttgatgaccctttccttctctccttcagtatcaagtgtacatccatccatgtggcggatataatattcctacagttacatatggtgtaataatttcaatcaaatttctaggaataaattaagccatatatggcaaacgtaccgtaactgatttagatttaagaggcagcaaaaaccattgtttcaaacagctcaagtctcatgtcaatgcagaattttatttgataaccccatttcattggtgggtactaactaacagtcaattatcgaggatgttcgaaaataaagaagttatttatattacagtgctgcaccaagcaatgcatatgtgacatattgaagagttgggatgttccaaagcaagtcttagtacaagatatgatctttcaatagtactagatttaaagctagtatcaagattaactgtacacatacctgagatgcgtaaggggtatctgatgagatggtagcatgaaaaacaacatattgcatgtccgtcagtgtgcaaacaatgtcaaacatcagttttgcacgatctttacagcgcaccgtcactactgaatatcccttctcttcacaacggtctattgtgatctttggtttgaaggaaggagaagaaacctctttattaactccactactctcataatctctatcagcaaataacatctggtggagtctccgatcaatgtgagtaaatccgactgagaaactagtgtaacccgctttctcatcatcttcacaaccccgtagaatgttttttagctgctcttccattaaagacaatctagttggatcctgtacctcttgacatgtcatgttatcattaacataaagaacacatgcaatccgcccgttgtgagtccaaacttcagcagcagccacgttaaagtggaggttggccaggaccgctgagatctcagacaagagaccaggacggtctctaccgatgagttctatggccgtctgttccccaatagaatggacaccaacttgtctccctggtgtagtcttcagtccctctctggtttgtcctccctctctggtctgtccctttggtcctaaagcctattgtaacaaacaagtgatgacaatgtaagacaaatttcgcccaatctgtggcaaaatctgtttctcttcgtgtggagcttttcataatgtcatgaaaggatttgtatgctcttttggtcaaacaagaataagtccgttttctggcacgcagaaagaaggggtataaagtaatctgtcatgaagaaaataaagtttccaatattgccagaacatgtatataagagcttttaccctgatggttgatgatgctttctccctttggaatgtcggcttaaaagttctataaaaactattttgacaatcataattatattgatttctggtttagctagctaggatgaacattttctttggtttctaagtaagggacacaagagcataggaggatgataaagaagcaggcataccttttctatgtactcaatggtttttctatctgtaattttgtttccttgctgatcagtgacatgaaatactggaccaaaagcaaatcaagaacatcagaaatagtactttaatattttactaacgtaaataaatttccaatgacagaacgaggacaattatatacatatatatgcatttatatgtatatatgtgatgtctctacaatccaagcattcaaagtaaatacgacaattttaccatccatgaaccatccgccatcagaagatacataagctttagtgatgatgagatcaatgtctgataatatctgcacaacttcaagcagaattcctggtttgttcacactatccacctacacatctcaattataccaattttactcattataactataaaaggtttaggaaggggacgtacactagtgaaaacaaaaaagtgtccaaccatagtaatattcttacctctatggaaaataaggagaaataagaagcattaccttgattagagtacagtcggagcatgaagagttgtcaactgacaccctgaaaagagaatacaaaatagaagaaattatatagctgacaacgccaatttgacatatgcagccaatctagataattccagcattgcgttatgtggcaaataaattgagcaccacggtcacaaaagcaggttattaagcctgaaacaattagatcataaagcagaatgaacaacgccattataacactagatgctactgagatttttggtcgtggtagcttccccaactcgttgaactcaacacatctagcacccttttcttttttct

SEQ ID NO: 271537 - DNA, 721 bp, Cannabis indica
aaaataaatcaaatgtagatgctcttaaggttaacagtgatgatgcaatttttttatctgtttttattttagtttttttgataaaaccatttgagattaaaacagtcagttagttagctcatttttctaattctaatcctgattttatttccaacaaaaaaatatccatattaaattttttttggtaaatcagtcatgaagtgcattactaaaacgtttttgtacaaagctaagagcacctgaaatagataggcctcaattctatttacagtaggtattcaatcaattgctattagttacaaagcatcaaaccattgtagatctttttgctgtattttctttggctttacacatgtaattctattcttgactgctacttgaacttgctgtacaattgtgtcgactggaacagcattcgcattccatatttttttcatttctgcacttccagatcatgtaaaccaattctgcaatagctgctgcaaacacttctttcttgaatttgtctatctttgctctttcgatccaccttataatgttcttcaaggagaaagtaaccatattccatcccagccatctctttatctgctgaagtccttgctgtgaaaaaattgcaggaaaaaaacaaatgctgaaatgtttctgtggttgttttgcacagtacacactcatcatcattcaccagttgaaacctgtgaagtctttcttttgttttcaatct

SEQ ID NO: 271538 - DNA, 1200 bp, Cannabis indica
aaaaaaataataaaatgactttttgtttttaaaattttgattttcaatttaaaaattgaaaagtaaaaacagttttataaaacatgtttttgaaaaatattttcacttttataattttaaaaatagaaaactgattaaaaaagtgttaccaaacgaacccttaataattttagaataatttacaatatagaaagcagtgttcaaacagtctatttcacgctcgtataaaataaaattaagagtcacgtatgcaacatactgtttgaatcctattttaggcgtgttaaattgatccaaaagtttcaaaattttgtaagatatcttaaataactacagagtacacgagtatacataacttttttactttttatttatttatttatattttaagatatttttacaatgcacttatttttaaaaaagggtttatcgacgcactttttctatttattttgaaatcttagaggatttttaagttcattattttttttttatataattgtctacgttgtagttatttaagacatattgtaaaaaaaattgagaaatttaaaaaatttaacattctgaaaataaagtttaaacaatctattccgcgtgcatataaaataaaaaatagatgaccatgaatatttattagactctaaaattttttagaggatattttaaataattacaacatagatgactatgaaaaaaaattaaattaaaagattctcttagatactcaaacaaatagatgtgcatcgttgcattgtataattttcttatattatatattggaatattctataaatagctctttaaaataggtgtaccgatacacctctgtatgttttaatatttgaatgaatttttcaatctatttttttttttctaataataatgtgtgtgatagttatgtaagacattctgtaatattttgataaatttgtaataatttataatacaaaaattaatatttaaacaatatatttcacacgcatgatatttagagagatgcaccatattattttcctatactatatattttgtcttttttattaaaaattaattaaatgtttgctaattcactaatccgtagtggtcaaatgaaacgtctctaaaatcaatcaaataatacatataagtattatttatttttatttttttattatttttttgaaataaaattgattttttaacaaaattctgcaattt

SEQ ID NO: 271539 - DNA, 1238 bp, Cannabis indica
tgctgcagcaaccggaattcccaccaaatagtatgctccaagattcacatatgcccccaaatcttgccatccacaccctctagcaatgcctggtttaagatgagattaatcatgagtgactcgagattcgagaatgttatcactattgatcgatcgatcgaacaaggaagaaagaactagggaaaaaatacctgaaagagtagcatgtaaactgtcgaatatgacagatagacaaactagaggagccatgttcatggcataatccacaacttctttgtcattggtaaagaagtaaccgaaagcttttcggccagcaaatagagctgagcttacaataatggattctgagacggaaagaaacatgacagcaccaactgcgagacgagctgctcttggtttgcctgcacctaattcattcgaaactctagtgctattttgtaccaaaaaaagaaagaaaaaaataatcaataaccaacaaaaatgttaagaattattttggtaatcgggtaaatgttgtgtttggtgtgatttaatctatcgaaaaaaaatgttaagaatacttattcatattaccttccagctgaaccaagtccttctggtattgtatagagcgttgaaattgtagacatactgttatcaaaacaaaaaacgttcacttaattaaagttttgaaatccaagatatgtaaaatatgaataccgaaacaaaggtgataaagacataccaaacagataaaacagaggtttcgagctgaggattcgagagaagaccagacaacaaggtaattatctcgaaagaccaccactcgaggcttcaatcatgacatgaaacaaagaaaaagtagaggtaattagaagctttgtttggtaatgaaacagagtaaatacacactttttttgtagaatgaaaaaggttttttaccagctcatagcagcagaaggaatagcaaggcgaaagaactctccgcatccttgaaagagctcagaagaaattggaactcgggtactttcacatgaagaagaaaatgtcatgtacaaaaggagtaaaatcacattcaaccaatatgaaataccaatagatattgcagctccacaatgttgtaatccacacttgaatactaaggtccaacaaagaggaacatgacaagaaatcgaaacacatgagctcactagcaagggtttaatcaagctttgtgattgaaaatagcgaatgagcggttgaagtgttgcataagcgaa

SEQ ID NO: 271540 - DNA, 3200 bp, Cannabis indica
ttgaatttatatgcgtaaatttacattttgtttttcctctctctcttcccttttcctaattgattttggttgtgattcagcttttacttctagtcaaaatggacaaaacatgaatatcctgggaaacaaagttggccacgatctgcattccccagttattgatccgcgatatgtccaatttttgcaaagaacctctgattatccaacacgggctgcaactagtctgggtgatccttctttgataaaaaaccaattttctacttctcattctgatttggaagagcttcagaaagcataccttgagactttgttggttcaacaaaaagaacagttagaattgtcactactaggtaattctggtggtttcggtcaggataattatggaagtgcatcttatagacttggcacaccataccttggaaaccctatggcaaactcggttcttccatctgttggatctggaagtccaatgcttcagaatgaaagatttgcacgtttcaattcaatgaaaaattcaatggcaggatcagttggctcatggaactcagatattggcaataatgtagaaggtcgattcatctcatccttgttagacgagttcaagaacaataaaaccaagtcttttgaactttcagacattattgatcatgtagttgaattcaggtatgttgttattatttttttccccacttactacattattcctctcagatttatagtttattgccttccccttatttgttgcagcacggatcagtatggtagtcgctttatccaacagaaattagaaaccgccacccctgaagaaaagatcatgatattccctgagattactccacatgcccgtacattgatgactgacgtctttggaaattacgtcatacagaaagtacggcttttgtcatcttaaatactctaaaaccctatcttttcttccatttagagcccacattaaattttatctttgtatttgcagttttttgagcatggtacagcaagccaaagaagggaattggctagccaactgactggccatgttttgcctttgagtcttcagatgtatggttgcagagtgattcagaaggtgaatttttagtcataatctgtaatcctttcatattgatatgatttcacttcatggacaaaatgttgtatgttggtaagatctaaaaggggatgtatggaggtaaagaagaaggtacgatcgtacacaaatgtatatatgtagtctgaaaatctgttagtggatgggatccggcaccatttttttgtaactgttgtgatccttccgactcaatcaaggtgatgtaatagttagaaattttttggacgggataaaaagagagaagaggtacaaagattcttggaggatatagaaatattggagttggagactataggtacatgcagatggggggaaacaactttactaagtagtacatactttttttaatgctctgaagttaatatccaattttaaaaagatatggttgttgtaacagaacagtatattatgatcaggtcttttttaacttcaacgagtcagttgattaatgaagttgtcttcttcttgataagaaaaatgtcctggtattacattttacatttctaccccctcttcatttgtatagaggagatatatttcgcagcatccttcttactcatattttatatgattctaaggtaatcattcttgccatcaaatcagctatcttgacttgatgatgattgcatatttctctttattcctttgttttacaagggaaagctcaattattcttgttttatgaattgtttgaacatggtgtatatgagaagctaatgtttagatttatattacatctatgaagaggatgatgtatctttcttgcagagatgtatatgcataagaaagattttcttggctctcttatgctttaaattttgtcactcgcaggccttggaggtggttgatgtggatcagcagacccaaatggtggcggagctggatggtgcaattatgaaatgtgtacgtgatcagaatgggaatcatgtaattcaaaagtgcattgagtgtgtccctcaagatcgtattcagtttattatctcatccttttatggtcaagttattacactttctacccatccttacggctgccgagttattcaggtaagttgcttggttttttatttatttatttggaggcaatttgaggatattgtattgttttttctgatttgataatttgctactacagagggtcctggaacattgtgatgatttaaatacacagcaaattatcatggatgaaatcatgcaatctgtatgcaatcttgcacaagatcaatacggaaattatgtaattcaggtaagtgaatggtgatcaagtattctattattgaagggtcctgtcctttctggaatatatgggtttgaatcccatagcccctttgtggtgaactagacatttcttttcatcttagggcttttcaagacttaaggatattatattgtagaaagacatttcactcttatatatatttttgaaagctatgatccaatatgatcagctattactgcaatagctgtccatagttattttttccttccctgatttcaccttgcagtaagcactctactatgtaccttctctgtgagttcggcactgctagtttccaataggcttccttatcgcaaagcttatactaatgtgatttctagccaactttagccccccttaaaacttaatacttcatttgcttaccttttctggtttgtcgtcttaccgttcacacaaactgctttctctttctacctttatgcggaagatttctttgtttttgttttccccttttacagaactagtactttagttttaaagtttgttcttgattactttgtatcattcttttttcttttgttaatttatgttttgtttgtagcatgtccttgaacatggtaaaccactggagaggacagcaattatacgccaactcgcaggccaaattgtacggatgagtcagcagaaatttgcttctaatgttgttgagaagtgcttatctttcggcagtgctgaggagcgtcaacttttggtgaatgagatgcttggttacaccgaggaaaatgagcccttacaggtatacctgattcttactataaattatataaatctatcatataagcctgaattgataccttttttatagatcaacattattaa

SEQ ID NO: 271541 - DNA, 803 bp, Cannabis indica
ctgtaattatgtgttgttttctgtagttcaaatgtatttaattgagtggattggactaggtttgatgtatgctagatggattaaccaagtttggatctttttaactcaaaaaatatgatttctatggtaaaatgatgaatcttgttgctatgattgttgttattgtgtaattgtgttttttcgagttaaattattttggaataggttgatttatgcatgaattagtggctgtttgaggggttagtcaggttttgagtttttgaactcaatcttgaacctttaatggtgaaatgtgtttctgtgtttgaagcttggtttcattgcttgggttatgttatttggggtatttagaacaggtctggaaggttgcatgaagtttggggttgatttaagtgagaaatgaatttttgaagtttcctgcactgaaccaaaattccggtttagtatagcctgtaggaactggaattccggttggtgttctgggttcctcccagaatcggaattccgattgtagaaccggtctaccagttgggaaaattttgggaaccctagttcttcccatttttgtgttgtttagggtattgccatgctttttatcgatagggaaacttttagtttctagtttaagtccccgggaagtgatttagcgtgtcacttatcaattgttgtgattattatggtttaggagcctgtaaatcgccgagcagttcgttccactcaggttgaccggaacaccttaattcagaattgaggtaagattagcataacagtatgcatatatatatttacatgtttagcgtgca

SEQ ID NO: 271542 - DNA, 528 bp, Cannabis indica
agttgttcatcttttaggctgactatgttggagttggtttttggttttttttttgtagttgcttagtttttgtttgtcttttacatattgcatgcaaattatttatttagttgttcgaatttgttacttatgatttttattgttatacctacttccaggtccctcctaagagttcagagaagtttgaagactttgacatacccaaaaaaaatcatcctaaggtgtgtattttttttctgttttttttatagtacatttctgtttttgtttcttgtttagtattttgtattttgtattttagttttttagtcttttgttgttttcctcatgttttttgttgaaattgttgcaggaatgggattacataatgaccaaaagaatttgtttcttgcgaaagtcgtctccactgcttcatacaaggttatagataatattaagccttgtcttttatctaagcaacttgaaattttttcaaaaacctattttgggcatttcattaagcttcttgagttcaaagttcaatcgcaa

SEQ ID NO: 271543 - DNA, 503 bp, Cannabis indica
tttaaggcataaaatcccaacaaactcccacttgtactaatataaaactaaaagtacatttcaattaatcttatcattaagggtgagcaaaatatctaataaactgaccaaaccgagtacaccgaccgtccgaacaccgaaaaaatcgacaccgaaaaaactgaaaaaccaaaaaaatcgcctttcggttaaaactggcttaacatggtcggttttagtgtcaatggcaaaccgaccgattaaaccgagaaccgaccgaacatatatattatatattaattttgtacatatttaatatacaattttattaaactaattttacttatatcttttttatttaaagtctcaattatacattgttttattttattataatttgatgcatttacgtattatatacacacattcataaaataatacgagttttttatataactcattaccatattagtagcacaaataatttgaacaaatttaaaaaaaatttattttacattatttat

SEQ ID NO: 271544 - DNA, 354 bp, Cannabis indica
aatttttagttattaaataataggaattgacatttaagtggttaaatttgaaaattgacgtttttgagaaaatgagatgcagaaatgataaaacagcaaaattgcataagtgagacccattatccaaagcccatggccggccacacttaaatggattttatcatttattttttcattattttaataccaaataattctaacctaaacctaggtggttgcctataaatagatagtgatgggtctcattcaactttacatatgttaactttgtcaaatgatatttgagcctcctattctttctctatagcggccacttcccttctcttttctccttcaattttgaaatccttgagt

SEQ ID NO: 271545 - DNA, 1064 bp, Cannabis indica
aaaaaaaaaaaaaaactctcttattaagcattggtacatttattttgcctataatttttttctgttgttttggttttttttttaatttttcttcttattttctaattagtaaataatagtgtagaaaattatatgagtttaaataatatttagtttggtggaatagtaatagtaatgtaatagaagaagaatagattacgatatttatttttttttggaataaatattaaattaagtgataaattcacaaaataatttatactttaatttttattcttattaaaaagaaagatatttgagtttattttatttaatatttgtgatgtaattcttattgtatagtttctacactgtaataaaaattttattgcacaatataattatcattacattaaaatcttattacatcacttttaaaggaaaattgaaaattataacagcaattatgattttattacatcaaaccaaaccaaaccaaacatgaacttacatattatattaatattcttatattattttattagtatataataatagaaaaaaattatgaacttacacttaaatagcatgacaaataatatactttatcttaaaaaaatatgtatcacactctttttatttaaacataattaataagaaaaaacatatataattaacctttaaattttgatcgaaagtacagacacaactatacactagtatatatttataaatatatatattatttaacaacccaactcatattatatatttttaaaataaataaagtgtgagaacgtgggaagtcagttgaagttgaatagaataatagagtaataaataaataaaagaaagggagggaggaaaaggccgaaccggacggccacatcgtggggctaagtattgacattcttttttttctttgattccgacaaagtaaccgcattactcgttctctgtcttcttctattgggcggaaaacctactcaatgccgctctaaaaggccttaaagcccagtgtttattccctaccacttttattttagaaaatttacacaaatcacctactttccttttaatttttt

SEQ ID NO: 271546 - DNA, 578 bp, Cannabis indica
cttccctattttccagagaaggcctaaattcaaccgtaagctagtcgcgactagccctaggccaggtcgcgacttgctcacgaaattttctataaaatcaaaattcaaatttctaaaaccctctcagccgactctacccattttcctctcaaaaattcaaaaatttcttcaccaaacttcaaattctttcatctccaatccaatttcttaatcccaatccatcctagaacctaatttctttcatcaatctacattttccataaaaaacaacccaaatactcatcaatttcaccccaaatccgaaaatacattggtacttcatcttcaacctcaagcattcaaagatattcaacaatggaggtggagtaatacgtcttcaggtttgtaagtattattttctattaaattggaaaaattgcatgaagatattgagcattgtttgtgatttttgttagaattattgattgatataagaattgttaggtttatagtgtgatttgggattgtgaatgtaagtgtgtgaattaattggtgagttttcattttttggggatatagaaaattaaggggaggtgctg

SEQ ID NO: 271547 - DNA, 541 bp, Cannabis indica
atatttttgtcaattaaatatgccaaaaatggaattaacagggtgaaaacgaaaattcttaaactttgattagtataaaatattattataatataaaaacaattataaaagcaataattatctatatatctataaaattctaaaactaagagagatgatgtggcattctaagatttctatattatcttttttcttattttttctaacttttgaatatatttacaaattttagaataatatgcttcatagtatatgtttaaaaaaactcccacattgattagttagtatcttatatgttatgttgtactttataataacacattcaattatttacttttatttatattaaaattactatttgttttttctcacctcttatatgagtgactaattaacttaatattactcaattatcttaatttacaatttgttaatatatttcataaaatattaattataatagtattatataattatattctatatattattataaaatattttatcaatactaaaattaaagtttcttttaataaaaaaa

SEQ ID NO: 271548 - DNA, 658 bp, Cannabis indica
atcatcatcaacagtcaaaaataacctaaatatattttttcgtatttattgaaatatttattattattttaataacacatctttccctataaaagaagagctcctctccatcaagcgagagcatctctctctagtttctctctttagaaattagagctttcagacttgccaattttcttataattctcagcaagatggtcaaacctctagctaagaaactccaattcactcaaacatgtagtctctgccatgtaactctactcctgagattccccttaaacaaaaactcaaatcccctatttatatgaatttgactgtaccctcaatttctcagacggaatcctcttcattttttttggcctctcgagacttggagaggccatccgtggcctccatttcggtcttcaattattggagtcagcagcatcgtacacaattgagaaagagagagggagaaagacagacaatgagggggctcgagggtggaaggtcgagatttgagttttgagttttcggggttcatttcgaccttggtgatcgagaatggtcgtcgttggtcgggcttggccatggctgtttgacagagaaaagagaaagacatgaaagagggggtgagcccgagtggtcaagtaaaggagggaggaccgagttttgggtt

SEQ ID NO: 271549 - DNA, 503 bp, Cannabis indica
tgtaacaccatcaaagaagtcttactcttgtatgagagggccaccggtcagaaggtgaattttcaaaaatcttcactctatttttctcccaatgtcgcgctcagagatcaaaccctaatttctgactttatgagcatcccggtccgctcctccttcgagaaatacttgggactcccccagcacatcggacgaacaaaaaagcaattgtttcactatctccatgacaaagtctggggccacctgcacaactggaagaataaagttttctctaaaggaggaaaagaaactcttctcaaatctgtcattcaggctatcccaacctattcgatggcttgttttcgcctacccgttgctacttgccattctctcgagtccattatggctaatttttggtggggtgtcaacgaaaacaaccgccctaagactcactggaaaagctggaaaaaactctgcaagtcaaaacgggatggcgggttagggttccgttctcttgttcattttaa

SEQ ID NO: 271550 - DNA, 548 bp, Cannabis indica
cttgggggtagacttcaagtcgaagaaccaggcgacctcgtggggggaaggagcatcccatccttggtaagcgtagaagacgaagagggcggacatgtacttagtgccctttggagtgatctagaacgggcagaggccaaagaagtctgccacatccctaaagtacttgtgcaagggcatcagcgccccttgctagccgtgagcccccgaccaggcgcacattcccttatcaggatttgtggcgcgattgtcgtgggcgagaatgtagcaatctagctcgcccaggtacccgtcctggtcgagagttcagaggcgtgcctccgaaatcttggacggaggacttacccacctggcgcccaaggcaccctgcctcctatgaggaaccgcctcagcaagctcctcgctgacgtagtccacaccctcaacaagaacgtctccgttagcatcaactggctgcccagcctcgttgtactccccgaagttagtgggttcaacctcttcctctccctccgcctcggaaggactgcccggacgcacctcgtccagct

SEQ ID NO: 271551 - DNA, 3465 bp, Cannabis indica
taattgatccttgaatggtccgaatgagagctttgattggtatttctgaacaaagataataatagaatattggtatgggtcatcctattattatcaattatataaaatgttgtattaagatctggcataaaattattagtgggaaatgatccctaaattatttgaatgtgagttttggtaagtcatttttcatcaaatagaatattattaggagttgcaacttacaagcatcctatttgtatcaattatgtatcaacattttatatttaaattacaccaatcactaatatcacatcaagtactctagtgttggagatatatatatatgtagtggttactcgtaaatgagatggtttgccttcttgctacgttgatgtatatgatcttgaagtcaaactagtatgccatagccaacttttgaaggctttttcctattaaattttttatgtgagtgggcaagctctcaccatccaccattgtaagaaaagtaatgtcatcattgcaagatcacaatgttcgactacaaaccattactcaatcaaaatcatccaattttgattctcttatacatggaataataataacagtagtaattaaacttcataccccccattatgcaattttattacttttaaaaactagtaaatagaaaagaagttctcaatctcagctgctgctgagtactaataagttagtttaaccatcttggtggtgcctttatgccatgaccaggattcagagggtgacttaggcagtggaggaagcaacacaaccttgcggcacagaccaaaaggccacccttcacagtgacaaaactcttgaattatcgaacgcctttgatactcttttaagtcgagctcaattggacttggacaatgagaaaaacttgtattgacagaaagaaaaacatctttacttgcagcaacacttgaacaacaagaaaaacagcttttcactgataaaaactcttctttttcgtagtcttcattactatcatcctctttttgttcgagtccttttgagcttatgtatagttgtctggttattggagagtaataaacccaagaaaagttatctgagctcataaggataggcttcttcttcaacttctctagtgccccgcttcgaattgctgaaacaacttcctgatgagatgaataagaaacacgaaaagagattcagtaagaagaaataaaatgaacagcaattcagtggttttgagtttggaaaagttggtacctcttcttcatcatcgaaatcgcttgttgggtattcttcatcttggcctaaagttgaaattcttcctcgaaagttatggcaattggaaaatgcttcctttaaacaagcagccagaaatttgcatcccttggaaggatttgaatgctcttcatgacagaacacagtcattttgtttaaagaagagaatgttgaaacataaaatttggtattggctttgtgagcactgaaatatatacagcattcttgttagataatttcaactcgttttgatgaccaaattgacttcctttacctttatttgatagtggctttgcaccttatttgacaatgctggattttctatcctttggggtaaaggcaaagttaaaaaagtatttatacaagaattataaatgaactaatctttgaattggttttaagattcactcttgaatcaatgctattaaatttatcccactaagaaactgattttgtttgtttctttgattttctttgcttaagggcttatttctgtagttttcagtggctcacttcaagataaagttatggttgaactagagacatattaccaaacaaagattgccatttgataatgtaattggacaaatattttataaataatacctctttctgttgaagttaattcaattgaagataatattgcataataatttttttctttttcaaaggataatattagaaacaaacaagtaaacagcagccactacacatctgggccccacatccactttcatgggataaagacttagcccagaaaagaaatgaatagcatatataacagcaaaagtgaacttttgaattgcagggtagccttaactcaactgactgatgttgttttcttgatatgaaaataagtacttacttgaatttaatgcttaacaatggtttatgtgaattttgtgaaacttcaaacttcaatataactcaacagaattgcgtgcagccaatataaaagattttgttccattccatagaataaagtaagagaaaattaagtatcaagtctcacatattttaattttagtttagaaaaatgttaaaaaactccggttttaaatgtcatattgtatattattattggtacaattaagtataaaatctcgtaataactttaatagaaaattgctaactacaatgctcataaagcaataaaactcaattagtcataaccaaaatttcccctttttctattaccaagatgtaaaaatcatatcttgataaaaggggcttagtagaaactaacacaacttttttttcaccatattatgaatcaaaaagatctttacaaaacaagaacaagaagatttgaagttttgagaactttgattaaacacttgagttaacatctaatctaatttacaaacaaaccaacaagtttattaacatcagttggatgatttctgaagttgcttagaagttaaagagataagagattgaagtttagtaatggcggaagtctgacccggtgggcacttggaaagcgaaacaattaaacagcgaagagcctcatcatgttttccagcattgaaggccgtacaccctgccgtaaaggcttcatcagccattcgagcatcatagttctgagccactttactcgaatcaaagctcttctttttcgaaggagaagaagatgatggtgatggtggtggtggtgagcgtgactccaacagagccgtggctcgtgaaaattcaagattagatatggcagaattaatgtctaccattagagcatctggagaaagtgggaaagctttaacagtaccatcaaagacggtccaatgggattgggggcttattcttgcttctgctggaaccagaaggccattatgagccatgtctcttaaaattaaagaaccctagttgagttaagattgtaagaaacagtttgttgtgattaattcgtcttaattggtctgagaaaagtgattatcagttgtggtgtttcggttgattagggacgaggtttgtgagcgttgtttcggggaagactcgttggaacgaagcaagttttaggatcggatcggctgtgatagagattacaataatgatagggtcaaatctcattgattggccattctctaccctacttactctttttttcttttctttttggaatattcttagagatacttaacaaaatacacatatttttttatttatttattttctttcacatctacataaaatttgttacatttttttttt

SEQ ID NO: 271552 - DNA, 628 bp, Cannabis indica
gaaaattaattaatctttggagcttcaaaaacttcgagtatttagaaagaataaagtttttggagaaacagatattaggcacattttgtataccctcttttattttgaaaagttatattacacttgttataaattttcaaatttattataaaaactcttatcaaattaaattaaatttatataacattgaattttttttattatgataaaaaaaaatcgattgtcaaatttgatgcaatacaattaaaacattatttattttaaaaaataattataatattttgaaataaaattataattttaaaaatagatagatatatggcaacacttttataaatagtgtcgttatatgtttttattataagttacaacatatggtaacacttttataattgttgccttatacctacatttttagcaacactctaggagacaacacttttataagtgttgccttttacttttctttagttaaaaaaagtgttactaaatgtaattttctagtagtaagggagccatcagatcattagatctggtaaaaagttaaccatggctatttgcaatcaagcaataataggttttgaaaacttacaaacaagctaaaacacatactcatgcaacaaggtta

SEQ ID NO: 271553 - DNA, 2296 bp, Cannabis indica
tctcaatacaaatgcttccaaaaaggttaaagatccgatcttcttgaaaagatttaaagatctaatgtacaactactacgaggaggaggattttgaagcaagatggttagacgtcgtcgaaacccaacaactaacagataatgaatggtgccaaacaacattcgacacaagaaaacagtgggcagaaacttatttaaggggttcattcgttgcaggaatgagaaccacacaacgttgcgaatcgatcaactcagccctaaaaaaatttttagagaagaattattgcttgcgtgaatttgtaacaaccatagatatgacagtctcaaagctcagacacaacgagactgcaaatgacttcaaaagcagatgcactcgacctcacccacctaatcctacatgcttgaccacgtactacaaccaatgtgctgaattctacacaagaactatgtaccacaaggttgctgagcagcttgatttagagaataattattttgtcataagtcaggagcaagaaggagagtggcagatatacaccattggaaagtttcagcatccggaagtccgataccgagttcattactgtgaaggccaacgagcactacactgtagctgcatgctatatgaaagtcaggggtacccttgtagacatttatgggctacaatgaaaagattaaacatcagaagaatacctaatactcttctcatgaagcgatggagcaaatccgcgaagacaaatctccacctacattttaaccccccggcacaagaacaacaacacatttatgagatggctaggtttggatctctcagctcattaacttataacttcactttctatgcagcaaaaacagaggattcgtacacgcgtgcaaaggaagagattgaacggctaactctaatgttcaaggaagaatttgagatgagttccaatccagaaggacagacgccacaacctggaagatatcgtaacaaccccaacattattaaagaccctgaagttgtgagaacaaagggtacgggaaatccaagggaaggaccgaacggggagcagatcccaagaaactcaagacattgtcgcatttgtcgctcatcaggccatgattatcgacggtgcccaaaccgtcaacagaatactggatctcaggggcaacagtctgcacacaatcaaccaacaactgactcattcaatgaacactccaacgcgtatttcccggaaccgccttcctccacacaagaatcatactatggtcattcatataactagctatttttaaccattgatgttttaaggtttatgactctaattattgcttcaaaaattctagatttatatacttcatgttatgtttgtcgtgtttaaggtaattatctcaaccaatctcaaaattataattaacgaacaaataaattattttaggcaaaaaaattcaatcttataaggttaaaatttccatagtaattaattttttatatataaaataataaaaacaatacaccaacgtaaaactcaatgtataccaacacataatttcataagttataacaaattattcttaacaatatactacgaaatataaatgaacgtactcggtatgtgatattttgtacattaattttactaaacagcatgcagaaacaattaatgtacaaggtacgtaatataatgtactcaactacaatcccacaattacatacatgatataaaggaatgaaaacaccaaaataatcccactccgacaacatggccccactgcatacagtatatttgtacaattaactgccacgaacagtaaagttgttgtactttttcgtacattaactaacgtaaacagtaaattaattgtacatttttcattttttaattaaaaaaataaatgtacaaccggtaaagaaacttagaataactggttctcaactaaattaaataattaaaaaaaaaaaactattataacgtgggacctacttgtcgtacaacggattccaatccgtgatttttacttctggacacaaaatcgttcgcctatatattgatttgtaagaagatgactaattaactagtagcatgtaaatgattttgaaaaaaaaaagaaaaaaaaagttagtagcttggaacgaacacattatcacttacggagagaaatgaatgactcacaccaacaccaggtaaataacggaggagtgtacttgctacttattacacaaaaattaaaaaagaatgaatattaagattcttataccagaaatttgtaggttgttaatctaatccaatctcactattttgcttcataatacattt

SEQ ID NO: 271554 - DNA, 635 bp, Cannabis indica
taagtaaacaacttttaaaatcccatagtaagtgtaatttcctcaataaaattttaacggtcttttttaattttatatattaactttaatagaatatattattacttaacaaaatattttttattaattttataataatattatatatatttaaaaataaaaatcatatattttatataaagaaatttcaatttaaatttaaaatactagatatttttaatcatattttaattttattagtttaactttaaattaaaataagagacaatttcgctcaatcaaacacacaacaattcaccagaatattttacttggattttattgtacatataaaatacttctatatataatcacatccaaatagcacaccaatttagctgtaatagctaaaaaaaaaaacctcaaatatcaaatgctcaaatcccatttcagaattaagaaacatatattacctaatttaaaaaaaattaagttgttgcacttaacatcatctaattaaacctggttaaaaagaaaactcattatatgtgtattgcacgtaactaacctagtatatatatatatatggaacacttcttaatgggtaatacccattgatgggaagtaaaaaaaaattaataaggtaataatctaat

SEQ ID NO: 271555 - DNA, 1001 bp, Cannabis indica
gtgggagggtttctaaaaaaccatctcgtcatggcttggatggtgaaattaatatggtcattggtgacagtattgatgacgatccatcaacctagaaataggcaatggcaagtccagaacaaaaacaatggtcaaccgacatggattcataaatggatttcatgaaaagaaataaagtctgggaatatgtagatgcacctgatgattatcatccaattggatgtaaatgggtctacaagaagaaaagaggtgctggtggagaagttgaaacttttaaagctagacttattgcaaagggttatacccaaagagaaggtgtggactatgagggtacatttagtccggttgccatgctcaaatccatcaaaatatttttctccatagcagccacttttgattatgaaatttggcaaatggatgtcaagacagctttccttagagaagttcttgacgagacaatctatatggagcaaccaaaaggttataaacttccaggataaaaagagaaagtttgcaagctaaataggtccatttataggcttaagcaggcttctcgctcttggaacaaaaggtttgataaaattatcaaaacctacgactttcaccaaaaggaagataaaccttgtgtttaccaattcaaggataatcaagtggtagtattcttggtcctttatgttgatgatattttgatcattggtaataatgtcaaaaaagtgactgacattaaggaatggctaaacactcaattcgaaatgaaaaattttggtgaagctagttatgttcttggtattcaaatcatcagaaactggaagaacagatcacttgctctctcgcaagcaacttacattgataaggtgctagagtgattctcaatgaacgacaccaaaggggcagttatgccttgtagacatggtgtgtgactatctaaggagcagtgtcccagtgatcttcaagagatagaagatatgggaagatttccttatgcttcaacagttggaagt

SEQ ID NO: 271556 - DNA, 917 bp, Cannabis indica
gtgtataagtatgcaaacaagggtagccttgccaaagtattatacgattcaacagatcttgattgggattcaagggtgaaaatagttcaaggattggcccatgcaatctcatacttacaccatgaatgttctccaccaatcattcatcgtgacgtgtccttaaacaatgtactacttggctctgattttgttcccatattgtcagattttggcattgcacgtttgttgatccctaacttgtccatttggacaactgtggctggatcgtatggctacatggcgccaggtattactattttaattattattaattaagcatttctattaggcacgagtagtgttcccaacatcatcatggtactagacaatacttgtgaccttatatatattttttgtctacagagctagctttaaccatgcgtgtgacagagaaatgtgatgtctacagttttggagtagtagctttagaaattatgatgggaaaacacccgggagaactgttggaatctttatcatcagctcgttcgaaaacattattattagagaatatactattgaaagatgtgttagatcaacggttgttacctcctagtactgggcgattatcaatggatgtggtgttaatagtgagcttggcattgtcatgtactagaagtagaccagagttacgtcccaccatgcatttgatttcacaagaattgtcaacaaagagtgctcgggcttccatcatctctgagccattcgaaaccattacaattgagaagcttgctgcacctctttatgaattgtaagtgtaagagtaaatatttatttaactaatgagaattactcatgacttgtatgatgtaactatatgagccaaatcaatttgcacattaattgcttaagcaaaaactaagagaaacatctctcaactc

SEQ ID NO: 271557 - DNA, 1072 bp, Cannabis indica
tgtggtactataatttgctattatttttcattattttctttatctagtagcttttcttgctaagtcactgtaactcacgggtgcttcatggtgcaggtaagaagattagcagctgtgttcaaccatgggtcagaggtctcttagcagtgtacgtatcaaccgtgttgtcttgactttcatgaagcaggatcaacccttttctatgattggatgtataacctattcttgtactaatggatttgtaattagttataaaagaattttattagcaagggatccccatattacgacagtatttaaagatgaaagtctttatgttgaatttaattaaaggttttaattaaaccacacttttccaaaatttgtagattagtaataattagtttataaaagcacacacgtggcgtctctgagggtcagggcattacatccaggttcagatcttggtgatgctctgctacagaaaggaatcaagggctagagatctgaatggaaggagtcattatattccgctgcacccaataataaaataaacttagatatttttgtagaaatttaaatattgcttaatttatgatattttgacatataattaggataattattatttatttattatttttcttaaaataataattttctaaccatatctattttaaaattagtttattttattattttaattttattaaattataagatttgaaaatgaaattgaagataatttttttttaatcattgatcttattagatatttaatttaatttgataaaaataattcaaataaacctagatatttctaaattagtttttatttttgaattttaaattttgagagttttggggttggttttaacaaccctaaattttcaaaattgaggatgttagtttaaaataataatttaattatattaatatcttatttcacatttgttacatggacaatgtttgtttaattttatattgtttattcaaaacttttttttaacaaacctattatttatttgatctaaattgctatgattaacttgttgacagatccaatgatctgattttaatcatagtccaattg

SEQ ID NO: 271558 - DNA, 1878 bp, Cannabis indica
caggattagatcttttgatctaagatcaactagtgatattgacttagaaagatacaacgtaagattataatatcttaaccagatcaatatcggtcccagtccaatgtatactccataaattcgaaactagtataccttaccaatgtctagaagaacataacactatgcaaagtgtaagtacacttcatcgttgactatcacatcagtgtaaatccagtgcactgatgaatcagggactatgtcctttgaagcatataatcagaatcacattccactgtgttgacatcactgtaattgtaaatgactatatgttctggacttaacagattttgtatatattaaaccacaaacatgaaaactacatgtaaacataaatgacttctaatctttcattgataacaaattagattagattgaaatgagttttatttaggacataaaatcccaacattagcatcatcaacgatacactcactataacagagaatatacatgaggtatgtatatttcttggtgtgttgaaaatatcatcaagatctctaccaaacactagaaaagaaattttaggatcacagaatgatctttgattaattgttattagttgataattcgagaaatgtgtatttttagtttagttatgcgtacttggtatgagcaatgttgcctctaccgtataggttacattaatttactttatagtggtagttaactgcaagtgattgggaaattttaaagttatgttagctcaagagaaattgatgcaagttaaaataagtagaaatgaataagattcaagttgacaataagatgggaattcctcaagtttaagtgaacaaaaaccgataaggaattacaagagattaatgaagggagtgatgacaattaaattttattaatgaaagaatgaaagcaagaaatacaattaggaacgacaaagaagcatctactttatgataacccaccatgagcttaccttggagttaagcatacttaacttggggtaatctcaagatgggaaatcttccaatgagttatcttggaaagcgtatgagtgaggacaaagtacgctagaaagattcatattaggatgcaaaatcagtagtcgttctagagataatcaagaagaagggatgtgttaataagtagaaatttacaaggtattaagataagtatatattagtgggtggaaataaagaatgctctaattgaatatctatcagaaacgaatacttaacttattactaagttaagtcaatagatcaccttaggagatcccatagaaggaatagaaatacataattataaattaggtattgtgggatcttatgatttcgactgaatagtaacggttggagataccgagttaatatgctgtctatcagtatagataatttatacaataaataaggatatagaattcatacgaaggaataatctaatcttgtgagattccaagattgatatcttttgctatgatgttaagaattaaagaaggttattgagaagcatgaagattgaagtaaaaatagtatgatgttttattcttgaaaggtgggtaacctgagaagatcaatggaatattagaaacatgtcatgagtatatttaataaaggttagattatcttacaataatctcttccctgatgaggtttttatttaaaagaaataattaaatgtgccactggttaggtaccttaataagtgtggtatgagagaaatattagatacatgtcaactggattaagtaggctaggtagcctattagctagccttaactcctgcgttgtccggagtatataatgtgtttcatgtcttcatgctgagaaaatatatatcaaactcgacccatattctgagttgtgacgatgttaaacgtca

SEQ ID NO: 271559 - DNA, 1044 bp, Cannabis indica
ggtgaatgcataaaggtaaaagcagctgccacttgatttctttacgaagatagggttcacctcaaagaagcacgatacgctacccctataaatacactcaccaaagctatcagctaggaggacagacagagagaagtaaagaggagaaagaaggtgttcagtcccatcaagcttgtcttatcaatcttcaagaaattttcccttgctttctattccctttgctgtagaggctgtttgtaagcgtcgaagcataaacagcatgcttgcatacaaactctcttaatctctcacttcaaacctttcagaaaagataaactccaaaagaagagtgtgtttatatgcacgctctttgtttaccttcttcttttcctttcttatttatcttatttctctctacacaaaaacagtttgcgttgatactgtttctatctcactaaaatacccatttacacacagttgagaccattaatctgtaaatctccattttattaataaaacctaatatagcttaaatgctaccgtagacgtaggcaaatgattttctgccgaactacttaaatttgtgtgttacatattctatacatatatttatacttatatgcgtatttagcaatatatacatataatttctgcttataatatatatatatatattatgctataattacgttcatttacatatatattatgctataattacgttcatttacatacatattatgctataattacgtttatttacaatatttatattaagtttataattatttattacgcattatattataagctttgacttatttatttatcatatatttataattaaatgtttagctagaacccctaaacattttggcgactctgctggggagcgttttctttaaatagttcatatatacttatatatatatatcaataaatatacttatatatacttatatatatatatcaataaatatacttatatatatactaaggaaaacgctcaattcgttcacttgaaaaaaaaaagaattctgttctctcatctaaatccaaatgtct

SEQ ID NO: 271560 - DNA, 954 bp, Cannabis indica
ttcttactgggcgttagctcacgggtactgtttgtgcaggtaaaggcaaaactaaacagtgaggatggcgagcttgaggcatggattacatgttaggggattgtcacgatgttttggtttaaaaatatttcgttgaaaattatgactcgattacttttgtaaacattaatgtttaaaaatttataaatgaatcaagtgtttttgttttaaaataatgagatctaatgctttggttattttcgataaattagtttattgtatttattataaatagctttaaacggactagtaagtgtgacgtcttgggaaatcagggcgttacaatatggtatcagagcaatacgaccctaaaaaatctgtggttagccctaacatgtaaggttcatcgccacgagacgagctttactcactatactttaagtttttgtcaatatgttcatgttagttttacaaattttatgttgcgttacattttaagtgtgactagaaattttctttgtgtttagaagaatatgtcttagaattttatgggtaagactcgatcaatggtatatttttagaaaaatttaaggaaatatttcaaggtattgctatattacgtaatttaagtttgatattcgataagttgtacttattttcataaataacgagtataagaagagtgtttatcaaaaggaattatgttataagaacattggaatagagtatgttatgacaaaaaaaataagtttagttattatattagtatttctaatgagagtgtatgtttgaggtttaataaattagacatatatagctattggaacgttctttagtttgatgtttttttttaatttaagtgttaatgaatagataattttaagctctgctcttttattagaaataattaagctaaattttggttaagggtgaaatctaataattaaggttataatagaagaaaagattaaacga

SEQ ID NO: 271561 - DNA, 716 bp, Cannabis indica
atctaaagcgggaaatcatcgaattcttgataaggaaaaataacccacacgtacagaagtatgtcaaggccgatcaaaatcagaggagtgataacaaccaagactttcttccaccaccagtagatggacatctgcaagtcattattggaggcccgcacatagctggagattcaagcaaacctcgggagaggtgtgcccgaacagtacagcacgagaaagaagaagtagtcctggccgtagaagaaaggaagccaaaaatcccacaggcaggagagcccaccataacagtcaatgttgaagatgctgtcaaaatcagatttctacacaatgacccattggttgtggaagtccagatagccaacaggatggtggccagaaccatgatagataatggagcctcttccaacatattattcaagaccacatataaaaagatggtgctccaactcaaatatctaaccacctgtcttctgcccatatatggtttctccggccaaggagtcgcacctctagggaaaattcgcctacccctcactgttgggcaagctgcgacgagcataactataatggcacaattttttgtattggacgttccatcagcctttaacgtcatgttaggccgactagccttgtatgacttaaaagctgttacgtcgatattccattcatgcctgaagtttccaagaaagaatggggtatggtgtctaagaggaaac

SEQ ID NO: 271562 - DNA, 603 bp, Cannabis indica
caggtacactaattatatttgtagtaataaattcttaaatacaagtacatatatctaatgtatttttttggcattgtaggaattgagtaaggtgcaaagggaacgttcagcaaaaatgcaatccagacatcaaagtggtcggagtcgaatggtgaacgtgagggaagatgtggtaagtaattaatgatttctaataatgtgctttaatatgtaattgtactcatttaattgttataaaataatgtagaaaaaggacctcgtcgttcaagatctcccacgccaccatgtttggatcaaatctcggaccaagagaacaaaacttgtcattgattacgacaagaaaattgccgaaaagatagtaagtatatattaatccttaattgagtactactaatgagttagtatatataatgctcaattagaggagcaacttactcagggacaaattcagatccatggccaaaacgatatcctgacgcaggcgttcgggacaccaaatcatcctggacgtggcagggctgctgtgtatgctagtacttgagaaatgttattttcttagttatataaaaaatcataacttattttatttcatgatttgcaggt

SEQ ID NO: 271563 - DNA, 646 bp, Cannabis indica
atgccaaagtctgataagagagcaaggatccaagtgatttcgcaagtagcttgagccatagctcgatactcagcttcagcggaagatttcaaaagtgttggctgctttttagacttccatgagaccaaggactatccaaggaagacacaataccctgtgatggaccgacgggtgtcaactcaagagccccaatctgcaactaaatttttttttaagttgttctgcatttgtgaagttagattcagcaaaagcacacaaatgaggattagaattagcataaaaattcaggccttagcctggtgtgcgtttgagatattgaagaatcctatgtgcatcatgtaaatgaggggtgcgtggctcatataaaaactcttaaagtgttgacagcataggagatgtccggacgagtaatggacaaataaatgagcttacccataagtcttctataaatggttggatccgaaagaggagtgccaacatctttgcttgatttaatatttgcttccatgggggaagaggctactttgctcccaagaacctgtgtcatgaagaagttaacattggaatatgttttaccaggatctagatttactaacaagtatgtttcattacatcctaatatgaattctaaaataatgaaattaaa

SEQ ID NO: 271564 - DNA, 705 bp, Cannabis indica
ggggggcaaatgttatcccaatttttgcactctgacgtggcatcgcataaatggtgacacgtggaatccacttggagcatctcctcgggaagcatagtccgagcaggatgtctcgctagcatgcccagagcaaaggtttcaacgatccgcgcagagcaatcaacacttagcgaattcagctttcgcatcgtgactcatcaacgaaatccctataacttggggatcataccacagaactatggcatacacacgatcccacgatcccacgatcagtgtattcattatcaatcccacgatctttgtacctagcattgatcacacgatctttctgtttatacacaatgtaacgagaggggaaacacttcctctccaagcttactagccctataaatagtgatgtatgttcactgggcaaaaggtcgcaaacagattaattgagactataccctaaagatattatctaagaattatgtattcagagatactgttggaagagctataagaaaaggaaccattctccttgttcttaagtcaatacaaataacatgtgttatcccaattttacacttttacgtgcatcatgagaatggtgacaggtggagtccacttggaacacctgctcgggaagacaggctgagcaggatgcctcgctggcatgcccagagcaagatattcagcgatccgtgcagagaaaccaacacttag

SEQ ID NO: 271565 - DNA, 764 bp, Cannabis indica
cgaagttcaattggtggtatccttagaatatgtgaaaattattgacacttgtcgtattttttgacaaactcatgagtgtctttattgatggtaggccaaaaatagccttgtcagattatcttcttatataggttttaccatctagcataatccccacataagtcctcataattatctttaatgaatattattggcttctgctaggagtacacatcataataggggcattaattattctcttttataaagttttccctcaacagctgtatatcttgggattgcatacatgagtttacatgcatcgcttttatctattgaaagttcaccattcaacaagtattttatgataggtatcatccatgtgggacttgaatcaatcctttatatttcttgctcttcatcttcatagatactcagctcgcataatagctctactggaactaaattgaggttattcgattccaactacgatgccaactttgctaaagcatcaacattagagttttgttctcttagaacttgctcaattttagaataatcgaacgcctccaaattctttcaaactttatctaagtatttttccatcctagtaccttttgcctggtattcacccatcactttatttacaactagttgtgaatcatggaagcattgaattgctttgactttaagggtttcaacgatccatagtcctgctagtaatgcctcatactccacctcataatttgattcttaaatcggagccttagtccataatgaaatct

SEQ ID NO: 271566 - DNA, 723 bp, Cannabis indica
atgccactaaaaaaaatcattgggtttatgccgcttacaaactcaaaactttgggtatttatgccgctatttacccttatttatattgcaactcttaacttaaaagacttgattttcatgtaaacaaaaaaatattataactcatttggatctttacatttatataaaagcatatttaagagtaataactccacgagctattttttgtattgataatgagtagctacttaatgaatattggtgaaaaaattgtgatgaagaagtattgctgattaatttttgttgtgactaaaaaagtattagtgacaaattttagttgtgactaaagaaatattagtgacaacaaaagttgtcacaaaataaataaattgtggctaaaggattgttgtgactaattgtaaatttgtaatgacatcttaacaattattagtcatgaagattagttgtgactaaaagtgacttttagtgaacgcttattgttattgtggctaaaactttatcacaaaaaaaaaattgtgactaaaacttttaatcacaacttttttcatttttagtcacaattattgttgtgactaaaagtccaattttttgtagtgatttattggtctcggttggtttgggttgtacataaaatataatataaagggtaaatagcagcataagtacccaaaattttaaatttgtaagcgacataaacccaatgtttatttttagcggcataaa

SEQ ID NO: 271567 - DNA, 1002 bp, Cannabis indica
aaaacaacactgaaacaactcaacaaaaaataaaagaaaaaaaggattaaaaataactaaccatcttctaaacatcctcaacaccatatgcaatagcggctatatttgcaagtccagtcctaaaaaattagaataaaaaaactactaaaacaaacctaacccaaaacaaaaacaaatgtaaaattataaaacagaataaccacttagaaaaatataaaagaaccacacacctcaaaatctttttgtcaatgagctcatcaaatgtatttataggagaatcgaagtaaaaaaaactacaaaaacagacatagaaaaggaagaaaaatgtatttatagtcttgatcttctacacccacgaacagaaccaccacagtaacacaagcacccgaaaagcaaccattaattctgacgagatatagcaagaacaatgaaactgacatcaaataaataaatcatgacaaaaccgtaaaacaatactaaaacaaatagaaaaaaagattaaaaaaactaactatcttctacacagtctcaacaccatatgcaataaagactatatttgcaagcccagatctaaaaaatcgtaataaaaaaatcacattcttatttttcccaaaaacgtgagtgaaaatttcaaaaattaaagaaaaaaccgaaaagaagatgaagaagaagaattgaacaagaaatttttaaaaaaaaaaaaaaaaaaaaaaaaaaacaaaaaaaaaacataatactattataaaataactgctaaaaaaataaaaaataaataaaataagaataattgatatttataatttccttaaaaaattatagagggtagttaaaaacaagaatttaaaaataaataaataaataataattaaaaataaaataactgcaaaggtcaatattaccatgttaccatatgataaccgcaaccaccacatcaccatatagcttccgtcaaccaccatcaccacaccaactacactatattagacagtaaccactagtaac

SEQ ID NO: 271568 - DNA, 942 bp, Cannabis indica
aatgcattgtgagatccaattacagaacctcacgggtgttcctaggcattccatcacatggtcaataaatctccagctcatcctatcataagctttgacaagatcaattttgattgcaaaaaatccttccttgcctttctttctattgaaagagtgtatgatctcctggactatgacattgttatcatggatatttcttcccggaacaaaagcagcttaagtagggcaaatgagagaaggtaacaaaggtttaattctattcgccagaatcttagaaatgaccttgtacaccacattgcatagggagatgggtctaaaatggttggttcttttcgggttcgggacctttggaatgagaacaacattggttgaattgatacccctatgcatactaccatttgtaaaaaaaatcagacactgcctcacagaaatgactatgaacagactcccaataatgcttgtagaacagaacagacattccatcaggaccaggagccttatgactgttcatggcaaacagggttcttttgatctcatcggtgcttgggcaagtaagaagagtctcagactcttctaaagatattcgctcttggaatagatgaccgcaatcatattccaaaccattatccgcccctgagaaaatacctttgaaaaaatcgatgaattctctgccaataagctcatggcaagaaatccaggaattatttttatctaaaatactctcaatggcatttcttctacctttaatggcagctgacataaagaaaatttttgaacatgtatccccatcttttagccaagaaatccttgccctttgtttccagtatatcgactttctttctagagattcattcagcgctcgccggatatcacactcccgattccagtcccgggatccagcacaaaggctctgcagagtgttgagttgattttcaagctcct

SEQ ID NO: 271569 - DNA, 1773 bp, Cannabis indica
tttactactaaataaaatcataagatacgtcaaaataattaaaatttcgtaaactgtattttgtaatttttttgtgttttatatattgtgaaataatccttgattaataccaattttattaaaaataattggataaatattattgggtgtttctataattcacctattaaaataatacactgatacaccttttatatgtttcagaataattttttagtctatttttttcatatttgtgtacgttatagttatttaagatatcatgcaaaattttgagaaatttagaataatttacaatataaacagtagtgttcaaacagtttattttacacgcgtataaaataaaatagtcacgtgtactgtaacacaatgtttgaatcctattttcagcgtattaaattttctgaatttattaaaattttacaagatgtcttgaatattataacgtacataactgtaaaaaaaattgactaagaaattatttcagataccaaaagagatcggaatgcatcaatacatcccttaaggggagtacattgtaaatttgtctaatactatttcagtgtgattaaatctgcataaaaaaatatagttaattaatgaactagaaatactaatattactagagtaatttgtggcataaatacttaactttaactctcggttgtaaataaatacctaaatttaatttttggcatttataataccttaccattaaatgttaagtcattatgattcacatgttattttttattggtatatttaaactaatttttttttaaaaaaaaataaaaatttaatgacttgaataagattgccaagtggtaatttacttaacacttaacagtcaagtacttatagaagttttagaattataacttcggtattattactgtcaaacattaatcttagatatttatttacaactaaaaattaaatttgattatttatagcgtaaattactcatattaataataactctttttgaaaattgaattaaagaagtgaacgataaatgaattcaaaaaaaaaaaaaaaaaaaagaagtagaacgatactatatactttgggccatgcaatttatttgcctctatatataatattgcatgggccatgcaatttttcttttttctttctttttttttttaaggaaatataatattaggcacataatatgaatatttttgggtataaataataataatatgtatataaattaatcaaattttattaagactttcaaaatcaacatcgatagattcatcaaaactagttaaaaaaaaaatataaatctaaaagcgattgtcattctaacttgaaaactatttttactttttaaaaataggaaaattacttattaaaaacaataggaggtgtttagttatatttgtttttgcttacttgtcaatatttctttttttactttctcacacatcatattaatttgtatatctcatatcgaggtaccactctaatttgggtacgtacaagatttggaattcaggattgggatcagagtcgggatccaaagtcacggttggatttggggtgaaggtcgatgaacgaggtcgagattggggtcaaggatcaggtttgagattagggatcgaggtcgggaattgggatccaacgcaaactcgacactgggcataggcagactaggcttgtgcccctagggcccaccctagcccagggcccaaatgaaattttttatttcttttaaaaaatacatattttttctaccgattttaaaaaaataccacattttttttc

SEQ ID NO: 271570 - DNA, 1859 bp, Cannabis indica
ttttagtcacaacagaatttgtgactaaaaagaaaaaatttgtgactaattatatattgtgactaaaaagtccgtggctaaatatattagtcacaaaaattacaatttgttgtgactaaatgtatttttatcacttctactcagttaataacttctgtgtttggatattcattctactctattaatgacttctgtgtttggcttagttgttaatgactgtagaagtttgttatcctctctttctgatgttcaattacgttttgttagatgatcagcaaatcatgcggcccactttgttgctaggcacgcacgatcgttaactggtcgtagcattctggggtctttcatacctcttgatcttcagattattttggattcagagtgctaatttaatgaagttacaatttcatataaaaaaaatgtttttttattacaatatttattgtgactaaaactaaattagtgacaacttgtgtctaaatgctatattttagttacaaataatattttcttgtgactaaaagtcacatttagtcacaaaaaattaatgttataactaataagttgtcactaaaagtaacagtttttggtagtgattattgagtttttgtaatagtagtcaattggacaatgattttgctctgaaacacaatgcttcgaaccattttcatggtcatggtgaggctctatttatagtgactaaaggtccgtaactaaatgtattagtcataagaattacaatttgttgtgactaatgtgtttttggtcacaaacaacttatatctaaatattatattttaaagtaatacctaataaaaaaatttatgttataactaaaaattatcactaaaagtattaattttctgtagtaagtgtagatgatgataaaaattgggtttcgtaacttacatgtatgtataggaggcttattgtctattattaatttgtttgtatttagtttttaattgtgagctataaattataattatgattgatcattaagaaagtaataaaatttattgaaaagaagacaaaattacttaccaaaatgagagagttaattagatgaggagacaactttaatcaatcaagttgtaggtaattaatttagcaaaaaaaaaaaaagttttacatagaaataggactcccacaaattgatatgcccacaccattacatagaaagaaaagttaatctttattcaaactcagctataacaatgtcaagcagtaatatcgaagcattgctagcaataatgtgacaacctgacaaagaactagagttgcgagcaatgaaatggacagctctcttcgcagatcgtagaacaaaagaaaaaaaaaagacattaagtcgagagtttaataaaagcttgcaatcctctacaattaaaccaaaaggagatggcatttgaactgaactttgaagtgtctggattgaagttaagctgtccatctccacactaacattgctccaatgcttaattgccacccaaccttaaggcttccttgatagacataattttagcaagaaccggctgaggagaaccgatcctatacaaagcaaaaccttcgaggatgtggccatcactgtcacaggcaagagcaccataaccaaaagccccctcaacagcaaataacgcactgtctaaatttattttaataaaaccagctggtggcttagaccagatcacaccaccattggctgcaccagaggaaacccaaagacaatcaaagcgtcgatctcgtgcgtgtttccattgctacagtaatgacttagcaacatagacggtggcagtagcagagttgaaattggattgccataacaactcatttctccctttccaaactacccaagcagtaac

SEQ ID NO: 271571 - DNA, 2857 bp, Cannabis indica
gatatttaaggttgtttttaactgccctaaattttcaaaatttagttggttagttaaaataataatttaattatattaatatcttatttcacattgttacatggacattttttgtttatttaattttttattaaaaaaaaacttttttttaacaaacctattatttatttgatctaaattgctatgattaacttgttgacagatccaatgatctgattttaatcatagtccaattgtcaatagatcctataaataatttgtaacaggtaaattttgtatttctttcatctgtgtaaacctagaaacatgatagggcccatccaaatcaatttgacctgtgtgagcctatatgtttgcttttgggcttagatgcatataggaagcccatttatttctagatatttaaatggactaggttgctaaaataaaatatcacttatgatagttttatttaggcccaattagtattgggcttattcaatgaataacaattatttaatgaaaggttaaattcctctcctttgggccttgtgtgagagttagggggccattagtagtgggtacgacatactgaacccatccctccctcacatgaacaaccccaattgtgaaggcccatttaccttatttaaataattgaattaggctaattatactagtttaacctaattaaaatttaattagtaacataattaattttgaaataaatgaaattaattttttattagattattttaaaattaatttagaaaaatacacttagtttaataaaatattctagatagtgaattctagtaacttatttatattttctaatatttaattaagtagaaaaatattagtgttgggagactattggggatgacatatgtgaagctgtgatatcatttttggaatcaggtaaaattcttagagaaatcaattcaacaattaataccttggttccaaaaaataaatgccctaacactatcaaagattttagaccaattgcttgttgcaatgttatctacaaaattacaactaagcttttgagttctagaattagagacattcatcctgaaataatttctcattctcaaggagaatttattaagggtagatttatagggcataatatcatgatatgtcaggatttggtgaggcactataacaggaaagctaacaaatcgagttgtatgatcaagcttgatcttcgaaaggcatatgacaccattgaatgggaatttttggaagaaatgcaattaataatgaactgtatcacctctcctaagttctctcttatgttcaatggaactttacatggtttttttaaagctaggagagggcttagacagggtgaccccatgtcccctctattgtttgtcttgggtatggaatacctttctagactcatgaggaagattggtgagaaggaggactttcatttccatgatagatgctctcaacttaaattgaatcatttggcatttgcaaatgatgttctattgttctatcatggagatacaaagagtgtcacttatatgctacaggccctaaaattgtgttctctcacttctggacttcatcctaatgcaagtaaaattgcaatttactgcagcaacatgcatgaagacaatgtgaagaagttgatagaagtatctggtttctcaagggaggattttcctttcacttacctgggaatccatatttgtgtaaagaaaatatctagtaaagagtgtgagttactggctaaaagaatgactgctaggattaagagttagagctcaagaaacctttccttggcaggtagaattactttaataaccttagttttaatagctattcaggcatactggtgccagatgatggtgttgccaaaaaaaatgatcaaatctatagaagctatctgtagagcctttttgtggaaagggcaagctatgttccatggagctggtgctgttgcttgggagaacatatgccagcctataagagcagggggttgggaataaagaagctagaggagtggaataaggctgccatttgtaagtatatatgggccatttcaaacaagcaagagagtctttggctaagatgggtccatagtgtttatatcaaaaaacaggattggtggagttactctgcttctatccatgctagttggtaatggaagaagctggtagctatcaaagaccagcttaaaaaagtgtgtgatgttgcaagttttcagagggaaaggtacaccattgtagcagggtataacctgctctctgcttctgcagctaggatgaactggtgcaaagaagtgtgggctagattgaacacccctaaacatagtgtgattttgtggttaacaatgctaaaccggctaaaaactaaggaaaggctgctaaagtatgggatgcaagtgaatgagaaatgctgtctttgtgaggctcaagttgaaacgagtcaacatttgttctttaagtgtaatgtttctcttcacggactgctagaaatcaaggcttggctgaattggaatactgtaacaatcagccttccccacctgctgagatggataggcagacctaagctctctaaattttgaaaaatggtctatgctgctgtaattgcagggctggtttatagcatttagaggctgagaaatgctgtaatctggcaggatttttctttaaattcaaggtgaattgttgaagacactaatggagtgtaaagatgagaattgcaatgtttttgccaagaaagatttaatgatgtagataaagattggttcaatgctttataatgtgaaattgtacagaaagatttgtttgtgtatagattgtttaggccccggatggagtgctagtaggttccaaataccattttgtgcaataca

SEQ ID NO: 271572 - DNA, 2379 bp, Cannabis indica
tttttaaatatttatttacgtagaccaataatataatgccatgtgtacatattgtccaagtagacaatacagtgtagcagttaacacctaaaaatggatggaaatggctaagtgttaacagaacatgagtttaggggattttaccaccaaaattttagatttgggggttagttgcaaaaatctagccacttaaggaggttatgccgcaaataactctattaagtgtactaatataaacgtaagatgtataagagtgtgtgcataaacagttcatgacggcagttaacagtaaaaaaaatagatgacatcgtaaatttactaatagttcagtagtttagaaagttttaccgtcaaaatttaagcttaaaaaattaagtgcaagtgaaacgataattaagagaatttagccgtaaaaaaactcttcttgaattattattattttaggagaaataattaggacacactcaaattatacatactttttacagacaataatatataattaatctcaacaatataattaaaactaatatggtctcacttaaaaaaaaatattatgactaatatttattatatatccctaatatgtattaataagtgtgtgcatgtatatagcattacacttattttattattattagtagtagtacctctctaagtatagggttttacccattaattaagtggattccacttgaaactcttatttgactttgttatggttttgtgagagtcataaaagatggtttttctaaaaggaaaaaaatggttgttactatctaccattataataaattattgatttagtattattgttatgggatacctcttttgtggtgattagatcaccataaagaaaaaaacttttacaccactaattaatagggttcaagaactcaaccacaaacagaatagacaaaactaaatgcaagcaaagaattaaaacaatgataatgatgaacttagctcaaaaaatagatggatcaaaatgggtctttattgatttgaatgatcaataatacacaatcgagtccatgaattacaatttaacacagtaaaaataagatctcaattaaaattagaactcgcactgaaagtgttttttcattataactctccacacacaccctgattttagataaattctcaaaaataatttaaatttctaatagctgagaattaaatgagagaattgtgggggtatttatagttgttatttgaaaagacatacgaaaacaatacttaatctaaattcaatccagttgatgattgtttcaaaatattaaaactcaaaatgaatgattacataaatgagttgattcacattatttgtgtaactggttaataaaatggttgtgtaattgattttgtgaatgtatcatgtaatgaccgtctaaatttaatatgttggattattaattaattaagaaattatgagattgaattattaattatgatttgcccatttgtgaagatttatttaaattcagaatgtactaattttgttatatatatatatgaatttctttaatatgatttgcacattattaattatgttataaaaatataacaaataattacataaaatattatttttattttacgtttaaagatttttttaaaaatatttttacggtattctataaaaatgacatccaaacaacatcaaaataacatataaatgataaaaaaaaataacaacaaattaataagttttcaacataaaaatacatcaaaatattgtattttctataaaaaaaattataaaaatcgtaaacatatttaaaattccgtacaactatatttttgtaatttttttgttatttttgtatatttataaaataatcccaaatataattgttcaaattaagtgagacacaagcattttcattttctattaaatattaagtatagagcatttgaaacaaaataaaaatattattcagttttatattcatcatgattaaaagtttgatgctatataaattaatcgaaattaatctaaagtattaattctagctctatattgcatcttatttgaagaaaaaaaactatagtaaaaactttttttttaagaaactataataaaactttgacaaatataagtatataatttaaatcaaaatcacttaatcaatcttatcccatatatgcaatccaatcatcatactcatttaatcccatccaaatataagagcatactattttagtaaataaatattaaatagttttttttaaaaaaattacacagtacacctaaggtggcgtttggttgggaggaatgaaaatacaagaataggaatgggaattggaataggaatgatcttacattgaaatggtctttccttccagtttaaaatggtaatagtcattccacca

SEQ ID NO: 271573 - DNA, 693 bp, Cannabis indica
ccctttgaactctaaacctaatacacggtcaaattagagggaaaaagataagaggtaaaataatttcgctcaaattcatacgattacaaaaattgattgatttcttgagataacccaatttatagaagggaagaaacttcattaaaaatgaaaaagaaagtacataaaataaaattgatgataaaaaattgagaaagggaagacccaccgggccaaatatgaaagagaaagaggcacgtggaacaagcagagaaagatgggagagagagtagtacctagctttgagtttgatgtgagaggcagagagaatagggccctttgctttactttgattttggtttgtgcaagaatggcggcttgtgaggagaggagatggtttttatagcgtgaaattgagaaataagatattagaattagagttggagaaggactattaaaggcggtgctttttcgggatttaatatttaattaaggtcaaaatacacaatataataatatgtgtcttacacgatgggtagttgactatctttactttattacgcttgactaacgggcttatctattcattaagtgaattttcattttatcgttttttgagaaatatttacaaaaatatgatattttttgaaaaacatatttaatggaaacaaataaaaaatatgggaatagcaactagttaccttatactatttt

SEQ ID NO: 271574 - DNA, 1809 bp, Cannabis indica
tttttttttttaaataaaacgtttatataaataaaaaaaaattagattttatggtcattataaaataagttcataagtagggaagagatatccaaaagactatattaattatgggtaaaagtccacttggccacattatgtgccataaaattacaagactaaacaatattagaaaaaacacaacccacaaatatgaagaagtgcttttacatcaacttgagtagttttcaatcccccaacaagagttagccctagtgagagagttgatcaccaccttagaatcgctttccacgataacaaagttgcaccccttctcagatgtctctaaggccaagcaacaagtcgcgacctcgccataaagagcgtcagtaaagtctaatctcgtcgtaaccacccaaagcaccacactctgataatctctagcaacaacgacaatacacatattctctattgccactctaacatcacagttcagcttgacctatgcagagagggacaccaaacatccagtcgggtcggagagtgaataggggagctctataatttatctaacaaaaagaaatagaatcaatataataatttatgttacccagattattattgtgtactttatgattttgagcccgccaattagtgtccaccacgatagacacataaagaaacacctcatccactaaactttgtgattctaagttctttggagagttgggatccaagtctgttatttttcataatcaagccatgcttgttaagcaagcatttagagctttcactaatcttgattatcttctctctatattattaaaagtaaatatttcaaggctaattcttttatccaagtttctaaaggccactctccttcttttactcgagaaagcttattatggggcaaagaccttaagcagtgactaatctagaagattgaaaatggaaaatttatctctactattggctctttctagctctctagttacaagatcctccattataaaaataatgtttatcctcgttgatactatttcttatttcatcactcacaatagtccttgggatattgataagttgaatatatattttgatcatgaaatggtgaattctattttgcaggttccaattgttgtctcactgtcaaatctgcagaccacttagctaaatcttatgtttcttctccttcctactcatctttcttttttttcttattggtggaaaaatctttcgagtattttatttggaaagcttttaatcacattcttctgctttaaatttatacaaaagaaaaatgtcactcctaattctctttgttccttttgttttaataatgttgagtctattactcatgctctcctaaattgttccaaagccagatcaatttggagaggtacttagttcaaataattttatcttaacaataagatttatgatatgaaagaatatttattaagaagttttgatatcaataaaaaagatgattcctttgtcttttggtattatgtggtctattttgaattatcccaatagtttactttttaaaagttttgacattgccaatgtgaaaacttgggttaaaacctttttgcaggacaatgttcagactcaagacttgatagattggttcctaatactgcttctagtttaaggaagtcttcatgttatgatcaattggagaaactacctcctctaggaagatttaaattaaatattgatgctgctattaatgggttgttaaaaattcccaaggtgaagttgtggcagcttgtctgtcatcaatttccagtaggcagcctctaatctatgcagaagcagaagctt

SEQ ID NO: 271575 - DNA, 1073 bp, Cannabis indica
tagaggttcacccccgagcagttcggtaatagcctaatcctcgttatttgtattaacttaagaacaaggagaaatgttccttttcttatagctcttacaacaatatctatgaatatgaattcttagataatatctctttaagtaaaatctctcgaccctctgccgagtgagcatgcatcactatttatagggctatgagcttggagaggaagtatttcccttctcgttacaatggatataagcagaaagattgcatgataaatacagaatacactaatcgtgggattttgacactttgccatatctctgcaatctgatccccaagttatagggatttctttgatgactcacgatgcgaaagctgaattcgctaagtgttggtcgctctacgcggattgctgatcgctttgcttcacgcatgcatatgaggcgttcggttcggactgtattctctgagcagatactcgaagtcgattccacgtgccaccatcatgtgatgccacgtcagagtgcaaaaattgggataacaatgtactaaacaaatctattcagaatgatattaacaattataagtaagatacggtgatgacatcagatttgaatgtaatgacgaatataaagaagatacgataataacaacggcttgaaatcatatgattagtttttttataaatttatcaattgtaatatatattttttaatttcaatttaatttattcaaacgatatatataacttacttattactaaacaaaatacaactgcacgcgaagcgcagtttgtttgctagtattctgttaaagttataaatatagaaactatcgttaaaccaagaattctgtttcaaagttaaactaataaatttaaaaatattattaaaaatatgtaaaatattttaagtattttaaatttaaatttatatataatatctacataatttttgtttttaaatatatataataatattataagattaataaaaaatattctgttaattaataggatattctgttaaacaaaatacaactgcacgcgaagcacagtttgtttcctagtattctgttaaagttataa

SEQ ID NO: 271576 - DNA, 3789 bp, Cannabis indica
aaattacggtcttttgatgtaattttatgttgttctcttgttaatttgttgttatttgtatgttactattttttctatgttgtttggattttttttttctgttacttttatataaaattttacaaaaaaatactattttatataattattcctataattaattaataaaatgtatataaacttacaaattttcattatattaataaaagaagaaaggctctgaaatgcatgtttaggcacaaaatgtagtcacatgtgccaaatctaatttttgttttggtactttaaatatgtttttttgttaattagaaacactgacaaaagatttatatgcttattattgagtatttatttattggtatgtgtagaaaatgggttgcaagggaagctgggaaaagcagcatacttggaggactggataacaaccattaccccattgacagcaggagagtctgcatttaaggtcacttttgacttggaagataatgatataggagttgcaggggctttttcgataagaaataatcaccacagtgaattctacctcaagacactcacacttgattatcctgatcaaactagggtccattttgtttgcaactcatgggtgtacccggctaaacgttaccaaaaagatcgtattttcttcaccaataatgtaaacttttcaacattagactatatggtatggtatgattgttcatatgttatgttacataatatatgttgttattattgttggtgttggtgtagacatatcttccaagtgaaacaccatctccactgctcaaatacagagaagaagagctacttagcttaagaggaaatagagaaggagagcttcaagagtgggatagagtatatgactatgcttattacaatgatttggccaatccagataagggccctgagtatgctcgtccagttcttggagggtctagtgagtacccttatcctcgtagaggaagaactggaagaccaccaactaagacaggttaaacttttgtttatctgtatgcattattttcttttctttatttttatcattcttattctaaatttcaattttctgataaatatacaatttgacagatcctaacacagagagcaggttgccgattcttatgagtttgaacatttatgttccaagagatgagagatttgggcatctaaagatgtctgacttccttgcttatgctcttaaatctgtagcacaagtcattaaacctgagttagaatccaagtttgacaacactccttctgagtttgatagcttccaagatgtgttgaatatgtatgatggagggattgagctgcctaaagggttggttgatgacattagagaaaacatacctgctgagatgcttaaagaaatttttagaacagatggtgaaagactcctcaaataccctcttcctcaagttcttaaaggtataatatgggcggtcattataggagtttaggctttatattctgtactttatacgtgttgtctcaatgctattttcttatcttttaatgtggactagagagtaggtctgcttggaggactgatgaagaatttgcaagagaaatgttggctggagttaaccccgtttccattagtcttctccaagtaaattcaacctctcaaaactagttaagaatttacttgaaaaagtaaattgactttcatattcaatgaattctatttttctttttcttttatataggaatttccaccagcaagcaagctagacaaaaacacttatggtgatcaaacaagtaccataactgaagaacacatcaagaataacttagatgggctcactgtgaatgaggtaactaaattccactgctcaaattttaacgcattagagtttgttgtttcaaaagaagtgttcaatgacaagttatttatactggtttaataggcacttgagaagaacaagttgtttatattgaaccaccatgatatgctgttcccttacctgaggaggataaactcaacttcctcaaaaatctatgcaacaaggacacttcttttcttgaaaaatgatggcactttaaagccattggcgatcgaattaagcttgccacatccagatggtgatcaatttggtgttgttagcaaagttttcactccgacaaaagaaggtgtagagagtcacatttggcagctagctaaagcctatgctgctgtaaatgactctggggttcatcaactcattagtcattggtattaaacaactttactcttacttttgtaactggaagttttccttttggttttcttgtaatgatcttttcaatcacaggttgaacactcatgctgccatcgagccatttgtaatagcaaccaacaggcagctaagtgttcttcacccaattcacaagctcttgcaaccacattttcgagacactatgaatatcaacgcatttgccagacagattctcattaatgctggaggcattcttgaattcactgtctttccagcgaagtatgccatggaaatgagttcagcagtttataagaactgggttttcccagagcaagctctaccagaagaactcatgaagcggtacagtcatttcaagtattcatcatagttttctaaatcatagtttttgagtttgcatttgatcatgttttcaacatatgcagaggaatggcagtgaaggactcaagtgcgccccatggtcttcggctactgatacaggactacccttatggtgttgatgggcttgaaatatggtatgcaatcaaaacatgggttgaagactactgctctttctactacaagactgatgaagccattcaaaaagactcagagcttcaatcatggtggaaagaggttagagaagagggtcacggtgacaagaaaaatgaaccttggtggcccaaaatgcaaactcgtcaagagttgattgactcctgcaccataatcatatggattgcttctgccctccacgcagctgtcaactttggacagtacccttatgcaggttaccttccaaaccgccccacactaagcagacggttcatgcccgaaaaaggtactcctgagtatgaagagcttcaatctaatcctgagaaggctttcttgaagacaatcactgctcagcttcctacccttattggggttgctctcattgagattttatcaaggcatgcttctgatgaggtctatcttggtcaaagagacactcctcaatggacttcagacacagctccattggaggcctttgatagatttggtaagaaacttgctgagattgaagagaaaattatgaatatgaacaatgatgagaaacttaagaacagagttggaccagttaaggttccttacactttgctttatcctactagtgacgagggacttactgggaagggaattcccaatagtgtttcaatataaaaagcatacgatccctttggtgtttagtaatattataattatgtatatcgtttgtaatcattttaagaaggttgggtttgtgtgtttaaaataaaggcacatgcattgtgtagttctaatatatttcaaatattactttcaatatgggttgtcttataatactttattctttcttttgattattaataaattttaacataaatatttttattaaattaatcataatcattcatatattattatacatttgtatgattaatagtaattttatatattgttattgtttggttatgttttgtttgagttaaattttgttagttataaaaaaagtttgatgtttgttgggttttatgccctaaataaaactccatttcaatgtaatccgtattat

SEQ ID NO: 271577 - DNA, 907 bp, Cannabis indica
attacaaatcaagccaaataaataaggtttttacacacctgtgaatatcctgtttttattgggccgagatgaacgtgtaatcaaaaatatacggtaagccttatctcatagggatgcctcgccgagaatggagccaagataactttgatagcgagcagttgcttgtcatttggcttctcgagactaatattgttttaactctgataactatgcttttctggtgtcgagatgatcttcctcgcatgcataccaccttctagcgagataagcgcctcgctgcctgttatctcgactcgtcacactatctatactcagtttgtatatcgtataatatacgctaagtatttttagtgttctcgttttctctttcacgcagcgaggttgaggcctcgtcatgaacgcgtgcacccacatggtttctcgtcaatacataagttagcagttcgtacgtttctgtctcgcagaaggctattcagccaactgagttataaacataccctgcgaattatatttccaacgagttgttccatgttagtatacttttagtttgcgtgtttgagttcttcattcttcccagctcgacacgtgtcttcctctgatgtgcttaccaatttttgggtataacaattgccccttaaaaagttttttttttaattaaaaagacctttttaatgattacaaagggtatttctgtcctgttcctctttttcttttgaaaagacgcattccctctgatttggcgattgtgcggtttcgaggtacatcagaattaaatgaccatctttcccacttccacttcgaatcatgtccatgttggatatattttactaggatctagatttactaaaaagtatgtttcattaacatcctaatatgaattctaaaagaatgaaataaacacatataa

SEQ ID NO: 271578 - DNA, 986 bp, Cannabis indica
gatgactcgcacatgggattcaacaaagtcaatgataccaaaaggtggggacacgatatggggagctcataatggtcgcccgaggattgctataatcttaaagaaagtcaaagaaacaatgacacccagatttcaagtgaagagaggattgaaaaattgtcttctcaatcaaaatctgctcattatggaaaaatgatatcgtttggaaaagatgtagcagacgcacattcgtctgagatagagagaattgattttcgggtaaggttcatttcttattaaaattttctaattaagcagaaatattgggccttctgcaatacaggatcataaatagttaaaaaataacaatgcaggggtttgacaaatagaaacaaaaaagaaaaaagtaatgtgcacatgccctttgtgtgcactgtgctcaattaggtcttggcagttctttcatacaaagtcttattatgtcttgattattcccttgaaattcattatttatactaagttggcaaactggtatataggatgcaatcaaggggaacaatattgcaaatagtacttgtcgtgatgtgtggactgaatatcacgacatggggattgagggaatcagagctgttgcagattataaagtgtacactgctgaagaagttgtggacctacttcattttgttgccccaaaaatgatgaagcggggtagtgctcacttctcttttggaattgctgataatttggatgatccaatgtacaatcattacaaatattggtcaaaccctctggagactaagtgagaatccttgcattatttctctgtaattgattttgtctcccctttttttcaattcagaaaatacttcttgaatgtaaggatctcgatcatttgcctcacagatcaccccaatatgtggtagtctaaacttcttattgatgagccaccccgaatcaaagatgtgcgaagatataaatggctctcaatttttgtttaggcaattcct

SEQ ID NO: 271579 - DNA, 892 bp, Cannabis indica
attacacagtaaaaagaggaaactagtctgtttatttggaaagttgagctcttcccttttcctatatatagccgccccctctctactcttggtaatgcttttgaatgctttgatattcatgccatattgtatcacacgaaatcaagagagaaaagagagtgaatttcgaattctttgtgagagagaagtgcccacacacagcatacagtacctacaatcatagccaacacgtatgggatgggaaacattgttagaaattcaaacaaatatatatcctaggttagttagagccttctatgcttgcattgagtttagttgtgatacatatagcgttaagggaattctaaaaggagtaccatttgagttaactattgactcgcttaataatctccttaatgcacgtaaagatggcctcttgcttgaccatagaccttgccttacaaatgatgcctctttcaattttaacctcttcaataatcatgtgtgtaggtaacaattttaggttaaaaccaaaaagaacctacctcacccttcaagggaaaattgtccatgcctttatatgctctcatcttattcctaggaaaggccatcacgatgaagtaagtgccattgatcaagtgctcctatacaatcttataatgggtgataacaaaattaacctaggctatctcatccttaaaaccataagtgaagtgtttaaaccttccctaaaaagggaattaccctatggctatctccttagctacttattcccacttctaggaatcccaatagaagatgaaactgatgtttatgaacccaaggattccgacactcttggtgagatcacattcaaatccatgcgctacaaattcaatgaagaggaaaagaagtggattcccaccaatccaat

SEQ ID NO: 271580 - DNA, 1470 bp, Cannabis indica
ttgctcctcatccatattctcccaccgactacaacgccggagcagacaacgaaaccgaaaaagagagaatcagcttcccagctgttggttctcccaaacacttcaaaaaatcaagcagtggtatcacaactaccactactggctccattgagaactaccacagcattgaaatgacccaagtctacgacaacgttagcgaagacatcgagaaaaacggcgtcgttgaaaggtcaaggtgggttctcaacgcccctgaaccaccggggctattccgtgaggcggcagactcggttagggacacccttggttcgatgagaaccaagtactacaagtctctgaaaagccagaatagtttcaccaaacgcatgctccttattaaccaaaacatatttcctattctcgtatggggtcgaaactacagcgcagccaagttcaagaatgatttaatggctggtttaaccattgctagcctctgtattccccaggtacgtacgtaattcattttttgtattattttaatgcataaagttaaagctttgaaaataaatgaccaaataaactttcatctgatcagagtattgggtatgcaactttagcaagacttgatcctcaatatggcctttgtaagtcatgtaccttcatgggttttctaatttccttactaattacttattggatatttatatatggaatgatgaatattattatctataattgtagatacaagtgttgtaccaccacttatctacgctgtaatggggacttcgagagacatagcgattggaccagtggctgtggtatcactacttttaccttcaatgattcagaaaatagtagaccccggaactgatccaatcacttataggaactttgttttaactgcaactttcttctgtggtatcttccaaggagccttcggttttttcaggtgtgtcttcataataacaccacactaatttaatttcttccaatataatattatgttatttctcgtaataatttatgttttacataataactttgatctttgaattaattaatatgtaaaatttgtaggctgggatttctggtggattttctttcccatgctgcaatagtgggatttatggctggtgccgccatcattattgggcttcaacaactgaaaggattacttggactcactcactttacgaccaaaacagatattatctctgtcactaaagctgtttggaattcaattcaccatcctgtatgtgttcgtacccttcttctaataatttatttaatttctatattccttttatattttaaagctttatttatatatttgttaatgcttttctgcttcttttattgcagtggagtccatataatttcatcattggtatttcattcctgggttttatctttttcactagatttctggtaagtataacattaattgggatcatatgtttcgcaattgatatggtgcattttattattgaa

SEQ ID NO: 271581 - DNA, 1194 bp, Cannabis indica
atcaggacctctcagaaatactgaagaggtgcttgctttctgaatctctcatataaaggctccatacggttaccagcaacatgttgctcaactggcaccgcaggggttgcaggaaccgcagcaggcggttgtgggggaagctcgacaggagcatcctgttgcgtgagtcgtcggatctcgtcttcttgttgctcaattctagtttgcatctcagcaaacctttgttcccaatcgaccacctccggtctcaaccaactcaccctgccttccaacatttcgctggtcgtccattaattaggacttagcctgcgaacccacaaggcatgtaggttagacagtggccaaaattttcaagaccgcattaaaggttttataacatccatttaatcatatatgcaacatatcttaaaacagtttgcaaaatgaaataaagcttacggaacagtgagttgagctcgacactggccttcattgtacatatcttgacggtcttcagtggaaaacctggtggctctaataccaaactgtaatgcccgtatttaaatatttttaaacccaaaagataacttgattatattataactttatacttatatgggtcgggatcccgagtatcaaaatacagtttaaaagtattttactaatatgtacatataatatttttttttcttgactcgcgaacatgcaacttcaaaacacagactcaaaatattaaaagaccgaaaccctccaggttgcactgccgcgatatgtacaatcattgccgagctctatctcactgttcctccagctttgcttttcctttacctacacaaggtagcaaactgatgagtcaacaaactcagtaagatatgcaaaacatatatataagtaatgcgatgccggctttgtgattaagccgccctaagctcaataattaagctcaccaaatggataagaacgttctcaagggatgtacgaactctacaccaaatgcactaaaataccaaccctgtacttgtgttggtagagccataattgtactcccagaaaatactaagtgttgtaccacatgcacgacgtacaccctggtactcgtgttggtaacactgtaaccatactaatatgtcacactatactaacactcttaaatcacattcatattagcgctagtagtgcaaacatccaaaaaaagcatacattcatatatacatt

SEQ ID NO: 271582 - DNA, 602 bp, Cannabis indica
actatgattgaggtatcacttgctgtgtgtggggcactactcatacactaagtatttttgaaatctcaatgaggaagagggagagagggtcggtagcaacgaatagtaggtagagaaggagtcacgtttacgttttctcgtaggaaaaagtaaaagtaaaagttaaaaagtttaaggtaagtttttaacctttttccgtaaggaaccgttcccttacctaacttacttacttttaattttaagtacgacttaccttaccctaacgggtttaagggggtttttagggtttaagttaaatttttaggttacgaacttaaaaatttaaaaaattaagtaaaaagtaaaaattactacgtttaaaagtttttaaagttccgtaccctaaaaacgtaaaagggtcggtcggtccggacctaggtcggttacttttagggtttttggggggtttccgggtttcccttttttttcgtttttaagttttaagttttcgaactttaaaactttaaacctttacgttttagtttagttagtttacttttcccaaaaaaaacgcccaaatttttctaattcaaccatttaaatgtcaattctaactatttaat

SEQ ID NO: 271583 - DNA, 1752 bp, Cannabis indica
tatccaaccggagtgtcaggatatgtacccgaagccaaactttcgagaaccatgcccccagccacccctcaaatgagcggcatacaattctccgctacactaggatataatcagagcctagccttggctcccgcatcatcacattttgggaatcccataagcaacccctcggggatgagtgatcaagctccgtctcagtctgctcctaccgcaagcctgacaggacctcctcaaagctcccgaagtaagaggtcctcaaagggtcgcaactggacggaggataagcgacaacgaaggggatacacccatcaatatactcaatacacggagctcacagacatgcaagagcgagtgtattttgccaaaatacacactaccgaaagcctcctcccctatacagggacagttcgcgaagggatccttacaagagatgtgaataccacaacgacattcgccatagtaccaatgagcgcaagaacttgaaggacaagatcgaaaacttaatccgattgggtcatttgtatgaatgaattaataaccggctaccccatcttaacctggttccagtagggggtccgttacctcaaggagcaccagcacccgttgtgccccctggaggagaaatccctcagcaagtccttgggctcccaccaagacccaacgggagagtatcaatgatctcaggtgggccccatattgggggaaccactagaatagagttgaaatgctacggtggagccattaaacacgatgaagtgtgggaagtcatccagcttccagcacaaaggccccgactcatggatcagcccattactttcatggaagaggatgccaaattggtgcgttttcctcaccatgaccctctggtcatagagatccctatcgccaacaaaatagtggcaaggatattggtcgataatgggagttccgtgaacttgttgttcaaagaggccttcacagccataggcctcacagacagggatttgtcacccagcgactcccagctcacaggattcaatgggaccacacttatcccaatgggaaaagtgagactgctagtcaccctgtgcccggatacccctcagattacttttaagtactgcacctttgtggtggtagactgccaaaccgcatacaacgccatccttggccgaccggccttagttgtcttcaacgcaatcacatccgtccgtcacttgtgcttgaaattccccagtcaggaggccggagtagggaccgtgaggggaaatcagggagaggccaagcagtgctataatgttgcaacacatttgctggtgttggtggtccgtgagggcattgaaccagagtcgatggaagaagatgagctagatccccacatgggatccaaaaaaaattgtaaaacctatggaggacattgaggaagtacgagtgtgcgacctcgaccctaccaagatcctctgcttgggaaaaaacctagagccggaggaaagaaataagattattgaagcattaagggcagccatagacattttcgcgtggtgccaaggagacatgaccggcataagcccgcatgtgattacccatgtcctgaacgtaagcccagacatgccaccagtacagcagaagcgacgtccccttgatctggtaaaagcagacaccctggaaaagaggtagacaagctgctgaccaacggcctgatccgggatgtgtactacccagaatggctggctaatcaggtacaagtgcaaaaaccaaataggacatggcggg

SEQ ID NO: 271584 - DNA, 1204 bp, Cannabis indica
gaatattttttctattattttaattagccaaataaattcaaacctaaccctagtggaatgctataaatagatagtgaaggcttcaggaaatttacacttaaatttcacactttcattcagaaaaaactgagcctctctctctccctatctttggccgaccactccctctctctcttcttcctaaagatttcgaaattcttagtgttagagtagtgcccacacacagcaagtgatacctcaatcatagtgaggaagatcgtgaagaaagactttcagcaagaaggagtttcagcactaaagaatcagagaaagagatccaggttcagatattgataatgctctgctacagaaaggaatcaagggctagatatctgaacggaaggagtcattatattccgctgcacccaatgtaaggtttactaaactttatatgtgtttatttcatcgttttagaaagttcatatttagggtgttaatcaacatacttgtgagtagatctaagatcctggtaaaataaaacaaatattactatccaaagacttgatattaatgtgtgctttgtttcttgggatgggattaaccaattttttaatttattgtttaatttattctgttgcctaaatatctactaatatttattttattcctatgcttaattggatcaatttcaaggattggaaaatgaacttacttatagttctaggatgtatggatttagtgttgggaatattttactaggatctaaatttactaacacgtatgttgaattaacatcctaaatatgaattctctaaaactaatgaaaataaacacataagggtttaagaaaaccttacattggttgcagcgtaaatataatgactccttcctttcaagatctctagcccttgattcctttctgtagtaaagcattatcaagatctgaacctggatctctttctctccttcgggtttagtggttaccactgtcttactcactatgattgattacttgacttgctatgtgtgggcatggcactcgtcactcgaggtttgaatggtgaagaacaatgaaggaggtttgaaatcactaaggaaggaagtctctcatataggttgaaggcaatagtcaaaataacattaatttgacaaagtgtcaagtggatgagatgagagcatcatgttccttttatagtattttagctagggcttagggttgaattat

SEQ ID NO: 271585 - DNA, 1367 bp, Cannabis indica
agaaaaatctttatatattaaagttaacctcacgttatctaatgttttatctggataagcataggaagcagaaataccacttctatctttgagtgattgcagatataccacttctgtcattgacctactttttagctttataaatagagatgttcatataatattaatactttacagaatatttatagatataaacctacattacaatgttaaaaaaagaactaaatagaataatctactactccaataataaatttatttacaattttataattacaataatattatttttaatagattattaaataatatttcaaatataaatatttaattttttcaaacaaaaaatttgtaatctttaaaaataaaatacattcaaaataaaaaagaccaaaatcttaaatgaaactagcaatacgtggctcggcacgtacattcacctaataatttaaaaacatgttatacaaataaatttgtattattgcgagttacaaaaaaaaaaaaaataaaaaacagttttaagtaaaacaccaaaccggtaacacagcaaaacaatgtgctggtatattaacgaaataaatgaccaaacaaagtgtttggatacgtatgtatgtatattcaatataaatataaaatatctggcttgatgttgtttaaccttaagctacattaaaaattaaaatataatcagcttcaaattatattccaaaacttaaaaattcaatataaaatatctttttttatatatatataataattcaatataaaatattaagaagattatttgacctttcaaagaaaaaaatagaggttactttttattaatgaaaatagtcaaaagaaaaaaaaaatcatctattagcactttttaatatttttttgttaaattaataagtaaatattattttgtaatgacaatgcacatttatattttttaaaataatataaaataaaacttaaatttaatttttatcaactaaatattgtccaaaaattttttttacaaaaatattaaattttaagtaaaaatttataattttactgttacacaataatattttataatattatattatttttttataaaataaataattaaaataacaatagaacaaaaacatttttttttaaaaaaaaaaaattcactccacaatcaaaaagtaaaaaaaaattagaaatttgtatgcggtgtaaaaaaaaagaaaaaaaaaaatccgcccaccgactcgagctggctggctggttaacaagtccgtgttcgccttctcttcgttcttttccttcctatataagctcaccaaattcctcttccttctatttttgttttttcttcttcttccgaagaacaattattctccgaaaaatct

SEQ ID NO: 271586 - DNA, 914 bp, Cannabis indica
aaattgggtagagagcacgagaagtgtccccccaaattttgtcattcgaatttaaataatcattgaagtctcccattatcaaccaaggagagttatggatagtggatccaagtctgtggagaactttccaggaatggattttattttgacaattcggtgtcccataaaagccagtgaagtaaaaagcagaaaattgatgaggcttaaggtagcaatgaaaatgacttatattataagacaaaagagttacatcaacttcatgagtccataacaacaaaaggccactactaagaccaatcctagggacttctaaaccattaggaaaattaagttgagatttaaacctacttaaagcaccagcagggagtttagactccattacatacaatagtgtgggcttatatttcttagttaatagggagagggaacagaatgctcgtttactccctaatccgcgagcattccaactgatgacgatcatggctcttggcgggtgcgctgagcagcacccgcctcgtcaatgtatccttcatccagagaacgagctagatcacgagtacgcttaagcattttacgaaattcaatctcgttaatgctagggggacgctttggcttatagcggcggccagaagtggaagctgtggctggagaggatagacaaagtgaagtggctggttagcattgagatccgccattattgtagcaaaggcttgtgagaccggtacagtgtaaccagtagcatcagaaatgttggcattagtgatagcaggggcagccacaatcggattagatggtgcaacttgttcaggtacagacatactattgttgatgtttgtgttttggtcatggagaatggggtaggccgaggggggaacggatctacgtgattgggaagggctatcaaggtccacaac

SEQ ID NO: 271587 - DNA, 640 bp, Cannabis indica
aaaaaaaaaaaaaaaaattaggagcactcatcgtaaatctttttttctcttacattaataaaagtaatattttttttgtttattcaaaattaatctataaaagatttgcatattgcaatagggttaatgctttgtagtagttttcttgtgttttttattgtacaattattttttaaattcatttgtatttgttatgatgtatatttttaatttattgctgataatttttttgttgtgtatatgtgcattgggttgatgttttgttgttttgtagtggtttcatgtatttttttttgttggacatttattttttagttattttttaatttgtgtgcatttgtatggtgcatatttttagtttattgcttatatcatttttttctattgtgtatacgtgcatttcttgttgtagttgtttaaagtgattttcaaaacactttttagttgtacgttatttttcagttggttttttttttatatattttatgtgcatttgatatggtgtatatgtttaatttatcttataactttgttattattgttgtatgtgtgttgctttgtagatataattacatatatttagtttattttttgatacattttttttgatgcggtgatcaaaatcacacatgattaacaa

SEQ ID NO: 271588 - DNA, 986 bp, Cannabis indica
atttactaattaataaaagaacaaaaatcgcttttatgttgcatggttcacactatttatttcatgattatatttaatgtataaattctattaagtccagaacatatataaatatgtatatatttgttcatgattatagtgtcgtaagcacagtgaaatataatcatgattatatgttcaaaagtttaattcccatgatttgtcagttcactggatttagactggcatgataatcaacgataaggtatacttataccttggatatctagggcattggcatattttaccagtatcgggtgtatggagtatacattggaagggaccaaaattgatcttggataagatatcataaacttactgttatatctttctaagtcaatataatttgttgctcttaggtctatggatcttaatcctgttatggttaggttcaacttagttgtagtatttatgtactttgatttgtttttaaagtcgaccaattggatcttgtcgtgacatacaaattaaggacacggtagttcaattgagtgggagcgctaaacatagatatggatctgtagcttctataagaatttagaagtgaaacgatgatttccttcgagcttggctgaatacagataaatgattgaggcgtcatttcagtaattatattagtttactgaagtattatttataggttgctaagtgttttaaggagaaaatactttgaagggtagaacggtaaatttatccctactcagtgtagatcatctatacaggatttttgactattaggattgtaacactggataatcataatgtatctatatcgttgtacatatagagtgttctatataattgagagtgctattcaatgccatatctatagtggtgcaaggcggaattaataagttagagaatttacttggtaaattctagatctacttattgaaaggtcgggtatataggcccatggacccctcactagttgagataatactgct

SEQ ID NO: 271589 - DNA, 5930 bp, Cannabis indica
ttaaaataaataaaataaagttggtatagaatgcaattttctaaaaaaaaaaaaaaaaagacttgaacagtataaaagaaagaaatgtcgtgtctcaatattaatgtaaagaataaagattaagaaaaaaacacagtatttttgtaagtttcattttttttaggtggtaatatagtggatcccacaaacatttagaggggtaaaatatatatttgtgtacactttaatttgagatagccccattcccttgcccacctttcatgtaacccaaaactaacaccaaagtaaaatcttccaataattagactagagtacctacgtattagtattaggctatttattattacattgaaaaaacgagtacacaaaccaacaaaatctcgtactcgttgggggataaaatgcacacaaccattaacaagatcccttgactaaattctctccacaatccgtgcttactgtgccctctccttcctgctcccatgtcgatcactttccagctctgccggattccaatccgtaccgacctcgccttggcggagcctctctccgtaaccggaaccctccgctgccggaaacctttcgtcatccgatgcgccggcgagtcatcttcaacggcagcagattctgatttcgatgcgaaagtgttccgtaagaacttggtccgaagcaagaactacaatcggaaaggttttggccataaggaagagacccttcaactcatggacagcgagtacaccagtatgttgttgtgcttcgattcctcgatttgtttatgattaaaggatttttttttgtttgcttaattgaataattaatttacttgaaacaaaattcaggtgatattataaagactttgaaggataatggaaatgagtacaggtgggggaacgtgacggtaaaattggccgaagcatatgggttttgctggggtgtggagcgagctgtccaaattgcttacgaagcaaggaaacagttccccgaagaaaagatttggattacaaacgaaattattcataatccgacagtcaacaaggtttgattttttttttaattagaatttgtgcttcgtcttcgtaatggctcaatttatatgtttatttattgttattatttggatagagactagaggaaatgaaagtggaaaatattccaattgatgaagggaggaaacaatttgagattgtaaacaagggtgatgttgtgatattgcctgcttttggtgctggagtggatgagatgttggctttgagtgataggaatgttcaaattgttgataccacatgcccatgggtttccaaggtaacctttttgtttaataatagagatttttgaattatgggattctgtttaaattttatgttattaatgggtttggttacaaatcttctgtttgtaaggtttggaatacagtcgagaaacataagaaaggtgaatacacttccattattcatggtaaatatgctcatgaggagactatagctactgcatcttttgctggaacttacattattgtaaagaacatgaaagaggtaaacaactctcttatgacaaacaagttttatgctttagattttaaatgaaacctttatggtcttcaattcaggcaatgtatgtctgtgattatattcttggcggtcaacttgatggatccagctcaacaagagaggagtttatggaggtgtgttttgcctattcactttgattacttagttgataattttcttgacacaattttttcaatagttttataacattcgttcttgggctttgtctgcagaaatttaagaatgcagtttctaagggatttgatcctgacaaacatcttgtgaaggctggtattgcaaatcagactacaatgctcaagggggaaaccgaagagattggttagtttttgcagctggttatgctatagatcttgaagaattgccactacttgtttgcaatgtcttttttaacttatattctttaatttcagggaaactggttgagaggactatgatgcaaaagtacggagttgaaaacattaatgaacacttccaaagctttaacacaatttgcgatgcaacccaagtaataagttcctttctcttcagttcatgtattcttgtccggtttgttacttctgagatttcattttcctcgagcaaaacattttactgtcaaatgaccattttgttttctttgtttgtttgttcttctgattaattgacggcattcctcttgtgtcatgtagtctgagttaatttttttatgtttttctttaggagcgtcaagatgcaatgtacaagatggtggaggaacgtattgaccttatgttagttgttggaggatggaactctagtaacacttctcatctacaagagattgcagaggaacgaggtattccctcgtattggattgacagtgaacagagaataggtcctggaaacaagatagcctacaagctaaatgtaagtttggacagataagactaccattgcaatctaattatttcttgttttctgcttatgtactagtttagcagaactcctaagcaatggttccttctaatctgttgtcctgattgttgtaaattccttattgtgaattttctggtagcatggagagttggttgagaaagagaactggttaccagagggtcccatcacggtcggtgtaacatcaggtgcttctactccagataaggtgagttctttataccaatcaaaaatagcaaaccgcttcaatgaaatcataaaaagtcatctccattctactcacaaggaattttctttatcaggttgtggaagatgttctcatcaaggtgtttgaccttaagagcgaagaagctttgcaagttgcttagtttaagttagactcagtgtttatacatcaacagacagcgctgtcttaattatggagcattgttattattgtattattattattattattaggatgaaatgttggctccttgttatgcatgagccccaattacctaaagaatattaatcatcgtatagaaataatagaaagtgacgttgttactgctgtgagtgatccaagttctttgaatctatatagagaaacgtttaatttaccaaaaatatactggtatattatgcttttcaagtattcactttgtatggtaattacaacttacaacggtgagttgcatatgtagctggtaataaatatcatcgtcctaatactaggagaatactcctggttacaataatacaaaatttcagaacagtaactgtttacttgtcgattatctaagcaatcaaattgatttgtgactatatttggatcccttttacctcaaacaaaattccaaatgaaagctagctagcatcctccgccaagtagtttttgttctttatcagtagtatgagagacaagaccaaattacttggccggagatgattcaactaattctggaagctgatcaagcaaccgattcatgtcgtctggaaattcagcttttgctctgttggtctttgctcccacaaccacagatgttccatcttgcaatgcccatatctttcaattcatcccaagagaaatcattaaacacagcaacatatcaaggatttaaattttgcagaaaatcaaaatgcagtttgtatataatcccactcttaggcattagtattttaaataacaaacaaagatttaggcaacatgaatgaacaaaagaagttagagctgtatttctaatccaatgatctaatcagcactaagtgtgaattttatattttggatctgattcaatctacacaatagtttaaatctaatccaatacacaataatgcaaatggatgtgttacttttcaattgttagaatatattagcttattagttagtttcttatttagtctgtctaatttaggtagttttctatttactctttgattttgtatgtaaatgaattttaaaataataatattagctgtaccaatataatttgacacgtgtacaagagtgtacacataagcaatctataatagcagttaactaaatgacactataaatttgctaacaattcagttaattttgaaagttttactgaccaaaatttgaaggtcttcttaaatttgaattagatgttaaaccaattaattaatcatattttataataaatttattaattatattattcaattaattaatcataatttataataaatttattacttatattatttaaacttatttacttatttttagtttaataaaattagttagatgtattttttttataagtaaatttaaaattaaattaaattttatatatttcaaaaatataattgaattgtatcaaatttaattttattattattatttaaattaataattaaataatagcaattctaatacaactggcaaacaagcaaattgcatcttactaatacttaatttatatatttatatatatatgtttttatcaataaattttaaataaattaaatgataaaagagtaataaaactctgcaaagaaaaatttcaactaactttccgatatatatgtgtattttgtttcagtgtagtttttttttgggtatagattataagttaattgcaaaattactaatttaatattatatatttttttactagattatcaaggtaatgtttgttaaattttatttatttgtgcatgttttgtgtgtgtgtgtgtgtgttttttttttttcttttattattttaataatatattaaataatttaatattaaaatagaaaatagtgaataaattatatattttatttcataaaatagtatgtatttatatacaaaattagaaagaaaataataaactacctaaattaaagagattaaataggaaactaactaactagctaatatattctaatactctccctctaattgaaacataaatgttaatcatgtctagcttgttacgaaaataattaacccgcacctcatttatagcatttgtaaaaacatctcataattgttgtccaatcttcacatgtcctgtggagattagtcctagttgaattttctcacgaacaaaatggcaatcaatttcaatgtgcttagctcgctcgtgaaacacaggatttgaggcaataaaaagaacaacttgattgtcacaccacaattttgttaaaactgaagttttaaatccaaacttagtcaaaagttgataaatccatactatctctctctctctctctctctctctctctcacacacacacagactggatctagacacaacattttttcttcttactcttccaagagataagattgccccaaataaatacacaataacccgaagtggatcgtctatctaccttaaagcctgcccaaaatcagagaaatactcaatctaagtgtatccatgatccttgtaaacaatacctgttcctggtgctcctttcaactaacacaaaatttgctctaatgttgctcaatgatgaattgttggagaagacataaactaactaacaacattaacggagaatgcaatatttggacgagcataattcaactttcaaccaatctgtgatatttctcaaaatcttcaaatagtttcccatcacgtctaagatgcacaactggattcattggagtgttacaaggttttgctcccaattttcttatctcagttaacaaataaagtacatactttctttgagacaaaaaaaataccttgtttactctaagtaacttcaactcccaagaaatacttgagcacccctaaatcctttgtgtgaaattgagtatgaatgaaagacttaagagatgcctccagtatcattttcagtaataacgatatcatccacatacaaaactaacaaaatgataccagcagttgatcttttatataacacagaatgatctgacttacttttcaacaaaccaaatttctcaacagcctgactaaatttaccaaaccaagcacaaggact

SEQ ID NO: 271590 - DNA, 738 bp, Cannabis indica
agaccaagttgcttataaacaaaataaggcaacaaattcacactaggtcctaaatcaagtaaagcttcgttaatcacatgatcaccaataatacatggaagtgtgggacatcccagatctttgtgtttaacaagactttcatattgaattatagagctggcttattctgttaaaaatgccttcttcagaatattggtgtttcttttcgcagtacacagatctttcaaaaaatttgagtaggcagatatttgtttaatggcatctaagaaagggatatttgtacttacttgcttgaatacctctaagatgtcaccatactgactacctctttcgatcagatcaatctttacgggaatagagcttttggaatgaacggcaaagtttgactcgattcttcaaccgagtctttggaatgtgaactttcaggctgactcttttcattttcttttagtgagtctttgtttatttcagtatcatgttgaggtacgtaatcgggttttcaataatttttccagacttaaggatagaaattgaattagcttcttcaacaggtctagatgtacttacctcatactggctctttggattggggaatgggttgactgggaagttttctcttttccctttcaactataacagtagcaagctgacccatttgtgtttcaagctttaacagggattgttgggtggttcgcatgaactgttgtagggtatgctctaaagattgatttctttgtt

SEQ ID NO: 271591 - DNA, 510 bp, Cannabis indica
gaaggggagttagattatgttgaaatggctgagattttaggtttccccggattaaggttttcatgagtatagtttttgtttagtctagtttagtttttgtttaattttcatgtgttgataattgagctaaaatattgattgaactgttgttgtttatttgtgcaatggattgaaatttaaccgtgtgcttaattcataaattctttggattgaattggatgccttgtaaaaaaaattctttcatatagatgtgaagtattgatctttggatagtatcacttttgttctacttgggtttgtggaatgtttgcttgacatgaaatatagcttgtgtgacttactctcttgaagcgaaatccttgatgattattgcttggaaaatgatttaggcaatttttttggacagtttgaacctttcaagcttacctctaaaatttttgtccttagcatgttagacaatttatatgtataaactgaaacatatatgattatgtataaagtgcggaatta

SEQ ID NO: 271592 - DNA, 958 bp, Cannabis indica
gaaaattgcttgatttgaagcttcagtgttaagaaagtgtgttggaagcttaaggcttgattgtgcaaggaattgaggtagtttttatagttgataacttttgattctttgcagaaatattgtggaaaagcatgaattaagtgaaataaccttgtttatgcatgtatgaaaagagttggagttaatttggttgaatttgagtatgtttatgcttgaatctttgttgtagtgtttctactgatttcgatttgagttcttgctgaatttcttaggttcaagagcatgaaaaaattaaattgttcttggagttgcatgttaagtgttttggtgttcaatcttgatagatttgagtatgatttgcatttttatgttgtgaattatattgttaagttttgattgagtttctagagtattttctagattagagtacatgttttattggctattttattgctcggaaatattggagttaggttggtttgaagctctagtttaagagcttgagttttgttaatttcgagcaatctgatttttgaggtttattgttggaattgatgcatgaaatatgtgtttttgaccctctaatatatactagcaactctattttgtgattctgagagatatgtatgtttggggtgagtttgggtgagttttggtacttattttcgaagcagaaaattgggagcttgtttggatgtattttcaattttcagtttttaaaagtgagaatagaaaacaattttttgtcattttaaaaatttaatggtgtttagcacaaatttttaaaaactattttcagatttttttcctatgccatgacattaacccatccggggccaagtttgggtatagtttcaggtctaggatccgagtatgtgaggaaaagataaaatataatatctaagacaaaaaaaattgtttttgaaaattgaaaacaacattttgatgttttctgttt

SEQ ID NO: 271593 - DNA, 1922 bp, Cannabis indica
cattctttgttgggaacttgacacacagatgaaaaactgacgtgacagcttttaagtcatagagggctgatcagcctaacatgacattgaaagctgatgggacatcaattattgaaaattgtgtcgtcacagttatgctcctcagagcttgtccaatagtgaggggtagatagatttgtcctagaagggcaatgctctagctggagaaaccatatacgagctgggtgtaggggattagatctttaagttgaagccccatcttctcataggttgttttaaacaaaatgtttgaagaagctccattgtctatcatggtccgtgccactgtcgtattcataatctatacttcaacaaccaagggatcgttgtgtgggaagtggacatgattagtgtatgctgcagtgaaggttattgtgggttcccctacccgtggtatttttgtctttctctcctctatggcaaaaattgttcccttttgttcatagtacaaggctcaagcatacttttctcgagctttgcccgagtctccagcaggatgtggacccccaataataacttgtaaatgctcatccactggcggaggcatcaatttggtctagttattgtctgcttggccaaccctctgattctggtcagccttgacatacttttgcaagtacaggttattcttcctgttcaaaaattcaatttcccacttcaagttattgcattcatttgtgtcatggctagtctacgttaaaatggtagaacttggacatgtctcttttattcacgtccttcttcgatgggagagggtttcttgtatgggaccatagactgagttattgcatatattgtccctaggttgtctgttaggatagaaaaagaagtaaactttgaggcattgtccctagtgtgctgttcgacatttccaatgaacttgcctttctttctgttgccctgcctgctatcgttattagacctcttcccattcgagtttaaactgccaggatactgtggactctgagcggactctccttctgaggtggtacatggctggctcttcttttatccaacggtgtctacacaccgaatagcttctttgagcttaataaatccatctactcggtccaaaaattcagccattaaacccatggtcagcctcttaatatccttccacagttctctaagtggctcaattcccctcagtatagcggccagccttccttcttcagtcaaccccttaaccttggtagcctctgtcataaatctgtttatataagctctgagaggttcccctggcatccgttttaccttgaccagatcttctagatctgagggaagttgacaggaggaggaaaactaagcgtggaattttgcggagaaagcattccacgaattgaacctccacggaggcagcttgaagtacaattggtgagcagcttctacaagggttactgggaatactctccctcagacatcacctcgtaccccttttagatccatctgtattttgaaatattttagatgttataagggatcctctttccctgtatacatcttccaggttggcatcttgaactttgggggtagttcaaggacttcaatctcaagggaaagggtgatctacacgccctgtcaagttcgagatcggtgagttttggtcccatcaggccttgtaccatgtttttaagttggtccaattatgcttgcatcaatggatgaactagtttagcttgttgaccgacctgtgtcacgttaggtttcctttgaactggattctggatgcaaatatgtggctggatagctggtgggatgtactattcatccagaccccttcttctattaaagtcagtcctgaggtcatgtgcggcacccaacctattaaatccaatgactaggtggtcttggcgtctgacttatttggccggtaggttggccag

SEQ ID NO: 271594 - DNA, 776 bp, Cannabis indica
aatgacattcaaatttgtgttgtgtaaagactgcttagttataatttagaaattagcatataattagggtttaattatgaatttgtttattagtcttgaattatttattcacaatgatttatttgaattcagaatgcattttatatgtcatatttagaatttcataattttggatgttttgtgccccgcaacattggaacgcagtgtttggctattagaatcacatcctagtatttttagtatagcggggcactatagttagacattgggaatgtcgggagtagtcgagattatagagttgaaaaaaatacccctaagttactttttttcatttttagtgtaggaggggcaaaatggtcattttgccaatttatgttttgtctttttgtgagtttatgtaaagattttaaatctaatttttagtgattattaagcttgtattattaataaaactaaactcagtttatataactttattaaaaaaataagaaaaattggataaaggaaacattttctctctcaaactcaccctctctctttctctctttcgaaatccctagaaccagctagggttctagatttccttctctttttcaagaaatttgctgcaagtttttagtgttcttaagctctaggtaagctcttgactttatcctcttaagtttcttgaattttaagaaagtggattatgcatgtttttgtaatttttgccgttgtggttgttgttggtgtatgatttgtgtttctagattgagattatggttttatatgttgat

SEQ ID NO: 271595 - DNA, 908 bp, Cannabis indica
tttatgccatatttttgtaaaattccatgtttgtaaacaataataacttttgcgggaaaaattcgccagcgcaggaaaagtcaccagtaccgaaaagtcgtcagaaaagtcaccgaaaaactcgtcgaaaaagtcaccgtcgtttgaatgaaaataaataacacaaaataactcaaaccggttataattgaaatataactagttctgtaacataaagaataaaaacaaataaaaaaaataactcaaactaattataattaacttacaaccggttctataacataatgaatgaaaataaataacacaaaataactcaaactagttaaaattgaaatataaccggttctgtaacataaagaataaaaacaaataaaacaaaataactcaaactaattataattaaattagaaccgattttataacaatgctgtaatgaataaaaataaataacacaaaataactcaaatcgtttatgttgacctcgcttttagccaactataattttagtaagcgataagtaaattatagcgatagatatatagtaaagcaatgtaaagacacaagaattttatagaggttcagccccgaacagtttggtaatagcctaatcctcgttatttgtattgactcaagaacaaggagaaaggttccttttcttatagctcttacagcggtatctctgaatatgaattcttagataatatctctctaccaaaatgttttctaccctttgccgagtgactacgcatcactatttatagggctatgagcttggggaagaagtatttcccttctcgttacaatggatataagtagaaagattgcataataaatacagaatacattgatcgtgggatttggacagctttccatatctttgcaatctgatccccaagttataggtattt

SEQ ID NO: 271596 - DNA, 910 bp, Cannabis indica
aatcaatcaaacaagaaggagaatcgggctcaagaagaagagaaagagatccaggttcagatcttgataatgctctgctacagaaaggaatcaagggctagtgatctgaacggaaggagtcattatattcagctgcacccaatgtaaggtttcttaaactttatatgtgtttatttcattgttttagaaattcaaattaggatgttaatgaaacatacttgtaagtaaatgtagatactggtaaaataattccaacaactggcctcagagccatggtaatgatttactttcatgtgatatgaattaaaatgatgatttgtgttgatttggatggcttcatgtggtttatgtgcttatgtgatgatagtttagaaatcacaatatatgttactgaaattttttttatttcgatctggaattatttttacaggaaagtagacaaaaaattaataaatttaggcttttacagaatggatgttttattaattagttatgattttttgaatttgaacaaaaatatctagttttgaatgcacacatgcgcacgcataggggacaagtgcggctcgatcggacaaaattgcttcagacaacaggtgtgtccgaagcttacccttatcccacccatgtttctcggccatagaggttgcacgcagcctcgttccttggtcagacatccaattccgcccgcgcaggggtatgcaatgcatacccctgcctcaaacttgtttttgtcatatcttttgattcaaaaatcgttcttcattgaaacagaagccaatttttggtagaattttgtgtagaatctaaattttcaattgaaaatctaattgccaaaatcaaattaatttttattaatttttaattaattaaaattagttttagatattagtaggctttgaattttgaa

SEQ ID NO: 271597 - DNA, 595 bp, Cannabis indica
tagccatccatcgcattttcagtcgtcgcacgagcaaaaattataaaaattgcataattcaaatataatacaaataatactcttagagtttaataaaatctttggaattgagaaattataactctaatgcccatttctaacaatgggacccacaaataattaaaatccacaagtactataaaaatatcaataattaaaactaattacctttactaatccatattataaatgcggtcattataattatccccccgttaaaaggatttcgtcctcgaaatctaacttaaacatctcttgatattgagtcctcatgtcagactctaactcccaggtggcttcctccaccttgtttatttctccagaatactttgaccaagatgatggtcttgcttcaaagaactttttcttttctatcaagaatctgaactggttgttcttcctaagataagtctgactgtagttcaagggcttcgtaactcaagacatgagtcgggtctgaaacatattttctcaacattgaaatatgaaatacattatggacagccgataacattggtgctaaggctaagccaatacgctacctgcccaaccttct

SEQ ID NO: 271598 - DNA, 871 bp, Cannabis indica
tggaaggtttggttgcatttgattgagcaagaaatgaaatttcttgggtgaactggtgcaaaactgggtaaccggttttacacatatgtgtaaaaccggctagccggttttggcagggttccccaggcctttcattttctcaattttcgttttttggtgccttggttgggtgtttcccaatttccagagttagaataacctatagaaagtataacagaacctaggtgtttggttttgggtttcccgggattagggttttaatcatgtaacttacccagtttccaaatgtgattatggcatccatctagcacaagacttctgttcaggtcggccagcacacttgaattcggaaagaaggtaagaactgtatataatgtgtaaaatggatatgcgaatgtatgtatatgtttagtgtatatgcatgcttatatgttgtgattcatacactaccaacacttgtacggttgcggtacagagtgcattggtaaagtgtatgatgtctgaaagtacattgtggtgttcccagcacttgtaggaaaatgtacaaggtgtatgtggtacaacacttaacagtactcaaggttcggtccataccctacctacactagtacgaaggtatattgagtgcatgtggtacatggtacatggtcgtatccttagtagaacgttcttactcatctgttaagccttgtaaataggtgtatgggcgcctaggtacaagtcaaaattttatgaaatgctatattcttttcttattgagtctgtcgactcacagttctacttccatgtgtaggtaagggaatggtgaaagttgaacaagagtgaacctgagctagggtgagattgtacatgtcaaagcagcgcgacctgg

SEQ ID NO: 271599 - DNA, 950 bp, Cannabis indica
tcatagtgtggaagactgtgaagaatccaatcaacaagaaggagaatcaggctcaaggaaggagagaaagagatccaggttcagatcttgataatgctctgctacagaaagcaatcaagggctagatatctgaacggaaggagtcattatatttcgctgcacccaatgtaagctttccttaaacccttatgtgtttatttcattgttttataattcatattaggatgttaatgaaacatacttgttggtaaatctagatcgtggtaaaatatttccaacacctactccatttaaatatctagaaataaatggacttcctatatgcatctaagcctaaaagcaaacatctaggttcacaggtcagattgatttagatgggccctatcatgtttctagggttacaaggatgaaagaagtacaaaatttacctattacaaattatttataagatctattcacaattgtactacgattaaaatcagatcattggatctgtcaacaagttaatcataacaattagatcaaataaataataggtttgttaaattttttcgaataaacaattaaataaaacaaacaatgtccatgtaacaaatgtgaaataagatattaatacaattaaattattctttaactaaccaactaaattttgaaaatttagggttattaaaaataacattaaatatctcttcaaaatttaagattcaaactaatttaaaacatctaggttatttgaattattttatcaaattaaattaaatatcgaataagataaatgatttaaaaataaccaaatagatattttcaatatcattttctgatcttataatttaataaaattaaaatattaaaataaaccaatttgaaaataaatatggttaggcaattattacttttggaatagaataataaacaaataataatcatcctaattatatgtcaaaatatct

SEQ ID NO: 271600 - DNA, 1014 bp, Cannabis indica
ctgctcgaaagagatatgccgaacagaacaccacacatatctgcgtggaggaagctttcctagctgagcagtagacaggccaaacaagatgccaacacttaaaaatttcaacacttgcatcgtgaatcacagaagcaaccctataactctgggatcatatgacagagatatggcaagctgtccaaatcccttcatcatgtattctgtatttaatgtataatcttaccaattataaacattgtaaacagaagggaaacttttccccaagcttatagccccataaatagttatctattctcattgggcaaagggtccaaagaataatctaagagagtattctcagagataccattgtaaaagctttaagagaagaatcactgcattcttcgttcttaagtcaatacaaatcaaggggagtaggctattaccgaactgctcgaggccaaacctctttaaaaactctgtctccattatttattttactatattacacctatattatatcacttatcgcttacaattaagactaattatcgttggctaaaaccgaggtcaacagtttgtaaagaagaaagacgggtcactgcgaatgtgtattgattaccgggagttgaacaagcttaccatcaagaacaaatatcctttacctcaaattgatgatctttttgatcaactgaaggggaagacaatcttctccaagatcgatcttcgctcaggctatcatcaactgagaattcgagaggaagatatcccgaaaactgcattccgtactcgttatggacattatgaatttcttgtgatgtcttttggactcaccaatgcattggcggtattcatgtatcttatgaatcgggtgttcaaagattacctggataggtgtgtaattgtgtttattgatgacatcttggtttattctgaatcagaagaggaatatgagttgcatctcagatcagtattgcaacggttaagagatcacaagctgtacactaagttcaaaaagtgtgaactctggtt

SEQ ID NO: 271601 - DNA, 621 bp, Cannabis indica
cctcaattctgcacaaacaagctccaagctttcaacacaatctcccaacaatcaagctttaaatcaagctagttttcaccaaagtcaaatttgaaattcaagaggttttgagagagtgagagggtttgggtaaggggaagaagcagacagaaaaatacacttccttttctctaaaaattctatttatcaaatgtaaatcaataaaggtcaaaagaccaaaatgcccctagggccaaataacatccactttaacatacaagggcataattgtcatttcacactcatttattttcaaacaaaaatttagattattcaataccaaataaaatgccaatatttaattcccaaaattacattttgggcccgaacccagttcgacccgaaatacccggttgtgactatactgcgccaacctgtcagaacccacctgaaaaagataatacaagcatactatataataatataatcccataagcacgttaataaattagtttcacggttttacccttctcgtgtcaaaattactaaaatgccccaagctcaccaacggggtcttaacatagcataaatcatataaattctcatatattaaattatataataatataatttcctcaatta

SEQ ID NO: 271602 - DNA, 729 bp, Cannabis indica
caaaaaaaaaaatttttacatcactatattgaaaatttaaatttttttttcgtttttatagtagaaggataatttttaaaaaaaaaaattctgtgttggtttttcaaaaaaactatgtaagtttcatactgtgtattgtgttaagttttgttattttacagttgtttaggttgtttatagaaagacagtattatgtaaaaaaattcgtgtggcagtaaaattgtaaacttaactcaaaatctagtattttgtaaaaatccaaaaaaaaaattgtttgttgaattttgtttgtctttatcattttgtggatttttttttacattttttattataattttttataattgatttttttttttgtttttatcattttgtgattttatacaatttttttattataattttttataatattttattttacattttttctaatattatgtttttcaatttttgttttcattttgtgatttttttacatttttttattataatttttttttacattttttattataattttttttaataatatttattttacaattttttttttacaatacttcgtgtgatttttttgctaatttgtagtgcttgggaccaataaggtaataatggtatgccactatttatggtgtttaacacctctcttaatagttttatgaatgacaattttttttacaacacctcctatggttttgttttcaatgatcgtaattttctttattc

SEQ ID NO: 271603 - DNA, 1550 bp, Cannabis indica
atatatataaaaaaacagtataagataactagttatccctcgagttacctttgtttatgtttccatattctttttcttcaattttttgataaaatatatatttttttaaaaaattataaaaacttataaaatttataatgtcatctttttattagattagataatatattttaatttaataattattataataaaaaaataacccgtaaattacatttgcgtatgtgatttcagatactaaatccaaaaaggtgtattaccgaacatcggaagatggagtagttgttaatataaccaaagaaaatgtttcaatagagatattagattcggaatcaaataaatcaactagttttcaactaaaaagtgatgatccttcatcatcttctatgagcagtacttatcattacttaaaagagaaaagtatagaagaattaagggaattatatcttgaaaaattatataaagaaaaacaagggcaacatgagttttactgtcctaattgtaaggtgtgcatcacaaaggtttttgttaaagatttagatcatcatcagccaaaaattcctgatcatgaagatgatcaaattagaccaatctgcacctcatgcttcagtttcctcattcctgctttaggtactatactatatttacattatattttaaacactttttgattatgattcttgaatatgtattaatattatgctctaattattatataattggtttattgttttataataggctggttcttctctaaactacatggatcatcagctgatctcaccaatccaggtacttaatttaattaactaagatgtttttcaaatatggatgataataatacaagtgagataaatgattcctaattttaaaaatatcattcttttatatatattttagaaaattattgttgtttggactagtcttaacttgttttaagcctccgctaactacggatctactatatgataaattattaatgattttagaaaaaaaaaaaacaataccaattttgtcataatttttgcaccaaaatattctagtgtgttgactctcaattctcagccgtagccagggacggaaggacttaagccattgtataggcttaagccctcactcaattttataatatataaaaaaattttatgttacatatatgtatttaaatttttgtttactataaatgtgtattaagccctcactcaatttgttcctacccaatttaaaggtaataccactaaaatttaacactaaattaaaaataaaaaagcaatatatcaacatttttttttttctaaacatatatgtaacactctattcaagccttcactgaaccgaatttctgtcactggccgtagcaggagtggttccgggagcatcaagggagggtgggagtgagtgggaaatgatgaagagcgttgtgtacggtggtttagctgagtcaattacaagcttaggcattatcacttcggctgcccctggtgatctttctacatgtaattacatattaacccacttctctattctcattaattaattatatatttaat

SEQ ID NO: 271604 - DNA, 1655 bp, Cannabis indica
aaaacaacttattacacacttttataaatatattgcttattgttattatatttattacatataaatatatgtctttctctttttttaaattctaaccctaaaataaaaatcctacccaaccatctttttctctcactcaccaactcattctctctttcttctgtaggtgcggcaccgaagccaagtaaaattctcggcactctctccgacatcactctctttgtcatcccgtcgatctctttgtgatgtctcttcgtccgtccgtctcttcgttccgcccaatctctctatctatctatcattccatcaccagcgtcgcctaggtccgtccgagaccactaccatctccatatatagctgatctctctccctcccatttgtcttgctcgtctctctctccctgcgcagccaaggttaaaaatccaagctccgcctctctccactgattcggtgttcaatatatatatctctatttttctattttcatagtttctctctcttatttgtgcaagggttgaggcgtgggtttaagaagatttgaactccattgtggttgcgcgttgctcgctgtcgacggccgttgttggcagtggttcaaagttctattgttgtggttcattgttttttggtcttgcagtggtttttttttttcgttcttgttgttgtggtggtttcaaatctaagtagtttgcatcaatgattcattttgttataaaggaatttgtgtaatgtttttttgttcattatttttgcattttgggtattttgattcattgtccaatgtttgtatctatgtaatttaaatttttttttaatttaaacttttatattttgtatatattttttaatgtaattactactactttttaataatacgttaaagaatggtaacaattaaaaatattttatatatttattgatttatgtatagtaattgtgtaataaatttatataaggctttaaagtataaatatagaaattgtttaatattatttatttaaaatatttattatttatttttttaaaaatagagattattgcatttcaagtccaacaatggtggacattaaacaccagtccactttgaagtctagttttgttggactaatgttggacttgaaaaatactctttttatgtccctggatattatatccaacacaaaaatataattagaggttcttctattttgtcttttttcaatggttctggagcaaacaccaattgctcattttttatttcattgacatatctattatgggcattacttctctctccagcgagatgcggccctcccgagatgaccaatatatcctcgccctcaacaaggggaggttgcaatctttggttatctgggttgttgggctgattaggccagttttgctcgttcccctaatgcttcacatatttttcaaaatatccacgagagattaggcactctatctcgtcctttagctgccaaaactcttcagttgtatgccctatatctttattaaatcgataaattcttgttggatcttttttgtgtctcgcatgtatcattggctcaggtttgcaaaatgcaaccctatgctcatcatcaagaaagatgttttcacgagtttcattcaactcgatgtacatggagtaaattggcacatatttctcgtgatttttt

SEQ ID NO: 271605 - DNA, 666 bp, Cannabis indica
aagattgaggcagcatggtcctctttctgtgcctcctcaagttgctcaggtcgttgcagttccagcggtgccagcagaacaacctgttgttggcaaccgtatggagccgttgtacgaaatatttcgcaagcaggcacctccagtgtttcttggaggtccggatgtaatgacggctgagcaatggctcttagtgatcgagcgtatcctcaattttatcggagtggttggtaatgatcgggtgacatgcgccactttcctgtttcaggaagacgctctcgtgtggtgggagttgataaccctcactcgggatgtcatagtgatgacctgggaagaattcaaggagtcgtttaactccaagtattacaatgtagctgtccgcaattcaaagcggaaagaattccccgaatcggttcaaactgagggaatgtctgttaccgagtatacaataaagtttgaccgtctggccaagctcgcagcgggaattgtgccaacttatttcagtaagaaagagaaatatttggctggtttgagtgcaaaaattaggcacgatttggtaattactactattgaggcaaccatatatgcagagatggttgaaaaggctttaagagccgagggtgcagtgaaatttcttcaggagccccgggtgactctgagtgttggtgg

SEQ ID NO: 271606 - DNA, 662 bp, Cannabis indica
atataaatatgtattcatctcttttattatatttcagtcagttatatgataaatattatgtttgcataacttcaggatatatgcaagattttattgagaacgcataatcttcagaatatatgcaatattttatcgaggatacatactttttttagatatatgtataatttatatagattttctctatcatatcgtagacacatatattgtaaatattataaataatttatgaacataatatatatatatatgaaatcaatcataaacatataataataagaatatatgcatatttaacatataatatatagatgttaaatgaaaaagaaaaagaaaaaagggttcttgaaatttcttcagtcagatgagtatatatataaatatatatttagtgtatcgtgaccttcaaacaatattcaagaactttaacaaaatatttaccttggggcttgggcagagactcgtgctgataatgtgttataaaataatatagaataatatgaaataaataagaagaaaagaagaagaagatgatgaagagagaaagagaaactgtaagtaataacagccccaacttgtacacatcgtctgccacatcgcacgcctcaaatgctagccaaatggttttgaaagtgacccttttggcattgttgaggtagtcc

SEQ ID NO: 271607 - DNA, 616 bp, Cannabis indica
tttaataaatattttacacatattcagttctaatatcaccaaattaaacatatcaaataattaatttgtagagaaaaatgattttttgtcgcctttgctatgtgcatatacatatagcttgtgtatgcatttttttttttaaaattaacttattattgtacaaaaaataaataaaaagctcacaacttttaattcactaagtacatttacttatatttcatttgaaatttattttccaacgccaaagctaaaaataaaaaatcatacataatgctttgtgtacaaattaatatttgataaaaaattattgtaatgaatttcaggtgatctctctcaaaggcttaggtatcatgaatgcattttcacatgttcctcctggtttccgatttcatccaactgatgaagagcttgttgattactaccttcgtaaaaagattacttcaagaagggttgaccttgacgtgatcaaagatgttgacctctataaaattgagccatgggatcttcaaggtagatacgtacataaatgttgatcaaattaaaggaaaaacaaatgaatatatatatattgtacaataagtaattatgggttgattatattttgggcagaattatg

SEQ ID NO: 271608 - DNA, 2901 bp, Cannabis indica
tttagtgttgtaccaaaaaccctgacccgtatttatagcactagcccaatgtaaagatgaactcgttggaattgaaactacagataattatatagattgtttttcttcttcttccttttatcatttctgcatactaacaaaaaataaccaaaaattatatgctactgacaattaagacatggttgcagacaaagcttctctttgaaaatcaaaatctggcgtgtgttttgcctcaaaatcatgatttgatttttaattaacttctctatctactccttatgataaactcatatggtagtagtacaacaccacaagatatgagagtatttcatggcttctactcagtataatacaatcccaacctacctaacatcatgtcaattttcacaaactcaacctcacaacactctagttaataaaatatgaccagaaagacctcagaagtaggagcctcggcgaggataggctaattcgtttcgatccagtcttctttgcaaaattttcaaccagtcttgcttcatggaagctcctgcccctactcacatctcgttatcaatgatgtcccgcatcatctgtattggaatgagcccttcagtccggattgcatcttttttcgggtcagggctaatgaagtataatgtaggcaatcctcgcacctgccatgatggaaaatatgagaaactttttcatggcttcatctctgcagttaaagaacttaagaaagtaacatatgcaattagaacaaagatgagtaaatgattctacctgcatatcacgagcgaattcatattcataatctgtatcgacttttacaatcattgcattgctttcatactccactgcaagcttttagaacaaacccaaattaagatttcatttcaatataagcaaaacctatgacacaatacatttaattaatatttcatgaattctcacatcatatccaacaccccaactaaagaattaactatgaactaaatgactttttaaggaatcatagatctggtcaactaatattactgggaaaaaagcttcaaaaacaaatcttaatgaaatggggcagcttgctgattggtttatcaattcaaacgaccacaagacacaaacaaatggagaaaaggcacgaaaactagatgggtttacagccgcaatgttggcaagttttgcagggagtttgataaggactgttgcattcacggcacaagacgtacaattccttgaccccccaagaaaattgaattgttgtaaggtaagttattacatgcttactagtctcatgagttcgtactaggtgacacaaattcagaaacacaaggggctttcaaggctgatagacagattttggatgttattttagagacaaacaaggttatggaggaagatagaggcgatggaaaaaaggggctaacatgtaaaattgacattgagaaggcctacaaatttatggtgtggtatttactattttctagagttattgtacaaaatatgagggagaatacactagtagtagatgccatgggtagagtggtgaagaaagccaggttgaaacgaaaatcttagaccgaatctggattaaaaagatagcatgaatgaaaacacatacaagtacaatatgattaaaagtacaactataagaaacctagtgaagctccttatcataaccaaataatgtccctcattgacaaaaaattatacaaagcatctactcatataaaatttatatctaaatgtattatatggttcagcattaccagaaaatattactaacctactaaaacttaaatgtctcatatatcacttcagagaaatatagatgttgtatatattaatataaatgaaactgctagatgtttctattctatttcaagaaactgggctccttgcctaaccccaggagagactaaaacctcatgtgttagtggaatcaaaccattctgaacatgacaaaacttaaaaagtcttttcttctaaacaaaatataggaaccaaagcagagctggatatgaatagttgaaattcatacaaaaactaaagcatttcataaaacaaagagtcttttaagtctgtatacaggagtacaattcttaaaccaaacttaccatctctagttcttgagccatcagaatacaaggtccacaccatgtagcataaaaatctattatgaggggcacatttctttctccctttaccaggtcctgaatctcctgagcagacaacttcttctgcaacaacataattacagaatttcaaagtgttacacataaattctacaaccaacatcatattcctttaacattgtttacagatttaaccaacccataattcatacaataaagtaaagactcttacacaacaatagagcaagaattgagacaagataagaaaatgggcaagtgttatgaagagaagcataccacgagatagtcttctctgacatgttttccttgagggggtttacaaagaagctttctgggaagtgttgagagtgaaaagggtgtttggacattggaggaaaagagcgagctttggtgatgggtttttatggctgacagtggaaaagaggagatgggttttggagttgtgaaagaagggatttttggtaagggtgagaaggtttgaaaagcaaagtgtgggtgaagaagagccatgttgagagagtgggagatgggtttagttcaaaagccaaaacccaaaacccctaaaacaaaggcaaaggaagataattgaagagactgtttggaagctttgaaatccatcctctcacctcgaattaacatatcccaacaaaataatgttgcattgcaactttgtttaattcaatctgtaaaagggaattttacagttttacaccatttggcccaaaaaacttacaaagtataaattttttatatcactccattc

SEQ ID NO: 271609 - DNA, 1000 bp, Cannabis indica
gttcctttcatgatcataacatactaatatcacaagtgtcatctaaatgaagatgggctttgaattttaaaatctccactcaaataggtactgtgatgctatgtctaagaacttctattggtatcagattctattacaacaataacatattaattggaacaagaattaacatcaagaatatgttctgataattttgctaattttgttcattatattatatccatgtttaatcaaaatatgtgtgccatagagatactgtggtgtattgagtatagtctagagttcaaaatgaactacatatgtcaatagtttaatccacccctaagtgatatagagatcctgtaatccacccgtaagtaatatagagatcatgtggattatgaatataattcagagttcaatagatataaaaaatcgttgaactgcatattattcttaacttttccacccatatcagatcaaaagatcttttttattaaacaaaatcttactaattgtttcagaattaacaattattcataaacatagaattgaaattctatgtcacagagataaatataccttggttttttttgtcagtaataaaataataatacatacaaacatttgaaacatataaatataatttgtataggcatacagaagataaagaaatatgaagctcaacttataaatgcaattcattaccaaaagagaaaaatttattataatattcaccaaaaaaatgaattttctgcaataatatgaaaaatagggaataaaaatcccaaaccaataattgaaattcaaattgtttagggattaaaacaattaattcaaaattataaatagaagattccgagcttcatcttcaatcttggactatctccacccatctgtccaaccatctgactcaacttgctagtataacaatccaagtttaagcagttggagctaaataagaagaaaaacaaatggttagtaggtccagaattaatcacgggcttgcctgattaggtga

SEQ ID NO: 271610 - DNA, 564 bp, Cannabis indica
ttttgctctcatactcggatcctagacccggaaccaactcgaacccggatagattcatgtcatggtatgatgttaaaacattaattttttttagtaagaaaaaaccaaaaaatagttttaaaaaatttgtgtcgaacaccattaatttttaaaatgacaatatctcacttttaaaaatataattttaaaaactgaaaaatcaaaacactctgctcaatttctcgtgaagatgatcaattaataatatatttctaaaccatgtgtatatataataaggttaaatacaatatagggagaagtacgacggccaatatttttggaatgaagttattatatattatgaggtaatataacttttttgatggaaatcatgtcaaaaggaatttaaggtctaggtttctacatgctaccttaattatatatcatcatcatcgtcaatcgttttcgttacaataatatagaaaactttgactttgtatatattaataataatatatatttatttcaggataattagtgagagggagtaatatgtatatgtttgtggtgtgtgtgtatatatat

SEQ ID NO: 271611 - DNA, 866 bp, Cannabis indica
tcaagctccaaaccaagcgagatcactccaatttcaccaaaaataaaagttgaaaagaagagggtttagagagagagaggggtcgggtgagaggaagaaaagcaccagaattttcttttcctttttttcaaaattccattttgtcaaacttagaaaataaaggtcaaatgaccatttttcccctagggccaattaatatgcataaacactttcaagggcataattgtcacttcatacacgtttaattccaaacaaatttcagatcatcaaatatcaaagaaaatgctaatatttaatccaaaattgcatttcgggcccgaaccccgttcggcccgaaatacccagttgtgactataccgcgccaacctgtcagaacacacctgaaaagacaacacaggcataatatatgataatatagttctattaagcacataattaaattaatttcattattttacctttcccgggtcacaattactaaaatgcccctggctcaccaacggggtgttaacatataattaatcaaataaattctcatatattgaagtatataataatataattcctcaattattcataattatataattagggttttgctaatccatttcttaattctagggtattacaaaatgccagcgagaatggagtatgtcctgttgctatcttctcagttgttttatgagcccaaagtacttgaggcagttcatcgacccatcgacctttagcagcgtccaacttatttttgatagtagccttcaaggttttattaactactcctacttgcccatttgccttaggtcgtgacactgacgagaagctttcaataatcttattcctctcgcagaactcagtgaataattcac

SEQ ID NO: 271612 - DNA, 1186 bp, Cannabis indica
cgccagcatagtagaatataatcatgattatatgttcaaaagtttaattcccgtgatttgtcagttcactagatttaggctaacatgataatcggcgataaggtatacttacaccttggataatatgtcattttcagggcattgacaaagtataccagtatcgtatgtattgagtatacattggattagaccgatattgattttggataagatatcataaacttaccgttatatctatctaagtcaatatcattggttgatcttaggtctatggatcttaatcctgatatggttaggttcagcttagttgtattattcatgttcttcaagttgttcgtggaagctaatcaatcgttctggcagatatttacatcttgggaatatggtagttcaattgagtgagagcgctaatcatagatatggaatctatagattttataagtatttaaaagtgaaacgatgattttcttcgagcttttctgaatagagataaaaaattgagatctcatttcagtaattatattagtttactaaaataatatttttaaacagctaagtgttttaaggataaaatacattgaatggtagaacgataaatttgtccttattcaatgtagatcatctatagaggatctttgactactaggattgtaacaatggataatcataacctatctatatcttggtacatatagagcattctatataattgagagtgcaattcaattccaaatctatagtggctcaaggcggaattaataagttgagataatactgcttgcagactcagttaattggttttaattaatcaattataattgtgaagagaagaggttttaggattcatttattaattaagagactttatatggtctaattaatacaagacaattttatttgataattagttataattattaaataaataattttggcatttataggattgaaattagaaatatggtattattgaaagaagaataattagttgaaataaagtggcaaaattgtaactagagatttttccatttagtggtcgaccactctagcaattttcacccaatattttattctttttcaatatatataattcaaacttaacccctagttgaaacactatataaggaacattatgctctcattttatccaacacttttcaacgtgccaaatctagtttctaactct

SEQ ID NO: 271613 - DNA, 3797 bp, Cannabis indica
ctcattttacagaattctctgcagtcaaagtcttttttcgcaagaaagatcaactctggcttcaaaacgttctatttctgttttgttttgctgatttttactccttagaatcgaaacctgggaaaaaaagaaaagcttcaactgtgaaaactactacggttctcaaaatgttgccagaaatcagttatgacattgctatcaataacttaaaattattaattatcagtggaataaacggttaactggttccggctttgcatctcaattacttcagattcatattaaaccccgactacagaaaagataaaaccatgaaacggctaaaaatgatcaaattagcagtaccttggggcgttccatggagcttccaaaatatcctatcccaaaggataaagaagaataagcagccgcaatctcaatagctttcagtttcggagtacttccagaaacctaaagtaaacatctactacataactgtttcggacaagctaaactaaaaaatgttccaatcaagagcatggaactcacccctgtgtccgcttgtacaagtaaaattccagcacttttgtccgttccattatggttactctcttgcataaaagaccgtaaaactttgttacaagctgaggcaggaccaacctgtgaactatgcaatgtatacgactgtgtcagacataaaaacagagtctgcctgtgaattagcaggggcaaaatctaagttcagctaagtttctacaaagcagtgtagccaactttgccatctcaacataatccaaagcaggaaacaaaatcattcggtaacaaaatcgttgagttcttctacccctaaatccttacctattttactaatctaatgacagcgttcctagagagaatagtttttgaatcttaacatactttccgagagaggaatcaatagcaacagatcttatgtgatggaaaagtaagaaaaaaaaaggagaaattaaaaggcagtcatacattgatgaagaaacacagcactctcgggctgcaaatcctttcattagatattcaccagcaccacttacgcaacaaccaaccacaaatggagctccaaaaggacctttagaagatgcccaacaacctgaaccataaagtcctgctaatccgacacgtcctctcacctgtaatatatgtgtgtatttattattattaacaatgtacagacaaaatgttgggtttcttaaaatagatggtgagtaaaatagcagtctatactatagtagttcattaccttcatggcaatgcctccacttgaggccccagatgccacatgtccttcagtgtccacacaaataacaccaacagtgtccatgacgcaatctgcttcaggcacatccctttctgaaggacaacaaggtttagcttcttttttctgaagcaatatgcacgtaatatcagtagaataatagaaagaaagatgaggtaaggtacctaaattttgtagactacatgactcaaaggaagatttatctgttccagattttgcatcaatcatcatagctttgtattttttccattgtgcttttgccctttctgtcaccagccactatcgaaattcacaatgtcagttgagacaatactaagatataagaagttgaataattcgctcacaatgggaaaagaaaattatataaggacctcgtcagcctctttcaaagtaactggcaaagcgatacccttggattttgcccattcacgagcaccttcgccaaccaggaacctgtgttataagaaacgttgttttcaagtttgctaagtaaaacaaaaataaaatgaatgaataggcacgcctactaatctatctattctagtctgtaaagagaagcatataagaagtcaacagcagacagtcctaagttgaactgatgatgtttatacaaattgtaggcagaaacacttcactcaagtacacatttgcttaaaaaggataaaaaggaaaagacaactgacaaaattagaagaagcaattcttttaagcagagttcaaagcatgcctatttattacaagagacgtaatcagaaacgtaaaaacatgcatgtaaactaaaattagagagagaagacagtattcaattacatgggaggtattagacctagcaaagtagatttcttcatttgctccttcaccagtaaagctgcaatctggattgcgtttttaacacctggtctaaaacatttgcagtggatgttcagtaatacattaaaagagagtacactaccaacagttttaatatattgataaaatgaaacaggcaaaccaataacgaacgcaatgatatcagccttcacaatataactaatagaatatgcatcagagccataatgagattacctggaaccgctccaacggctccaaatgttccagtatcaccattcatgatactggcatcacattccaccgaaccttcttcgttcaaattggagcctcggccagcattggtgcttggatcatcctacattggaaaaaaaaaaatctaagtgaatctataagctataattctaacaaagatctataaaatatgtaatctatcaaaaagatgtaacatttcgaatcatgaatgctacatcaaattcgtttttttcaatgaaaaacatccgtaatgataaggagcacttagtccctactcaatacttataaattcatataaatgtacctccaaaacttgaatggcggccgaaacagcatcgacacatccaccagagtcctaagcaagataaacaaataaacaaaagcttaaactttttgggatttatgaacaagctcgatataaagctgcataaccagtatataagatataaggtaacgatttccatgaacctaataaattaaaaagagacgaaaccttgagaactgaagaagcagcgagacaagctcgtttcatggcggacctcagggctttctcattggacggcgagtgaaatcccgcgcctacgtgaactgcaacgaagaacctagggttttgatctccttcgactcgatccaatgccatcgatcaatcctgatttgtgaaatgtcaaattcaaataatcgacggtgccttttccgccggaagcttcctttaaatcccgtccaggtctgtggcttctcaaaactttaatttaaaagcgcgggtagattcttcaatattattttcgtttattatattataagaaataaatacgaaattagcttagggcgttcatttgtataaaaaagaagaaaaggtttcatccgagcaatggatacgagtatatgaatatcaaaggaaaaatcactaatattacatttacatgtgtgacaataatagcgcagttctcaaattcctggaagaactatacgcataaaagtgtaaataaatatgagactcaattttacactatttccttcaatttgtttagaagagatacattttagtcttgacataataatcatcagtcattatcgacattactgtgacaaagaacatctgaattgggaacaaatttaaaaagcaatgaaaatgagaatggctttattcaataagataaaaacagatacattagaataattatgaagatactaaaagaattacaatggcaagttctcaatcaacacaatttttgtcccttttcaagaaaatgatataaaattacacattttagatttctgcctgatatttattctcacggaaaatcacaaatggcacgtatttgaagaaccaacagctttaagctcaatctcatggttaagctaggaatagagctttacactgctcagctgtatcttcagggctagtaactgcaaaaaaaaaaaa

SEQ ID NO: 271614 - DNA, 2339 bp, Cannabis indica
tttttttttcaagggaaggctatgattaaagattataatattacaacttttttagttttcttcaatagtgaacacaacaagagaaagacatcgccacaaatttaagaacctcaagttatttggttctcttctcacattgcaatgcaacttaatttacacaaaacatatttacaataaaaatcatgccaaaactcctgtataatatgttgtgaagatcgatctaaccataaattggagaagtaatttccttgaatcttcactaaggagaggagatgatatctcttcttctctcctttaaagcaactcaataatttgacttcaatgatgagaaagatctcaaactcttctacttggttgttgaccctttacattttttgaacttcttttatgattatgagaaccagcaccacctgatgatggttttgaaacatcataaggtgactgaaaaccgatgttttcgacagctccaattgtattaaacagccgtctcttgtaaacttcctctaccagagaccggtgtagtaattgactgcgtatgtcaactaatgatttgttcctcatcagtttaaggttgtccatagcaaccattttttgcttttcctttgaagtagtggttgatagtaatgctttgagttgctcattgtacttctgagctgtagattgacttttcttatggttttcttcaggacaaaatcttgtggagtagttgtgactctttgtattgttgggaagtttgtctcctattgtggggcttgtattggtttctttctcatctccagagagataattcaagttggaataagttcctgagtgtgaagaactcacagagctggtatcatcatacaaatcatctgcagacaacaatttgcttttttgtagtttgacttttttattggaccaatcatgtattgtactactattaatcttgtcatatgttattatgttctataattcatcttgaaccaaagatttcagtataagctagataagctaacttaagtaagaatttaaattctaaagaagaaaaacatgaggagtcataccttgaagccaatcgcctcgattcgccatttgatcaatcccattagaggtaatcatgcctgatatagatgcctgggatgatgaacatgatgagaaagagtagaaaggatgatgagtaccatcatgatcatcattatcttgataattaatagtatcatatgtttcttcttgccaatgtggaagtagagaagatatctcctcttgaatcattttagctatttcaaatggttcccaatcagttatctccaattcttttaccatctctgtggcaacatctagtggagtgtcactaacaatgtcaaaggggaaaaatatgttcctaggaggacctgcaagaagtagaatctgttacaatttgatatatataacagcaacaaaaaaaaaaataagtgaagtagaaacaagttataaatttgaaaagtaccatctttatcattaaactgaactttgagaaagatggtatcatcttcaggattgagcttccctgtgattttcatctcagtccggggtaaaggatcactcagtcttaattttctcatttctttgtcattcagaaatggtttctgatttcttcctttttgcaattcgatatcattttcatcattgcaggcaagaaaaggatcaagcaagagttcttttgctgataatctctttgaagcagtgactaagcatttcccaatgaaatgttgagcttcaaaatcttgaatcttgtaaaatgctgctggcagtttcccctgaccaaatgaaagtaacatgtttggtaatctaaagactaaaaaaacaaacaaaagggttctttcacatcagaaaactcagcttaccgaggtcactttcttgtaaatttgagctggattggaacattcactgtaagggtattcagaagtaaacatctccaaaacacacatcccaaatgagtaaacatcaactaactcattgtaatcttcctcatacaattctggtgccatgaactctggagtgcctaaagataaaaaaggtagaaattagaggtacaagttttggcactactcaaaaatttatactagttacgtagtacctacctataacactgtgtgctgattgagagccacgaagaactgcagcaagacccagatcaccaatcttgacctgtccaagatgaccatttacaaaaatattgtcacacttaagatctctatgaataacaggagggtcatggccatgaaagataaacaagaccctttagaatctgtctagcccaatctaatggccttgatatcaagctctgtatttcttctgtatctgcaaaaatacatataagt

SEQ ID NO: 271615 - DNA, 1434 bp, Cannabis indica
aaaattaaaaagatagtaaacctaatttcctaaaaaattgtaattgctttcagctccgtaattatttttttattattttctttgttgtgttaaattttgaaacatttgagattgatagaagtttcctggaggcacatcatctccgcattccaatcgtctccctcgtcgactctaccatgccttggattactactccaagatcacctatctcgtccttcccaacaattacattcagtttgtttatatcttctacaatctcattaccaagacctttcttcttcataggtatgatgtcttgtatgtaccacttcacttttgtaccgcactttacctgtttaatgttttgccccattgaaaatattaataatttttaagtttttatgagtgtgcagttgagaagtataagaaatttccatcaattttgcagcacgtttatcaattttgaaattattattaaataaataattttattatactctttataaaagcagtgttgaaggagggtgaagtagaacaataatggaagagaaaggtcgcgaaagatggaacagatctcaccgagttgtcttccaatttagagccccttcaaaagcttctgtataagaaagtcgtttttattgacaaagaaacttttgccaaagcctccttcacctccgaacaagtccgaaccatcaaggtctcttccacaagactcgtttcaattaattaattaaactttactttgattattgatttttttctctatccgataattttatttttggattttaatttttttttgaagacacctccatatatgctatatccctttgccaatcaatgaccttgattcatggttgaagacaccctccatatgagtttttgattgctatgctcctttgaatattgggaatgctttaattaagataaaatatcaactcaaacatatactgacttgatgtatcatgtatatattggtaattaatattactatgttgcatgaattcattatgtaacttggatatattttagtataatgacttgatttaattgtttggcaacttcatgattagattacttatagctcctctgaaagcacatgagactcttccacaaagtgctgactttcttgctgatgtatttacatcttgtctcacaacacctattaagatggctttgagatggtgagtttcctttccttattcttctgttagaatatacatctttattcaaggtcgtgcaactttatgtttttgtcaagtttcaatctattttttttctttcttgtgcacagtcagtgatatatactgtaatgtactctgcatgatttgcatgttatgatacttattttatgtacttgttcaactgtatatatttacaagcttaagaaaaatattcattataatgtcatttgtggaatctacttatattttgaccatgtcagtcaggtttctt

SEQ ID NO: 271616 - DNA, 542 bp, Cannabis indica
ctagactcattctgatttagtttcagttcctacctacacatgcaaataatatttgtgagtcgacagactcagtaagaaaaatataaacataacataaaaccagattgtaataaggtgcccatacatttaattacaatcctattctgaatctaacacgtactaagtctagaatattcatacgacaaagcctaacatatattagcatatatctgttgacatctccgtgtaactctatgtatacacttcactaatatcatgttatgctaatctaatgactactatataatttttccaactagttaaagactgattcacctggaagcctccttgtctagctattattagcaatcagttggttcagtatatatgtctgaggacgaatgttataatgaccattccccctaaggtaatgggctggaaaagtttgctcgtctaccatgtggtccacagtttgactctgtgactttagattggatggctcatttccttgggtttgttgagtgtttccaaccaaacgttcttctggcccgtattgtggttca

SEQ ID NO: 271617 - DNA, 569 bp, Cannabis indica
aggatagggacctgggaaacagaactaggaccgcgatcaagttcccgacccagaccggaacttgaacctaggacccaggtcgtgactcggcacgagaaatggaactagactaggacccaagattgggatccggatatggacccagggcttggacaaaacccgtagtcggtgtttggatttgggacccaggcctggacccgaaccctgacaaggacccgaacccacactcggacctgaacctagtcccaaaatcaaaagtggacccgaacccgtaccctgtgaccccaaattggaacctaaatcgaatgttgacccggactggaactaggacttggactttgaatcataactgaaatttgacatagatttagaactgtaactggatagggacccggactcaaaatctgacctatacccgagttgggagccagaaccgaatcccaacccaaacctgaactcgggacccaaacccgaacatgaactcagacccaaacatggaaccagactagggacatagaaccatggtcgggacctagaatcgcaccccagtctcgatcccgaacccaaac

SEQ ID NO: 271618 - DNA, 1184 bp, Cannabis indica
tttattttttatgtatgaaattaaagtattaatttttttgctagtgattttgtgttattgttttaatatgttgcttaattgtttatataaattttttggcagccataatggataagtttattgtaccagcttcttctcaattaggtgaattgcatgatccaaacactaccttgaatactacccaaagagtaatattgacattgttgattgaggcctacatgagaacttattttattttgttcaagtttgttatggatgattttaatgttttaagactttggatgattgtaattttaatgttttaagactttggatgattgtaatttctttaactttggatgcttatgtttatgtttgaacttttatgaaaatttgtttttttttatatgacataagggttgtaacccaacccaacccaacccaacccaacccataaaaggaaaaaatgggttgggttagaaaaaattcaggatgtcattgggttgaaaatttctaggccgatgttattgggttgggtcattaaaatagcctcaacccggccaacccaactcatgctcagccctataaaagaccgtattttctataaataaaatcataaaaatcgtaaaaatattctaaattacgtacaaccgtatttttataatttttttgtattttatgtatttgtaaaataatccttaatgttaacatagctcacaatttacaactatttaatgtatgaataaattaattccattccatccacctttagatatagaaataaagaacaattagaaccgaaaaaaattaaaaagaaaaatactatgtcttaatttttttgaatgagaaccacttgaacccattttactaagaataaatttccaattcataagccatctctaaatatcaaacccaaactccataaatcaaattccaaatcacaaaatcaatgtattcctaaatcacaaacttttttggtcaacttagacatcaccataaaggtctccttgaaggctcgttgcttcaaactcattctaagtggacgccatcttcggctgccatcgacttcaacccactggtggagtacccaatattagcttggacaatagaatatactcacatatagactctcttatttttttcactgattacgactatagcaaaggagattacactcataacggagaaacttactttgaagaaca

SEQ ID NO: 271619 - DNA, 2800 bp, Cannabis indica
tagttttttttaatattatataacaaaagtaaaaaaaaaaaataatagtgtggtctacagtgcctactaaatttggtgggacactctagacaaacctatttatagtgtaatttatagtgttaggttggaatttttatagtgtaaaattacactatatttagtattatgaagttcgattggagttggtcttagtggtgcttaagatcttttataattggcgctccacgattatattctctaaaaattattttttaaaaaaaataatatgagacttgacacttaattattcaactaacattttgatacacattgctaagcaccagtcttctactaattctaaaaaaaaaatactaattacaacctcttagtcaacatccatatctgaaatcctatgccaaaatatttttttcaaattttttttatagcggtattcgttatagttacagtatcatccctgtaaattttttaaaaaattccgaatagtttacagtaccgaaaatagatttcttgatattccaatttaccacgcgcgttcaaaaaacttcacacgtattttcggcacggtaaactattcgaaatttttcaaaaaattacaaggatgatgttgtaagcataacgaacactctcgtgaaaaaaaatattccgagatatgttttcaggcgtaaaatttgactaagaggttgtaacaagagattgacgttagttctcctcaaaacaaaaattatgttgttgtgacataaaacagatttggacgctaaatttgccagtgttgggtcatgtcatgtcctttttttctttttgctcttgagtgtctgtcatgatgtataaataaaattaaaaataatttttaaataaaaaatatactttccatatatttaacatataaaataatttaaaaaagttaaatcaaattataattaaccgtacgtaagtttcgtttatacttaatatacatacataaataaataagaaatatagatatatattgatagattaactttgaatagcaaagcaaacattggaatcatttgaggtagatatgtaaaagatattacatattgatgatggagataaatgttgaagtagtgtcgaaggagattatcaaaccatcttccccaacttcaagccatctccgaacttaccatctttcctttcttgaccaaatatcaagacatgtctacaacccttttgtcctcttctatcaaaaccacaaaaacctcaacaaccacaacctccttcacctttactccaccaacatcaagaaatctctatccaatctcctttcccgctatcatttattcgccggacgactcaaacaaaccaccgtcgattgtaacgacgagggaatcccttatttcgaagcaaaaatcaactgcaaactctctgatttcctccaaaatccagacccccaacaactccacaaattcatccccttcgagcttaacggactaggccttgatcttctactcggtctccaattcaatctcttcaactgtggcggaatagctattggaatttgtatttcacacaaagtagctgacgctatttcatgtctcttgttcatcaaaaacttggctgccactactcgaggctgcactgatgatgatgatgatgacaaccagaacaagattgtttggccgaaatttgaatcagctaagctttttccaccaaaggaggcctcggcgcttggtcgtccaggcggtgttgttatcccgacactaaaaatcgtaacaagaaggttcgtttttgggtctgataagattgagtctcttagagcaaaataccaagaagaagatggggcgacgaggcgaccttctcgggtggagacattgtctgcttttataacaagtcgttttatggctgcactaaaagtaggatttggtgatgataaaaggcgcctggttataggtcatgcgtttaatctacgtaaaagggttgatccaccactagaagaaaattcatttggaaacattgccagaccatttgtaaaagtcttgtctagtaataacatcagtgatgttatgagtcaaatgagagagcttattgttagcggtgatgacaaagagcatgccaagagcttacagaaggaagggattgatccaacattgaatttttttgaacaacatgctgatgaattgatgaaaggagagctagtttgtatttgcttcactagtatatgcaggtttcctttgtatgtagattttggctggggaaagccctcgtgggttgcaacaaatccttttccttataagaattttgttgttcttgcggactccagacaaggtggaatagaagcttacattgatatggaggaagaagacatggtcaaattccaaaacgatcaagagttgctttcatttgtttctgatccatatataacaatataataggggaactcacctccatttgacgaagctcacctcttacaaattattgtgtcagagattactatacaaccaggagaatccattatcatcaatacattattcacgcggttgatttcagcttttactttgcggcattatttgtttaatgtttaatgtggaatttgattcagctagagtggaggagcacaagtgtagtagtttaactctatatggaaattttcttataaaacaaaaaaaaaaaaagtatggaagttttattttgagctaattatttgtctaaataaattttataaatgcaaacaaaacaaaagtcaaatcaatatctatatctaacatcgatagaattgacgttgactaccaaacaaatgaaaaagacttgtttttgtcttatctctctttcttctttttctttt

SEQ ID NO: 271620 - DNA, 963 bp, Cannabis indica
caaaacatacaaatgaatgaaaaatacttctgtttctttattgatattgaataaaatgaattacattgaaaatgagttttatttagggcataaaacccaacagtttttccaccaagctaaggggattcctgtttgggatgctgctatggacacagaaattgaagctttagaaactaattgaacttggattgttgttagcttagctgctggtcaccatgccatagggtgcaagtgggtttacaagatcaagtataatgctgatgggtacaatcaacaagagggcattgataataatgagacatttggccctgtcaccaagcttgtttcggtcaagctcattttagctcttgttgccattcaaggttggtttttacatcaacttgatgttaataatgcttttctccatggagatttgcatgaagaggtttatatgaatttacctcaagggtatagtcccaagggggagatgccacctaatgttgtatgaaaactaaagaagtctctgtatggtctaaaacaagcttcttgacagtggtttgacaagttttctacagctctaattgaagagggatttcaacattcagcattcgatcactctttgttcattcaaaggagtgaatcaagcatcataattctacttgtatatgtagacgatgttatattggctagcaacaacatggctgttgtgaaaaagttaaaagtaactctgaataaaaggttcaagctaaaagaccttggagaattaaaatattttcttggtattgagattgctagaagcagtgaaggaatctttatatcccaaagacactatgctcttcaataacactacaagaaatgtcacttttaccagcacagttcgctactgcgctggtaaaagtaacttttaccagcacatttcgcaaactgcgctgggaaagaggtcaaagttttaccagcgtacatttgcagtggctcaaatctaac

SEQ ID NO: 271621 - DNA, 1769 bp, Cannabis indica
gtgtgtaagtttttattttggttttctttacagaacttagttttttgtcttatattttttaactaattgataaatataataggtttttttatcttatttttgagttattttgtgttatttatttgttacttattttattaaagaatcggttctatttagatttatgcctatgtatttttagaattgattcctacttttttttatataattataatcgatttctaaggtattatgtgttattgatttatactcaatttgtttttgaactagcttggtttggtttttaatttatgtttcagtgttttatttttttctttattttttaattataaccgatttgatttattctgtgttatttgtttgcatttattatgtcgcaaaaccaatctatttgagttatttcgtttatttgttttattcattataacactgttatagaactagttctattttaattataattggtttcagttattttgtgttatctatttttattcattatgttataaaaccagttctactttaattataaccagtttgagttattatgtattatatgtttttatttattattttataaaaccagttctattttaatttatatttgagacatctacctctggtgatctttctgacgataatgacagctctaatgactttttttagtgacttttctagtgacaataactttttcagcgacttttccggtgtcaatgacttcccagtgacttttctagctacgacaactttttcgacgacattctgacgatacttattattagaagttttattaaatttatttatggccttctttttttttcatattttaaattttgatttttttttttatcaaagaaaaatttcatcaatcaaccagcaaatacaaaaaccagcagccacaacaatcagccccctcacaccagcctacaaacaatcattgtaataaaaagcttatcatcttcctaacatccctacttaacttcttcctttgtaaactatacaacctattctttataacaactttaatctcattgactatatacaaaactgtaaaagaaaaattttcatgaatacagttgtttcggttcctccaaatgctgtaaacacacgctgcaagacaggcacagtagatgctcatgctctgcccattgctcctgttcgaacaccaactaagccatccatcatacaacaaaggccaagccttgacaccaatccaatcaaagatagcagtaaccacctgcttagagaaaatacagtcaaagtataggtgtttatggctctcaatctcagcattgcaaacaggacaattgacattttccagagtgatttgaaacctgaaaaacttgtctctagttagcaattgattattaaccacctgccataaaacaaacctatgcttcgggagactacttctgcaccagacagcttcagtatagcacactttcccaacctgcaaagtgcttttgtacactgcagcaacactgaatttcccatttttacccgcagccatgagagtagcagcagaaaaccttgcccttaaatggcataacttcctccagtaccagctaacatccattgtaggggtgtagtcccatatattcttgtccttcaaatacatgacattgacccacttaacccaaagcaagtcatgcttgttcatcacagcccaaagatacttcgttagaatagctctattccaatttgcactatccctaaatccaagccctccatgagacttaggatagcaaattttttcccaagaagcaatg

SEQ ID NO: 271622 - DNA, 940 bp, Cannabis indica
gcccaacagaccgctgccaccgtacaacgttgatctccactcagaacttgaaaaatactgctgcaccattgcagaaaagagattgctggtgtagtcgtggtaccaattcccacacgattccagcattcctgaaccaccgtgcaagtcacaaggcagtgcattgtggtttcttcttcggcctggcacagtggacagaggacgctgcttaccaccctcttaatccgaagctgaacaagggtgggaagacattcagtacaggcacgccacagcaggttcgatatcttcggagggactttcaaactccacaatttattccagaaatttgaagttagatcatcataccagtaacctttctccttttgcaaaaagttatacgcactcttcacagagtaaatcccagaggtctccaaagtccagcaaagatggtccaaagccgtgggagcttgaagaggaatactctttattagttgctggtccctgacatcgaaaagatcttcaataatttcatcatcccatcccccattctccattgacataaggttcgccacagtggcattagcaagggacgggtgagttgaaaccacatgggggttagatgtatctggtaaccaaggctctcccaacacaggtatagcgtgaccattacccacacaccatctcgtgccactccgaaccaagtcttgagcctccaaaatgcttcgccatacgaagcttgggtttgagccgagctgggcagtgaggaaagaaccaccattataatatctagctttaaacactcttgaagctagagagtcgggtctagacactaatctccatccttgttttcctaacattgccaaattaaaatctcgcaagtcccgaaaaccaagaccgccccctttctgttcttataactgtcccaagccatccaatgaatacctttatgtgaacttttcgatgt

SEQ ID NO: 271623 - DNA, 915 bp, Cannabis indica
ttgatagtattgcactatcaaattggagtaactgctgtggatcaaacagagataattgctatggatcaatcaggtacacatacctaattattatatcttactattgtgttctatgttatatataaatagatcttgggataatttttaatttatctaacatagggtttctagacccttctctaagtatttgatactcagaaagccaaacgacactagtttgagtgtcgtgttggtcatacggtgccgtttaagtctaaagcattaattagacttggaaacgtcggttttgaccttgatactgatattaatcttttgttggtgtagggttaaagtagtaaaatcctacaattctcatggttaaagtcttagtgtaatatagtttgtcagtggatggtaggagggttaaagagtaccgggttttaaataatttggttctctcttttctcctatttaattttaatacacatacaatctctatgttatttcaataattttctttatttgtcaaaaataagtacatctttctacatatttttgtaaaatacaaaattttatttctaaaatcctatcattctatcatgttacttttttttttctttttataattctaacatcgcaatgtcatattttatattataccacttaattaagactaaaaaaataacaatataaaaagattacaaatattgaataacactgtgcgaagcgcgacttagttctctagttaatcaataatagaaatcacacatatacatataaaaatgtagatcaatttgaaaaatctaaatgtgattaagaaaatataaagaaaaatacttgacaagacatatgaacaattttaatataaaaatataaattatgtagtattcatatccccataataaaagtggcttttggaatgtttccattgaaaat

SEQ ID NO: 271624 - DNA, 653 bp, Cannabis indica
attagttgtaaatgagggcccataatataatcttatattaattagtagtcctttctaattaatatctttcttaattgtaacctctcacatggatgtggaccaaaataatcaaccaaattatacacaattactatttagaactactacaacaacacatgatatgttcactttaataacagtgaatgttgtcacacgtgggaaacctaatatgatttttcttccttattatgattcattaagaaaattatggacaacaatttgattttgtatattagaataagtatttgtttatgcattaagatattattattatgtcacatgtttttagagtttctgtttttcctttttttttatagagaattgctaaaaggtattgtacttagtatattcctttgtaccatactgttagtcccatataacttaaaaaataatttttaggtaatattactaatcaattatgaagcgccacctataaaaaatgccgaacactactaatacccaacaataatgttcagaagtataatgtgtaaatttacacattatttacattaaatgaatgttgaataagttgatattttgtgtaaatgtgttacgtttatgttgatacgtaagattaaaataaatttgaagataataagaatactaattaatgt

SEQ ID NO: 271625 - DNA, 592 bp, Cannabis indica
ccggttctaatggtcccccagaaccagtcgaccggttttgtgctgggaacccaaaaaaccccttcattcaatcaatcccaaactttcctgtaaacttccacgtatacctgcttataccccaaataacacatatacaagtatcaaaccacaacaaacaactcaatttatgaaaacaccattagagacctaacttaggttctctaactttaaacttgaacaattctcaacacaaacctccatctaagctcaaataagcaagaataatttacttctaactccagaattaaacaacatattaacccaatacacacaaccatctagaatcttaatcccatattaaaaatctaacctaaattacaaaaactcaaaaaggaagcagggaaggaatgattaccttggccaaaacactctattatcactaaaattccttgattccactcaaattacaccaaccccagctgctgcccaagagaatcgaaagaaaagagagagagagttgaagaaagggtaaaatgatttttctgtaaatttctttgattccttctaacctaagtaaataaaataatttcttttaaaacattagcttatatcc

SEQ ID NO: 271626 - DNA, 2225 bp, Cannabis indica
ttcacggaatattaaacataaacatttttacgattttttttgattttatttacaaaaaatacggtctttttatgttgtaatcttgttaatttgttgttgattttttgttatctgtgtgtcattttttgttgttattttgatattattttcatgttacttttatgtatttttcttgttgattttatgttgttttcgtgttattttttaaaaagccgtaaaaatgtaaaaaaaatattctttgaacgtaaaaaatgtaaatattttacaaaaaatagtgccttatgtaattatttcaaaaaataaatacataattagcggtctaaaaataaattatgacaatatgcatgcgcatttttataactactttttgtatgtttaatgtcaataaactaaatattttaaaaaataatgtgtagtaacttgttaccattatcaatttaaaaaaaaaaaataccataagaatgtaacgaaataaataaataaataaatcctataaaaaaatgcacaaaattaaaaatctcatatttatcaaacttatagaaaaaataaaatagaaacatatttgatgtaatttactcatactatattaagttgggtcaaatttgacctaactttttaatatgtgttaaatttgactaactttcaacacacattgaagaatatggtattccatcacaaatttggtatgcacttcattaaaaatgctataatatttttaaaaaatttctttaaagttataataatattgtggtgcttctaatcaaacatcatttgttaatatgtgggagattttttaggtaagggcaactttggctcgtaatgtagggcatttttttgttttcgatatataaaaaaatttataaattattattattttttgtatcattgcacattatatttgtagtaagcttcttctccatttttgataaattttaaataatttatagtgttgaaaataaaatttaaatacatagttgcgcgaattggtttattttataggcgtttaactaattattttgaacattattattgatacagtaagtatttcagaaattttcaaaaacagaaaaaatatctattaataactataatgtaaattattatatataagaaaaaataaggataaaattttctagttgtcaacaaaaaatacacatatcaaggaacaacaataatgtccttatttaaaaatatttagataaggagaagtagtgtaaagaagaaggtaaaactatatcatgacatatgtatggtacaaaagcaacatactttccaagaattttcatggcaaaaagaaagagtgaattgtgattgtaggtagctcaaggaagattcataagccataatttcatatttaaaaaggaaaaaacttaatagaaaagaaaaaggcaaggactatatatagggccattagtgagtgtgaaagggaaacattgtttgtgggaggaacatgttaatttgagacaatgtgactatgtgcacaaagggtcctagctagcccacaatgaatgaccattcttgtccaccaatgttcatatttattgttacttgagcattttatacacatatgaatatgctttgctaataccaaacactacaaaaagtattaattttgatgaaccccatttaacccaacaacaataacccaaaactatggattgttattgaggtagtttttattgttttatattgcaaattgggattgaatggtttggtgaagtggagactaaaaaaaattagaaattgtgtcaaatgagatgaaagaaatgtaatgatatatgatgatgatgaagaaataaatagttttttgttaaaagaattatgctatatgcttctaactaaagctagtgtttcatttagtggaatttacaacaacaaagcactaattaaattaacaagagtaaattggttgttgttatttccatgctaattacaaaatatgagaaagtaagaaataattgctaaattttagatatgaagaaagaagaagaatccacctttcactttacatatgaaagaaaaataaaaatacacaaatcttattttgttttgtgaactcatttctaactttttctttaatacacttaataatttactcaaacatcatcttttagaaaactacaaaacatgaatttataacaactacttatttatcaaaatggtgatgtggtcacccattgaataggtaaaggtcaaatatgtatagaaaatagaaaaaaaaaaaa

SEQ ID NO: 271627 - DNA, 1864 bp, Cannabis indica
aaattataataaaaatacttatcttatgtatttttttaaatggataaaagaattgttaaaaaaaaaactcaaaaaaagataaaacgtgccttgcacgtagttgccgtctagtatatatttatatatgttaatagcaagattgcttgtttatgaccacttttgcgtacaagattattgttagtttcccttgcaaaattgggatttcaagacttgtaatgtaaactaaaaagcctactaaagaattctagataaagacagattaacttaagttccattccccaaataggggtctaaatctaaactccaaacttagattctaacataaatattcaccacataactttttgaaatgtgttattttgtaaacttgaaaaaggggttgggtagactgaagaggagagagacctaaaaatattaacataaaaaattatagttaacaatattaaggtcttcttcttgttttatttttaactttataataagtgcttggccggtcacaagtcaaggcctccaccaaatttacccaatttaaaaatacattttagttacaaacttacaattaggtttattttaaaaagaccttaaccatagtaaattattattcttataacactacacgtaatttttatttaaatacaacactaatttcaacggtttttcattacgtaatcccaattaaaaaataccaaagacttagagacctcaaacccttcaaaaactttgtacaattgtttcatatattcttatcactatttggcttttttgtcaagttttcttcctctgatctccttcattttttctttcttcaaaaaatgcaagttttacttcttaaaaccatcttctttttcatgagtagtgtctcatattttgtgacacgtattttattttctaccatagcttatattctagtgttttttatccaaacactaaaagtgccaggtgaaaacgccaaagggttattagaaaaagtggcagagagtgtaaaggggttgattcagtacttattagaattgggttgggaagcaattacgacaggaatatctatgtcgtttgatgttgttaaagaaggtgtttttgggtctgtttcagttgttttatcgagtgttttggggcttatggaacaaacaagaaattcctttgaaagtttggtcaaagatgttcctgaattggtcgaaggtttctctgagatggcttctactattgtctctgattcatggaacaattgtattgatgcttttggatatgttaaggaccagatttcctcttgagattatttcttcttcttattataattacattatgcttcagtgttaatttgttatttttgatcttctaattaaattgaaatgtttttgtttcatggtactagtggtgattaatatgataattaattaactttcgtgaagctcatcaaaagtttgtacagtaattattgattacaattggtgactttttagttcttaattaatttgctattattacactatttagtttagagtctatgaatgagaaaaggatagtagttcgtattcaattttttgagtttaataaaaatgttagaattcacaaatatacataagtatataaacttgtttatttttgaaaatttattacaaatattaacaagtcattgaaaatactaatattgcatcttttaatttattcaaaatatacattttaaatgtattaaaattgatgagtcttaaaatattcttctaacactaatttttcaagactagacaatataatttttcataacgtacgtgttgtgtaacactcacaatctttattttatatttatttgatttaaaacgggtaaataccattttggaccttgtgttttgcaaaagttacagattggacc

SEQ ID NO: 271628 - DNA, 507 bp, Cannabis indica
aatattgctggcttaattaattacctatatataatgtatatggaattaattattaataattaatgcagaggatgagaaggagtttgattatgcaaaagatggtgcaaagggcccaaatagttggggagagattaagaaagaatggtctgcctgtacaaatggagcaatgcagtctcccattgatttatctaatcaaagggtcaaaattgtttcacagcctggaaaacaggacctcatacaaaattacatcccttctaatgccacccttaaaaatagaggccatgatatttcggttagtaatatacctaccaacctactctatataattaattttaaataaataatactaacaaaatatttagaattaattatatctataattgttattctttctgttctattttaattttttcttaattattaaattaataatgagctatgaattttgaatttttgttattaatttgtgttatatatttattgcttatgtaggtccaatgggatata

SEQ ID NO: 271629 - DNA, 537 bp, Cannabis indica
cctagatgtgtgacacatggccatttactttcatccaaggctagggatgagaaatgcattttctcattttggaaaaataaggaatttatgaaataaatcacagaaaccctctctttctcttctctctcttcgtaccagccaaaccaagggaattcattgctggattttgtgatttcagcaaggattggaggaggaatcaatcaaggtaaactctagttgctctctagttatggtttttctcaagttttagttggtttcaagaggtgattttgtgttataggggctgttagggttagggttgtttagagttcgaattttatgtttaatttgagttgattaaggatcctagcagctggtattgttggttggattaggttttatgcaactttgagctttaagttcaaagctttgatcttcaatggcatgttttgattcaatgagtttttctgtgattttctggttggattatgttgtttgtaccctaattgggtactctggaaggtttggttgcatttgattgagcaagaaatgaaattt

SEQ ID NO: 271630 - DNA, 583 bp, Cannabis indica
tgcagaaatgataaaacagcaaaattgcaaaagtggggcccatatccacaaggcatggccgaccacttatgtatggattatcatttaatattttcattattttaatgccaaagaattcaagtataaccctaggtggtatactataaataggtagtgatggcttcagaaaaataacatgcatcttattcctttcagagaaaaacctgagccatctttctatacttagccgccacctctctttcgttcttcttccttggttgtttcgaaaccccttagtgatagagtagtgcccacacagagcaagtggtacctcaatcatagtgtggaagatcgtgaagaatccagattcaacaagaaggacattcaggctcagatcttgataatactctgtgacagaaaggatataagggttagagatctgagtggaaggagatatattattccgctgcacccaatgtaaggtttctcatactttatatgtgttacttatgattgttttagaagttcatatttaggatgttaattaacgacacggtcatgtaccgataccggaactgagactcggacctatacctaaatctgg

SEQ ID NO: 271631 - DNA, 686 bp, Cannabis indica
cattcatgctgtctatgacctaccgacctttactgtagaagagcaacaactgaaacaacaaattcgagcaaagagcttgaattatgaggacatagctgaaaccttaggttatccaggccttaggtttcatgagtatgatggagaactgtatcagctgtttaggtgtgaactccacccggtagccaaggcatggctatactttgttactgcaaggttggtaccaaacaaacattattttgatgctcagatcgataggcttaaatttgtgtatgcaattatgaaggggtacaacctgaatgtgggggacatagttagagtgacttttgatatgttggttgagggctcttgtggaggtggacttgggcttgctgatattatcaccaccttgtgtgaggcacatggagtaccacaatactcctatgacacgaaagcagagccacaacgcagtatctctgtgtccacagtgcttcaattcaaactaccacaccctcacggtcaaccgccagcttagagagatcctcctgcaagacaacaagaggagcatgaagacattgtaccgccacgtattgctggctctctcgacccagccatgcaatacactcatgatcagctgaattatctgattcagcagaacatgcacatgcagaattacatggcccaaatgagcgtttttgatgagcagcagg

SEQ ID NO: 271632 - DNA, 541 bp, Cannabis indica
acaaaacctgactctatatgcctatagtgacacgcagaaaataaatgcaaaaagcttcagtgacaagtgtgaagtgtcactaaaaattgtctttccagtcaccctcattagtaatgcgcgttgaagtgtcactatacacttttagagttactcaatgtgtgtcactaaaactcgattttctagtagtgcgctgattatcatgccagtctaaatcagtgaactgacaaatcaaggaattaaacttttgaacatataatcatgactatattcgattgtgttgacaacactataatcatgaacaaatacatatgttttgtacttaatcgaatttatacattaaatataatcatgaaataaatcatgtgtaccatgcaacataaaatgcgattttagatctttattaattagtaaatctggttatattggaatggattttatttagggcacaaaacccgttataatcaccatctcttcagcagtctttctagcactaacgcaagtctaggaacctgattttgtgtagtctaagaggattaaatac

SEQ ID NO: 271633 - DNA, 7214 bp, Cannabis indica
gttggtccaatttaagtcagacataaaggaaagaaggacatatacatagtaacagtaacaagaaaattaagacaatttgtcatagagaaaagatggcatcacatttgccagacctaatgcatttatctacaagctcctttaaacgttcaattttgcgaaatattgacccagtccagttacaccatcaagcaaacatataatgatataaacaattggagttgaacaatgatggggtcatcatccgtaattttctcaaaagtattaaaacccaaaattttgatgctgtaaaaacaatcacactttttccattacctttatagttagttagttagttacttcttcattgtagtgataaaataatattcattgtccaacatttgttcgaaaagaagaaaaagaaaacacacctaattcctgcaaaattaaagtacctgaacgtcaaacaaagcatcagggctgacagagtaccccgttctctccttgatcagtgacacaaccttcaacttattgttcctttttgctgccctccactggctgtgaagatcctcattatccgcgaactatcagatacaataaaatcccggtaagtgtacagcacagagtataataatctgtatacttcagtgaacataaattaactaaactcgaactcaggcaatcatacagaaaagtcacttcactgctgctgcttttaccttacgtagatctgccaatttttcggtatctaggacccattcttctgtgccaatccatttagttattatttcactcaaatctggattgcaaaaccggatccatcttcttggggttaccccatttgttttattctgaaacttctccggccataactgccaaagttgcaaaagaactataataagggaaaataatttcacaactttataaaaggccttcacttgagattaaagttaaactgcattacattctgatttctgtatagatagacagagaagacatactcctctgactgacatctttacctgataaaatgaattgaaaacttcttccttgactatttcactatgtatctcagcgacaccatttactgcatgaccacccacaacacagagattggccatacgaacaagctttggtggttctggtaccggctctggtaacacctgttctttctcatcagggctttcctctccaagtttgtcttcttcatcaagagattcgactttttcaacattttcaatttcaacttcttcaacaggttcaatttctttgggtttaacaagtatatccgcataggcctcaggataatccacattttctaatatcctcatttctttcagtttcttttctaacaaatcataatctgctgtaccatactccgaaattatggttccaataacctgaaaattgatacaataggagttagagcaataaatagcaaacaattaggtgttggttcacaagttacaacactacctcctcatctatcatttgtatgatctcaatatgtcgaggtagaagcttttgcataagttcaaagctccatttctccaatgcctcaggaagaacagtatgatttgtgtatgccacagttctagtatgatgttagggaacatgaggaaatgttagggaaaaaagtacattcataatgaatacttaaaaaatgtaggcacatgtgcaatgtatattttggttggtggagaccaaacaaggctaggttgggaccaacttcatctaacatataaactgaattccattatcaagtgtaatatgatggtactaaagaaaagaaaaaaaatgcaaaattgggaaagaaaaaatgtcgcaaattcattcacattaatcaaactaacctataaaatatatttccttcttcttttaaagggtgggaatagtaacaataaattttagatactagtctctttctgtattaatacactcctctacggtgaatatggtatgaagcacatgagaaagtaatacctttgagtaatattccaggcatccttccagcttaaacctttcaaatcaatcaaaattcgcatcagctcaggaatgcagagagttgggtgagtatcattcatctgaactgcaaccttctcagggaattcttcccagtttacagatgctccagatcttctctcaaagcgtgcaataatatcttgaagagaagctgaacatagtatattgctgtttcagacgaaggacttttccttcaattgactcatccccagggtagagtacataacaaatctgatatacaagaaaagtcatctttatcttttctataagtggtaaacaaaattaaagcagcatttagaataggcatcgtcggaagtcagacaaccagagctgagagacactcgcataagtataaattataattagacataacttgtaccagaaatgttgacaagggcaggcacaaaactggttagccattctggcacctccattaagatggaatccgagatcgatattatatacaacatactaaagaacggcccaaaaacatactatagcctcaatattttaaattctcaatagtcaataccataatgaaaactctcaacatcaagacttttctgatatgaatggccaaaaagcatatcaaatgatcaaaggtaataaaggcaaactaagcttttacatactttttcagcgtttccaagggcttcatatgctttggtatgctccccagaattaaaggcgttcaaatcaaaatcttcggatggagctttggttgaccaaaggcggagattaattgtggttttagtttggtatcctggtatcggaacatcatgtgcaacagcttttatgtcttctcctccaatccagtgtcttataccatctgatccagtaacaaccttgccgtaaaatttaacaggataggagacatcatttcttacaatttcccatggattgcccgactgcaaggagaaacaatagttgttaaaggactgacaactcaagataacagtaaatgtactgacaatgccattaacctttacagacaaaagcagattaaataaagattttgaacagagcacattacctcaagccaatcctcagcaatttcttcttggccatcttttgtaatcagctgtttaaataaaccatatctgtatctaaggccataaccccatgccgggtaattgagagttgctaatgaatccaaaaagcaagatgccaaccgtccaaggcccccgtttccgagtgcagcatctggctcctaccataaaagaagtcaagcatttatttgcaataacacagagaagtcatatactgtattagatcattgaactgaaacaacagctaaattggtttcacaataaataagaattttttttatcaaatgagctcatgtattattcttattttagaagatcgtgatttttaagcatttgaagttatcgcatcataggtttccataactacccctctgaaagaaaacaatttcaaactttatatttgaatgaggggaaaaaagtgtatgcaaaccccattttcagcttaagtgcacatctcatcctcaaattctagaaatctgtttctaatgctcacgaattcttgtggttggttttccacaaacagaaatagaagatgttgatttttgaacaaacgatacagcataagaacaatgaaatgttgaaaatactgaatggccaaataagtataaaaaataccaatgaaagaactctcggtgtcaatcaaaagtgacaagactttgatgttgccaagcttgagcttgtagataaaaaattataagaaaagagtgttctaacctgggaagctatctcttctaatttgtgtccaagcttattcaaagcctcggcataagcaccacggagctctaaattaccaactgcgtttaacagagctctaccctacaaacaaaattgaaaattttaaaatgtagaaaacattgacatacagaaaataatttggtgatataaattatttctgcctgcagaatcattgcaatataaattatgacaaacctggagaaactccattgacaaataatatgcctgcttcacattcaacttctcataatagtcatatgttgcattccagttaataatgagagaatcacgaacactttgggcagtggcaaagtaagccttaggaagatcaagtcgctcaggagaaaatgatggggtgaactctgcatgatattttatacttgaagcgacagatgcagcatcagttgtgagtgagctgagtgtggtcgaagcttctaaggacatatagcaaatgtcagaatctagtatatcaaatctaaacaaatcaaactcaagaagcagtgctcagatacataaacgaggaaaaaatctcaaaccaaggtttttttctctgatgtacatctcctggaactgagccaaataacaggaactactcatacatgattgatgccagcataaaaaaatagaaataagctaactagatagtagtacaatgattatcaaccagtaactatctcctttccaaatatcctaaatgattgagatgctttctagtgtgtgatcgtaaccgaatggtagagaatagagatcatcaaaaagcatcttcaactcacttaaatgtcgattttatttgaacttaacaggtattaaagaaaatgaaacaaagatcaattgtacattgcctaccaaacacagctcgttaaagttgataaaaaatcagccactattttatcacaatttgccatgtttaatctatattaaactcaatttaacctcagaagctccttcctaccatctcataaaccttataacccaatgtttaagtcaataaacacaaaaaataacagaaacacaagatttcattattcaaaatacaaaaaaaagtaagtacaaattcatagtgaaaatgaggaagaagacaatcaagaccttcatcggcaattggatccttcaatttctgcgtcggctcactggaaacgctcttcacggagaatgaccgcctcgattgctttcgattcagtgacctggtaaaaaacagcttcgatttgctgcttctgcatgtgaaatcgatcaatctggagcgagattcgtagtgaggaaatggccttgttctactacaactggctgagaattgcgatgtcgccattggagctctctctgcgaaatctcactcggatcacggacttgtagagtagtggagatagtgagacttcttatcctctataaatatattcacagaacttctctggtgctgtactaaataaataattattattattattattattattatgtaagaaaataaataattattttttaattacaaaaaagaaaaaatctaatttccataattttaaaaagggtccgtattgaaaacgacgcttctcacgatccccacttgaatcatgttttttattttatgtcgcggatgttcggatttcccgcgttcaagtcttcctggaattttgccacgtgttaggtcgagttaatggtgttgttacgcgtgttgttgaagtaatgaaattgcttacgtgtttcttatttattggttaaactcgtttcaacacaagagtttacttggcattaataacagaggatacgactatgatgtagattttttaattgttggtgagtgtagctcaggaaatttagaccgtccacttggcagcaagctattggtcttaaagcaagcaaatgtaataccagttattgaaattaaaataaaaaaatttttaatgctaaactctctcaactatcattttatttgcacactctccaaactcaaaggtaagcacataagtaaaaccttctaacctactcaattattattagtaaatttcaggtgtcatctatttatcatagttaactatcaacatagattacttattttgtgccaaacctgacagcaagttatttattttggcacaatatttgctgtgatgtaaaatttacactacaataaatgtactattttttttagtatatttaactatcacattaaattataaaatatttatattatttttttattgtattacatattaaaataataataaaattgattataaagttattagattttatttttttcaacaaaacattaattagatattaaattttacatcaaaattttgtaattgtgcattgaaacacaaagttaaaacttagtgtgaatttaccataaaactactttttgtactaaatatagcacaatttttacatctcttattaaagatagtccgaaagctccatgatcaatcaagaaggtaagggacccatcacaaatcaataaggtcaaagctccatcatggatcaagaagatttgggctccaacctaggagttacataaagacttggagcaagttacattttgaacccgagccttaacaaaacaaccaagtgtgtggcttgagtatggagcatgtgtcaatgaaatttagctccatcacgaaggttacaataataaccaatgtgctacccgaatctttcataggaggagtatgaaagttacaaaaataattaagttaccactgaaaaatggtgaaccattataaaaatttgatgttgttcgcgatatcaattatttatcacctacattttgtttaataacttaagattgcttatgtttaatttgttttacgatgttcttagatttattaacgaaaaactatatcaacacgtactaaatgtttaagtgtttgacttcaaaaaaaaatgatgtttaagtgttttttgtttttattaaaaatagtggaatttatacttaattttctaataatagttaatatgaattgtgaaagaaattttcccttctatttgtactttttagtagttttttttttttgagcaaaaaggatgatttattcattcataaacattcaacatcaacaatagacttgagttcaagaggagcattatgctcactaacaatacgatctgaatggtaacaagacgctctagcaaggcaatgagccgccctattagcagaccgtttaacaaagtgtaaagacacatgactaatacaagaaagtaaattacgacaatcttgtaccaaaaaaccaaactgcgaaggcatttgaactgagcccaagacagcctgcaccaccacaagcgaatccgtctcaatctccaccttcgtccaccccttacgcttgatccaactcagcgcttccttcaccccgataacttcagcaatctcaggccccacaacaccaaacctgctacccgaaatagcttcaattagcttcccatcagccccacgagctatgcacc

SEQ ID NO: 271634 - DNA, 836 bp, Cannabis indica
agtagtttatacaaaactctatctatacatcttttaatgctttcttgaatttatataaattatatgtacataccaaaatatctagattgtattagaaaaactttctaatttttgttgctctttgttaatcttaagaatacctacaatataagtgtttattaatcatatcagattaattttgtttttatttagtactatatttgatatatattgacttgcatatacaatattttgatatatatcaaaatatttcatatattttgtataaacaataatactatacaatataatataatttaattcaacttactaaatgaatcttttcatgatgagtctcatcctgaactacgtggtagtacgaaattgatagagttggtgcatagctgctgaacagcagttcccaaccctatgtgctgccagttggctcatcctcatagcacaagaccttttttaaattttttttgtcacattttttctaagcaccacaaaaataaaagagcattgctattaggcaccagtggtacgtagtaccttctcgacatgtcgtgttgcgattggctagcgatacttcctattatattaaattatatggaacctgatactcagttagaccaatagcgatattgacacataagagggtgttaaacacttctggtgcccttgtccctgaagtctaagttgtattgcgctttctacggctaataataactttggtctcttgaccccattcttgctcggagcaataatcaaccaactaaccataaaatcttttaagacaacgtggcaaaaggtgagagccacttcacattattgcaaataagtaatcaatgtatatt

SEQ ID NO: 271635 - DNA, 2141 bp, Cannabis indica
ttaagctccttgagttctgctggagccattctatatggagctttagaaaaaggttcggctccaggtgccagatcaattacaaagtcaatttctcgttgtgatggtaatcttggcaactacttgggaaatacatcgagaaagtctttaaccactctgactacctcaggcccaaatgtttcaggtctgctggagtccatcactactactaaaaatcctacacatccactatgtagtagatccctagcccttaacatagaaataaccgagattcgagacccctgaactgatccaacatatacaaatggattttcaccttctggctgaaaagtcacaatttttcgcttacagtctacactggtcgaatacttggacagaaaatccatcccaagtataatgtcaaactccattaattccagttcgataaggtcagcactcaacttcctatcctcgatcctaactggcatagacctaatgcgccaattggagagaactaactccccgctaggcattgggttccaaaccctctttcaagtatatcacaaggccttcccaaaagatcaattatctgtgtaactacatatgagcgtgtagctcctgaatcaaataatacagtgtacaaggagttgttgacaagaagctaacctgtcaccacagaatgattggctgcagcatcagctttggtaatggcaaacacctgagtaggtacaggtttggcctttgacttctgctcttctttcttcgcttgagggcaatctttcttgaaatgccccaccatgccgcactgaaaacatgtcttctggttgcacttacccggatgatgttacttacaacgtgggcactcaaggtaagagtaaccctggcgtccacctctgcctcggttcccacggaaccgcttgctctgccccaagccaccaaatgccagggtaactttcctcttctgatcagtggtggaatcaccaccatccctaccataaacaagagtaggaagggtgggggttccacaaacattcggagtcactcggggctcttgaaggaattctaccgcacccgcagatcgcagggccttctcaaccatttgcgcataggatgttgcttcattggtagtgattaccagatcatgtctaatctttacattcaaaccggctaagtacttttctttcttactgaagtcagttggcacgttacccacggcgagtttggccaaacagacgaactttgtggtatactcagtgactgacatcccctcggtttgtaccaactcagtgaactctttcctcttagcactgcgaacagcttcattataatatttggcgttgaataactctcgaaactcttcccaggtcataacagtgacgtcccgggtgagggacaccaactcctaccacacgagagcgtcatcctggaactgaaatgtggggaaggtcactcgatcatttccaactacccccataaaatttaaaattcgttcaatcacagtgagccactattcggccttcattacatcaggacctcccagaaacactggaggcttgcttacggaacctttcgtatgacggctccatacggttgctagcaacaggttgttctactggcactactggagctacagcggcctgagcttgttgtggaggcaccgcaagaagaccttgctgccttaatctcagaatttcttcatcttgttggcagattcaatcttgcattttcgcaaaccactgctcccaatctagaggagcttgtggtggattcacaagacgaccaccctgagctctgccacagccacggcaacgaccacggagattctggggaattttaattccctgaccgcctccggtctcaaccatattatcctgacttcttgtattttgctgggcgtccattttataggacttagcctacgaacccataagccaggcaggttagacagcgatcataaagcttaataccgctcttatgcacttaaaggtaacacacttaaaataaataattataatctaatattcttcctaacatgctttaattatcacagagatactaaacaagtacgagcttactgatccgtgagccgagctttctctcatgaagattgtacatgtcttggcaagcttcggcagataaacttagcggctctgataccaaaattg

SEQ ID NO: 271636 - DNA, 4404 bp, Cannabis indica
tatgagtatactgttaaagtaaaacccacaacaacaaagaaataactttaagagttgagtcacacttcaaattaaaaaccaacagccaataagtagcagaaaagttgagttaacactaaatacatacatggcagtaactggcaactacttttgtgtagtagtttctttccagccaagacctggtctgcatacttcaccctgaggttcttcatattcacgggcatcacgtatcatggcttcaaagtcagtagaatcacttgcaactggaagaaaactgctaagatcatctctagcaccaaaacctcctgctcgtataacatcatcttctaatatggaggcatccattacttccccgggagcatcgatctctaaaggggatgcatcttgattaacattttgaccatctttccctttgacaatgttaacatgaacattagtttcagaatttggaactggttttaaaaactctttcttcttgatctcaatatgagtggattcagcttcttcaccttttggcttatcttcattctcatctagttaaacaaaagttcaaacaattacatatttcagtaagaaatatgatatatgtaaacccaggaaaaaaaaaagaagagaaacaaccatctataaacagcataaccgaatatgaaattacaatccaaattgattttaagttttcaagcatagaaccatgcacgcttcgttctcaaactttggaccatttgtttctgcacacagattgctgtttaaagcagattttgcataagttctacctgaaagatgtgagaggatatcgattgagaagccttttggctctagtagaggtaagatagaagttgttaattagttatagagatagaagatgaaatcttcaagagaaggaactgtatttgttatctttgtggttaaaaaatgtagtttctagctgctctctaagcattggcaaaaacacttaactaacgggtttagtttttgcttttcagttattttgttggttgtgtttactctgccatgtcaatatcttacccttgatcatgtgtgtgcatgtttcttccccgttgacagaggtagttttacaccacaacacccatttcacccctttcccccgcccccacccacaaataatttatttcaaaaaactaaactaatttttgcaaaaattcttgtacttcaaaaagaaaaaaaaaattggcccccctataagaccaattctccctccatccctttgtgaaaaataaataataatgactcattcatgtttatacttacctttttgacctaaactatggaacctggggtggaccatgaccaagtaagctgtccaactatagtaagacacaaatcatccaaatctctttcaaactgacttcaatatttttgtgaaagcatgcatgttaacttttctccaaatatagattagagttcaaatacaaaaacatatacactgaatatagtatacatccccgtcttcacataaaatttataccttataatcttttcctgcagactatttcaccacagaatttcttctgttcagtcccttgaacaaaaactaaaatgccctttctagagtgcttagactttcaacctattcactaactaatggactatgaaagataaatttaatgattcataaatgtaagttgacttttcctgccaaaattagagccattaaacgttttattgtattaaataaactataaaactcataatttctaactaaactttcttttattttgttgaaaaaagtgaagatactgacccttgtcaaacttttcaaacttatgaatctcttaagaacttctcttgcgatttctattttaaatttatttcaaagaaaattttctcttaccttgctttatagaggtgatccttcacgtatagtgtgttgactaattaagaggggaatgggggaacaaataggagagagaagataaaaccatacaaaagcaagacaaagactaattaattttttttttaaagaatcattaagagacaatataaattaaaatattgatctccgtctacttatcagtaagcaaacaaaaattctaccacaagtatcagggacaaatctttgtttgtatcaatgacaatgagagcacttattgagtacatgtcactctttaagtgacaattaagcatcgtgttaggaaataattaccataatatcatcctcttacatacattgaacccgcctagaaatcatttgctaaagcttggaccaaattacttttgactaaaacatccatgaagcaagctcaattcaggaaacaggtgccccatggcaggatacataatcagacaaagaacaaagtgatgtgaaactgtactgttttatggttatttcgatggaacataaagtcatatcttaggccaagaaacaggaagagttatccaaatgagaaagtgaagaactttaactaattgtgaatttccactttcttttgttttttctttctgtgaggatatttcatcttctattattcttttaaattattccattacagaatcttacccatttatatcattgtaagagtcatcagataaaaagtgaattttacaaagggtacccatttatatcgttgaaggagtcatcagataaaaagtgaattttataaagggttgatatgtattgaaaataaagcttttgggaaaatgaaacctataataacactagaaacaaaagacatcaacaacagattgtggaaacaaaacatacaaagcaaaaagcataaaactataatccaaagaagaaacaagaaccataccatgcgaaacactatccagacagctgtccatgggggaagcaaatcagtgaaacagaacagttagctgcttcctgcactgtatttctcgtcttttaggctacaggatgttacaatcttttgaaaggaatttggacctaagaaaaccaaaattaatattcatctaggtagaaaaaacgaaagagctcagcaatattcctctggtatctaatacaaaaattgcatatagaagcatacagttttagtaaatgctatgagcaaaaacaaaattgagaataatcttaaatgctaccggtatataataaaactagtaagtatttttcatgtttctactctcattctttgacaaatgaaaacaatcaaattttcaacttctgatttaaggctatgttcctgccaaatgttaaaccacacaatttgtatccattcgactctaattgtgtcttcaaaaccctggacacattttatagtaatgcaaccaccaattacaccattgctttaacaaatctatttcaatgaaaaagcaacagatatcacaggggctgctgaaaaaacaaaagaagaaactgaagttctcttcttttaataatcaaacaataatagctgaaggaaataaaatgtaagaaagggaaacagagacctccctacaaattttgttatgagctttaggctgcacgtattgtctcaaaaattacaaaacttttctgatttagatatctctagttaattatcagcctaaacttattaaaaaaccaagtactatagacactgaaggaagaagaatttgctttaaaagagcgaaaatggacctatgctagactatggtagtggacagtattatcactgtttattccattgtaaataatatgcttcttatcattggcacaattagtataaaagactcatcaaattcttgatcttgggtacaaacatcatggaattttttcaatgaaaccccattcaatagcttaaatcacaacatactgcacctgactaatctactcagtgaaaattcatgacaactgtgcttgagggtcaccaacaagaattaggaaatacacttgtggcaaatttcaatagaagacgtaccagaattcaacaaaaattccattcatgtaaattgtcatgaaagcaacttcacttattccaatattagaaaagtattcaaatgagcatgcaagaaatatcagaaatgaggtaacatctgaaacaaatcacatatagaacctcataattcataatcactataggatagagaaaccaaacatgagtggcatgaacacaaatttgtacaaactatgaatctgtggtctatcaataacattccagtaatttggttacacaaaataacaatcaacaacattccagtaattaatgaaaaatttcttataagaaaattcctcttctgttctgttaatttatgggtagtaaaaatttcaggatttctcgattatatataaatatatatttatatgctacaaatagatatgtgagtataagtcagaacacgccctttctttcataacacttaggtcatcttttcatcaccaacaaggcactgcgacagtgtcacagtaagccaatattaaataaagaatataaagaattaaaatgagaatgttccgcatagctctca

SEQ ID NO: 271637 - DNA, 755 bp, Cannabis indica
tttataaactcatatcttaaacaaaaaaaaaaaaagaaaataattaaaaattcaataaaaatataaattgttttaaaaaaaagttagaaattgaactgaaaaaatattatgtttacttcaatacatctacattttttgtgaaaaataaaatagactcaagtttttcccgtaaaatttaatttttacaaaattgaatttttaatatattttctttaatatcgaaatgatttttttaataaaaaataaatattttttaaaatcacttaattagtttttaaatttattttttttttaatttttttaatcattcaaaaaaaatttttttaaatctaaattaattttctaagatttactacaaaagatgttgaatcttaatcgtttttattttgagagagtacgatttgaaagttgtcaaagtttagggagcaaagttgctaatttacaaatacagtcacagaaggactaaatttcttttaatgtaaaagttcagggaaaatttttacaagtcctatattttagggaacaaaaacattgttatcgaaagtttcgacgaaaaattgctaatttctttttggctaattaggattttttaccctctaaattttaacatgtaccaaatcatgccctgtgaacttttctgaccgttataaattcccctgaacaattgagattgttggatttaaggaattttgtttaatttgattcaattttactatttcagtgattgtttatgtactaaatcatgctccccatac

SEQ ID NO: 271638 - DNA, 472 bp, Cannabis indica
ttaattctggtgggcaaagctaatttgagcgaagccagaggttactgacagtgtcttgagaggttctgttcttggtctggccaacaagttaataaacttaagatctcgatcttttttagtaaaaatactcccagtggcctgaagcgggagatctgggaggccctgggaatcggctccccagaaggaaatgtgaagtatttaggcctccccctgttcagatcaagacagaaagatgctgatttcaattttattctggacaatctctcagctaagctgcaggggtggaaagcgaaaaccttgtctaaggcgggccgggctactctcatcaaatatatgggtctgtcgatgctgatgtacgctatgcaaactactaaactctccaaccgtttggctaccaaaatcgacaatatggtgcgtgacttctggtagggttttgagaaagacaatcacaggatttacctaaaagcatggg

SEQ ID NO: 271639 - DNA, 857 bp, Cannabis indica
aaggacttgtgtctaatttcatttaattttactatttcagtaattttttatgtactaaaccatgctccccagactttgatatctaccaaatcatgcccctcgaactttgacatgtactaaatcatgccccctgaactttcatccatgttagacttttttactaaaattagaaaaaaaaaaccttaaatctaacaatctcaatagttcagggggtatttttaaccttaaaagttcagggggcatgatttggtacatgtcaaagttcaggggaaaaaaataataattagcctaaataataatgtgtgatatcgtaattatagtatttttgaagagtgctatgacacgtttaccaaactgtaattggaatcagaataatcaatgagagaaatgtatcggtttaaaatagaaaataatcggaaacaatattttattacgatgtttactaaactatccggaaagaaaactagaatcatattattttgtttacataactaggaaatgtaatcggaatgctttaacttgacaaaattgccatcattggaacatgtaattattttctgtttatagaaatttaaggggtatatttgtctttttcatttttttaataaaattaaaattaaaataaattaagtaaggaaatgaaaaggcattccctatataaatggggggagaacctttccctttgttttctccctaatttttgtgggtcccacaagtttctctctttccaaaattttgtaaacaattgtatgggaatcaataccatatcattcattcccattccctttaagtaaacatgccattaatggagaaatgtaacggaataaataaaaaataattggaatcaatatttgtaa

SEQ ID NO: 271640 - DNA, 1249 bp, Cannabis indica
atacttgtgagtagatctaagttcctggtaaaataacttccaacaagtaggggatgaggacttcggcagcatgccgccatggctaatagagaacataaagaagaagaattggttacaattgtgcgaagatccggcttctgcagtttgtcaagtggtaaaggaattttatgcaaattttctggcacatgaattgccagcttagattacggtgcgagaggttaaagtgaaattttccgacagagacatcaatcattactacttgctcaaaaatgtcttgtgagttctctaaagatgttggtaagctcactgatgagctaatgcataagattgtgcccgaattggcaactccagaagtagagtgggaaatagatgggcgtggtgtgttccgtttcaaacggactgatctgaagaatgatatcaagtgcctatataatttcgtgcaatccactttgctgcctacgtcacatgactccacagtgagtcgggaaaggatgtggatgctctattgcatcgtgaaaggcaagaagattaatgttggcaaggtgatagcgaaagagatcttcgaatgtgcacaccgggtaaaagggaaattatttttcccatgcctcatcactgaaatgtgtatatgcgccaatgtaccgatgttgaatgacgaagatccggttccaagaaaaggagtagttagtttcgggcctgatcgtgccccaaaacgtaccactccatccactgccacagctttgacttcaagggatccaatggacgagcgactgtccaagcatgaggctctacaacaacagatgtgtgagcggctgcagactcactggaactatgaaagggagcgagatgcatggatgatgcaaaatcttcgtcgcaaccaatctaaaacagccgctgcatttctcgctttcccagaggaaatccttgcgccttggggcttcgttgataatgaagagaaggactccggtggtggagagtcggattgttgagggagtatttatgttatccttaattaattagcttagtttgactgtttagtgttgtgttgttgaaataagtgtgctagtttaagtgttgttactgtttgtgtttgttatgtgtaaactgttgttgttgactttagaattgtgtgtagtaagcattatatgtgttagttaggttgttttgtcatgtttgttacgttctgtttttgcttgcaaatgaaaaaaatactgcttgcgtttttagcttggtttagggtagcgctcgatga

SEQ ID NO: 271641 - DNA, 761 bp, Cannabis indica
tcaaatataccaaaataaaaagatgaaaagaacacttgaaaaaacttaaatagtaatattattattttcttataaactaccgaagtaaattattgttatcccaaactttgtccacttgacgtgacatatccacatagtcaaaatcgaggacaactccaaacagctgaacaaattgcaggataggtccaacaatgctctctcatcctccattaagtctcccacacgtgcaaagcctccctagctctcaatcctcacattccatttatgcctcctagacactaagtcaagtatctttataagttcggtgctcttgcaaagcccagtaataaaaaaaaaggtatctttataagttcttcacaagatctcactagttctttatttctaactcattcttctcactattgtaatactgaagaaagtcatagctaaaaatcacaaggttttaacatgtgatctgcatgatattatctcgatagtgaatacaactaaaagaggagtaggtcattacccgctaatcaaaggggtcgagcctctataaattattgtgtcactttattatttgttattattatttacaagttgtgattagtggcaattaataaggctccgctgtaatgccctgactctcaggaacgccacatgtgtgcttttacaatcttattatcaataacctactagcttaggaaaagtgtggtttaaataaagtttgataatttaagatatacatataatttttttaaaaaaaaatactactaaagtat

SEQ ID NO: 271642 - DNA, 2069 bp, Cannabis indica
actatgagaattcactactacaaaaaataatatgatagataaaaaaatttgttttttttttcaaggattgtcgctaataaaattaagtgaatgtttaaaattgatacctatatttgagaataccgccacttttaaaccgtcgttatgtatacttgttggttttaaaaggtaagtaacatttgttaccaactttttttcagcaatgtctatttcacccaattttgcgttagtagaataggcgtcaattatataatccgacggtaatactcacccaactattttaaacaatcaagaaaccattttttttagtagtgatcattagaatatacatttaattacatggttacgtgaaacctcctaattactatgaatcacaaaaatattaaaaagattgttaaaattttggtgaccccacccaccatccttaagtagaggtagaggtgtaagtgatagtgttctttgtttatatgtttgatgttatggaattaagggagcacctagtcatcctcggatgtttccttaaagacacattcctaaatccttcttctatttgtttctctctcacacggtcataccataccaccacttccacctccacataagttaattgttttcactttctctcatcatttttgttttactttctttgtgtctctttaggttatttggtgttactttttgttgtatcattttgttttctctgttggaaacaaaatgaagggttaattaggatttgtaattagaaaagaacaaaaacagactaaaaaaaaaagtaaaaattatttatttaaaattattatttatttatttaattaattaaaatagtttcttttaaaaatgtgtttgattaattggtaaacagaagtctgatttttagcatcattctcacgatcctatattctaagttcccttcaagtaacgtctttcttcccgttactaccttcagtgcattgcctatataatgcatttaaaccaacgggagaaatacatctttcttcattatgaaaaacatatacgatatatgcataagattatattacatatttatatttcgagcagtagtcagtttttgggtgtagtataattttgagatggaaccttatacatcatatcttgtaattttaacatggtatcagagctaaattaaaaacattcgatgtctccaaccctgtggtctgtctcttaaagcttatttattttgcttacactcaagtccaaatgtgaggagggtgtattagagttaatcctacattaataatatgtggaaataaaatactatatataacatgaatgaactacttctttcattgctaatttattttaaaataaaactaacacactttatccaatttcattacaaatactaacaatgtgtcaacgtggttcttatttagtaggtaattatactttaggtgcttcccacactatataagaaaattagtaagcgattaaaaaatgaaacgatgatgtattgcccaatacctaacacgaattaatttcaaactttttaaaccaatgtccttacatccttcccacatcgtgttagttctatttgtagattaattagtgttaaggatttatgacatataaggatttgattgtaatgtgtaatgttaccatcattgcttgtaatattaatctagtataaatacaagttagtcatgcaattaatattgttatttagtttttattgaattgttcatacaattctaagataactaaccaggtgactcatatatatatatatatatatatatattcaaactggatgcatttaatgtaatgaaagagccagagatgtactcttatgcctatgttcttgctttagaattacagctgtgttgttggtaacttttgttttaatactcaaagtgtggaaatctgtgttataatttgcatgtaaccaaaaattattcatttacaataaactatgatgatctaggatcctggctcagcttcaaaagaatctgaatgtattagctgcaattgctaatgctcaaccacaggcaccatcaatgccctccccaagtttgtagtgagcaatgactagttttgaataatccacacca

SEQ ID NO: 271643 - DNA, 588 bp, Cannabis indica
gtttcaatgtgaataatcataatgatgtaatgaatgttatgaataagtcgcctccacaattagcattattttcttatacaggtgatctccaatttagtataacaatggagtcatccaattctttgaatggaacattcaaaattgcgacttctgaggactacaatggagattggtttatatacatgatgaattttcttacgaatctcaattgttcttggaatatggtaacactacacgttgacaaagccaaggtatgtttattacttgtcttatttcgttatgtggtgttatttcttggaatatgaatatggtttgtattttatttcgttatctctttacatgaaggctctcatctttccaaaacacatgaaggggttattagaagactggaattgtattcctatggttaattgggagcatcttagagtaattactgaatgtaaagaagaggaagaatcagaattgagagatactttgatgtggatttttccttctttgaagaaattatctatagaaaaaaggacatcttattaaaacttttccataagcgacttataagtatgtttcaacttcttaaacagtgattac

SEQ ID NO: 271644 - DNA, 657 bp, Cannabis indica
cccacagataaaacagaatgttggcaccttttcatatttgaagtaagcataaaatgcttctccattacgttttcgaaacttcattctcctttttaatggttcagcaacattaattgtaacacgcatacgcaaataatcacgccacacgccggagaagttgttcggatcagatgtaacaagagtgccgatgtatttgactacttcacgaagagcccagcccgtcttaaatcccgtcttcaagccatgcatttccacccacatatcaagagaattcagaaccaccattctaggattttcacctggctgtaatctttgtataatcatttgttttcgatcataagtccacgggctaccctcaattactctttgaatgtctatttcatcgtaaaactgaaataaaaatttgttttgttcaaggatttttattgtaattcctttgcctggcttccaaagatcagccataatgttttggaagatttggaaatctcaaactttcccagataacaggcggcctacaagacaccacttgtcgtcgaaacttgtttcttcctccactacaccttctgttggggtttatgccctaaataaaactcatttcaatataatcatatttacttattaataaagattagaaataacattttatgttgcatggtt

SEQ ID NO: 271645 - DNA, 3905 bp, Cannabis indica
actcataaaaattaaaaagctaggacaaaaaagctaaccattctttcctctagaacccacaaaactagaagttgaatcttgtccataacatgctgacacaagtgcacgccacaatgtggggaaattttgcaaggtgggctttaggttctctaatgtgcactggaatgaggagttactatgcctttttactccaccactactcaaacaattctgaatagggacaggggcatacataagtgttgccaaagctgccagttctccccctccttcggcaatatcatctacagtacaaattacttcctccacctcaagaagatcagtagaaggaactaagccacgtgacattactgaacgagcattaaaaaatgatgcatcatactcacaacccttgactctagacaacatcaaccatttcgcccattcacaatccccctgtgtaaaaacatatacaagaaaggaaaaaaaaagtcatatataccagcaacttgtatacagcagcaaacaggcctttgggcttggaagaccatgttaaaacaccttgtataagctaaaatcaaactcaatgtgcctcccaaatttcctattaactaatataattaagcaaattttaaaggcagctccagcatacacttgtctgggcataaactaacacagcacattttctattttggtgtgaaaagtactttggacaagaaggttggtgtcatattttggggaagagttaaagagattgattacactatcattcatcactaggatgtaactgcaaacaaaacgtaatcaaatatacccttaccatataaaatcaacatagaagcataagcaagagagagcagataaagaaaaaaaaaacttgaagaacaagatttaagaacttacagcagcatccagtagcaaagaaagtgaaccagtatctagaaccagcatgtgcttgtcaaggtaaaggtccaaaaggtgtggcaagttgcactggacacagtaacgtataactactttatgaagagcctgaactgtatcaaaaccaaatgctccaccatctgtggacaaatttgaatttgatgaactctccactgactcagcatttttaaggatttcattttgacttgtgacaaagccagcacgagccaaaataggaactatttctgcagtgccttcccagaattcctttaaaaatattagtttctttgcaagcttctcctccattagcatctttagccaagtagagcccataatattatctggaaacttcaaaagttttacatttggaatatatatacacacagcatccaattcttcaagagcagagaagtaatcatgatgcaaagaagattccatagcacatccaacagttgaagtaggctggggactgtccaagctgacttggaggcttccatcttctaaacttagttcaggaatcaggtccagaagtttagagactctctcccaatcaccatggctcatgtagtaatcaagttgtgattcccacagtacatcaacatctataaccaaagactgatccaaaactatctgtacaggaagagatttatgagaccatggacatcttaatcaacctttgtttaaagtgtgaaccacaatgtagaataacatggaaaaagaccttaaaagaaaatgtaatagacctaaattagatgagttaaggaaggagaaaaatgaatccagtcacatataatcattccaagcatgggaagggtcagggataagaaaatctcaatcgtagtaagttcgattatagcaattcctaatgattcattttctactatacatctgatatattaaatactggaaatacatgtcaacaatggctgcagaaattgtgctaaatttatggtggaagctttcatcaaagttcaaattatattgggttattccgagaacatgttctgactttgacattcagccaggtttagtcaaaaatggaaatacgaaattactctggaattctacattgtaggctgattgtaagtaagagacatgaaagatttttttttcctttccaaatgtccatctttaagttaaagtttgggaaatacattggaattctacaattgatattattttgttttacattgccggtttggttttaattaggtttttcttttttggaggaactatttccttgtcacgaaaaaataataaatatacttacacgatcaatcgttctctggtcccagacattacaccaaacagcagctgctgcccagtatccccccagaacattttcatcttcaactacaggaacagaagggttttcattgacatttgtccatgaacccaaaacaaccccatcaatttcaccacactcgatggtaaaattgttgaatacatcagaatgcaaaagcttcaaattattccttggcaaatgtgagcttgctggaaccctcatgtattctttctgccgtccattgaatgcattccagaagcagctgctaggatatagcctcttttgcaagaggggaaaaaagtcaatccacaattccaaaatcaacttacatgcttaaactaatatcatatagcacaggattgcagcatgtatttcacatcattgcacatatacttttatatgagatgatgagatttaaattcaaaggtgccaatcattatttagcattgaaaaaatacatataaaacttacctcaatgagagatattctatccataatcttccactcgtatggtcccaggtaaccatatcttttcatctcgtcaaagatttgtgctcgaagagatctccttactgtgccaaacaataactccttgaggcttgtttcaacatcctctccaagcctttgcaaagtggccacagcaagtccagtttcaccctgtttttaatgtaaaaatatgattaataatgcacaatcttatttgtggacttaaacattgaccaagttaccttcaaaaataggtcatatgcaatggctcttccaatatcacgaacttcattaaaagtatcataaggctctttgtctgaaattaattctcttgaatgatacagatgaagttgaagaaccgctaagggcagacgtccagatagtaaagcatcattgaccacggttctaaggtccaaattatctatcttccaacgtgcaatcatttccttgggattttccaaagaaagaattttattttgaaggagcccttcttgagatacaattgcagacacctcatgcaaattccctgggtccacatgagctttaagatccatatgagtcaaagcaagattctcagcataattagatcccacagcagatacatgaaaagaattatcattttgatttactgtctccaaagatagggtgtttgaagaaagaattgaaagtttggactcgtccaatgataaatctgcaggcgcgagtcctgattcatccccaccatttacctgtaataaagtaatgagaaatactaacattcatctgataagatgctaatataataagagaatcacaggtcataccaatccttggccaggcctcttcatttttgaactaagccgagactgtagatttcttattatttccaaaaaatgagccatctcacgaagccttctggaagttccaacttcattctgagatttatcatgtaggagaggtggaagatgatgtacttccgtcaactcaaaaccatgtgataaatatgcattattttcatgatgtagtaatccgtatgtgcgaatcattttggtagtgaagcgactagccaaggtaagaagcctatgataaaaaatcagacaaagtgagtccaaaccagaagttttgactatgaacaaaataaaatagtagtagccattttccctcctttttcccatgaaaagcacaatagtattgtatctatcatatttcacattaagagaaaacaaagaatttatgagtgagatatatatatatatat

SEQ ID NO: 271646 - DNA, 1591 bp, Cannabis indica
acacacatttccttactgagtttagtaactcacccttattaaattaccatgtgcagaccaaagtaattaaaagtctagaatgccggtggcgcgtggaactttggatgctggtgtgtgtgaactcgctgagggctatataactgcgggcggtctagggcgctctttatttatttacgttattaaacttatgtcgcaattattttagttattaattattatgtcttttgtacgaaaactggccagttgtgaacattttcaaatattaaataaaaatgggacaatatgattttccgcatttaacgcttgtaaacaaaattaatatttttataaatgtacgggcgttacaatgtctcccttcaaaaacaattttatggtagctctccactaaaatcttacccactgctagagctgagtatcaccaacaagcctctaatggttccattggctattttggccactcaacccgaactaatcaaatcgaaataggttcagtaagtttttgtacaatggtctcttagtccacctgaagatgccacttggaaagatttctcagcatgtaaaacactatatgatgtctctcactttgaggagaaggtgattttcgaggagaggaataatgttagcaaagcccaaatagaaagatgaatacctttggacccagtgaaagtggaccaaaagataagagagtcgataaataactcagtccaaaatagtgatgaggaaacatcagctctagctgagattcacaaagatgaagtaaagaagaacaaggctgaagttggacaagaaatcctagctcacaagaagagggctcgagccaaaccaaagtggctgaaggatttcgtggtgatcgagagacgttgaggagcaagctgttgagccactaaaagtcttttaggatgtaattccttctatatccttctattttgcgacaatataaatactcttttgtaataaattttggattggctattgaaattgcaaggtattgcaagaggagatttgtcttggctcgaagaagacttttgatctatcagttggaggttcggctgggcttgtattgaggttttggggttcgaaggagcttgtagtgggagtggattttcacagtggtagtcttgatttttcggtgatggaatttgagttttttgtcatttgtattttctagtctagttctaaactagtgttagcagagattttgtaaatagatacattttgtttttgtttatatttgttttataataattatacccatattttttatactaattattgtgtgattaacttagaaaggaaaatattaagcctctatatattagatgatgatggttgaagatgatgaataaggagttttaagttagtgctgatgtgttgattactaattggatgaaaaatgattctattggtgggttttttgggggggagatttgaccttatatgcataaagtatgttaaaattaataatcaaaacttaagctacccaatattggtggaataggtcaattttgatgtataccacaaaatatccccctcattttaaaactttctaacatctctctattttcctcttactcgttctctctctctctct

SEQ ID NO: 271647 - DNA, 1074 bp, Cannabis indica
ggagatgatgccacttaaccttacttaacaataggattatataagtatatagatgcttattaattagaatatataatttttgaacgtcatttgtatcgggaaatttacatggtatactaacttttgctattttttttataaaaatactctcaagcggtattttttacttttttactgtgttttttataagtttcatgctacagtttactgtgttaagttttcactagtgttctacttgtgttttactagtgttctactgttgttttgagttgttctactttgtgttttaccggtgttttataaaaatacagtatttttgaaaagatttccgtgtgacagtatttttgtaaaagttaacccaaattccagtatttttgtaagtttccctttgtatatgagaagcagggccagctcaagtgatttgggggcctcgagcaaaaaattaaaattggtcctttcaaaataaaattatcaattaatgctttacaaatttagttttcaaaaaaaaaatatttataaattttaaaataagcaagaattttaaaatcatgtgtagtgagatgattttatcatttttttaatgcatatttgttattatgaacatttattatgtatactatatattataaaaaaatatttattatattatatataaaagaaattaaaaaaaataaggtcttttaatatggggggccttgtgcaatggcccaagctgccatatgcttgggccggccctgatgagaagaagggtgaatttaggaaaggtcctattacgatggatagggaagaatctggtcagagatggagaagaatctatagttattagaagtcgtcttttttcttcggtccaagtccgttgtttttctctgaatttaggtgcggcttggttaggattgtgttttgttattctaattcgatttttgctactgcgattagttttgtcactgtaatatatataattttgagtgttttagtcttgtctctataatacaattttaatattattttttgaattaaatcaggagatttattaattagtaaactcgttcaaaacaataaaacgcacttcagagg

SEQ ID NO: 271648 - DNA, 989 bp, Cannabis indica
aaaataaaattaaaaacttagtaaaaacagtacaattacttaaaaaatataaataattataaattccacttaaaccgtggtttcgaaccaaaccaaaccgttcttaatggtttggtttggtttggtttgaaattttttttggtctggttcggtttctaatattcaaaaaaccgttatactggtttggttcaaaaactatgaaaatccggaccaaaccaatctgtgaacactcataaggaaaacttacaaaaatactggaatttgggtgaatttttacaaaaatgctgtcacactgaaaagttttcaaaaatattgtgtttttataaaacactagtataacacaaaaacagaacaactcaaaacaactaaaaaacaccagtagaacaccagtaaaaacttaacacagtatactgcagtatgaaacttataaaaaaaatacaataaaaaagttaaaaataccgcctggcagtatttttgtaaaaaaagagcaaaagttagtataacatataaattttcctattatttatttagagcatatccaatggatgtataaataagtggtgaaaagctaaaatatagttcatttaacaaaaagtgtgctccaatgatgtgccaaaaagtgatgtaaatttggcatataacaaattttgtatcaaatttggcacaatatttgctatgatgtaaaatttataccacaataaatacactatttttttcatttacatttatgtcattactattattttattagagcattgttattggacaccagtggtgcctagcacccttaagacgtgtcgcctttcgatttgctagcgatactccctaaaagttattatattaaactatatggggcccgatacttaattagaccaatagcaatattgacacgtaggagggtgcttggcaccactggtccctttagcatttctcattttattagtatatttaactatcacattaaattatgaaacatttatattattttt

SEQ ID NO: 271649 - DNA, 528 bp, Cannabis indica
aggagcaagtatgcagtgggtagtgggacctttggatgaagccgtgcatatgcggttgggccagagggccaatgttgtgaagttcgcgaagaaatgggtgcaagagtgcacttggtgctgcattgggtgcagttggcttgcgagcctcgtccaggtgggaagcaccaaagtttatcctgcgatgagagtgtcttgctcgattgccatcaggaggatggtgcgccatagagttggcatgtgaagtttccggagggacttgtccagagggacttggctttggtggaagcgtgttttgtaggtgccattgggaacggttagtttgcgaacctcaccccgaggggtgcaccatacttagtccttgtcgaaaggagtatgcattggacgattggcgagtgagctgcaatcagaggatgtggtagcttcagggtcagtgttgcaagggctgcttggttgactagaaggacgtagtgatggactcggaggagttcatgttgggggaagtattctagtgcagaggcactactccat

SEQ ID NO: 271650 - DNA, 935 bp, Cannabis indica
caggccaagaggaaagtagcattactcttacaaaagctaaagaaatatgagcttcctgacctgccaccccctcgacatgatcctgagctatttacacctgaacaacttcaggcatttaagaagattgggttcaaaaataaaaattatgttcctgttggtgttcgtggagtctttggaggagttgttcaaaatatgcatttacactggaagtttcatgagactgtacaagtttgttgtgataactttcccaaagaaagaatcaaggaaatggcaacaatgcttgcccgactaagcggtggaattgtgataaacatacataatgtcaaaacaattatcatgttccgtggtaggaattatcgtcaaccgaagaatttgatacctatcaataccctcacaaagagaaaggttggtggaataggcatacatttaatagattctataattcatattcaaataatttgctggtatagtctgatatttatgtatttttaccattggggaaaactattgagaatatttttatgtctgtggctttctgttaccaagattagggatacaaacacctggagtatgttcttctagtccccagactgaaatgttcccacagtccaatgttgtatttgactgacactcttccttcctcttaaaaaattaaaaacaggatcttaggctagaaactattggattggattctctatattgtaagttgaagtttagttgctccaggatcttaggctagaaactgtcaaaataattcataatatgctatttggaagagtgattaatataatgatatgcaggcagttaggaaagaacattgaactgtttggtattttatgcaggcattattcaaggccagatttgagcaggctcttgaatctcagaagctaaacataaagaaggttgagcaacaacttcgccggagtggtataaat

SEQ ID NO: 271651 - DNA, 1646 bp, Cannabis indica
aaatcccagtacctcgtgatatctccctaaaaaggggaagcaagccaactttgtgagctcaacatcccaaactcgccactataaagatgaaataaacagtctttggtggaagaatcaaaggctggaaactacgatggctggcatgcaaaaggtgttgagtggcatactcaaaggaaaaaccgaagcctcgcactttctgcacaaaaaccactagcaagagtacgagatcccaactgcacatgccggtggagagcactccatttcatcaacatatagaaccccagaggatgacagtgaaagggagcattatgagacaaggaccctataggtcgttcaaggcaacatgactctactcactgtagtaagaccacaatgatggaaatgtctcgtgatcctatgaaaggatttcaccgaaagagtcttatgctagggtgaactgcatttgcgtcccattttcaagagcaaagcaagcaaaaggcatcattccctaatcatggtgggaaaccgcacgataaggggatgagaggagttctactcgtagaccccatgaaagctggcaggaacacccaaattccactcaccaactctcgagaaaggatgaatgaaagaatgaaggagttagaagtagagaggcaagatctacgtcaaaagatggctaccacacaaaaggaaaattcggaggatgatgggtttgaggaagaatcccctttctcaagggagattcaaattgaactgcttccacccaatttcaaggagcctcacatgactctgtatgatggtacaactaatccaaagtaccatctaggatctttaatgagctaataaagatgaaaaatgtgtcatgcaatacaaggtgcaaatgctttgtggtcacactttagggagctgcatataagtggttcaaaaggcttggactaggaacaattacatcttggaagaagtttttggagaaattccttcaatagcaccaagcaataagtgattacgttatgcttgtaacaattatcaccaatgtgaagcaatgggaataagaaaggttacaaagctacatctaatgcttcaatatcgaagtcaccaaagtggggaagatgtttgaagatgaatccaagtttgccatagccgttggagtacgtcctggaagcaaattatgggggagtatgtggaaaagggaattggttggcacataaacttctatgagagagttaacaagtaaatctgtgtggaggaaggaaatagagtcatgcaaatagataccagcatgtgttctttgagaagcttgtcaaattcctgtagggtatatcaggcaatgcccccaacactcataagtcggtgcattcaagtgaagcctatgctctacaacccataaaaattagatatccaggatgttcctcaaagtgaagttccattatgcaggaaagtattcctagctgttatctgtatttctgttaagggacacataaattccaaatagaagtcaaggtctattagtgggcccaaaacaacatgaactgggccaagcccaacacaaacttggccttccaaaaagataattacacttcttgctcagacaagtctctgccaaggctagtccacatctagaaggatttttagctctgtgtagccgaaagaaaccttcagtgtgtacc

SEQ ID NO: 271652 - DNA, 519 bp, Cannabis indica
ttatactttccctacctaactttttttttactgttttttatttattaaaactttaaaaaaaatatatattcttttctttctttatattttcctaatttttttttcatgctgatttttttttcttcagggatgagtaacttctttttttttttcatgctgacttttttttcacttagggatgattgactttttttgtttcttttttgtctctctatttctctttttatttttttttaattctctctctctcttctcacactatttttttttatctttacatatatagtaaaagtacattttatatattttttttatgagattaagtgtcataaattgtataatttatatggttttgccacaactattctagtatatattaggatttgtttgtattttgtaatgattattacatgaattgagtaataatttgtgttaataatgatttgtttaggaagttaataacatgtgaatttgacttgagttttagtaatgaggtcaatatatattggggtgtgtata

SEQ ID NO: 271653 - DNA, 849 bp, Cannabis indica
tggtgtcccatactatgtcaaattaattaaaattaacacatcaattaatttttttttataaaaaaattaaaccactaataaagtcaacaaaattagttaacatatttaataaaaattagattagttgatgtgtcaaactttaataagtttaacacaatataaaagggatcttaattcgtataggtagtactgtaaaacacgattctttttgtagtttgtagtagacttttgactgcatgcacgtttttaagataacaatgggaattttgatttttgtgggtttttagtaaagtttattaaaatatatactttttttaaaaaaatatattttatgagaaaataaaataccgcctgtcagtattttttgtaaaaaaatgacaaaagttagtatactaaataaatttccttaaataaaaacgtgaaaaataatttacggtaatagttatcttaaaataaccatatgcataatcaattatagtgttttttcctgtatatataaatataataatttttcgcataaaaaatttcatttgataaaaacaatacttttgtacaagttttgtaagaatccatataatatgtaattttcacataagtattttcaatatatttttggatgctatgtaactttgaaagggtccatcaatacaagtctatctgtttgagtaattgagagaattttttttttttttttcatttacgttgtagttatttaagatattttataaaattttgagaaattcggaataattttaagagttgtttagttgtgtctttagtttttagtttttatcattgtgtttttaaaagtaagaatagaaaatattttattgtcattttaaaaattta

SEQ ID NO: 271654 - DNA, 882 bp, Cannabis indica
aaggggttttggcatcggtttttgcgaaattagctaccgacgctgttccaggtgacgctatagggtttaaaacaaccgacgccaaagggtccctatggcgtcggtttttctataacaaccgacgccatagggtcttcctatggtatttactttcagcttccaattttgtattttagcataatttatatatatattattttattattcatataattaaattaagtataaattatatataataaccataaatacaaattaaattgaaaagttgaataaatacacatctacattactctaagtgtttgtatattagctatctttttattaatattttatattatgtgtttgtatttttgtagtatattagtatatttttataattttttttaatatattagtatcatttttgtagtgtattgtatttttgtagataaagggttaaaatttgcatgaaattttttaaaaactttgaacattattaataacttttgatccggttgtccgcttgaggcgtatttttttttttttttgaacttgggtattttttgtgttttattttgctattttacttaacataaactaatagaattcttattttaagtattagaatcaatgtttataatgtatttgttaattctattgtgttttggtatattggtaaaaacttatcaatctatccttttggtcacaagttcaaatcccaatatagaccttttttgtattttttttatagcttactatatctatccttagcactcaacaatatatatcctatgtattacatcaatattattctaaaattactctaagcatttaaagattatctaaatatatatgaaaaatattcttataaaagtaggttaaagaaagcataccttatac

SEQ ID NO: 271655 - DNA, 1060 bp, Cannabis indica
tgatgtcgtcgcattctttcttaaacaatttctctggctgctcactaagattgtttacattggtgagcggcttctccttagcttctttggcatagcgctcttgcgacttgcgggagtctcctgcgatatggggccctccaatgatcgttaagatatcgcgaggtgttctcgaaccactcgcgttttgattttcttctttgtcatccgctcggggatgaccttcctcgttcttcttatacttgtcgaattttcctctccgaatcagctcctcgatttcatcctgcaagacccaacattctaaagtggtatgaccaatatctttatggtacttacagaactttttgggatctcttctgttgcagtttcccctgatgggtggcggcttcttgaagactccattcctttcttcaattgcatagatgtggtctcagggcaccgcgagttcggtatagttaacaaaacgcgtccacccttcctcttcggtgaggactccttcttgggaggagatttggccaactttggacttcgctgtctccgtgggctgcgtattctcgggcttcggcctctggaattcttccctcggggactgcgagatcttgatcgcggtattggtgatttacgcttatccttgcccttctccaactctgccagagaattctcaattctcttatggggttcggccatagcgaagaattcgactagcgattctggcctttgagcttgtaactctttctagaaatcggtcctcggtaaaatacctgttattaacatacacacaagcgaagactcgggagccttctcgacttttgttacttccgcgttaaaccgtttaaaatagtcttgtaaagactcacctggctcttgtttgatgttcgccagagttgtataaggaggcctataggtcattgtggcttgaaaatgcgtgaagaataaatcgacaaatgtttcccatgtcgatatcgaagcctcaagcaattgggtaaactaatcgtgggcgtttttctcgagcattgccgcgagaatgcgacattttgcaagctgtggtacctgatccacttcc

SEQ ID NO: 271656 - DNA, 809 bp, Cannabis indica
aatggtggtaataattgaagtatattaatatgtgtttgtgagattgtgagtgtcaaagtctttgaatcaaacttattttacacaacaatatagctatctaataggcggtttggttaggaccaatttaataaaaatatattgagaaaaaaaaataaagatgactacttttattgcttataagtgaagatggaatatatatatatatatatataaatataagtgaaaatgatttgtggagagaatgtataaggatatattgcttagggatgataatgtagaaaatgtgagaaatgtaagtatcaattcaacattatgtcttttttttttatatatagttggataattagatcaatcatatatatgaacatatatatatatatatttattttattgtaaacacacaataaatagacattttttggggggttttcaagttgccctatttggatctaagtgatccaacttagtagtttttgtaaaattaagtcaacatgattaattagaaaatttggatatttttgctttttgcttgaataaattttagtgtccttttttggacactcaatattattgtttatccaaattgaactttatgcatacatattatacatttgttgttttcatgtataactttagatttattgaaataatatgacttggtagcatgtttatagaactttatgagtattattagtggctcaatgttaatttgattagatggatacaaagaattcagacattgaggatcatgcttcttggcccgaggttattgagtcatattttatcggccttttgtatgaagaggccaa

SEQ ID NO: 271657 - DNA, 1049 bp, Cannabis indica
cgctgcaatctgatgtagagatccttctagcacagatgtgcacacccaaatacttgaatggatcatgatgtcttgcaaatccagacatgtctaacacccttttaatctcattttcactcattccactacaatagatcgctaattttgcattgttaggttgtaatcctgatgttgcagagaacaatttgagaccttgcatcattaggtagatacttttaaaatcccctctacagaacaataacacatcatcaacaaacttaagcggtttaagcccaattcagacatctctcatgatagccaaagtcttttttcttccctagtttcttcattactctgctgagatactccattccaagtacaaacagtagtggtgacataggatctccctgtcgaagtcctctcttagcttcaaagaatccatgtgtagatccattgaacataagagagaaccttggagtcctaacacacaccatgactaactcaataaattttcctggaaactgcaaagcatacaacatttcctccaggaaatcctaatccaatgtgtcatatgccttttgcaaatccaacttgatcatgcaatttggcttacctaccttccttccatagcttcaaattagattctgacaaattatgagattatgtgctatatatctaccctttatgaaacctccttgattaatcgacactaaatcaggatgaatgatctttaacctagaacagatcaacttggtagcaaccttatatagcacattacaacatgaaataggtttgaagtcactcacctgattaggactcttgactttgggaatgagagtgatgactgttgaattgatttccttgaggaggttacctatttggagaaaggatctaacagcttcacatatctcaggcccaatcaagtcccaattgtcttggaagaaatagcttccaaacccatctgggccaggactcttagatccaggaaagtcaaaaacaacatgctttatttcttctctagaatactatgctagtaagccatcagcttgctccttagtcaccactggccc

SEQ ID NO: 271658 - DNA, 619 bp, Cannabis indica
atccggagttgttcaggtaaatttcaggacgaaatttctataaggaggggctaattgtaataccatggaattatggaatggattagcaagaccctaattagataattgtgaataattgagagattatattattatatagttcaatttatgtaaattaatatgatttattatatggtaagaccccgttggtgagccaggggtatttttgtaattgtgacccgagaaggctaaaatgatgaaattaatttaatgacgtgcttaatggaactgtattattatatagtatacctgtgttgtcttttcatgtgtattctgacaggttggcgcggtatagtcacaaccgggtatttcgggctaaaccgggttggggcctgaaatgcaatttgaatgagattatttggcattttatttgataatataaaatctgaaattttatttgaaattaaatatgcatgtaatgactaaaacacccttgtgaggatgaatgtgtgtgtgttggccctaagggcatttttgtcttttgaccttattggatttaccttactaatattgattttttgagaaaaaacaaatgaaaaattttggttgtttcccctctcacccgacctctctctctctc

SEQ ID NO: 271659 - DNA, 1036 bp, Cannabis indica
aattcatcaaatgcattgtcatgtcgggcataggcggactaggcatccaagagcaaaaaaaaaattccttttaaaattatgtatttttattattaattttaaaaaatatcaatttttttctaaataaaagttaaaatatattttttacttataacccactaaattttaagatcgttctgtgcattgtgatacctaacttgagagaaatgttataaaccatggtactagatctagcttgatgaatcttgcataggccttattgagggttttgaaatagatcattttttatacttaaattccatgtttaatttttgaagtcaaataataaaatagttttttttcttcttttttccatatataagtagaaaaaatagagaaagaaacagagacacaatagaaggaaatttttgtaacttttcttttttcctcttttttcttattatatattaataattaatcaatgagatcaaatcgaaacactttaataataaatacataaactatatagcatattatagaaaaatgaactacatatataataatatagaaattaataaactatatattctataattaagcaaagtgaaataattaattatgaacttattacaattaattatttctatgataagactaataaacaattaatcatatcttgtggtatcaggaagatcagtgccatcaaggaagtgtttgatgagtgaaagagctctacgaggttggtaacttgggacttgatgaccagctcctctcactgtcgaaaatgttaactctcctttatacacttctgtatatccaccaatctatatatatacacacacatataattcttgtcataatcaatatatatatatatatatatgttttaattcatatttaattttgtgtgtacgtgtgatatcatactataagtcaccaaattgtatatgtaatttgaagttaattttaaaaacaatactaatcaacaaaactataatttagtgtgacaaatatgtttaaagttagtaacaatgtgacttaattaattattacgatt

SEQ ID NO: 271660 - DNA, 828 bp, Cannabis indica
aatattaatttttcactaatcaaattttattaaatatttttaattaaaataaacaaaataattaaattaaaagtgaaacataacgccaaactaaatatttttatatcaaatatcaaaagtcaaatataacaatatccttaaataaagataattcttactaaattgaatattcataaaccattaataaacataaaagtaatagttcatataactaaaataaaaatactaaaagacatttgttcttgcatcgtcaccatcatcatcatcgttagcatttctcggaatctgcggttgaggaacattcgacatctgtgggtagtatggaggcatctgcgaacttgtcatcgtctgatcagtctgttgcccatgtggtgtgggcatatgtgatgtttgctgcccatattgttgcccttgtagtgtcaacatcatctgaaaagtttgcgacatctgtgacatttgttgcgtcggcatcacttgtgacatccgagactgtgggatttgagatgtctgaggtgactgcatcatcatctgcatcattacttgtgggatatttggcgaccacgactgtgacatcatctgcatgaatgtctaaaacatttgaaatttttaaaattgatgagccatttgtttaaggagttgctgaggctgttataacggctgctgtaacaattgttgaagtaaaagtggagcctgctgcaactgtggatgctgaaaacccattggctgagaagatgaaccagatcaatctccatgcgtataaaagtgagacgattgtggacgcgttggttgcgttagagcagtgtcgctcatcactgtctccacatgggc

SEQ ID NO: 271661 - DNA, 1272 bp, Cannabis indica
tttttcattaactttaacaaaatctgttgaagattggtgaaaaagttgtctcccaaatccatttgaaggtggaaggatctacaattcgtgtttaagaaacgattcgtagctaaaaggactatgatatggaagtcagtaatctgactaatgtcgagcaataaggaagataaagcctcaagaactacatccaaaggatgatgggagcaacaactagaacaaagattaataatgatatgaagctagtggccctaacatctagaatatctatcggatctctgttatagggtgagctacaaagaaaaaagtaagccaccttatctaatttcttatctagggcccaatgcttgataaattggaagaagcatatatacaagcttatggagtccctctggtaccatcagcaatcgtaagcaatttaacttacactacaattctcaatctggctataaccccacccgagccaatttacaactcctacagtctatgggcccactacctcaaggtatgcgcctacacaaactaatttttccagcttcggggttgcacaatctggatgcagttccacccatagatagacaagccaacaaaaaaggttctagaatcaagtgtgagtcaacctaggggaaagaggagtggaaaaggccaaagccagagcgaggctctgaaaaaacggaaaaagtcagcatgaatcaaggtactccgagtacaccagtttgggatactcgagaaaatatgtattacgaaacttgtaatatggtccactacaagaagacactactaatgtacaataccgctaattattatgattcattaactttataaaactttacattctttatttaccatattactatcatttaaataataaaaaactaaaataataataatttttatatattctcaataaaatattaaattaccatcaatgtattttttttttactttacatcttatgcattggagtgcgattataaataatttgtcaaatatagcacaaacttatttttttgtatcaaattatcttgcattggatatggtataagttgtgccaaattaggcacatgctaaatactgggccaaatttggtacaagatagcattgtgccaaatttagcacagaataaatgctatatttttaaggattatttacactagatgctgtaatttctaacttttttacttttttacttgtagggtggaattttttctcaaaaaaattaagtgtttttttcttaaaataactgtgtaagtttaatatcgtgtactgtgttag

SEQ ID NO: 271662 - DNA, 637 bp, Cannabis indica
taaggtaaaatctagagtgatcgtcttaagaatttaacgataactcatattcacctctgaatgtacatctatatgttcaaatacaaatgatcctactttcaagtggatataggcatattttctctttgctaagaatcatcttgtcaaaacaactatgaacaagatgcaaacgccataaaaatatattatggttgtggtcgtttgatgacataggtctagttacaacaaacacttcttagaatagtctaagtaggttctggtcacagaatacaaaactcataatccatacattaacatacagttcgaatctatcgacagaaagtagttattaacaacttgtaaaagctatactgtattgtccaatgtaatctggaaactgaaattaaaaatttctatttggaatctaaaatttaaagtcaaagacttaaatttataccaaatattccttgagtcatgattctttcttggaccaccactactaatctaactctaagtttaagttgccaatagtaagcatatacaagtaggagatttctaagatcaagaatttatattatttttggatagaatgtctggaatatagtgttggaatttattttaccaggatcttagatctactcacaagtatgttgtttaa

SEQ ID NO: 271663 - DNA, 2753 bp, Cannabis indica
tgtatgaagctatgacttaggagagagtataaaggtttcttattttttgcctcttattcttaacttggggtatgttattgagctatggcaaatgcttaggtcgcgaccacttaagaagaaaagtgttgtttctttagtctttgtttcggttcagttttcgcagttgttacaactgtcattgtatattttgacttctctttctttttagaaatcttttctttgaacacatatgaagacttttggctgattatttatattgtaatactcttaactgtttttctattaacagtctcatagtcttcgttgtactgaatcttttatgcgggaaaatgttgttgcggaacttcaacacctgcaacctaatgatgaaactaaagagaaaatgctggatatactaaaaagatttcattcagaagaagaaacagaagacatggatgaacaaggtgtgtaactgaaatcataatagcccttctctaccctccaaagatatgatttcaagcatggtcattttatcttgacattgcattctcgattactcattatagaaataccctgcttctaattgtcgaagaggagtttctcataagattgattggcgttagttatgtgtgcggttcggttttttttaggactctcatatgatatgccattaagaggaaaattacacaaaagaaaaggcgtttctcgtctactaggttgtaatattcgtaggttgtgaaagttctatgaacaagcgatgatttgattcaatgttgtttagcatggtattagaatacactaatagattttagcaacctgctagaagattcgttggatttattcggaatatgtgtccaatacaatcatataagaggagtttctcataagattgattggcgttagttatgtgtgcggttcgattttttttaggactctcatatgccactaagaaggaaaattacacacaaaaaaaggcattcctcgtctactaggttggaatatttgtagggtattttatcggatttaatcatctattgtattttcatataaatagcggcaagaaagtctatgaaacaaacgatgatttgattcaatattgtttagcatggtattagaatacactaatagattttaagtaactaatagatgcacatcattggaagggttgaaaatctttagatgcttaacaatcaccaaaagccttgaggttcccaattttgcataatttctatcttccaattagttatcgaagtattctgcttaatttttctctttcttggcagattcaacactttccgaggagaccattaacaagattatgtctggtatgtttcgatgtctatctttgaatcgtgaatttatgatcttttcccgttttaagtctccatgctacattgcttgaagctaaagaagttttttattcatgtctccaggagatcaaatcagtttcgatgatttatcttcagaagaaaagaaacaatttcaaagagctattgcatctggagaattgagcaagttaattgagccttgggaaccatggtggctgaggccttctgcaaggacgatatcgctcagcagagaaggtactcaactcgtgcagccagttaacgaagaggaaacaatgacatcaccagaatccagtttagaaagcaaccaaaccgaaattcctcctggcccagataccccacttcctccactcagcaatctaagttccacacaaccgtcaccacttttagctgtacatctcgttgacataatatacagctattgtttcacgctacgcctctacaatggtgattggaaatcaaatgctgcagaatctgccttggtggtgttaagcgtgtcatctgtattgggtcaatgtgcacaacccgaaacagtgttggaggctttgtcttactgcctcgagcaaacctgttccccggcttacagacagatgggaggcttgcaattcggtttaggccttattgatgatgtagtaagcttacttactttaggtaacaatgccctattgtgcttactttcggacttgcaaagacttgttcaaaccggggaaaaagagcttaaggctgagaaaccacagaaaacaaagaaggtagagatcaggaataagctgaaactagccgagaggaagatatattttatcatgtgttgggtacacgagcaacctagcgaagcttggtcttccttggccgccattgtgagggcggagaaggcttcggcttcggctatggaatatgttagtgtgccaaggaaattggataaagaaacagaacagaagagcaaggttatgattgaagagattgagtgaatgaatcaacataggtgagtctcactcacaaatgttcataaatgcaatttttgaacactcaaattttgactctgaaaatgtattgaagaccttgaaaaaggcttaagtgagtgaaaaatgtcacttcctaggttcatttcccaatattttctatgttatctctcttgggaattgtcaattattaaattcatattcgtatgtatactcatgcagtaaatttattttttttttaataaatactattttggatcttgttgctttgctaaagttacagagtgaaattcttgttttgttgaatgataaatttaaatttgtattttttaaaattgtacaaattagtacactgaattgattttttatcaaaataaaaattagtgattactcaatctagagttattatgaaaaaagttgggtatattttttgtattgttatattagaaattgttttaagttagttatatag

SEQ ID NO: 271664 - DNA, 912 bp, Cannabis indica
caatatcttacacttacaagacccgatatagctttcattgttaacaagttaagtcaattcatccatgctcctacaaacacacattgggatgcctgcaaaagattatttaggtacttaaagggcaccatacatgaaggacttttcatccaacctgctgcaagattagagctttagacttactctaatgcagactgggcaacaagcattgatgacagaaaatctactggtggttatgccgtattcctagatggaaatttgatatcctggtcagccaaaaagtaacaagttgttgctagatcaagcactgaaagtgaattccgtgcttaaacaaatgcagctgctgaagtgaattggatctgccaattactcaaggaaattcaggtctctctcccagcttgtccaaatatttgggttgacaaccaaggtgctgcctctctagtagccaatcctgtctttcatgcacgttccaagcatatagaaatcgatcagcatttcatacgagaccaactgctgaccaggatactcgaggtgcgttatgtgccctctgtcgatcaaactgcggacatcctcaccaagtgtttatccacagatcgatttcattacctcaaagacaagctcaaagtgtgtccttcaccctttcgcttgagggaggatgataaactgtctacgaagttagtcatagttagttataacagtttggtggttgttatgtaactattttgttttttgttattagttttctttttctatgctctgtaacaaactctgtatcagttctctataaatactatgctcaaatcaaggctagctaacttttgcaaagtcttgtgattcaattcctcaaattgtgtccttgtagaattgcatagataagttcactggttttacattgtaaatttatgctttaataaa

SEQ ID NO: 271665 - DNA, 1402 bp, Cannabis indica
ttatgtaattattcttaaaaaaatatttctactataaagataaaactaatgtctcgatcataaacattttttatataaatatatagatatattaatatcatgcatattgattttaatttttgtttcacacatagatttttctattcaattcgcaacatgcaatgatgactcagtcgttatcctaattttggtagaggaatcaaaacactcattatcccaatattgcagctcagttatatagaccaagacaagttaccaaaatatagtctttttagatcgaatcatattaattacaatttaattactagaaacttgctaggagagtaatccttgtaattgtagttgaataagttggacaaacactttgttaggtaattacaaaggatatatatattcctattttgactgtttgattagcctatatgcatgtttgactgtttgattaaaatcacgtatattgtataatgttttcacaatttattcaagttaaacattgtatttcaactattctaacgattttacctaacatttttcaactgtcatcaactacttcatctataattttcttttgaaaaaattgtgtttaccattcgaaacattaagcacaccaattaatggtgatttttaatgtggttgtttcttaaatatataagtttttgatatgttttattttttatcatattttatttatttttttatttattttttttaaaaaaaactaagtgatgttaaaatattatttttaaattctttttcttgtttattctgcaactgaagttaaagttttttattaaccaaaatatggtgaagaacaagttaagaaagttgggagcactggcgatctacgactgacgttccacaagtcccaggttgtgtccccagacttccctcagtttcctgaggttgcctcccctgaaagttctaggaatatctttgggttgtctcctgccccttggtttgcgagttgcgaggtttgcctcgtggatctctttctctaaggtcaggttgattttggaaactattctcctatgctgccttgactgcagctatttcacgctctagttcagcgttacaccaatttgcttcctcaatcggcgcctaagatggcggttttctaacttaacaataggtatgtacctggttgggtcgtaggcgccatcctcatcaacctgattaggaaaagacggaccgttgtttatcctaggtccttcgagcatgagaccccaatactggcttttcccggagctagcagcctgttcaggtgatgaatcaatagatccttgaggactcagtggctcttttccaggacgatgattgattccttcgtgagaattatctgctttgttgtcattcattacttttatgttaggaggcttttttctaagcttttttcacgaaggct

SEQ ID NO: 271666 - DNA, 1132 bp, Cannabis indica
tcatcactttgtatgaaaaataaaatggtattaactttatttattttgatactacttaacaatctagaaacaaatataatgcaaagtcttattcaaactcttaggcatacattaggcttctaaaaaatagaagcaaataaatgttcttaatttattctcattccagattattttacaaatagtggtttgagttaaatttatcacacttaaagataaaagtaacatgagatgaataatacataattttatttaatcaaagatgatgtgactactctttaattaatataaaattttatatgttagttatattctttatctcaaaataataatttgagatataaattatttcaccttacataagaattttttatcatcacttgcaagtaaacattctatctatgcatataaaataaatattactcccactgaccttttgttatataattaattctatgatgctctttttaaacctaaaagaaaagatgtcataataaaaatactatttgtgagatatttattttaatctataggtagacttttaagcttgcatatgttcaccactcttagaggaaaatctttatatagtagtctgtataccttctcctctaatttactatttggaattgattaatgaatagaaacaagaaataaatgccaaggttactataattgaatcttttatataatgttatttatttgaaatttattattttatttattcttttaaaatatgattttcttaaaaattaagatagcatttggtaatacttttgtttttaaattttttaatcacgaaaataaaagtaaaatttttgtttttaaaattttgcttttgaaaaacaaaaagtcttctgtaactatttttgttttttaattttaaaagcaaaaaataaaagtatattctgtaaattttaattttatttttatttgttgattttatttaagtcgagtccaggaccagagctggagtcggggtctggtgggtctaggttagggtctgggatggggtgcaggtctggattccaagatctaggttaggggtgggagtctatatctaaaatattgataaaaaaaataattttaaaatattttaaaagtgacttttttttgttttcaaaatgtttaaaatttt

SEQ ID NO: 271667 - DNA, 661 bp, Cannabis indica
taatagtaatagtaatggtaatgaaaaggaataagaatattgattacaatgtttggtttgtagttggaatgaatattgtaatcagaattattgtgtttggtttggtatgagaatgtaatggaataaaatttgtattgacaaaaataaccctattgtttttactttataattataaaatactaaaaaaagggcaatttagactttttgactttttctactaaatattatttttcctttgtaattgtgtaattgtaataaggattacattggttttggtatgtaatcatcattacattaccgttacattgtaatggattacaaaaattaaaatggaaaagcaaacaatgtaatggacctattcattaccattatgattactattacggtaaaccaaacatcacctgagtgtttttctatataatttttctttccatatcaaatatgagaatttattattttttattttccactttttttttcctacttttttctttcctcaccaaaattcaacttccaaacatagcctaaatcaatttcatctgtactctgtagctgacaggatccttcaacagtgtcataagatccatcagtagttgactgaattcctctatagtgacctaagattcctcagctgactaggtgtccgtgtctctagtttttt

SEQ ID NO: 271668 - DNA, 3914 bp, Cannabis indica
aattgtgataatgaatgttgttattgatttctctcatatcaaattattttttctatttgaatgctatgaatattataaattcttgttaagtttacaactaattaaagttttacattgttctattatcatcttagaattatctctcacctaatagtttaggattctaagtagaatgataatttgcaattaatatcaatgtcaaagatattattaattgtgatgaaaaatagaatctagattaaatgaattatatgtttcattgatttgttaactagattaatgtatatccataaaaattaatattttttctaagttaaataaattacatgcttcgtgaatctattacttggtaaaaagatataattattaaacgcttcgctttaattaattgtaatagagagactgagaaaattgactgttataatgttttatgtaaggttaataatttaattgggaaattagaataatatttattattattgatcttgaatgattgtttaaggttaatagtttgcattcaaaatctaaatccccttttaaactattagttctaatttttaaattaataaatcgataatagtacttgtgtaatcaacctggttatatttatataattaaaaattagagaaaataatatttaataaatttgacaccacttacaacacacatcacacttataaataccacacacacacacaaaaaaagaaaaatgcgatgtaaatatatatatggtttttttttttttggagcaaataaatccatgtaactttaaacatacacacaattattgttgttgttcttctaaaaagtaacatacttataataatatgattatatataattataatagttacaatatattgcaattgagtgtttatgattaaaataagcataatagattatgagttgccaaagatgttctcatcattacttctcttttaggtatctaatttaactaataaaatcttacaaaaaaaaattaactaataacatatttaaaaataataatagaagaataaactggagctaaattgttggtattttcactagatattttgatctcatactttttaaaatgaaaaaaattaacataaattatattgttattataattaagctctaaaaaaaaaacaaataaggtaaacgaagaaggaatagatatcgaatgaaatgattctaatcatacagttttagttgaaaaaaaaaaataagtgttgaatataatttcaattaaaactaccaaccaatttagatgttgatttaataataataataagatgttgattttaataatcaaataaaatatttcagactcatttggtacgatattgtattgtgttgaaatgtattgtattatattattagtattatttaatacaatactatgttatattgatttgtattaatagattgtgtaaagttataatatatttttcaataaactcgacccaacaccgactacgggtcggatccggatccggatctgggtccaggtttagattcgagtctcgagttcgggttccaggtccgattccgtatcttgggtatcagatcgggtcacagtttgggttcgggtcccgtcctgagtctgggtttgggttcgggtcccgtcccaagttcgggtctggtttcgaatcccgagttcgggtctgggttcgaatcccaagcctgggttcgagtttgggtttgggttcaagttcgattctgggatcgagttttagttcgggtccgggtctaggtccaagtcctaggtccgtgtttgggtcacgagtttgtgtccgcatcccgagtccgggtccgagtcctgagctccgggtcctaaatcaggtctagtcccaagttcgggtcgtaaattagggttgacctcagattttttataaatattataatacaagctaatacggaccatttgttatatattaaataatacaacttacattgtttaaaagttttggttataataattaatacaatacattattttatccaaatgtagtattatttattatttaatacaacacaactcttatacaacgtaccaaataagcccttcaactcctatatattaaaaattctttatttttttttttgaaaaataatgaaacgtcattaattcaaatcatccaaaactaaggatacaattacagtaggtaaagaaaccccactaaaagtacaatgagcctcatctagagaagaccgcgccaaagcatgcacaatcttattagcagattgtttaacaaaattaaaagaaatagcatcaaaatcagaaagcaaagccttacaatcagagagaatatggctataaggagaagccatatatttagacctttgtaaatcactaatgacttttaagcaatccgactctacaataacacttgtccacccgttagctttaatccaacttaaagtttctttgatgccaataacttcaactacatgcggctgcaaagctcctaccttgtttaaagttttagcttgcaacaccaaaccaactgctgtccgagccaccaacccaactccaaactgcctctcattagagaaaagtgcaccatcaacattaactttgattgtaggaatttcagggggatctagtgctctaaatttgcaacatttgaaccattatcactagcagtagcaatgttattttttgagcatcacactagttaataaagtttagttttgctaatgtcaacacctcaataaccttaggctatttagagttccaaactagttcattcatatgcttctaaattgaccaacatatcatggatgcctccaagaattttgcttcattccaagaatccaatccctcctcaaaccagcttgtaaatgtcattggagcatctgctacgcctggcactcgagacctattccaacaatttttagcaaaaacacatcgaaccagaacatggagagtagtttctagtgatactaaacaaaattgacatcagaattaattggcacatgtttgattgtaagatgaaatctagttggaagaaaatttgtggatactctccacaaaaagctttgaacttgggggggggggggagcttaagatgccataattttcgccaaaaactagaattatctggttgattgctgctgcctttgatcgattgcagcagtgcataagcactcttgacaatgaacaaacctgagttttctttcatctagtaccaagcatcactctctaaactactaagaggtatcttcaaaaccaaatcctgatccctttcatttaacacatcggagacaatagcttcctcccattccaaagaatcaatcttcatcaaaatgtcgacagtgttcccaacaagagccggatgagaagattcaatatatggattcacatcaacttgcaaccatggatttgataaaatattaatgtgagtaccatttcctactacccttcaaacacctgcccgaaccaactcttgggcctcaaagacacttttccaaatgtagctaggattactacccagagtagcagaaagaaatgatcctgaaggaaatagctggctttaaaagttttccccatcaagctatccccacaagtaagaagtctacaaccttgcttggctagtaaagctaaattggaatcccttaagtcacgaaaatccatttctccattattttaatgagaagaaagcttttcacaactcatccagtggatacttttattgttagttgagctccaccaaaatttgctaatggaatgctcaatttcctaacaaataccagctggaatgagaaagacattcatggtataggctggaagcgcttggactactgacttaataagaacttcctttcctgctcgagagagaaacttgttgtcccaactttgaatccgcttttgaactttatccttgtagtaactaaataccacatttttgttccttccaatagtactt

SEQ ID NO: 271669 - DNA, 1108 bp, Cannabis indica
atcttctcataaaaaaaaatattctaatagttgacaactctaaaagttgttcattatggtcccacatcatattgaattaatgactttttaaataaaaaataattttttttaataaaaaaatctatatctatatctatatataaaagaaagttattgagagttgatgtggcattacataagagttttctttcatagtttctattttctcaaattttctatttttttaataatttttaattctatatatcatacaatgatttgattcattggtaagttttattgaaaacaaaaatcccacttggtttagaaacctttgtgagtgttgtgttatagcctctatatagtttactatttatttgttctactttagtttgtcccaaaattagtgttgcattatttctatgggcgactaaaaaatttagtcttgctcaattagttataatattttttttatgaatgcaatatatatttttgcacataccttttttcatagtttctattttcttagtttttttattttttttattttttaatactatatattatacaatgatttgattcatgagtaagttttatttaaaatgaaatttcaaaattaacgttacattagtttttatgggtgattaaagaatttagtcttgcttatagtaaacttttttttatgaatgcaatatatatttttgcgtttctaaatcatgaaattaatgttaatgcattacattattttttatgggtgattaaagaatttatatcaatccatctatgtatctatataaagctaaattttagagtgatgatgtggaattctataatattcttattctatttttctaattttaagagaagtttctttttttttttatatataaaaaaatatatattatgtacatcgcttattttgttcacatgtaatggtaaataaaagttttacattgtttaaatattgttttaaacataaatcccacattgtttaaagattattttatagtgcttaatataatatataaataaagtttatatatttttcaattctctaatttcatttatatattatatgtataaattttaaaaggtattttaagtatgtaatttttcattagttatttag

SEQ ID NO: 271670 - DNA, 661 bp, Cannabis indica
tagttggccttctgtttcaacatgtctttttgaagcgagtgcatgagtctggcgaatgagtgcttcccccaaggaatccggaagaagaactcaagatcttcgacatatctaagtatgtcaggcgtaatcagcgcgttagcctcgcgacccagaagcactgactcaacaaacaagcacaagccaagcttgtacaagtcttccgggttctgacagtttgtgaacctatcttggagtgcttctgtcttcacactaccagaccggttgaaatatttgttgatcaatcggtctgaccctgagcgagcagcctgcgcagccttctcctcttctgttggccccgtggagaagtccaggcctgtaatgagtgcaaactcaagcactccgaatttgagctccttccgaccaatgtaaaatcgcatcttcaactcctcctgagcatcaaccttcatcttgtgcagcaccagctggtgaaataacaccgaggagaatgtcaggggaacggcattccaaaagttgccgaaacggcttttctttgccgtgttattcaagttgaactcctcaaaccgagccttgatttttgcaaaagttccggtgcctctatatgtcacgcggccagtaaaatgaccgggtgctggaattattagtctgggagccatctgaaaaa

SEQ ID NO: 271671 - DNA, 577 bp, Cannabis indica
cactatatgacaaagatctttgtatgaaataaatatatgtaagtaaattgttgtttggaaaatacgtatgattgtctatgcaatataaattcgtaaattatacgttgtgatagactcttgaagagtttttgattatattataaatgattgaagaacaaacttttatttcttttgtatattgagaaatattaaatgtataaagtttgttcattagtagagaagtcctgaagtacttcatatgtatcaagaattatagatatatgatcatttgatatggaaattaagatcataaaacaagatgaaacaaatagtcttggagtaccatcattctcacaaatgaaaatttatattatcattaatgtgttatgttcatatttacttaaaattttaaactttggtatgaacaaagttacatacacacatgaatgatacaattagttggataaatattgatgttccagaaacccctcatccataatttagaagttcacacattctttggaagagttatagaaaatatatgatcatagataatatacgtgatattttaaaagtgataacaataatcttatgagat

SEQ ID NO: 271672 - DNA, 1539 bp, Cannabis indica
tttaagccaaaaatccatttaacgacaactatttaaaccaaaacccatagagctctaactccgggtagttatgggagggctgtagcctgtagtttattcaaaatctatggaaacaaagaaccaataaaaggaaaacagagaaacccaacaatggcttctaatgtttctgtgtataactaaaacttaaaactaaaacaaagagccatgaactatatatgccatactcagttcaggccttcatgtcttcttctctgatgacttcattcacactttgctagctccattttcattatcaactttcgggttctttttctcaatcgattctgccatctcctcagtgatttttgtatccaccaccgcacccgaattgctgtcattatctttcagctttttcatccacaactgcttcaacagggttgtcaagcagaggagcatctgcagcagatgttggcatttcagtcctacaaaaccaatacatagtcattcatttcattagtaagagcataaaatggaactgatgtgttttattataaaattattctcaaccttttggttgaagaatcagccttagaatgtgatcctttcggttgtttccccttatccgaattagcacttttcttcaccctctttcggagacaactacacatgcagaaacagaacacttaaatatcaagaaaaaggtatcgaaagagtttgtaaggggaagaaacatacgccagtgtctccaagaaagaatcagtttttccttgatcaaattttttcacttcattaggctcttctgaagctctcttctgtgctctagttccttgcctacttaacatgtagagtcggttttataagagaaaaactcaaatcacatagcgtaaagtgtagcaaaaaagaaacaaaccttcctgatggaggatcagcctttgattgatctgacttcttagcttgcttctccagattggaatttgattttttgctctgtactttcagtccagaatttctgaatgcatagaaccaccaagtaaaaaattgaaccaatgacaaagtattaagaaatggtagaaaaaaagtgtaaagaaaccaacctttctggggttggatcagcctttggtggatcagatatttttgctttcttttcctgatttgactttgcctgtactttctgtccagaatttctaaatgcatagaaccagtgagtgaaaattgtccatgtccattgtgattgagtgttctacttaaccaatttcaaagtactaagaatttgtaagagaaaaaaagtacacacaaaccaaccttttgggggaacggatcagcctttgcttgatctgatgttttagcttctttctcccgactcgggccttttgtgttctctctttccgtccagaacttctgaatggatgaatagaacccgtatgttaaaatgttcgtgtccatggtgcttgagtgttctaatggccaatgccaaagtactaagaattggtagaagaaaaaaaagtgcacaaaaccaactttcaggagattagcctttgcttgatctgatgtttcagcttg

SEQ ID NO: 271673 - DNA, 847 bp, Cannabis indica
aattttgaggttgtggaggagtagtaccaaacacgtatccttcaagatcgcagccccgaatcgcaggaacagttgagctctccaagaaaatatatttgattctgttaaacttcaccgataccacataattgagagtggaggcaaatagagaagcagagacacgagaatcaccaggggaggtgtaggaggcaagaactagagttgaagaaaaggaagcattagtcgccatggatgactgaaatctaataccaagtaaagaatgtagagtgagatttggattgaatggagctctctttgattaattgaattagagttcagactacaacatagtttttattagcatagctattacaagcaagctaaagctaaatagagctaaacagaatacaacaaactctaactgatttctaatagctatttaagtttctcctaatgctatttgaatccaaataaaaaccgttttaaaaaattcattaattttctattttaaagttcaagtttcaaaagagttgggttatgagtcatgcatgactgagaaaaataaaaaataaagatgtcttctaatcttatccaaaagaccaagagaaagctagctttcggctttaccgtagctcttcaaacattatatataatgtcatacaataatggggacaatacattaaagtataagtactactttgtcatgagcaccgtaactattgaaagttgtgaaataataaaatttatttatacatatagccacacctacatacattacaattgatgtgctccattactatttcattaatgattaatatattattcaattattggacctatattggaacactctcaataatttttctac

SEQ ID NO: 271674 - DNA, 1215 bp, Cannabis indica
atgtatactccatacatcagataatggtcaactttgccaatgccctggaaaggacataacacttatccaatgtgtaagaatacctatcgcttattatatcatgcccgtataaatccaggtaattgacaaatcagggaataaactttcgaacatataattaagactatattccactgtgctgacaacactataatcattaacaaattcatatgttcttgacttaaatagaattcatacattatatgtatataatcatgaaataaatcatgtgaaccatagcaacataaaaatgttatttctgatctttattattaagtaaatctgattatattgaaatgagttttatttagggcacaaaacccaacactcagacacaacaacctattgtgcgccattttggaggctcatcgcagcaacaaaaataccctatgtatggttaatttgagtcatcacaacaacaaactgtgtatggtcaatttggttctttgttgcagcaacaaccgatgtatggtcaaataggagaatctccaaaacagcttgtgtatggtcagattttcagttcacagagttagcaacaagaatagactactttggttcgtccacaaacttgacaattggttgagatcttacctacggaataatttgcacaatcttattaccctatcccgtcggcacctcaatctcatgataatcgtgatggttcaagacatgcctagatgatttaatggaatttagtgatcataacaatgataattaggttttttaattagaaaattaatatgtttaaattttttaattcatgatttacctcttgggaattgaaaatatgagttactttcatattggagaaaagttattatatatatgtatatattaaacaaagttatgaaaggaaggattaggacactgtataaatgactctataagtaggactaacataacaaattaccattaataaaatgacataatgaattggtataaattgtagtacgtaccttgctctttaattatataaaatacatttataattaactaattgttcagtacataaataatttgttaacggatcaaatttggtctatcctcgattaattcccttttttaaaaggatgatcaaatttgtgttgggttttgtgccctaaataaaactcaattcaatataatcagatttacttattaataaagatcagaaataacattttatgttgcatggtt

SEQ ID NO: 271675 - DNA, 726 bp, Cannabis indica
aaggttggattgctagccaaaggcatcttcattatcagatttcaaagtttagaataaagagacaaagtgatgcagcaggggtatgtgttttttgatcgtaagccaatggtgatgaaaccctggagtcctattgacgatttcaccaaagaagaagttactaatgggcctacttgggttcagctaaaaggtctggacatcaaatactggggagaagcttctctgttcaaaattgcaggccagctgggagttcttttacaaatcgataatgttacaaaaaatggggataggctacaatatcccaggatcctaattcaagtaactctagcacaatattttcctgaaaaaatcagttttattgatgagtttgatcatgaagtggatttagatgttaaatatgaatggttgcctttagtttgttacaattgctctggaattggacatagaacttcagattgcaggaaaaagaggagaagaaagaagcagggaacaagtgtgggtgcctaagaaaccagcaatgaatgtagagaagcagctggatgatgaagggtttcagaaggtcagtaaagggaaaaaagtagtgccaatgaaggaggcagaagggacaatgacaaagaatatatttgaatctcttaatgatactactgatattgcagtaggcactgagatggattgtggcatagcagaaaggaaaattgggcacaacacaggaggggagggagatccctc

SEQ ID NO: 271676 - DNA, 544 bp, Cannabis indica
catcatctataataatttttattcctctaggcatcaatataatggctcttccggagccttcaattaaatttgcagtgcctgatattgtattaacatttaccttcattcttgataaatttaaaaaatattttatcacttctaagtattgtatgagtggttgtgctatccaccaaacacatatcatcaccattatttgttgaatcatatataggatgacaaattgtaataaccaaaatattcagttattattttttttattatgctggtctagaaatctcgatgtggaaatagtgattgcatagaataagttaatttcgtaaatagagtatttttaagagttatataagatttgcgttagtttttaaaataacatgaaaatgagttattattattgttgttgttgttgttgatgttgttattattatcttacttttgaagataaatataattatatattggtaaaactgaactatggtcattttaagtgtttaaaatatatactagtaagtggcataatgacccaagtcttgggccatgtagattc

SEQ ID NO: 271677 - DNA, 565 bp, Cannabis indica
atttttttatgaaaaaaatttatagactccgttttaaatttattaaaaaaaaaattaaaaataattgatactgcatatattttcgtctaaactaagtaatctagaatcaagattttatatgtatcctgtttaaaactataagtaccgatgaaactaaaaaaaaaattacagttttataaacattgagtacttatgccgctaaaaaaaaatcattggatttatgctactatttaccttatttaaatatataaatcttacatattttaatttaataattattttaaaaaaagtagaataaatactattttggaccctgtgctttgcaaaaattacagattgactctctcttttgttaaataataaaataaaccttgtatttttcaaaatagtaaaaataggtttttgagcttaattttcgacaattttttttaatacaaccaacttgaagacaattcctaacactaacagatacagaaaatacaaaaaattttgtcataaacacatttagattagattattattaaattttattttgataaaaaatcaattcagggtcctatttgta

SEQ ID NO: 271678 - DNA, 685 bp, Cannabis indica
atttttccataaaataattttttatcaaagaaaattatattttcgtacacattaaataaaaactcataaaatatataattttcacttattctttttttgggagagcaaatttccacttaaaatattataaatatataaatatctcataaatgtgttattatgcgtgtcacaagccaagtcaagcgaagccagaggaaggaggccaaaaattatgtttggtagaaagcaaagagagtaggatggatgaaagattgatgaatgattgataatataaagaagggggaggagattgttcaaaaaaaaaaaaggggaggagagtttaatttttttgttgtttagtaggaaggatggagtgatagaaggatagataattattcatttactttctagcaaaaaaatatataaattactatttgttatgtctaaaattcggctacactttaaaaagtgacacgtgtcttggagtggaatatgaaccacttgatataataaagttacatcattaaatgcaagataagataactcgttaataaaggtttaatagaaaatatttataactcgctgactatatagtcttaagcgagataaggataaaagactattgaaacttatattgacgggatacgcacctacctcggaatacatagtcaaagaagatattcatttattcaaagtagaataaata

SEQ ID NO: 271679 - DNA, 656 bp, Cannabis indica
ccttagcagcagttctggtcccactaaaatgtcctccacatggtaaagcatgacaatgatttaggatagaatacatctcctcttcaggcacacatctcctaattatctgatcgacgcagtgcttgtagaggattggctcttcccaataataatgtttcacctcagaaaagaacttcttcaattgttgacgcgacagctcgggaggggttatttttgcagccaagaaattaacatagtcagcgtaccatggtaccatcaggttttccctcacactaaagagttgttcatcaggaaattgctcatttatttgtacctcctttgtattctgactttcttccagttctaatcttaacaagtggtctgccaccagattttcagtgcccttcttatcttttatctctaagttaaactcttgatgtagaagtacccaccgaatcattctcggttttgcatccttcttggtcataagtgtaaagaccgcttagtttaatttggaaattagcagttaatcatgtttaattatgagaattatttatagctatttaaataattatttatactgttattattgaattctgagatgcattttatgtcatttagtagttttcataattttacattttcggtgcccggtatcatggactcggtgtttggct

SEQ ID NO: 271680 - DNA, 961 bp, Cannabis indica
ctaggtccaatttcagttatgattccaagtccaagtccttgttcaagtcctggtgaacttccggtttatgttccaattttgggtcactagatacgggttcaagtccacttttgggtttgggactaggttcaaatctgggtgtgggttggggccttgtcaaggttcgggtttagggctgggtcctaaatccagacaccgactacaggttttgtccaagccctgggtccagatccggatcccaatctcgggtcccagtcaggttccatatctggtgccgggtcacgagctgggtcttaggttcaagttcgggtcttggttgggtactaggtctcgttcctagttctgtttcccaagtccctatcctgattctgggtccaggtcccggttattgtgtgggtttgtgtgccggtttaggttcgggttcgaatcctactctcgctttttgtttaggtctctgtcttggttttgatctgggttcgggtttgggtttaggtccttgtctttgtcctagtcgtagtcctagttcggttctagttccatttgcgattttgagttcgagtttgggtttgagttcgggtcgcagtttgagtcatggtctgagtttgggttcgggttaagatttcagtctagttccagatcaggcttcgggtgtgggtacgtgtcatgggtcttggtctatgttggctacgagtccacagttccaatcccaatctgagtctggattcagttctaggtctaagtcctatgttctgatcttggtctgggttcgagtttgggtccgggtctgggtctatctttttgtatgattctaggtgtgggtgtttgtgttcgggtcctagtctgtgtcttgggttttgtccaggtctggacccccatctgagtatggtctaggtccaagttcgggtcccgagtggggtcggagttctggtcgtgagtcagatctctgtccaaatctaggtcc

SEQ ID NO: 271681 - DNA, 655 bp, Cannabis indica
aaaattaattaatgattaagaaattacttaaattatatttaaaaaaaaaataaattattttttaaattaattatacacgtggcattgacatgacaattggctaagcagtcatgttatcattttatttgtcatgtgtaacaaaacttgaatatttaaccaatttacagtattgaatagttcaaagaccatttttgacgggttgaaaagttcaatgggcacaacaatggatagatcataattcggagtcaaaaatcttaaaaggtggcaagccctcgggtgaagggaaggatagatggatttggaccttggaaagtaatggacagttctcgtccaaatcggcttacctaacccaggctttagaaagagcctcacactgtgaggttgctccgtcgctttggaataagctttggaacagcaaaaatttggagtgtcataagattctttggtggtgcatcatttctaatgtgctcttggttagagcagaacttggaagaagatttcagattgagaatacaagctgtcctttttgtgggttgagggaggaatctattgaacatttatttctttcttgtgaggtggtgttacacttttggcgatcttcgcctttggggcatttatcatgtctgtgatatgggtattcgtgtttgggactggg

SEQ ID NO: 271682 - DNA, 935 bp, Cannabis indica
taaatttatgcacccaataattaggtttgttgtagtactgttgtttctactgtccaacacatatggtattggacactttgttctgttattattagaacatatatattactctcccttgattatcaatttactatttcatcactgaaatgttgttcttttttaataggaatatactcttctttgtagctgtcatttctacttttaattgtaagtacaacacaatgcacgaacaattagtacatatgcaatgattaatcgtattctaaataatttcttccttgtttaaaacccaacttatggtataatgtaaattcattcatgatgatcaatatggtaatttcacaaattgcagataatattaatagtgggaactaaacttcaagtattcattacaaatataaaattaagcacaactaatggatactatggttctctgaggatgactactatgagcttgaaggcacacaatctcccaacaatggaccagctgcaccaaaacacaaagaaataactatgaagttgagaaggatataagtgaggaagtggttcaggagccaatctcctcctcacaacaaaatgaggtcaagatttttttatctcacttatcatttaggaagtgaaatagataacgctactattttactcttataatagtttttttcctttcttgttttcttttcttttggtcatgtacattttgttgaagatgataatatgtataaggttgaagtacttgacaaaaatttcttaatacatattggtgaaaatatatccaataccaatatatgtattgatagattatagttttttatattctttaggtatgatgtactcataagcagcttagttttatattttatagtcagttttgttaatggatgattactaatttggttcaaatgctaaaaaataagaagactctcatgaatatgaat

SEQ ID NO: 271683 - DNA, 2725 bp, Cannabis indica
atgggaattaaacttttgaacatataatcaagaatatattccattgtgctgacgacactataatcatgaacaaataaatacatatgttctggacataatagaatttatacattaagtataatcatgaaataaatcatgtgaaccatgtaacataaaagcgatttctgatctttattaattagtaaatctgattatattgaaatgagttttatttagggcacaaaacctaacatccttatagggcagccactagagcctatgtttgctctatttttatcatttttttattccaaataattcaatcctaaccctaatagaattagtataaaaaaaaagagtaaggtctcactatccaaactaatgcttctaaagctttaaacctagttttcattctatctgacaactagtgttttaagactttttctttttcttttctctcttctaatttgaaattcttagtcttcttcaatatcaaatttgagccttagtgattgagtgcatgtccacccatagcaagttagtcctcaatcatagtgtgtaagattgtgaagaatccaaacaacagaaagagtgtcgggcttagatcttgctgatactatgctacagaaaggatacaagggttagagatctgagcggaaggagtcatttaattccgctgcaaccaatgtaaggtttctcatgccttttatgtatttattttatgtcattttagaagttcatgtttaggatgttaaaaacatacttgttagtaaatctaggtcctggtaaaatatattccaacaaaccatcgctctggtaggaaccatgttaaatcagctcttgataaggctttggtcaacattggctagattaatatttttcctaaggcaattctttgttcctaccagactaagaactctgatcatagacccctatgtttatactttggtgatatggatgctaaattcagaaggagcttcaagtttgaagaaggatggactagagatgctaggagtaaattggtttttgaccatgcttggaagtcgatatgcaccattgggcccagtgagaattttcaagaaaattggtgcgactcgggtagatcttttaaattggaatagatctcaatttgggaagattcacatcaccatagaagatcttgaaagaaaacttgacaacttacaaaaactacccactcgttctagagattggaaggaggagagtgacatccggcgtactctgaatgtctatttggaaaaaagagcgttgttctggaaacagagatcccaggtatcgtggcttaagaatggggacaaatgctctaagttctttttcctctcaactactattagaggaaggaaaaatgctattgaaagtattttgagcaaggataatgtgttgttaagcagacgagatttaatttggaaagagtttacttatttcttgggtgaaattttctctggtaatagttctgctcaggatcttaattgtggctaccttattcaagataggctctcttacgcatgatgaaatctgtaggacgttgtttgctatggggagtgataaggctcctggccctgatggaatgttggtcatcttctataagcactattggtattttgtgggaaatgacttttgtgaggctatacatgattttttcgtaacgggatatatgcataagggttttaatgctactaatttagtgctcatccccaagactcagaacccaaagagaatgaaccactttaggcttatttcactttgcaatgtgacgtataaggtcatttctaaaatcattgcaaattgaataaagcctattcttcctagactaatctgccagatgcaagcagtgtttgtgcatgggagaagtattcaagacaacaatgtgatagttcaagaaattatccatactttcaatagaaagaaagggaaagaaggatttttgccattaagattgaccttatgaaagcatatgatatgctgagttagaaatttataaagtatgtgcttgattgctatgaagctccagagaaattatgcaaatcaataaagcagtgtagctctaccaccactctgaatgtttgtcttaatggagggcaggtcggcaagattaggccctcgtgcagattacgccagggcgacccactttctccttatctgtttattttggcggtagaagttttgtcaagattgtgggaagacgccttggggaagggaattattaaggggattagactaagccaaagggggccgattctatctcacatattctttgcggaggatctaattttggtaggtaaggcaaacttagaagaagctaaaggctactagaagtgcctggaagatttctactcttggtcacgccaactggtcaacaagctttaaacttcaatgttcttcagtaagaacactctcgatggggtaagaagagagatcaaagaaactctgggaattggagacctagtaagaacactcccgatggggtaagaagagagatcaaagaaactctgcgaattggagacctagtagctaatactaaatacctgggacttcctttagtttagtcccgacagtaggatgcagactataactttattttggataacctgaccgctaagcttcaggtttagaaagcaaaaaatctctttcgaaagctaggtgggctactcttattaagtctatgggtctgtgttggaatttattttaccaggatcttagatctactcacaagtatgttgtttaaaca

SEQ ID NO: 271684 - DNA, 2055 bp, Cannabis indica
attagaaagtgattaatttgtatatataagtgatgtttgattgatttaacaaataataacaacagatacataacataatcatgatcagttaattaaacaaaattatatatttctgtaattttataaagtcatacaatctgatttaaatttagcgctacaacattatattaattaattcttttcttaaagtgtgtatattatatgtatatattctaaaataataataataacattcttcatcatcacgttattgaagtagcactgtgatatgatcatgaccatgactattatcataatcatgattatgatgaacattatcaactgtaatatctttgatcatcatcaagtctttggccttttccaattctttctcccaatttgtgttatacaccacagtcaatatggacacaacacaagcaatttgggccgctaaaagcccataacacagccccaaaaagcctaacttccacacaaaccccaaaacgacagccaccggagctcccaccaaataaaacgcatagaagtttatggctgcaccaatccctggccgagcacaccctctaagaatcccacaacttgtcgtttgtggacagttagccaattcacacacaccaattataggtagtacggccatagtaagctccaaaatctccttatcatgagtgtaaaccctcccccaagctcctctcccaaaagttgttcccaccaaccccactaaagaagttattagggctaagctgacagcaacagatgctgccagcttagccttttccggccgctctgcacctagctcgttcccaacacgtgttgagaccgaagcactgagtgcagacgggatggtgtacatgagagaagtggtttggatgacaattgcggaggttgccaaggccaccttagggttgggaaggtaaccggctagtaaagtcatgaactcataccaccaccactctaagcaaacggctaagcaactttgtatagacaatctaatcaaaacaccccaaccttcccatgttgagttggtaaaaaaagttggccatgattttggcaaaaatggtgttttcaaattagtagtaaaattagagttagagtagtaagactccttgttaaaattagtgttaaaatagagatatagtaaaagtaagaaaagggtaatgaaatttgtgatgaaattggagatagctattccttgaaccccaagtgagaatttaaaagttaagaaaatagtgattggaatgtgaagaaacatggctagtaaattagaccacattaaaggccaagtaatggatttactacgtaaaaaaatacgaagagggtgaagaagagagttagctagtaaatcaggtatggcaaacttacaatatattgttgctatttttgttatatctggattttggttaaggatcaacataaggggttgaaggttgaaccaaagtaaagagattggtagtgaagcaaagagtagtatgaagattgttctttgtagagttaagaatgcaagggcgtggttttgtgaaccaatagcttggctacaaagtgggtccatacccatggctaagccagataagagtgagtagccagtgatgttggtgaatccaatggctaaagcaccaccagcaagttcaaggcttcctaatcttcccatgcaaatcaccatagccatgtttcttagatagttcactaaactcatggtcaaaatagggaaacctatgtttgacactttttttagctcttccactacctaacaaaaacaataaaataaaatcattatatataattaaagaataataagaaatatatataagattttgaagtagtagtacctctggcattgtcgggtacttttgaaccttattattctctggctctacttgtggaaccatcttattaaatcctttatgtatgtccttacaccttaatattggtcagaaagagagagagagaaagagaaagagctagagttggaaattaataattaaaatgaaaggagaggagggtatttataacaagttttggggccataactttgctttttgataagtggtaaatttagaaaag

SEQ ID NO: 271685 - DNA, 2112 bp, Cannabis indica
acataaaactaaaaactgaaacactaaacactaaacacactctaaacaagaaaataaatctagagttaaataaatctcgacaaacaaaagcaagatcatctccgttgaaattaatattgtgttatatttattacaaaaagttaatttatcatatattttgtacagttgggaattaacacacttcaagaacgagttagtttcaataatgcaaaatgataattaaaataaatccataaaataacaaattataacaaactgatgctaggaaacaatgttgtaccattaaatacaggtaacaccataagttacaatgttgaatctcaaataactttattacttagatctaatctccggaatgaaccaccttgtgaccaatctttattcagaagagagttgctcataattacagtaattgattttcaaagatcaaactcgaaatggtgtcttgcacgtacaattttctcacttaaaggtgttgagatcaaacacggcccttgtacacccctcttcactcctctttttcttctcgatttctctctctaaattgtcacatagaactaagaactaagaactaagaactaagagccctatatagacacacacatataggctccaagagattgagaaagtctagctaacaacctaactaactaaatgtcaaaacagttaagttagttgctaactaaatcatctcagtggctaaattctaacagttctacctaatttagtcaatggataacactataaaattaagctaaaaaaacaataaataaataattggtagttccatcaaacattgagagtgcctctgaacagaggcatcaatcttcagtaggcttaggcatagcctaaacttttctcttgtgactggtttggtaaacatgtcagctggatggacatgtgtactgatcttcttgacacacctttcgtggcaactatgacatctctgataaagtataattttatgtttatatactttgatctctcatagaatatgaggtttttcatcaaataaattgcacttttgttagaatgtactgtgatgttgtctgaatcgtatcccatttattttgtcaaatctttgatccataaagcttctttaatggcttcagttgcagctatgtattccgcctcaattaatgagagcgctacaatattttgtaaattagatttccaacttatacaacctcttaaggttgtaaacacatgaccagttaatgacttttctgtgtctagatttgcagcatagtcagagtctacaaatccagtcacctcttctttcttttgatctattcgcctccatataccaaacttgtactcattgtccctttggcatatctcagtatccacttgagtgttgaccaataattatctcttggttttgtaatgtatatgcttactacactcatacagtgagaaaggtctaatcttgtgcaaaccatgacatacatgagactaccaatacaactagcataggaaaccttctccattttcaccatttctgcctctattttgggatattgttcttgtgacaaattgaaatgaggtgctaaaggtgtagaaacaggtttggcatccttcatgccaaacttttcaatcactttcttgagataaccttcctgagttagagtgcactattacaaaaagcacaagtattgacgatttaaaattcacaatttttaaaaactatcgcaattaaaaatatatgattatttaaaaccgtaagttataattggatatttccaatgattttagaaagtcataaagaatccccgatggtttaatatagtcacttaaaagtttgtcaaaatttttattgggtatccctaacaattttaaactgtaaaagaaaataaaaaatcccgcccaatttttcataaaacccccccaattagatatctatctcaattttcatttcaaagtatctctctctctcttgctagtccgctctctctcgtccctctccttcgacggagcacaatagcaaaagtctgatgtagccaccaccactctcaccagttggtctatctcggcatcctttccaacctcattacctcagtagtcgacaccaccttctagtcgcaccatgtcggtgttggatatattttacca

SEQ ID NO: 271686 - DNA, 503 bp, Cannabis indica
gcactagtcggctgagatgtgttctcagtgcagatgaagcttgtaaatctttgtgtgatttactgctttattatcgattcaagtctataattcatatctcgaaatcaatcaacctaaagataatcaacttggtaatttggatcattaaaatcaacaagttgtactttcagtagaaatataatttatgtgagtaatcgttaataaatgagatgcaaaattttgtaaaatgcgagtccatatgttcaagtgtacttgtatgatttctaatatgatagatttctaaagtgcatcattttagcttgctagtatacttttccttaatgcaatccacaatagcactaaataaaattagtaaaatcaagtgtaatgattattttcatcatttactaacattcattttatttgtggagatatattctataatctttggtgctataatgtaaaagaattcttattaacaatacatttcttattgttagattgaacttgcatatctttatgag

SEQ ID NO: 271687 - DNA, 857 bp, Cannabis indica
aaaaataaggaagttcaaagtttaactggtcggatcgccgcactcagtagatttgtttcaaagtcaacagacaagtgtgttccgttctttaacatcctgcgaggaaataagcaatttgaatggacagaagaatgcaaaaaagcctttcaagagttaaaaatgcaactcgcaaaacctcatgtactctcaaaacctctggatagagaagaattaggaatatacctggccgtcacgaaacatgtagtaagtgttgtactgatcaaaaaagagaacaatatcacacacccggtctactacatcagcaaaagagttattgaggctgaaggtcgttacccattgaaagaaaagctcacctattgcctaatcctagcaactagaaagctaagaccttattttcaggctcatcctgttcgggtatatagtaaccaaccattacgtcaagtattacaaaaatcagacgcctctaggcaatttctcaaatgggcagcggagttaggccagtatgaaatcatctttcagccccaaacaacgattaagggtcaggccttagcagattttgtggttaaatgtgcggcaaaagaagagagcacctcagaaagtaagccagagccagtacatgtacctcaggcgagcactaataaagacaagccaacttggaagctacatgtagacaggtcagctacagatcagctgttcggcacaggaatcgcccttgtcacacctgggggcagcacttgcacggtgcagtcaaatttggatttaaggcatctaacaatgaagctgaatatgaagcccttatccccggcctaagactttctcgagaattgcaagccaaacacattgagatctgtagtgac

SEQ ID NO: 271688 - DNA, 638 bp, Cannabis indica
aaaaaaaaataaaaacttttagaaaaaaaaaggtgaattaggtattataaaagattcattaaactaaaaaaatagcttcccgtattttttttaaaagtctttcctaaaaaagctggtgagtcattgcttctctaaaaagctcttttaaatcaaaaaagctcttctcatattttatctaaacatatctaaaagtagctttgagacttcaaaagttcttccaaagtcatgccaaacaagcctaaagtctttaatatcatgtgcttattatccatatggaactttttaaaaggagatattttccaaattacggaacaatcaagcaaggcgtgggtcacagtttcaaagggtcgggcagttacaaagagaacagttaggattgggaatattttatttggtgaaaatattaagaggtagatgggaggatatatgatggaaagttctccaaagaaagtgtttaattttatggggaagttgaaggctccaaaatgtagtccaccaatttcttaataaaagaggagttaaaggaagaaggagggagggagggaagaagatttaacaaagtgataagcagacttcacagtgaaggcaccagaggaatgcaacctccaaataaggcaatcctctatcactataaaaaa

SEQ ID NO: 271689 - DNA, 1127 bp, Cannabis indica
aaccaacggggaaggaggggtaaagtatgccatagtagcagtagaatacttcacaaagtggacgaagactgagccaatgaagactacaattgctaaaaaagcactagactttgttatcaaaaacatagtgtgtcgatatggcttgcctcacaagatagtctcagacaacggaaagtagtttgattgcaaagaatttaccgacttctgcaaccaacacggagtcgtcaaaagcttctccgcggtggcaaggccacaaacgaacggacaagcagaagcggtcaataagatcctaaaagtcactctatagaaaaagttgctggcctgcaaaaataagtggcctgaagaattgccaagaatgttatgggtagaagtcgagcttgaggttttggccattagtctgccaggccataaagatgccgtcatcaaagcgcttagtgcaatgattgcagacaacaggggctaagagctcatctcttttagccttcttcaaggcctgatctttaaaatccctgagctccttcacctcaacggtcaattaatctgtcgtctgcaagctcgcctgatgcagctcctccataaacctcagcctagcagtcagatccttgactgcctccttggcctccctcagcttgcgcctcgccttggcctcaacctcgtcccgggtcttcaactcctctgccttggcctataacgcctcctgatgcctcctctccgcttgtgcctccctctgttgggcttcctcccagaatgttttccgctcaactgccaggtccctcagacttctcatgacctcgtctatgcccccaaactcggacatgacatacccatgatctattaaagtctttgagaagcgaccggtctctgcagcgatctggcagaacaaaaaaaaagaatggtaaagtacgagagatcggatgccatagggtaaagcacaaacgaaaaaaaaaccatcaataaagacttaccgcggtcatggcagcgctgatatcctaaacttgatagatggaatttgtggaagcgtaggctgcgtatcttttagccaggagttgggttaggtttgaaacaaattggctagtcagttcggaagcgaatggagcaagggcagggccgacaaagcggttgaacca

SEQ ID NO: 271690 - DNA, 664 bp, Cannabis indica
ttacggaactcattcaaaaaaattgaaaaagatatggatttttgaaaatcgggttgaaagtgtgtcgaggggtgcacgacacacgcaccagtcacttggacaaggtgctcgtgcgcgggtgtgcttcagacatcacactgtctgaacctgctcatgccccaccttcagacacacacgcccacgttttcaggcacataaaggctgcattgcaacctcctgcgcacgcggatgaggctaccaacagcatcctgcgcgcgcggatgaggctgcacgcagcctgtgtgcccagcaagtgtgttttgcacccaaaaatccgattttcatggaattttttcccaaatttcggattttttaattttcaaaccctaaaattaaaataaaatattatttttaatatatttaaacttaaatatcattttttaaattaattatatttattttatgatattttttaggtttaaatttaaaaattgattattttattttttaaattatggtcagatttaaaaatttattagtttctttaatattttatatactatttattttaaggttagtatattttaatattatatatattttaaattaaaaatatcattatcttttaatttgaaatattatattaaaatcaccttatatgataattaaataattaataaatttg

SEQ ID NO: 271691 - DNA, 757 bp, Cannabis indica
ttcacccagaaagatttgaatatgaggcagagaaggtggttggaattggttaaggactacgattgtgaaattctgtatcaccccgggaaagccaatgttgtggccgatgctttaagcagaaaaggtcccgggcaggtttgtaccacggttatgatagcccctcaactagcttctgaaatggttagtgcagggattgagttcgtggttgggaaattgcataatttgacactccaatctgatctgttggagagaatcagaaaggcacaactagaagatcccgagctagttaaggttcgagatgaagtaatggctggtcggcctagagacttttcagtctcgaacagtggaatgttgttatacaaagctcgagtttgtgttcctaatgttgatgagcttaagaaagagatacttgatgaagctcataccacaccttattcattgcatccgggaaccaccaaaatgtatcaggatttaaaaccctacttctggtggtatgggatgaaaagagatgtggtggactacgtgtccaagtgtttaacctgccagcagattaaggctgaacatcagaggccggcagggttactgcaacctttagtccttcctgaatggaagtgggaggacattgcaatggatttcgtaactggcttgcctagaactacgggaatgtatgattcagtatgggtcatagtggatagattcacaaaatcagctcactttctaccagtgaaagttacatattcagtggatcagtatgctg

SEQ ID NO: 271692 - DNA, 1092 bp, Cannabis indica
taaaacaaaaaattttaagtaataaaataaaacaaaacatcatgagtttaaatatacaaaacaaacaactgttacaactttaacacaaaaataaaatctaataaaaatataattaatatatattatttttttattatataaataaatataaataattttttaatttatataaatgtaattagattggatcgatttttaattagattttgagattgacatccaataaccgatccaatccaattagaatctaatttttagaatccaattgtaattggatatctaattttttgtaattagattggattggatcggttgaattcaattggattagattagatattgcccacccctactcacatgtttaacctgtacacaataaacaaaaaagaataaccatttcaaataataataataataataataataataataataataataataaatcctctaaattaggttttgtttggtagaataaaattaaaatggtaatatagtagaatgaagttaataataaaatagtaattatatgtgccataaaatataaaatatgtattataatactacattcaataaggtgagaatactcttttaaagtgtgagttatgtcttaattagatgtaattgatggattaagaaaaaacttcagtagtatttattttgtatgcacatattattacccatagcacaatatttggattattctaaaataaataaatatttgattagaaatattttgtttttttttttttggaagaaaagcgtacttatattagattaggaaatgttagacctcccggtcattacaacatataaaattcaggcaaaagaggaaatcggcacagagccaaaacctctgattggaaaaaagcccagttagccacattatgggccataaaaattacactgtctacgaaacgaaaatgaaaaattaacaaaccaataaaaaagaggtggaggtggttttacaaaaatagaggcgtagttattaaatctcccaacgggactccttcccattaaggacgtcaaatcaccaccctcgaaatcactctccactataaggtactgaaataccgcgagctttagcctcct

SEQ ID NO: 271693 - DNA, 853 bp, Cannabis indica
gggtactcgtagagaagtcaaggtcgtcagccattctaatagaaaatagtggaacgacattcttctcttctgtcccaatgagtgcaccgtcaccaatagggcaaccacaacttgtacacgtcatctttttccttgaaactctcaaagactctgcgtagttgacctaaggtgatggatgggtccccattgaagtactcgactatcagacggtttgaacttgctttctcttaaattttggacatagtaggtctagttaacaagtttagcccagtcaccagagcgaactcagctcgcctggatcttcatctcttctttgcaatataaaagtccactttgtgttttttatctgacttgatcttgcgcatgaataattgatggataagtgcatctgaaaacaataattgctctctctcaaagaattgtttgaaaggggattccttcaccctccaacaatttgaattcctcatattttaattttatttcgggtaattaaaactaccatcacgccaagtgacacgcccagtgtaatggtctaacactggaagtataatgtgtgaaagtcttgaagactgtaaaataaatacaacaaaaatggaggttagtgtgtaaagacatcgaacatatatcacacaatttcaatatccaaatatatgatagcattggaccaagtgtcggacccacatcagacctatatcagactacaaccaaaaaagatcaattcaataaaatgaaataatgatcgggtagcatatcagactgtatcggtgttgggttttgtgccctaaataaaacccatttcaaatataatcagatttactaattaataaagatcagaaatcattttaagttgcat

SEQ ID NO: 271694 - DNA, 893 bp, Cannabis indica
ttcagctgggtacgtcaccgagtctgtcccgctcccttccgcctcctcttcatcctcgcctgactcgcgaactggggtcgtccagtcatcatccatctcctcgacctcgacgtcaggagcatgcctcgagtgtataaggtagtcgcgggccgacaccgtggactcgctgtctcgaatgtcgatggtcccaggttcggcgagttcctgcaccatcctttcgatgtctgcagaagacatcgggcctagctctattggtgcggcctcctcttctgaaatcgaggttgggagaaagctgtcctcctcctggtcaacttcaccatcgaatgcacggcctctagagccgagctgttggctatccgacaagtcgctcatctgaaagatagaagatcttttcagcgtgatggatgtgtgaaaagcaaaataagtgatctcacccgcattaaactataaagtcgcacttgatagaatgatcagcatccttgcgaatactgaccgccccatcaatatgcgagcagagataatactaaaaacgcgagtaagtcacgcatcctgggccaagcgatatacctccagaaacggctgggagaatcccagtgactcaaggggcatgcgttttcaagcatgaccctgaagttactggggtactcccaccgttccgagactacctatcagccaaggagtacgatcatttgagtatcatcgcatattgcaaatggctgggtgtatctcagtatctcaaggggcatataatcgcatatatgaccattagaatactgagacacacccaccatttggaatagcgattgataccctcgcaattcaacccacagcatataaaaatcctaaaagatctagccatcaatcaaaagaaagtaaatcttgtcaatacgcga

SEQ ID NO: 271695 - DNA, 1057 bp, Cannabis indica
taataacaattaatcaaagatcattccgtgatcctgaaatttcttttctatgtttggtagagatcttgatgatcttttcaacacacccagaaatatacatacctcaagtatattctctgttttattgataactccttggtacaaattaccaaaccaacttatagtgagtctctcattgatgatgctgattcatcaacatccgagagtctcgtgttcttttccatcattaccactaaggttttactccctagttcatacgctaccattgctttcttgcaatcatcactgtcttcctacttggttaactactctaaaacttattttacactcaattatataacttgttgtttaataaacaacctactttgtgatccaacattcaccaatcactcaaatacatgtccattaaattgaatctcaattcataagctttttcccattgtgggtgagtatgcctttccataattgcttaataaagtaatcctttcctagaatttcaatggtctccttataaacaacattgactatccagtcaattataaagtactctccatcattactgtgtcaccttaagtaatttaggtaatcttctttaccttagtgataccattattcttcttgacgttcttttatacgttaccccggtaacatcttcgcttcaagcctccattgggcccttactcccacagaatgatggctcttatacacgagtgcatcactctagctatttcctggactgacgactggtcccacggaccaatccaagtgtttctaacgtgctttgctctgactcgtacgcttcatgagaaaatttcctaaatgaaaccaccctaagtcaaggacactcaaccatggagttccttcatggtgatttaccaaaacaagatgcttcttactaacataggtagtcccacgcctacataatctcaaaattactatacaatcgtcgccttcaattcatctaggattccagtcaatactcataaattgtctcacctttggtaacactatatcacttctaaacaaaagattttgttatttgaatcaattagatcga

SEQ ID NO: 271696 - DNA, 456 bp, Cannabis indica
aaaataatttccaacacaaggaagatcctctgtcccacatcaaatacttcgaaatgcaaatggacttgcatgcatgatgtaaggtgtagaatcatttcaactaccttggtagaggccgcccagcagtgatactctaaattagcaccaagaaaattcagttcttggaactcttttatgttaaagtttcacgcatagttctgctcttctaggcaacttaagcctataaatacgacccacacttaagcttttaggaggatcgagaatacgaagatcttacgatttagattgagagttagagaaagaaagagaatgagaggtagagagagagaggtactgagaaaagagaagattgaggttgggttttgtatgaaaatcttctgcagatgaagaagattcttgggtaagagtatgagagttgaaacactttgagagaactcaacagagaagtggtgttcc

SEQ ID NO: 271697 - DNA, 1353 bp, Cannabis indica
agttttgtcataaacacctttagattggattattattaaattttattttgacaaaaaatcagttcagggtcctctttgtactattttagaaaatacagagttcattttgttatttaacaaaacagagagtccaattaataatttttgcaaaacaccgggtctaaaatgatatttaccctttttaaatttttattaaaatatttaacacattttttttctttaaaaaacatccatagtcattgttcaaaaaaaaaaaaaatattatagttactaaaaaagtagaaattttaaaatttaaacattattttattattaaaatattaagagaaaattattatacaccttaactcttcataatcattagatggattttatcaataactaaacaagtatcctcacaatttagccatccctactataatagtcatgtcctataattatatgtaagatattgttatatatttatgttaacaatttgtacaaaatcttaaattatttacaaatcagcagcacaactcttggtggtattgaaccactggtgagcctcatagcaaggccaaaggctgttataatgttagaactccaatggtactatattataccaagagtcaatgtattgcaggacatagcctgtcaagtctcgacaactaaccaaattaaaagaatgagattacaccaaaaaaatacatctaaacactaacacaataaaatcttccattacagaaggaacattacacgcgttgagctcccaacaaagaagatcccaaacaacgacacatgcccaacacttgtcaacataccaaaccatactactaacctatttagggactcaagtttcattttctttttttattgttggaaattgtgaatttttgctacctattgtgggccctcatattttgctcaagagaaagagataacaaaatatatctacatttcccttcttctaccttattcttgatctaccttagggggtatagcttagaacacaatatacaccattaccatgagacttaatccaattcaactatctcaagttttgtactctttgcttttcatatcataataataattctattattataaatattacccaaaaacttctctagaaattaagtattcatcaatggagatttcgtgagattattttcttagatgtagatctctgtccctccaagacttggatagggtattaattaatttctagaactacttgacctgaatatttgtattgcaaaaccaccacacttcaggtatatttaaactacaatttttcttttgcttctatttaatttcctctatgtaatatatatgtagatttgtttgtgtatgttgccttaagaattaataggt

SEQ ID NO: 271698 - DNA, 1020 bp, Cannabis indica
agatagctttgtggtaattgaccagatttttcgaactagattggtattgtataactagttagtcttgaaacgatccttagctcctgctttaaggatatctgctctcttgaatttctccctcaaatggcataacttgcgccagtaccaactagtgtcagacttgagctcataatcccaaaacctccctgatttcagatagatattatcaatccatttaacccacaagagatcctgtttggtagatatcgcccagacatacttggccaaaattgattgattccacttgactccatttttaaatcttaggccaccataagcctttggcagacaaactttctcccaagaaacaacatggatcttgcttctatttccattcaaaccccaaagaaagtcccgacacagcttttcaacctccttagtaacactatgaagaagaacaaatatactcatccaataattcctaaggccaagtaaaacagagtgaattagttgagccttaccagcaaatgaaagctttcaatttattcaggacatctttttaagaacacaaatactaagttatgtcaagtttctattcttagtgtcaaattttaaagaacaagtttcctgacaaatttaaacattcatcttggtctgtgtcacaaaagtttaaattgttttatctattatgatttcatatgtggctattgtgtgtatttttctgcatttcaagactcaaattgctaattattttaaaatatacactaaaataatgacaagtttgaaattgacaagtccaataaaaagagccaaattttttgaataagtattagaaagtgagtataatttgattggatatgtagcgatgagagcgtgcatatatttttcatttatatatctatggctattgtgtaattcaatgcagatacctataaattctgccaagtaagttctctcaaatttaaaagattttgaagaaaatatatctctttaaaattctttgtaatcttatactaccaaagttgggcctcacaaaatctc

SEQ ID NO: 271699 - DNA, 3956 bp, Cannabis indica
agggtcctatttttactattttagaaaatacagggtctattttgtcatttaaaaaaacacagggtccaatctgtaacttttactaaacacaggatccaaaatattattataaaaagaaaaaaatatattctattaacataaaaaaagtaaaaaatattcaattttggatcttggtcaaaaatataaattattcatttgtaattcacaataggataatctccttataaaaagaattggataaggcgccaagtatgcacgcgtttcaagacgcatcgaattcatataaaacactccaccgcagaggatcacaacccaccaaaatccatttccggttttctgatgggtcagtcttcgccggaaaagcttatagtcgtcagtaatgagcccaacggaattggattcgtcacgatcaaccgtcccagatctctaaactcactcaccaagcctatgatgacggacctagctcaatccatcaaggccttggctcaagacgattcggtccgtgtcatcgttctttccgggtcgggtcgagccttttgctccggcgtcgacttgacttcggccgaggatgttttcaaaggagacgttaaggatgtggagtccgatccggtggcgcagatggagcggtgcaagaagccgattattggagccataaatggattcgcggtcactgctggttttgagatcgcgctagcttgcgatttattggtggctagtaaaggagctaagttcatggatactcatgctaggtttgtcatattttcttgctgttattaaagtttgatccgaatttttatataaatttgtatttgaaaaaaaaaggtcaacttttgtgaaggagggttagaaattcttatgcaagaatccattttgcatagttgattagcctaagtttgagatttgaatctgtactctatttgggataagtcaaatctacttagaatctcccaaaaatttgaatttgggtatgaatttgtgctattggagctatttagtaatttgggttcagattttgtttatggaaaacgaaattatactgcacaaacttgatgtaacaaaactatgttttgagtacttgatgagtctattaaaagctataatggcagctttatgcatctatctgtatctttagattctttaccatttgtttgcattagaatgaaaatatatgttggctttggagaaaaaaatacttcattacagtgaaattcttccatccgttttgaaaattttagtgatatgaaaaactactattcttgcagatttgggatatttccttcatggggactttctcagaagctttcccggattataggagccaacaaagctagagaagtatcacttgcagccacacccctaactgcagaggtagctgagaaattaggctttgtgaatcatgttgttgaagagaatgaattattgaacaaagcccgagaaattgccttggctattataaaaaataatcaagatttagtgttgaggtataaggcagtgataaatgatggcctcaagctggaccttggtcatgctctttcattagaaaaggttcttattttttttgcttctatcttcaacattagatagttttgatgtttcatagtaaaaattgtttcttttttctttattgaaatttcaggtcaattctctgtacttatgtctttgttattgttacaggaaagagctcatgactattacaatggaatgaccaaagatcaattcaagaagatgcaggaatttattgcaggtcgcagctcaaaaaagccttcttctaagttgtagactactcattctattgtttttgttttcctttctgttctgttctgctaagtttcagtaccaatccatatgcttaattggatctcttatatacagttcttttatgaaaagtttgtacttaaagagttcatcaagtcgattagaaataaatgaatggggaaataaaatgtatattgaatgtaagaaaatggaatagaactggagatggtcaaatttatcaaattgttcatatgtgtatttttagatttcaattataaaaatagtgttctgaaataacatttgttctagaatgtttatatatttttcttccaaaagaaaaaagtacacaattattgaaaatttataatttcttattaaattatttaattaatcttatcattgtaattttttgtgggtgtatggagaaatcacacctcttgccatatatatttttgtttttcattaatgtgtgaaaaacttatttgcattcaattatatttatttaactatttacatgttatcatgctgggtgtggacatttttcggattcaaaatttataatttcgttatgaaattattttagcaatctcagcaaaaattattattatttttcattatttcaattggggacagagaaatcaaccctcttgccatagaattctttgttgatgataaatatgtaaaaatgttattttaacttattgacatgtaatttattaattcaagcttaaaatgaaggagcacatagaggcagctagctgtggatatttattgggatgcaaaaggaaaatgagttgtgcaaaagatttgtttgctaagttaattacatacgtataattttatgttctttggtcactattgaaagaccagctattttgcagagcacctaatctagtgaagatagtgttttaggcaagaaagatagtgctatgtttggtttttgttacattgcttatgttttcagtcttattgtcccacattggctatgtaaataaaataggatatcatagctgctataaaatacaaacttgtttaacgttagaagcatacctttctcggccttttggctaagatcaagtgtagtatctgttcttatcagtttaatatctgatatgtgggccaatggtccacacgatattaaattaattttttaagggtgaggggcctccacagtagcttgctgctgggcctctcgagcgtcgcctgtgcgttgcactactgcatgggcctggcgcaacccacccaagcccagttcaactttagcgtcttttctattttattcttttgttataaatttagttaatgtgctttaatggatacgtgagcctgtatttactgcaatgggcctggtaatggtaaaggctgtgggccctcttcaatagaacccaatcaaatataaggagctcactggtcagtggtcagttcttgactatggagaaaatacaattttatctttctctttcgttgtgttgggctgtgccattttgtttttcgagagaaaaattaagtggttcatacatttggctaaaattatatgcctgctttaattgaataaaaattcatccttttcaaagaaaatgaaaacagaactagtgcaaatagtttacctcttacacaacttgtaatgtatgtttccgtgtttaaaaaataaaaatgcattatttggtgaaagggtgtgttaaacatgatatttcttttgctactttaactagtgaacgcctaaagaagatgcttgctcaaaaaagctccaatagacacgcctgcttttaactatagactctagccatttctagctatatatataacaaaagttctttgctggaacccaaaagtttctatataaccaaagttcattttgaatatttttgacaacccaaaatgggagtgggagattacattataaggattagttcaatatttagcacataatatgttaaaaaatgttataagatttggacattgtagacttgtagtatagttagaatagtcatcccataaaaatacacacattaacgaaattggcttgtacctcatttgaatcctatcttttttttttttaaagtcaatattttgttttttgccttttcaaaaatagctgtttccagaattgaagctcggttttcttccttaaatacatatatgttctatacatattatataaaatcgaggtctgtcacttatcacatattgagacaaaaatt

SEQ ID NO: 271700 - DNA, 546 bp, Cannabis indica
cgcctaaggtagttagggtgttacaaagtacttagccattttcaggcacataccctagtattccccgagaacttgatttacaatcagctacaaatcactatgacatatgagattcttgaccttcaacgccttggctatcttcaagtcagcgatcaaggcttcatattcaacctcgttgtttgacgcgtcaaattgaaatctcaaagcataatgaaacttaaagccttctggtgaaattaatattacccctgcacccgagccctgctcgttggatgcaccatctacgtataacttccaagtgtccgtgtctcggtcaacaggtggattttcctctgaagttattccttctattaagaagtctgccaaagcttggcccttgatggatttttgagggtgacatgttatgtcaaactgccccagttcaattgaccattttattaatcttccagaagcgtctggttttgataaaacttgtctcaagggttgatcagttaacacttttattgagtgtgcctagaagtaaggccgtaacttgcgagacgcatg

SEQ ID NO: 271701 - DNA, 5311 bp, Cannabis indica
ttaaaaaataatatatgaggtaagtctactatggggaaatgagaattactccatatactattttttatttttttattttttcaaatttacgattttagttattctggtagtttctatatgagttgttatgtgaattttaattgcaatttaaattgttccgttggatgctatgtggattcttcataaaaatgtaaataaaaaaaaaaactgtttgaaagtctaaaaaaaaaaaagaaaaaaaatcccctaataataattagtagtacccgtagatgtgatatataaaattaaaaatgtggctagtggctccaacacaaacgacacaagtagaccacactataaatggggtgacagttttgacaaaatacatggtttggctttgtagcattgtaatttgtacgaaagagatttgaacgatgagatagagatatcaccagccaagtttttagagctactagcacagaaagagtgggagagagatgcatggtatgtggttgtacttgaaggagaatgtaaagtgtgggaagcatactgatgtgctttgtagctctgaaaaatgtagcaacaaacatagcttcacaccattaaacaagaacttggttccagattctcagttagttcatcctattcgcgaacttatttaccggaaaaactactcccaaacacgtctctatggttagtcttcttcgctttaatgttttctacttcttcttcgtctgacactgagaatggtgtactcaagcacatacatttttttgttcttctcttttgtttatgtttttgtttctgtttctattttactctcagagttggagattggagatccatcaaggaaaattgtggagataatattccaaaaagcatccttggatcactcaaagtcaacaacccggataaaaagcattctaaaggtaaagaactctacacaaacactagacagttttgagaagtacagagacaaggtgaagatgattgcggaccatagatgcacaaagaatcccagaaacattgtagatggaaatgagcaactccgattctatggcacgacaatgtcttgtcgcagggaaaggtcgaagcgagtttcagagctttgcaagaatcccaattgcagagtttgcagaatacttcaatcgaattttcacatagattacacaacaaataatggaattcatttgagttcaagtagtgatgagttcagggagaaagtgatgaagaacacagaaagagcagtgatagtttgcagaatcattgcaggaaacgaaagcatctccaatgatgacgagagtactgtgtgcaattcaactgggaatgaaaagggatacaataggtccgggaatgcaatagtgtggaatcccagtgctgtacttccatgttttgtcataatttttacatgaaatttacttgcttgtatatgattccttgcattaactaatacattttgtattcagccctaactggtgctagtagtagaaatatagatttcgtatttcattcaatgacagaaaagtacaagttcccagcaaaaacaaaaataacagaaaagtacaagtttcatttcttagttcaactagtattagtagaaaaagtcttaacattacttgaggctagttctatacttttaagttttaacaccaactctaactacattacaaagatgttggacaaaaggggggaggtaaggaaaaaagaaagtacaactgatatcagaatacatgttactagtaaagctctacctcaaaaatttacctaaagacttagaaacaaccctaaatcacaatcagtttttcacctccatgcacatgaagagatcatagctttgtccatccagccaagatataaagctccatccctttcttcaagtgtgaacttctcactgtaattctgaagcagcgcctttatagtagaatttaccaaggggcttaacggataaggtctaaaccctgccatagtgaatcgggacctccacttcccaagcatctcatggcgttctactctttcaggcccgtcacatgctatcacattaacaatgtctcgtgccagacaatgctgctcaacattgatccgctccttgtgctcccttggcagagtcacatcaagagactcgaaaacagccatgtaatagttaaatgtctccacaaagcgagaataaaagggagctgtattggtgttcagctcttgctcaacaagggttacaacatttggagacaagctcttagtcaacctcagcagcctgtcccggtgatttggagtctgactgcccacactttcatctggcatgtggtgaagcatcaaggcaaaattcactgcaattgcctcgccaggtcgaaccccaaggtcctcaagttgaacctcagctacagaagtgtcaacagcattgaactcaaaaggtaccttacatgactctgcaatctttgacaatctcaatcccacaatttcaagaccgcctcctcttgcataagcagatgtagagtcatctatggcagtgatcctcatctttggtggtcccccaggccgagttgaaagagcatggattagaatcatccactgagcaccctgaacaatctgaaagtcaatgatgtgaactacactttcatccttaacggcttcagctatcgccccattagctgacatgtagccaaatttgaagtaggggcagatttcatacagtatatgcatgtaggagaagagttcagcactagcaggctctttgcatcttaatgctttgtaaatagaacttcctgaagaagccatctttgcaacaagaccttctaacatgtaagcactcaaacgttggaggggatcaccagaaactgacactaattgacgtaattcagagatcaaccactctgttgtcgacttgtcattttcagctactgcttgagcacaaataaaaagtagacctttcaagtctgatgcagaaagcatgtccatcaatcgtccccaattgtctccttctaatgagacctcattctgttcaacctggtttgaaatattatacatttcagggaaatctgaatcagttccttgcataacactttccaattcccttattttgtgcctcaggtcatcagtatcatctgttaagcaagaatggctcactggagagccacaaaaattgtcgggagaaagatgctggtatgtaaggtatgactgagtttcaggctgtgatgatgggcttccattgggtgagaaactaacagaagatgaagaattttgaacagggttactgcttgtcccggaagacgattcaagggtgcaatactgtgtaaaagttttcactgcaagatgggagccttggctatcattagcagctttaagattgtctatattgtggattggagcccaacagtaagactctgggtcttcatctgactgcgccaaaaacctgtgagagccatttgaaattctataactctgggattctttcatatcaaaaatagcctacacttgcttgattaataacaatcaatgatgagtcagtagcccaaaggaatacttggatatcgatgtagcacaaatgttgtcgaaacgtaattgacaactctcttgttgtaaatgacaaaccttagttgcttccaatttatgttcgtaccaaaaccattcggcagatatccaaaaatttcagcttggtatgtgctgttcttggaggaaataacatgatctgtaagaaagagaaacaagaaaatttagagggtttccctcgaaaacaaacaacgtcctttatagacaatagtggcctgaaagcccagaactaggaaagtaatcaatcagaattagagacatggatattagcaagatgtgacagctaccgaaatttcaatccaaggtcgagaagtaatagagtactgaaagtgttccattttcaaagcattcgatatacgactacatctcagagtcaaacatagaagaaatctagaagaatgctaaaataacaccttaaacaattgggtcaatagtcagatcagattacaacagcttaccaaccaagtctgaaaatatattaataacaaatatattagaatagaaaaaaggttaagtgcaagaaaatgaatttatctatcttattcaaccagaaagtgtttaagaataatcccatggcggaggctttactcaacaccaaactaatggcacttcataataaataacgttataaaaccagaaattctacagaataagaatttggacctggccatgattggaaattcgagaaaaagccacagctactttttagtgttaatgactactcaacgaagttaatgatataatctttagccaaaaacccaaacgaaaacaagagtaaaatgaagaagatggaagaagaaaaagagcatataatataaggaaaacatttaaactgaataatccaaaagccactacagaataatagtatatatccagaaattactactcaatactcattaaaagcgtttgaagctggaaaaggcagaaagggggaggggaagagagaggattcaactaactggatccaaaacgaacatgataactttattataaagaaaaataaagcaaagaaagtggatatgaaacccaatacagttctttatttttattctgacatgccactagtaaccacttaaacataccctctaagctcaatccattttcataacccatcatgtatgtataattagctcgaaaataggaactatgcaggaaaagaaaactaccaccaaattataaaacacaacagtaacacttcagtttaacaaaactaacctttatcacatcaaagaataaatctgaacttttacactagaacagcatcaaaacatcacttcaataataataataataataaaagcttgaaaatcataaagggaaaattttactaacaaggaatttggtaaaaacccatttgagactcataacctaattgctgggttttgacatatacctttacttaagcatttttattccgtgttcttctttgcttcagagtccaaatgataattcagagctggctgaaacaattactctcctaatagaacccttcacttttataatttttatagtaattatgaagtataacccagaaactattaaaaaaacttatacatcttaggcctcatatatctttatataaccattattaaccaaagaaaggatcaagaaaccgctgcaaccgacattaggatgagtgagacagtagtcttcttcttcttatttttcgtcatatttatccctcaactagaaaaacaaaaatatttgactactggaaagaccaaaataccctccttctgtcaatagaattattgtgggcctacacgtgctcctgctcctgctcctgctc

SEQ ID NO: 271702 - DNA, 1116 bp, Cannabis indica
acgtttctagtgaattaaatccaaaaaaaaatcatgaaccaaaatccgaattgcagaacaaaagaagaaacatagcagaaacagtcacagcatgtaggtaccttcttgagcttctgaaggattccggcgacggcggaacgtagtgagaccgcatcgtcacgaaggcggatcacatcgcgggtggcccgcgggactcgaagtagggcagcggagctctgctcctcgagcgaggcggagatctcttcagataagatttggagtctcatctccagatcgacgagatggttgtcgattgagtcctccgggtgccgagtctgacaggccgagttcacccatttcttcgggtcgaaattatcagccgagaatggacctagatccatcatcattctgaccgccgaggtcgctcaggatcggacgagtgaactcagataggtcctgaatgaaatgaatgtcagataagtttgagtttgttatatcattacatttacagttgagactttgaagagaaaatatgatgtttgtgaatgagaggtggcgaaattataataatatttcatttagaagtgccttttgcaataaaagcaaataacaaggggctttcttcttctttcttctaattaagatttttaccctaaactttagtatgtactaaatttttctccccaaactttataggccattgaaaatttgacccacactattaaaattttgaattcaaagatttctgtctaattttattaatcgatgcctaatgtagatgaaagtttagaggtacgtacatgttaaagctcaagaaacatgatttgatatatatcaaagtttacgggacacgatagataatcgtcacattagtaaaattgaacgaaagtgaatagaagtccttagaattcaacaatctcaatagtttaagaagaatttttaatatcttaaaaagtttgaggagcacgatttggtacatatcaaaatttaggaggtaaaaatcttaattaaccttattattttgaatgagttttgttacttaataaaatttataaaaatgtcgttcattttaatatgtataggccaagtctatagtacactccttaaagagattttttcgtagacttttatctgttt

SEQ ID NO: 271703 - DNA, 693 bp, Cannabis indica
tttacaactttgaaatttcgattaatgggtgccttcgaactaaagcatctctaaaatggggtgcttacttttatgtccctttaatattatggtgagtaatgtatttaagttataatatcttacatatcattctcatgaggctgctttgataattgcttgtgttccctttgagaggggattgatacttatagttatttctcggtgacctttcaattcatgtcattaaaagctcaataatcaagttgatcttctaggtggccaataagctcgttttttttttttttttgacttagttgccattgacagccatcaatggaaatgaaatcagggaacgtcagagtcacttggattttattatttcctgcaagaaaaagataagaaatcaatttaattgtttaagtataaatatgtaggacttcagttcttaatcaaatccaaattggagattgtggtagtagatttttgagatgttatatcatctcatcaatctttttttttgttttgttaaatattacttattcaaatttgtttgtgtttcttctcctaagaccatcccatcagctcttttagcagtgattagtgaaaatctgctggggatttagttggacaaaaatttctataattttgtttggtacataaattcaaaattgacctcatacctacgggtgctgaacgagggaagagtatagtaat

SEQ ID NO: 271704 - DNA, 1759 bp, Cannabis indica
aggtcatcctgatcccttgaaggtccatttagatcttaaagttcttaacacgagttagggggtctttactacctgtgtacttgcaagtaggcattttgaattttgctggaatgaggaggtcattgatcatttgagagaaagaagaccctctcctcatttctagttctaagtcagtgagtttcggtgcagtaaggtctttgaccaatcgggttaacttatccaaacaagcctggatcaccaaatttgtggccgcatggggttgaaccactttaacgtcagcattcgcttggtttctttgaacaagactaggtggatttactatgtttaaattgcggttgtccctattcctgttgaggggatcccgaaggtctccaccccctggtgggcctacacgttcaaagattgacccggtatttggccttcctcctgcattgtgactatcagcccttccattgaccatgggtggtacttggccatctctacccctttaaggcggattgttaggttgacgttacctattaggggcatacaaccatctggcttggtaaccccccagctcaggatttggttggttgttgcctcgacttttagcttcatcatcgccatgaccattggggtagtttgaacgataatcattattgagtttggggtcttcccttctcccccgaggcctactatttctcaggcgatcgttgccttctcgtggttggtcacggggtttccactccctatgttagggtgtccttccaccgtttctaccgcggtcaccttgttgtttatggagtttccttctccgctctgccttagacggacattatgggagtcatcacgtcctatataataattgggtaggacttgttcacgtgtagggagcggtcgattattgttgcggggaactttattgaaggggtgacttctagccctctcttggttccttggacgctctttaggtccatagaccaccctctcccgttggtttctcggggtagggacttcctatggataggttcgtgatcttgaggtatctattggttgtgggcgtcaatacccaacccttgagtgttttggtcaaaggaagttcgaattaagttggccgcctcttgggtgtgacagtcttggtcatcttggccctccttatttcacgatcatgatctaccaagcaagattagaattctcttctttggttagcaagactttcggtcaaggctgcttgagcttgagtttattcttggtgcacagtttgaactggccttgcattcggcctatcacatctcgtaactgatgcatctcagggtcaattccttcaacatccacttggagttcactccgcggtctaaagacgacagggcctcgaccagttttagctgggcccgtgccatcagtaggtgggagaagatttccagtattaccccttccagtggcactgtcagtagcgccgcctcctgcggttgtggcgttcgtggtacacccatcaagtttttgcccagcggcaataatttggccagttgtcccatgaccagcagcagtctgagcagtggtgtgggtgatggctacaccactgttccccgaacgcgggggtcattctccattattttcgacgggattgcttgctgatggaacttgctgggcattatctatcacctcatcaggtcgttcttgagagcttcgggttaacatcgattttggttaaaactattaatgaaagcaccaaaatattgactaaattttttgccaaccgacgcagagtcgtaataaatga

SEQ ID NO: 271705 - DNA, 507 bp, Cannabis indica
cgtcgtcgtcctctctggaggtgaagaatacttttgcggcgaaatcgatcttaacgcgctaaagactttcaaaagtttcctttctggcgaccgaggacgtggcgggtagaggttccgacgaaacgtaatgagttcggaagattacataatagcaatcaaacggtgctgaaaacatttcggtgttactgcttcaggggttagtgtcatattagttgaagcaaaagatgctttaggtggaaaggtttttccactgatctattttacacccatgttagcaccaaacttattctttcattacaattcattttcttttatgcttttagacttgttttcgtttaaagttttgaatagtatcacttttaaccttagtttaggttcttattacggggaaagaagggaattggtgaacaatatgactggtctgttaagctcagatcatagttttcactatatattatataaatagtttttataaaaggataatgagaacctaataaaatgtattat

SEQ ID NO: 271706 - DNA, 594 bp, Cannabis indica
ttttaaaaaaaaataaacatatattcaagatgagtagattctcgttaaatgttcgatcttaaaaataacaggaaactctaacaaaactatgagtaacctgttagtagaacgataaatatataaaagagacacttcgctcaaacaattaaacaaatgtctagagtcgttaacaagaaatccaaaaggagagtttatcatcagttgactgcaaatagctttaactgccactaaacaatcagtcttgagcaccacctattctccgtccttaatctaactaagagcctccctgatgcttataatttcagccaactcaagtttcacatcccaccacaacaaatggtatgagcttcaacaaaattgtcttgatgatcacgagctaccatgccaattccaaattgatgagtcgcaacaatgtggtgtcaatatttatctttattttgttcacttgaggctttacttaaatctaggtaccaatttgtgcacaccactaggcagtagtttatagttatcatttcatttgggcattctttcatcttcaagatacggggtgctgaacgtaaccatatctattcactacgttaggtaacttttttc

SEQ ID NO: 271707 - DNA, 568 bp, Cannabis indica
agttaatgggcccaacttgggtatttttccaattttgacaattttagctttattttctcaaaaatgctatttttccaattctaactatttaagtgcaaaaactaattatttaataactaaaattaattatcaaataaaattgacattgtatgtatttattaattagacataataaagtctttcaattaataaataaaacctagaatctcttttcttcacaattaagcccttgcttagtgaaaattcataaactagacatagtgtaattttagaattataattgattaattaaaatcaattatttgagtcttacaagcagtatggtctcaattagtatggggaccatgggcctatacaactgagattccaataggccgaactacaatttaccgagtaaattccctaacttattaattccttgctgcatccactcatagaacttgaaattgcactctcagtcatatagaatgctccatatgttttatgatatagatacgctatcaacatttaaccatcattctaatctcaataatcaaagctcatgtatagatgatttacaccaagtagg

SEQ ID NO: 271708 - DNA, 1071 bp, Cannabis indica
tctacacattctctcaaataattatcatttgtattactcaatcattctcctcaataattcaatcttgtattcttttttttttctaacataaaacttattattctcctacacttaaattgttgcaagtattcatttactttttatagtaattttttttattgaaatacttacaacttacaaatttattctaagggaataataaatttttctcctcatcacttgtacataaccattaattttttccctcaacaacactctcacacttttacaaatacataaaacatcaatatactattgtgtaaagaaggatgaataaagatttttttaggcttaaaaagttattgtatagggtcaaaggaaaaacaagatgtcaatatttaggctcaaattgggtaaaactaaagatttaatagatagggtagtcttaaaaaaatctcaatcgatccaaaaaaaattgcttatatcatatcttaaaatcatgtgtaatgtatttcgcctcaaatgattatcaaacaagttctagagtggttgagaatttaaatcaaaagtcaaacatgcattcgtctttctaaatattagcatatatgaaaattcaactggtgtacaaatatttaaaaaaatcaagtttgaacaataattaatcatgagttaaacacacaaatcatgataatctatcattttcctagaattatagctatcacacaattaaaaatttcatcattaaccaaattattttccacaaaaccatgcataagacatcaaagtaaaaaacacatatcaaataagagcaatcattgtcaacaaaattttattcaaaccatgttcactaaaattaaagaaagaataactaatataaactaaaaaaaataataaaaataagtaaataaacaactaaacaactaaggaaaaaaaaacagtaaataataaaattttttattcaaaactctttaagaatgttagcacaatgaagctcttatttgattacctcaagacatgaaataaacactatattgtaattttatcaaaaatagtgtaaatacaatttttggaccatgtattttacaaaagtta

SEQ ID NO: 271709 - DNA, 690 bp, Cannabis indica
tgccactgacgttgcttaactgtagccactatgttagtgatacaagctacttcttccccttcatactattgcaagttataatcacccattgtgattgtccttttctagtcctcaagagccaaatgtgtcaaagtaccatgaggctttctacttagtgcattagctttcccagagtggtactacacagtgaaatcatagtcctccacatactcaacctatcctctttgcctcaagttcgagtaaaaatatatttcgatctcttattatctgagtatagctcaaactttatgtcatacaaataacatctctaaattttcaagacaaagattaccgctgcaagttctagttcatgcgtagggtaattcttctcatgtggtttcaattttcgacaagaataggcaaccgccttgccattttgcatgaggacacctcctaagccagtacttgaagcatcaatgaataccacatatggttcctcaatattaggaacagtgagaacgggcaccgaatttaatattttctttaattctctgaaagcttcttcacatctatcatcccacacaaactttacttccttttttgttaacattgttaaaggcatagcaatccgagagaaattctccacaaagagacgatagtagcttgctaaaccaagaaaactttgaacttcagtgacattctttggtcttt

SEQ ID NO: 271710 - DNA, 1158 bp, Cannabis indica
agatcctggtaaaataaattccaacagcagctggttcaataaattcacccacaactcaatcacttcttgggaacaacagtctatggatttcacgaaacaatttcaggcagcaagagacaggcgacctagagagtcttcccttactaacataaatcagcaaccgggcgagtcacttaaggcctacttaagtcgtttcagtacaaccgctgctagagttagaaacttgaacgacaatatacagcttactgctcttcaagcagggattacaactgacctctaaaaggcttgaggcgagctatgggatgacttacaaggtcgcccagtgaaaaatattagtgagttcaatgaaagagctcatgtgttcgtaaaaaaagcggaagcaaagaaagagatgaaattgatagactagctcgggaaataaatccagcattgtctcagcaagcaccgtctcgatgaaggctgacaatcctggaggctctagcaccaagagaaaagatgactttagagaattagccaaatataagaaaaagcaaaagaagcacaataagtacgtgccaatttacactatttacaccgagcttaatgaaactcgggaaaatatttacctcgcacatgagcacagggttgcatttcgcaagcctgagcccatgagacatgcgaggcacaaacgggatacaacaaaattctgtagatttcacaaggacatagggcatacaatggatgaatgtcgtgagttgaaagacgagatagagaaccttatctcgcgtggttactttcaatagtatgtaaaacgatagggtaatggacaaaaccagccaaatccacctaataacctagacaaccaaagattacaacctcctcctgtagaaggagaggacattttggtgatcttaggagggccgcatctcgctagagaaagtagcaatgcccaaaagagatatgtcaaggaaataaaaaatgagcgatcattttttgctccagaatcatcaaagaaagctaagactaaagaacctccaattgtgtttttggaggaaggcacaaagcacgtgaggtacccacacgtcgacccatttgtaataacaatccagctcgccaacaaaaggtaaaaagggtgtggtggataatgaaagcttagtgaatatcctttacaaggataca

SEQ ID NO: 271711 - DNA, 658 bp, Cannabis indica
atgagttgggattttggttgctgttgttgctgctagtgtttgttattgttttctatggataaattatgctaagatatgatgttttaggcttgtggtggtggctgatttagtgtttgagcaagctttgagttttagaactcaagcttggctcattaatggcaagttttgttctagtgcttgtagctgtgttttgttgcttggaaaatgatctttaggatgcttagaacaggtctggaaggtttcaagtggattggggttgatttgaatgagttaggaaatttttagtctttcctgcactgaaccgaaattccggtcagaggggcctgtaggaacaaaaatttcggttggctcccaagaaaccccacaaaactgtaattccagttggggaaccagtctacctgttggggcagttttgggaaccctagtttttcccattttgagatatttggggtatttccatgttatttatcgataggaaaacttttaatttcaagtgtaagtcccctgaaagtgatttagcgtgtcacttaccactggtgtgattgatgtggtttaggagcctgtaattcgctgagaaattgttccactcaggttggccggcacacctgaattcagaatcaaggttagattagtaatatgtcatgcatatgtttataca

SEQ ID NO: 271712 - DNA, 1153 bp, Cannabis indica
gcgaatgaaaggaatggcgggtcttcggtgaatcaatcttcttggtggaaggggctgtgaaatttaaagataccacataaagtcaaaatctttctctggggaatgtatcatcgggctctcccgaccaattcccaacttatcaaacgtaagattccagttcaaccaatttgccacaaatgtggtgaggccacggagactccgaaacatgcgttagtgttctgttcttctctgcttcctatctgatcaaagcttcggggtttggagtcagttaaatcggtgtaggaatggttcgttggcggagctgctggtttgcttattttgcggtgattgagcagagtaattttgagctgttggccatgatttggtggtaggtgtggtatgatagaaactccgttttgtttgggaaggacaatcaagacaagatctgatattcgagttagcaaaggatgcgttggaggagtttcagggggagggggcgttctaatgtttgggttttaggtggccctcgtggttgtttttctagggtgggtgacggggttgctggtggggtgttgggacgggctgggagaggggggcagtttgggatgcccgactcgttggtatccaccggagatgggtgagttcgtgttatcggttgatgctgcggtcacgccgagaagagggtttcggctgggtttggtggggtattcgtgggggttgggggtgtggtgtgggcggcgtgggtcgtgggaggagttgggggattttcaggtgatagtggtggagctccttacggtgcgtacgggcctgttatgggcggccagattggggtacaacttggtgcgggttgaggcgtacggattcctctgttgttagttctttgaataaattgtccttcgtctattattatgtttaaagttattgttgaggagattcattctctttttagctgatgttagtgcgtgttgcgaatggtgtggcccatgcactagcaaaatctattactagttcggtaggggttcagttgtgaacaaatacttgtcctaattaaatttattagtactcctgtaacaactgattttatttaattaaatacatgctttccttcaaaaaaaaaattctacttttctatttaacctcaaacttttatataacattatacatcaactattct

SEQ ID NO: 271713 - DNA, 1397 bp, Cannabis indica
aaatgcagaatatcttggtctttccattgctcgtatttttcatatttaagtagttcgtaatctactatgtgcgcaagcagtttattatctgccaggcctttgatttacgagcagttatcaactctacctcacgataacagttataatctgtcttaagcaaacttgaatatactatttgatgatttatcaccttgaatgatttgtcactttgtatattcttgattgcttatatgaatagttagatcatctattcatatactaggtttaagtacttttatcaagacaccttgatgtctcatttaatactttcctatattatgcgagtcgttaatattcagccttacacgcgagttatgagttatttctcatttataacttttgattttcctttctcgtcagacaggttttaaatcaaaaagttatgatggtttgatccctttctcgtcagaaaagtttgatcaaaaaagaaaaaaaaaaaaactaaagttgtgggtttgcaatcatgtatttccagataaatttcggttaatcatacacctatgccccttaagtaattctaaagagtaacactttgtaattacttgaaaaaagaaatgattaactttattcataactaaagttcaagatattacatcagcaatgcgagttacaattattaatttactggtagtagggtcgcaaatgttccacattccagtagttctttattagcgagccatttggccgagccaattttaaaccccgattcctactatcgcttcaatcacataaggaccctcccagttcgggttgaatactcctgcagacgcatctctcgtattcttagcaccaagtctccaacgttaaatagcctcttcttgactcttttgttgaagtatcttgttactcagtgttgatacgctgcattagtgacttgcgactcagttcatttttcatcaagcagatccaaggacaattttaagagttcttggttttcttcttgatcataaaactctcgtctatgagtggatatgttcacttcaacaggtaacattgcttccgagccaaatgctagcaagaatggtgtttatcccgttgttgttttttcagtagttctgtgggcccaaagtacttgaggtagctcgtcgatacatctacctttggcagcatctaactccttcttgatagtatctttcaaggttttgttaacggcttccacttgtccattcgcttgaggcctagacactgacaagaggcttttaattattttattcctcttgcagaactcagtgaacaagtcaccatcgaactgaattctattattagatattatcttcattggaattccaaacctgcaggcaatgtttttgacaacaaagtcgaggacttttttctggttatggagacaagaggttcag

SEQ ID NO: 271714 - DNA, 468 bp, Cannabis indica
ataatgtaactaattctattatgtttaagatactatttggtaactttataaattttttattaacatatcaaatttttgtattaaataaatttgttattggtatactatatcataacttttaaatacaaaataacagaatactttatggtaagttatgatgttacttgatatgttaaaatttattaaacttaagattttattattttttattataaaatataaaaaggaacaaaaaattacttttaatattgatcgtcttttctcggagatagtgttaagtaagagcgatatgtaaatattagaggaaaagtaaaaaaaaaacaaagagaaataataaattaagagaaaaagataaaagaagtaataataataaatgaagaagataataatgtcagaaaaagaaaaagtaaacaaaaaggaaaaaaaaagtaaaaagatcaatattgaaggagggttataatttctttt

SEQ ID NO: 271715 - DNA, 1396 bp, Cannabis indica
aagttgcatgaacatctggtatacgtgctggtttagaaactgctgtaggggcatcatttgtacctaatgcaggtgagattgtggaagagcctggtgtgggaatagttgttccaggggatgcagaaatattgttctgctgtaaagtgggatctggtatggaaataccaggtattgttgctgatttttggccagaaatgggtgaaaattctgggattaaagctgctggtgtaggagctgtaggtgtggaatcagcagggtaagatggaggagtaatattggctgaatggagagccggttgtgcaccagatagtggtgcagattggcaggcaggtgtgtgcatagtaggatgagcatttggttgatgcacaagttgtatagtgggaagcacgaggtcaggaaacaaagtgcttaccttagaaggagatgtagttgaaaacaacgaaaaaattgtttcataaaagactacatcccgagagatataggtttgttttgtttcaatatcaagaagtaggtaggctttcatgccttggggatatccaatgaaaaccgaggctctacttcttggtgtaaatttatgtcttttagagttgagggtggagccataggcaagacacccaaaacttcttaaatggtcatattttgggggagtgccgtggagctcttgataagaggtcatacctttgaacagtttagatggagtcctattaatgaggtaagtggctgtttgaacaaggtatggccaataaactaaagaaaggttggattgaaaacctagagctcttgcaacattgagaatatgttggtgtttccgttcaacaacggaattttgttgaggccgttccacacaagaatggtaatggattatgcctttagatgcaaagaatgaatgtaaattaaattctttggcattgtcagaccgaatggccttgatatttgttgaatattgagtgcatatcatgttgaaaaaatttggaatgatagtttggacgtcggatttattcttgagtaaataagtccatgtaaaccttgatttgtcatcaactatagtaaggaaatatttatatccttctatgctaataacatgaaacggaccccaaatgtccatatggaccaaatcaaatatttttttagaaaaattatgatttgaaataaagggtaaacgtttttgtttagctaaatgacaaatatggcaatgtgaatgacaattcttatgtggaatcttgtttcctttattgaagaaatttgaaatacacattgatggatgtccaaggcgattatgccattggtttacacttgttttattggaaaaaaaagatgaaacattggcagctgcagtagggaaagatacttgttgaatcaagtacaagtttccatgtttttcagctgtcccaatcac

SEQ ID NO: 271716 - DNA, 1108 bp, Cannabis indica
agactgggatcgaaatgctggacctagatgtggaccgagatcctgacactgacccaaacttggacctgcactcgagacctgaacttggacctggacccgaatgtagacccagataggggtcgagacctagacacaaacccggacatagactcggacccaaactcaaacacccacacctagaataagaccaaaagctagacccggacccagaccgaactcgaacctagaccaggatctgaaccaaggacttagacttagaactgaatacagactcagatcgggattggaatatgggactcggacccaacttagaccaagacccaagtcgcgaacccacacccggagcctgatctggacctagactgaaatcacgacccgagattgggatcccgatatggacccatactaaaatcacgacccgagattgggatccggatatggaaccagactaggacccgagattgggatccggatatggactcagggcttggacaaaacccgtactcggtgtctggatttgggacctagccctggacccgaaccctgacatggacccgaactcacaccaggacctgaacccagtccctaacccaaaagtggacccaaacccgtaccgtgtgacccaaaattcgaaccaaaaccgaaagttgactgggactcgaactaggacttggacttggaatcataactgaaattggacctatatccagaaccgtaactggaccaggacccggactccaaatcagacctacactcgaattgcaagctggacccggatcccaacccaaacattgactcgggacccgaaccctaaactgaacttagacccaaacgtggaaccagactagtgacacagaactaggctcgggacctagaatcgccccccagtctcgatcctgaacccaaactcagaaataggacatgggacctaaaccggaactagaccgagacccgtgacagtgatccatatcttgactcgggattcaggtaacggggcctggaacagactagtaggcggtgtctagatctaggactcagactaggacaagaaaccagacgaagaaccaaattcgaacccgaacctagacctgggacccaaaattagaac

SEQ ID NO: 271717 - DNA, 1323 bp, Cannabis indica
gacttgattttttttataacaaattagaggttattcttgaatagagtattcttaaatagaggttctactgtaattgaggtttatatattcgagaagactataaattaccttagtaaacctgctattgcatagaaattggtaacaagaagataatcatattaggccataatcaatagatacaattgaaattgaagccctaactttaatcattgttaatttccttgcttcttattttcactgttttcactgttttctagtttaatttcctcttaattttgacataaccaaatagaagtaaagatttaattttacagtacttaactacaatccttgtgggatcaacctcgttcctggtgagtctattacttattacgatacgtacacttgcgtgtgcaaattaccacaacaatcttccctaatttattgcaataaagattttttaataactagagtgtttgtttatttttaagtcagtatcttgttttttatttttcattttgaattatattacattattttcttcttattattattattgtttaattgtaatgggtacctaatgggtccccatattcaatgtggattcccctccccgaacccatcattaattaagcgggttggggacagggatgaggggcataaatgagaaatagagatggggtgaagaggtgcattactcactaattattcatccaatttccattcctagcagaggcctccggtttaccatcggaacgatggtagcgttgttgcttggagacctcacaatgaggctcgaatggaaaatctcaggcaatttgaattgccctgtacggagagggtttttgtgaatctttatacatacacaatgcaatagcatatatatatatatactagacaaaaactacgtgcgaggcacgtatactaaattttatgcttaatttttttatgttatttgaaagttatacaattaaaaattaaagaaaaaatattattaattattaggtgagattattattatgtgtataggaagaaatcacaaattaattaatcttataatcttaactttaatcaaatagggttctagatatatgaacaataaataatcaggtaaaaatcaaaaataattatttgaataaagaattcaatatacacagttatatatatgaatcccattaatcaaaaataattattcaatatatgaacaataatttatcacgctatatgtttcccaataaagaaccataatgtatacatcatgataatgtatacatcatgataattactcattaaataaccataatgtatacatcatgataattttattttatttggtatcaaatg

SEQ ID NO: 271718 - DNA, 551 bp, Cannabis indica
atgcagttcaacgatcttttatatctattgaactctagattatattcatagcttcacagtatctcgataacacttaggggtgaaaaaagtgattgatatatgtagttcaaatactttaactttgaactttagactatacttaatacaccacagtatctctatggcacacatattttgattagacatagatataatataataaacgaactagcaaaccaatagcactaattcatgatcatgtaattgttccaattaacatgttattgtagtaatagaaaatgataccaataaaattcttggacatagtatcacggtaccttatctgagtgggagaattttaaaattctagcccatctttatttggatgacactattgatagcatactatggaactttaaataaaactaagaaagtaaatctaaccgttcatatgggtagaaataacttattagaattatgaggataagatagaatattttgcaatgtctattcgaatgacttagggaaaatccctagtccttatgaaaaattttatggtatctttaatgatt

SEQ ID NO: 271719 - DNA, 736 bp, Cannabis indica
aataaagtgcacacacgtggcgtccctgttggacaggacgttacacaataagtggtgaaaaattaaaatatagctcatttaactaaaaatgtgttctaatagtgtgccaaaaagtaatataaatttgacacatactaaaatttgtgttaaatttgacataacatttattatcatgcaaaatttatattacaataaatgcattatttttgttatatatatttatgtcatttgttttaattagtaatttttcccctcgaactttgacatatactaaatcatgccccctaaatttttttggccgttaaaaattcccctgactattaagattgttagatttaaggacttttgtctaattttagtaaaaaaaaattctaacatggatgaaagttcagggggtatgattagtacatataaaagtttgaggggcatgatttggtagatatcaaagtctggggagcatgatttagtacctgaaacagtaaaattgaatgaaattagacaaaaattcttaaatttaacaatctcaatagttcaaggggaatttttaacggccaaaaaatttcagggggcatgatttggtatatgtcaaagttcggggagaataattactaattagtcttgttttattttattagtatatttaacaatagtattaaattatgaagtatatataatattatttttattcttacatattaaaataataataaaactgataataaagttattagttttt

SEQ ID NO: 271720 - DNA, 912 bp, Cannabis indica
tttaagaaaataatcaatcatttcggactatgaaaacgaaagaaaataagacacccacttctaataatttcttcttattttatgaaagatagaaataatattcactaggtaaaagggataagcccaacaagtaaagcaaaagtctgaacaacatcccatatcgatcgataagagaggaaatcccaacaagaatgacacaaaaccaacatcacaaaagacagaatgacatacaccatttttacaaagaaaaattaaaaaataaaaataaatcaaagaaaatagtccaacctatacaaggaaaaaacttcaaaattctagaaagaatgatctaaaacaaaggcacactaccaaacaagaaccacccaatacagaagccagaatgatacgagggtgcactacccttggggacaaacttacatatcctttacagttgattcattaggcctattgtttgatggccaaacttttcatttttcattcgtttagggggtgggatgttcccactcgcgcagagattttgtatttctatgaacttgtttcaattcaaaaaagggagataaaaattgtccagaagctcacctggacaacaaggttttggttccttacggccagaagaacgtcaatgaatggaggaaacgattcttctttctttaggcttccaggctttcaagcatctagatctcttcattgattgggctaggattggtaagccaatatttatttgtcttgctaattttccttttgagattgtcagtgacttggccacgtagctggtgcacggctctaccaggaggttcatggtgtgcacttccactaaccctatctttcaggatcaatactttagcaaccaattagcttcagtaagacactaactcttcttatctctttattcactttagcggttatcttttt

SEQ ID NO: 271721 - DNA, 750 bp, Cannabis indica
ataagacaatctagggttttctaccaaatctcgcggtataaatacactaaaataaaacttatattttgactctaaaacatataacatattgtaaagctcatcgcaagctttaaacagtatatagaacgtccaaaacggacactcgagtcaaaagttatgacaaaaatacgatttctgatctcctaggaatttctaaaaactatgaaactcgaaaatctcaatttttgcactcaccgaaacactatcaaaacttatccaaatcactccaaacttcacagggcgcttatataccataaatattaccatccttgcgtaacagaaattaaaatcgagcccttaaatgaaaacgccattaacattcagactaagctttaaaaagttccaaactcgatttctaactcaaacccacctcaaattcaacaagcaaacatataaactagtctcatagttaccaaagaacaattttacaaagtcagaatctccgtaacctttttaaatcataaagcccttatataaaaccaatcgtttttagcttaaaacgtaattaaaccatacatttagctttttctcttcaaaggtttgctatcccgctactatcagagcttagatcgctaagtttcgggttgaaaatcgaagaaaatgaatataaagggagaaaattttgtcgaaggaaagagaacgaaggtttgttcattcttcttctgttatgtttttaaaaacatataagatatatttatatggaacacttct

SEQ ID NO: 271722 - DNA, 4493 bp, Cannabis indica
tttttctgcttaatgaactggttgttactttcaaaaaaaaaaaacaaaccaaaggtatcatttatttaagagtagaactacttaaaagtcaagtgagagcctcgagaacatagtttgtctgaaaagatgacgcacgatcttttaataaggatttcatttattgaaatgtgtagcttcatgtttccttctttaaaccctctactttatgttctttaaatgcttttatgaccaattttattgtttgaatttcccatgcagagttttgtcgaggcccatcatcaaacattttcttttaaaagaaaataattgattaatgcatggagaacttaattaaaattattgaacagtgtgccttataaattcccttttaatactaaattcatttattataaatccgtagactttttagacatgatattgactaaattgattgtgctctctttatcatctagttttgacccttatgatctctctctctctctaccgctattcttattttattaatttgattctattcagataaactatatacccacaatcccaacccaatattccattcatatatatgcatatatatggcagccagacttaaaatcagggatattttgtgattagataacaaaatgtcttggcgagtatttgtgaactatttgcatgttattttcattatatgtataattttataattgtatgactttaaacaccaaattgaatgcagaatgatcgtgaacatattaatatatctaattataaaggttaattaacatttttgaaactttcacatgtactaagttatgtctccggactttttagattgttaaaaatttctcttgaattattaaaattatttaatttcaatattttatataattttattcaattttactaatacgacaattatacatatactacattttaacatgtaccatgtaccaaattaatccaaattattttcatcaaactttctttagttaaattaaacaaataaaaatttaaaaatataatttaatattataaacaaaaatccaaattaacttataatatatacaattgtgaataattataataataataataataatttagaatgttatgaaatgacaaatatatccagcattgacaggtgtccatcacatgcagctgcatattatgatttattacagctagtttgctgtcacaaaaactataataacaaaatgaaaaagaggactgaaatgaaagaagcaaaaaaaaaaaaaaaaaagaaaaagaagaaagaaaagaaaaaactgttctctatgatgtccctcagtactatatatacaaactctttctttataatggctttaaattggttacatttcctaggaggtgagaaagaagcattgacctgaatttgggtaatggagaagggtttgacttctattttatccagctttttaattaggacaatatattacatatattgattacaatataatttcgaaacattgcccatttcatggaaccttactctccattgaaaaaattaaattaagaatgaaaaaagaatcactaactcaccactaattaattaattcacttttatagctatcatcacttctgcatttgtatataaacaaattacaactattcccttctctcttaaaattgcgattctcctcccaagcttattcaatcaaataaaaggtgcagctttttagctatgttgatgaagagccttactttcttgatgatactagctgtgttttatctatcaagagttgaagccagcagattattaacccaaaaaaccaccactaccaccaccactaacccactagaagatcaatttacacttctttctgaaggattaataccatcactttccactgtaagttttctttttgtatatatacatatattctgttaattaaggcaaaatatatggtgtgttattttatggcaataataatgacaataatatataatgtgtctgtaggatcagaaaacagggttggaggaaggtgggtgcaatggtggtttagaaagtgaagaggagtgcttgattagaaggtccatggctgctcatgcagattacatctacacacaagatattcatggaatcccttgaatcttatctttctatctttattttctttttcttgttaaaatttacattttgtttgattattatatatcttcctggctttcctccatcctgtaatcttgaaggaaatcagagttttgatcattaatatagagatgcgcattgactttgagtatatattaatttagtgtcaatatataagtgtctctctctctctatagcaacacaaaattggtaatacgaatttgctttcatataatcaaagaaatttgtatgtgtatatataactagaaatgataagacactagttcgattgaagtagaagttatagaaatcgacagaacacagattataaaaattatattatgtgtatgtatatattcatttatatagtagagtttgggttgctttttaggaggaatattcagtctaactcaacttaataacaccggcttgttaggcaaggattgcaccaccttatgatgtaaattgggtaaataccaccagcacagcaaatatagaattttaataggctcccgggttagacatgcctttaggacactccactttttttttttttttgaaagagattagtaacccaaaagaaagacaatgagggctggttacaaatcactgagtgagagaacaaatgttgttcctcaaaaactcttcgtcaaagcatctcagactagattgtgtgcaaggatgttatggctcttggagtgtacacaaccgacatcttggggaaggagaataaagagttgattatcttccaaatgaggctttagagggctgaaagatccctttgtttcctctggattttgaaaaccaagtcttgacagtcagtagccacagtttcaattgggaaacagacagacggcttgaccccactgcaatgctctgagaagggcttcggcctctgcaaaaacaggaggtaaacctgaggtggctgaagaagagaaaaaagctataacctggttgttggagtcttgaatcactgtaccatagccatgcttgttttcctgatatttcgtggctgcatcagtgcttaatttatacattcctggggaagggatcagctggtttgggtccctgtcatgagtggcagcagtgtataatggttgagaagacgattgaataatcttggactgcgcatctttgtattcttgtaaataagagacaatatagtcctctatttccttatgaaaattcttattttctgcaagaagaaacttattacaataattccaaattgcccaaatgattccaaaaaatatttcaagatcctctttttgaaaactttcaaaaccttttagcataaaatcttcaatgtcactaaatttattattattgaaaaaagttctaaagcgagtttgtttccaatacttacctgctctggagcaatgaactagggaatgagagttggattcaattcggttggggcataaagagcagtaagggctatcgaggactttacgagagtggaggttgaggttggaggggagaatgttgtggaaagccgtccaaatgaagtgcttgatcttgggaggaaccaaggaggaccaaactgccttccaccagggtttgaatgtgtgaggagaagaggacaatggttgagaagaggtagaatttgctaagtgataagcagagtttacagtcaataaacctgaaggactattaacccaaatgagacagtcctgactagtagaatcaatagacactttgaggatggagtccactaaatcttgtggataataattgtggagtgtaagagagtcccaagtaccatcctccttgatgaaaaaagaacccttatcttcaagagaagaagaattatccttaaaaaagatgtggctggagttaggaatccaattatagcaagtgatggaaatagattgaccatcccccactttccaaattagacccttatttagaagatccctgccccacaaaatgctgggccagcagtaagaaggagagtgtccaatagaggcttggagaaagctactatttttgaaatatttggccatcaggagggaagagactaaggagttggggttggagaagatgcgccaagcttacttagcaagcatggcttgattgtggtgtatgatgtccatgaacccgagacccccaaagaatttggaactgcaaatgtgggtccattttttccagtgaatcttatgagtacctgaagattctcaccagtagttggccataatcctactaaactgcctacaaattgaaagaggaagcctaaaacatgacatggtatacgaggggatagcttggatcaccgctttgaggaggatttctttaccagccttagagaaaagatgttagttccaggctgataatttactgccggccttttggagaaggaagagaaaggatgatttcttagatctggaaaggcactggggaa

SEQ ID NO: 271723 - DNA, 960 bp, Cannabis indica
tgttctttttttttttaatgtacattttagtattttttttttttttgttgaaattctatattaaattttttaaacttcacgagcaagaagctaaaaattatatcactgtaatttatttttttaattaaatattttgatatgcaaaataaaaaaaattatttttttttctttttattcaaataaccaaattttcaaaccaacaaatcatttgatattaagtgattactaaaaagtattttattatttatatttaaaaaatttcatatagtaattcttaataaataaattttatcaaaccatttaaataggttttataaaaaaatgtaactttttaattactttttatcaactcaaataaaatttaatatacaaatcaattttatgagttaataaaaaagatattgtaaaataagttactactgtcatcaaaatcattttggtttttttttataaaaacaaatattttgttaacaaaaggtagcctaaattcataattagaagaaaaaaaaaaatacaaactagtgtcatagactagttaacttttttgttattttatattagagttaccaaatgatttacataaaaaaaagttactaaatgatatacttagaataaatttatttaatatgaatataaaaaatttatgagtaattataacaaaaaaaaaaaatatttatgagtaatcaaatagtatcttaaacattatattacatctactaattttattaataagttaacatattttaaacaataagacaacataatattaactaaaataatatttttttaatgtaactaattatgtggtacttaaaatacgatttagtttccttatatatatttaaaaaaataattatcgaaatcacataataaaatagacttatttagatactatgctacatttaaatatgaaataataagacacttatagtaacttgccataaaattaataagaattaa

SEQ ID NO: 271724 - DNA, 516 bp, Cannabis indica
gctctcatctcatccactttttttgacaatttaactattgccttcaacctaatcgaacctagtttttagttttctctatcaaaaaactagtagataagagacaccttcaatagtgatttcaaacctctttcattgttctttatattcgaacccatagtgatagagtgccatgcccactacatagcaagtaaagtaactcaatcatagtgagtaagacggtggtaaccgaaacctgaaggagagaaagagatctaggctccactactacaaatataagaattcgcgacggtcctaaaacgtattttttttgggggaccgtcgctaaaaaaattaagtaaccactactacaatgttggcctttagaggttgtttttcactcacatttataaaaagggaagctaaagggtgtgaaagtacccgctttgttcgaaattgacatttagaggcagttttttgataaaaccgtaggtataaaattaattacacttatgttgtcggttggaggttgaggagttt

SEQ ID NO: 271725 - DNA, 721 bp, Cannabis indica
ggcaaaaatttcatgaagcttagaataagcaagaggaaagaccgacattatgcagttcagaaagcaagcattatggactataaaatagcatgaaaccatgacaaagaagaatcgtagagtttctaaacctagggtttcctatgaatgttctacagcgaagtcaaaagtgcattcgaaatgtaaacatgaaaaaataagcataaaggaaatcgaaaacttactcaagagtcagatatttggattcaagcaacgtcaaaccaacgagaagtttcgatgaaggtacttcagcaaacttgaagccaaaaacatctcttttcgctctgaactcacttagaaaagaaagatggtgaaaatgagtttatgtgccaatggtccttggtatttatagtcaggtcacgaaaagaggtaatcatttcaaaagcccttggatgcctcgtttccctctaaaaagccaatatgcaaaataaaaaataatcaagtgcatccgtcaaccgtggtgagagaagtcgaatttcgaaatattaattgtcagagcattaattagccgaaaactgaagggatgctcagtcaacctcacatcgagtcttgaacagacacgcctgacatgtgtccccatccaaaggcagaagcaactcggatgaagtctacacgcaacttcggaagtcccgtggaaacttgggggaaaatgttaccccaatttttgcactcgtgacgtggcatc

SEQ ID NO: 271726 - DNA, 1830 bp, Cannabis indica
gtctaacctagttatgtcttatacacataactcttaacataaatgcgtacactcaatacatactataacatatagaatcttagggaaataaccctagcttgcatactaaataatcactcctacaacatattataggatgctgaaaataacacctattaagggtaataaccctaactcatgtcttcacttaatcaacaatattaccatacatcatcgctttcttaccttcataatattctagggtaataaccctagaccacatttaattaaactcaaggtgctagtttatcgagtccagcttaattatgccttaggcgcataattctttattctaacatattaagcatggcataacattcaacatcattaaataactagggtaataaccctaggccatataaccgctcactttacggtaataaccttaatcctggttcttaattaatcacaaccataatatacaacatgagcgccaccacgcttaactctacgtgcaaactactgtcttacctgaggtcccgtaaacgtggagattccaaatccgtgggtgctcctgaccaagtgttggtaattttagtcacaattcctgggattcacaagtatcgggttaatccctaaatcctttcacataatatcaaattggcattcacaatacagataaacacatagatcttggaacgagctttccaacgatataaagaacgtccaaaacggagtcccgagtaaaaagttatggccaaaacaaaattcaacttttccccaatacagtccaaccggaattccggtttgaacagccctgaaccaaccggaattccagttgtctgggcaaaaacaacacggaaaatctaaatttctaagccccataacctactcaaatcttccccaatcaccaccaaactttctagcgcatcaacatataatataataaacatattttacaactcaaacacaatagttgcaccaagaatcaaaaagtaccattaaagccacaagcttgagttccatgaactcaagcttgctctacacaacaccatccactaaaaattgagttagaaactcacaaataaaactcatcaccaacctgttttcatcactaaaagcatactaaacaatcaagatgcaaacaacattcaaactaatatcaaattcttacatacatgcatgcttgaacaaaaatcacaatttaacatattttctttaacaaaattcagcaaaaactcaattaaaaaggcagagaaaattacctcaaatccaagcatttaaagtgcaacaagaattacttcaaaaccaccaccaaatccaagtgattttctcaaaataaaagtttcaaagcaaagagtaaaagagagagggagaagtcggttcttagggctgggaagaatatcagaataaatcattttcattactcaaaaattcattttgttggacaataaatcaagtggtcaaaatgaccaaattgtccctagagtctcataacacacatacatgcattcaagggcattaaagtcattaatcacataacagactatttaaataatttttagaatactcatatatcaataaaatgccaatataaaatcctaaaaatatatttcggccccaaacccggttcggtccgaaatacccgattgtgactataccgcgctaacttgtcagaaaacacctgcaaaaggacacaacaagtatactatataatagtatagtccataagcacgaaaataaattaaatttacagttttacccttctcgggtcaaaattacgaaaatgcccctagctcaccaacggggtcttaacactacatttatgagattaactcgcatataataaat

SEQ ID NO: 271727 - DNA, 1330 bp, Cannabis indica
aaagattagctataaagtggagaggggtgatagcatttagaaagtaacacactttatttttttatgagccatatatagatacaaaatatatatatatacataaatagttttcatctttttattttgtctcaaattctctacctaacctaaaagagcatgtacttatatatatttctttatatttatagactaataatccatatatagtgcttttccaaatcaatgtccacaacaaaaagccatttcatagtttgagcaaaaaattgtttatttgtcaagctcatattgttaattaatctagataatgtggctggatacctaactatacatacatacatatatataaaatctatacatatattataaactcccattaataactttacaaacaattaaaaaaatgtacataaccaaaatattatattaaggtaacaattaaacaagggtggctagctacattccaaccctagttgacattattagtacatataattaatattaaatatatatgagacacatgagtttattatatctaatcattatccaagacttgcatatatgccttatccttttttactttttctagtcgtttttatttgttagctattgaatgtctatagaaaatggttgcttgctttaaatttttaaatatttattttatattggcttccttcgatttatttgaatcgaataagacacttttcacaccataacctttggaaaagtgtcaaatgtttttcttcttcatttaatcttttataagagaatatcaaacacaacattgaggaaatccgattggttatttggtaatattgaaaaatgtgatgttagattggtatgaagaaaagctaaaattgaatttgagtttctaagtgatggtggcccacattttttaagcccttaatctttgtaaagcccattaggcccagggtatgaacccacgtttgtgtaaatttagttgcagtctccactcatttatgagaaactttttaaaaaatatgttttttttcttaatatatatatgtataaaattatatatattcctatcttttgtaaaattaattattaaaaagtcatattcttttcaaacaattaagtttaaaattttcttggataaatgtatataaaactttataaaatctatagtacaaagaacttgatataataataataaaaaatatatacgcaaacaatagaaaatgtaattttatgtgtatatataagaaaaaaaagttgcaaaaaaaaaagctatatatattttttaattaaaaaaaaagactatatatagtataaagggataattacataaaacttgtaaaaaattttaaca

SEQ ID NO: 271728 - DNA, 891 bp, Cannabis indica
agaatcggtttggttttgtcttcattgtttgagataaaaatggcaaatttcttgaagctttctcaaatagcaaactcagtatggtttcccctgagatagcagaagtggtgggcgttaaggaagtcttaagttggattaagacgaaacagttaattgacgtggagttgaaactgattctttggtagttgttcaggctattaacggttcagttcaaatgccatctcaatttggttttcttgttcaagattgtctttgctactctctgagttacataatgtttttatttcatttgttaaacgatctgcaaatagggctgctcattgcattgcaaggaagtcctgttttatgtcaggttgtattttggatgagctttctgctccatctgatttgctttcgattgtaagaaaggataattaattcttcatgttgaataaaattcttaccctcttttctacgaaaaaaaaaaaacttataatctacgtgttatattattattaatatatttaaattaatttttaaataaaaataaaaatttaataatattaattaattttaaaaaattttaaaaatataacttaaggaatattatttacgtattatattattattatcatgttaaaaattatgtaatcaaaaaatattatccaattaaaattaaaaattaataatttaacaagagttaaactaatattaaaattggtgccttgttccttgatttgcaacaacaaagacttattttttaacttgatatttgttagggattatttcataaatactaaaaaaaaaaattgtaaataaaaaaaaagttcataaaatgtaaaaagaattctatttttaaatatattatgtagaataattagcttttttagtccctgtacttatgacactata

SEQ ID NO: 271729 - DNA, 736 bp, Cannabis indica
ccagtctgggtcttggtccgagtctagctttgggtttgaatatttgtctgggtttgagttcgggtccgagtctgtgtccggctttatgtccaggtctataccctaatctgggtctaggtttgggtccaggtccaagtttttgtcccgagtgcgggtccaactttgggtttgggtcaggatctcggtcagaacctatgtccagcatttcgatcccagtctgggtcttggtccgagtccaggttcgtatccggatccctatctaggtccaatctttgtttgggatcgggtcccagaattaggtccaggtccgggtctcagatccggtctgggtacacgactgtgtccgggcccgagttccagtctcaccttgggtctgaggctaggtctttgttcggttctaggtcttcgttcgggtcctggtaacggtcctagtcttgttctagggtcctagttcgacaattcttgttcaggttctaattttaggtcgcaggtcaaggtcttggttcgggttttgttctttgtattggttctggtcctagaatgagtcccagatctagacaccgactactggtctgttccaggccccgttacccgaatcttaagtcaagatctggatcactgtcccgggtctcggtctagttctggttttggtactaggtccatttctagtgccgggtaacgagctgggtcttaggttcaagttcggatcagggtcgggtactaggtcccggtccta

SEQ ID NO: 271730 - DNA, 627 bp, Cannabis indica
atgacttagaaagatataacgattttataatttcttatctatggtcaatatcgatcccttttaatgtgaactccataaatctgatactggtaaactttgccaatgccctagaaaggacataacacttatctaaggtgtaagtatatcttatcgcagattatgatgccagtctaaatcaagtgaactgacaaatcatgggaaataaacttttgaacatataatcattattatattccactgtgctgacgacactataatcatgaacaaatatatacatatttatatattttctggacttaatagaatttatacattaaacaatcataaaataaatcatgtgaaccttgcagcataaaatacagtttctaatctttattaattagtaaatctgatttgattgcaatgggttttatttagcgtacaaaacccaacaatgttttgtcaaactggcccagttcaatcgaccattttatcaatcttccagaagcacctagtttttataaaacttgtctcaagggataatcggttaacacatttatggggtgagcctggaagtacggctatagtttgtggacgcatggactaggcataatgcgagtttttttagagggggatacctagattctg

SEQ ID NO: 271731 - DNA, 1326 bp, Cannabis indica
tttaggggaattaccccatataccgttttatttatttcatatcttaaattaaaatagttgtaataaggaattgattgctttctattttagttatggtaaaccgattcacacattatatttttcgtaaagtttgggagtaaaaaacttttatatcaaatttacgaatccagcctatatacagacacactcaaatttgattatgtgagttttgtttaagaatatagtaaattacaatatatgcattatcaaatacgttacctaattaagaaaatttaaaaaatttaaaaattacatttatatataatcatatccaaatgacacaccaatgtagcaatagctaatattttttttcttcttaaagatcaaaatcttaaaccttatttaaaaattaaaataaatacattacctaataaaaaaaattaaacatacatgtattacatttaaatcacctaattgaacttaattaaaaaaaaactaattatacgtgcattgcacgtaacatcaacctaatatataaatatttatatataaaatggaatagattttttaagatttcggaaaaaaaaaatagatttttttaagaaattgatgaacagtaatttggaagaaaaaatatgattacattaaaggaagtttatctttagaaaaatggagagaattttacacaaactatcatttttggctcaattttaatatttataccgtcaaaataattttttttatattattacaaaacctttttttctgtttatttttaagatttcatattttcttaattataattctataaatcttaaaccaatataaaaataacataaaattacaataacgtaaaaagaaaaacagttcgtatatttaaaacaaaaagtttatattctgtaaaaatattaaatttcgtacaatcttttatcttttctaattaattatgaaaaaacgttaatataataaaaggaattaaaataaggtcatatttaagaaaaatgaaaaaagctttgcttaatcttgagatggcccatgtattatatcacctggtttagtctcttcaccaattaatgggctcgaccaggagacaaaccagcctagactggagactatgttttgccttgggcccgattctgatctctttttcaatttaatcaactttaaattcctccaaaaattttcttctaaggtggcgtttggttgggggtaatgaaatggaatggaatggaaaagaaacaattttcattccatttctttgtttggttgcattttaaagtattgaaatagcattccaatggaatgctctttctactattttggtggaatggctatttcattttaaaa

SEQ ID NO: 271732 - DNA, 540 bp, Cannabis indica
gtaaatttttaaaatctaatcggatgagatcgattgttggatgggacatccgatccaattatcatccaacggtcattcaattatatttataattttatatatttaatatattttatttaaaaatatatattaattaatatattttatttaaaaatatatattaatttatatattttatttaaaaatatatattaatttatttaatatacatttgacacatgagattaaagaacaaaaactttagatttaaaatattaattcttatcttcctaaacactaataaaattaccaatgcgtattgaataaattttattttttagtggttttattatgatatcatgagaattaagttgaacttaactaatatttattatgtatgttggattattaaattttaaactatattttttatatatatttttcttttaagttaaatcaacttaaatggtagctaaaatgggttggatgaatccaatccaattcaatataaaaaccagtcaatgcatccaatagttagaactgatccaatccaatacatct

SEQ ID NO: 271733 - DNA, 502 bp, Cannabis indica
tccctctggaattctttatcagcatgaagaggacctttttaaatcgcccacaagatctatgatcacttgtgaggattgcccatggcgggctacagggttcccctggtttggattggtcgaaagctcctcaaccttggaatctaccgtttgcagctttgattgaggtttgaagtccttggaaataaatggaaattggttggtgcgtctaggtattattaatttgggaggatgaacttctgaactcagaagggccattttggcaggacaagatgatccattctgaaaatggatctcactaaagagcaagaggtttatgaaaaatgacaagcttgagtcgcccttttatacacaagtacagtgacaagaaagctaagtattgagaaatccaacggttgggagaagggcataatatgaacaaacgattcatattgaccctcgaaactgtacaaccgccggaatcaaaggatgcattttttccaagaagagatcttgacgaaaatgc

SEQ ID NO: 271734 - DNA, 736 bp, Cannabis indica
tagagataaatggaagagctcttatttcagtgattatattagtttactaaaatatcatttataggaagctaagtgtttaaggataaaatacattgaggggtgaaacggtaaatttatccctactcggtgtaaatcatctatagaggatcttcgattattgggattagaacgatggttaaatgtttatagcatatttatatcgtgaaacatatagagcgttctatataactgagagtgcatgaattttcactaagcaagggcttaattgtgaagaaaagagattctagggtttatttattaattaagagactttattaagtctaattaataaatataataaataggaattaggaaaaatagcgtttttgaagaaaataagaaaaattgttagaaaatggcaaaattccaaagtggggcccacgatcctatggccgaccacatggaagggaatttaacatttaattttcattcattttttgtagccatctcttctacctattagaaccactcttctctctttctctcttcataatttcataccctatagtgatatagtaagtgcccacacacatcaagtggtactcaatcatagtgtgtaaggctgtgaagaatccagtttcaagagaaagagattcgggctcagatcttggtgatactctgctacagacaggatacaagagttagagatctgagcggaaggagccattaatatttcgctgcacccactgtaaggttt

SEQ ID NO: 271735 - DNA, 939 bp, Cannabis indica
cgatccaacagtgttccaattgcgctggtaaaatcctggtgtcattccatctagtccaggtgacttgtcgggttgcatctgctttacagcttgtctaacttcttcctcaataaccagagcaagtaaactcatgttctgatcagtagtaatggttgtgggaatgctatcagttataacagtagctgcactaggagaagaagaaaataattctgcaaaataattcttaataacatcagacagtccattttgccaatccacccaataacaagccgaattttgatgctttgagagagagagttaattctttttcgagtagaggcataagcatggaaaaacttactattttgatctccttccctcaaccatatttgttttgatctttgcctccaaaacacctctctttgagtgtaaacctcaaaaagattatgttcagcttctttgtgctttcttatagataaatcatctctccctcttttccaataatggacctcttttttgagattttttattccgtccttgaaattgcctgtgtaactctttccccattcctgcaaaatgtttccacagaatgctatcttatcattaatagcattagaagggcagttggaccagatatctttaataacttatgcgcacattggttctctgagccaacaattttcaaagcaggaccttctcgatttccaacttttatttacaataaaaatgttatttttcttgtttatcaaacgaacgtacacccaacccaactatatatagaaaacaaaacgtgcatgcggtatgctaatttttttttaaatgaatcaaattaatatttaatataacaaaactaattttaaaagatttgtatatactttaatttagtcagcatattattctattatcctatgaggatctctaatgatataaataagtgatataaaactaaaatatagctca

SEQ ID NO: 271736 - DNA, 3112 bp, Cannabis indica
acataattaatcttccttaaatcccatacactaatataaacttttgaaatttacaaataaaatttagagcatcattcccaacataatttttctagtgtactcacccattcattcatttaagcaaaaaccactatattggtatgttaagtgaagtatgttataactgtacaaaacattgtatcattttcaggcattttcaagattcaaaatacatggattaactatgtaacattatcttttaactctaacctgttatattgtcatatttacctgaaattgttaaaaaaacattgttatgaaaagtaaaaaaaatgaagaaaagatcattatgtgtatggaggactaaccttttatacaaaacctttatatcttctgctagtttttgactgcattccaagaactcatcaccacagttgttaacatcaacagtctcaacttcgaaatctttgtatccgcagtactctttccactcgaaccacatcttcgataccaattccttcctggaacaaacttgataatcttcctcttcaggtgaatcagcagccaccaatctatacgaaactactctcttcttctgtccaggacggaaagcacggccaatggcttgacgagtcactgatggatttagatgaacatctaggattatgattcttgatgctccaactaatgaaattccttctccacaagccttgattgagccaaagaaaactttggcattaggggagttgttgaagtgcaccatggacctgtctctagagttttgagtagacttacctgaaatgaagacaatttccttatctaattgccaacctttctctttcatagctaatttttgcaagaaatccaatggatcaaggtactgactaaaaaccagaagcttctccttctttgcttcacataaatttagtatgttcaaaaagaactttgtcttcactccatcattcacgtccaaatgtctcactacctcatccaacgtattaccatctgtttgcttatcagaaaatggcaccaatgccggatgcagataagctaaccccaactgaacttgctttgaatctccctagcttctttattttttcaagttcatgtttttgtttggaactgagattgagcaatactgtgaaatcaagcagaccaggaagctcgtctaagaaatcacctttgtagtaatgaaggaccttgttggtcatctcgcgcaagtcttgtataacagacacttttcttctaaagtcttgatctttctgaatggtatgctccactgcctcaaaaaaagctgcgtcgccccaagctcttgattgccttttaccacttgacaaatctgccttactcatgatccgtttcacaatgggacgagatgtttttaagctcaaaaaccttggtcgaactagatttaagacattgaacacctcattcacatgattttgataaagggttcctgaaagcacaaccttccttggtgtccttactcgggcaagggtttggaagacgtctgtgttatcatttcttggggtgtgcccttcatcaagaatgagaattgatggaaccttaactagcatatcacaacatttagctgatgcttcgttagaacccttggtagaaacaatgtaagagaattgttggtagcctaagaaaaggacactagtcttttcttcccactgtttaaaaacctccaattgttgggctctgctgcctttgactttgtagatgtcatacaatggaatatcctctatttgccggttcctgaactcagtcttccatgtctccataattcctttgggaagaacaactagtggtctagcatccggatactgtttcaggaaactttgcagaaaactgattatcatgaatgtttttcctgatccaggagcatgggcaaggatacaacccccgggttcatctcccatcaagttgctaacaagaaaaccaaagccctccttttggtgagctttcattatcttcaaatggcttgggtgtgcaaatagagtggttaacatctctctctcccgagacatagccggtttaactatgtcatctaacttgtctttgatttcttcttgacggtcatgcacgtacgttctagtgctctttcttacctgaaagttgaaacaaaacataagagaaatgtaatagaatgcacttttagctaagaaacacaagtaactatattactattagcacacctctacaactttttcatttggagggaaaagtaaaagactctgtttggtgaaaatgctcactgctgtgtcaatgagctctttacacagatcagttctaacaagacccttagctggtttaacaactatacagttcacacaacagacccttgttatcaaacctaaccacctgcttcagtggttgatttactagactaataaactcacattcagtgcattacaataattcaactgtgcatgctggtcctgaataacaggttcaataatcggtgcaactcgaactctgactttcatggtttagcttgtctgaaactatacttaccactagtgtatgtgctttctgttatgcaatgattgtatgaacatattttatattctagaaggttgttatcatttgttgtgttgttctagtaccaatgattgtggaggactagtccatatatatactgcttttctcagctttattaaaatcagtacaacatatatagagactaattcttttgcaacaagatgtcaccctgaatttacaaatgtaggattatatgttagttggtttttctccaactcatgaactctttgtataaagttataaatagaagatgaaaccataccttataccgaaactcaaatatcatctcgatttctttgtcaatgatcccacaaatgcggcaaacataaccaaggtcatcctttaatatgaaagagtgctcacatttttcctcattttctgtcttttcttcctctgatgaatggtccacaactggatcctagaagaagtaacacacgggaaaataagctcactatttatgcttcatggaaaactttggaaattgaataataattagaatgtaagaacaaatccaaactataatatatacgtgtgtgtgatgtgcccaagctagatggcaatagacataactaggcatattggatga

SEQ ID NO: 271737 - DNA, 777 bp, Cannabis indica
ttgtggtgtaaattttacatcatgacaaatgttgtgctaaatttgacacaaaatttgctaattatatcactttttggtacactattggagtaaactttttgataaatgagctatattttaatttttcgccacttatttacacctttattggagatgctctaacctttaactcaaccattcttatttcaaaaccattaagttatctagagtaaaattaggtgaatttttatgtgttatttatatgaaaagggaaatatttgacctttttagaagtagcttagtttaggtagttgttagatgtcatgttaacttagtcattgaaattgccttaacttgtttatagtcattctaatgctgtgttttttaaggtcccaattgtaatggtcaatagtccatatttgctgcattgtttcataaatgtgatttcactcccctatctaataaagtagtagggtttttttttttagtattgaaaatattaataataacttgtccatcaagaatttatattaataagataacaatacgaccccttcttctactcactcaaatgacatgctttcaaaattgtagcacaaaaagaaaaagaacaattaaataacaataaaagaattcgcaaaagggattctcaaacatttttcaaatccatcatggtcaaccctttgacttagttttctctatctctctcaccctctacattaagcaactcttgtaacaccaaattaactcatccataatgtgcatctgctaacaaaataatattgaatgttatttttt

SEQ ID NO: 271738 - DNA, 1678 bp, Cannabis indica
tctttttttttcactacttttcatgtttctgccataacgtgtggcgaaatgttgagtgagctcttcaaatgagttaatcgaccattccttcaatagctcgaactagagcacatgttctagtgaaactccttctccatcaaataatgtgaaggttggcatcatgaattccataggcttcgatacttcgatgatccatttggcaaatggagatctcgctacatttcttacagttgctctaattggatcatctagctctacatctatttcttttccaattttggcaatgacctctctcataaccttcactttccattgtatcaagtcatctttagattgcactgggtgtcagaatgctgagattggatcataacgggcggtatcttctttattgctctatcttgtgcaacatcatattctattttatttttatttgtcattgttgatggattgaaagtgcttctgaggttcctgctctgtcctagcaatatttttttaaaatcagtaaggaagcatatcctcttctcttcgtagtggctgatctcatcttttcaggtagctctttactaattggtatcacctatggtttgtcttgctttcttttgcaacgttctaagagattcttgtttgctacgactattcagatgaaatctctcttcatctcttattagatttccatttcttgtctgcccaacatcgtgcatgcttgcattttcatttctgcgtgcatttctaccatttcttgcatgaatttcttcaaacactaagtaacatcctgatgatgatttcggcttttatcctgatgatgttgacatcactcttcagtgatccattgttcttatcaaaattttctctatgcgaggcatcataattctttattgtgcttatcttgtgcaataattctttgattttatttctcttatttcttttgctagagtatagtagttagatcaacgatccaatttgatgtgtctccttcacttgttaccataattttctgcatattcttcgacactttcttagatctcatcctagattgtagtctagtccttagcttttcgttcttgtgattcccacatgatggtgccaactattgatgttgaaaattagctcaacaacaaattagtaattgtacttcaaattatttacactaggattgtcccaatcaaaggttatagctctactttatcgtacaatttttcctaaattatttcttgtatgttattctctctttgtacggtgatctcggattcgagtgaagtgtgcttctggagatgcgattcaactgaagtttgactaggctagtttggtcactaatccatcatctttttaaatattaattacatttctctatttattggtggaaattggtatcagacgatctttattctctcctcatattggtccacatgattttgttctcctattctagacacattttgttttctgttctgcttatcaagctccgtcctcgaagctttttcgagcccagttcaattcttctacttttctctacttcttaattaaatgataatgcgtttatacttttcctgtcctacttctttattaattttctggcattcaataggatgaaattacttttatactctcaaattatttatattcgtacaatatatatataaaagatggatgcagtaaaatagatttgtgtgatggttgc

SEQ ID NO: 271739 - DNA, 886 bp, Cannabis indica
caaccaagcctaaggaagtacaggcctaaacaggaaggatggatgcacttaacagattcatttcgaagtctactgataagtgtctaccatttttcaatgtattgcaaggcaacaagaagtttgaatggacagaggaattcgaggaggcctttcaaagcattaaaaggcacttggcgacacctcctgttttggcgaaaccagtaactagagaaacattactcatctatttagctgtctcaaaagatgcaattagtgcagaaatagtgcgagaagagggaaagcaccaacaacctgtttattatgtccaaaaaaagttttctgggggagaatcgaggtatctccctcttgaaaaacttgccttatgcctaatccaaaaatctcgcaagttacaaccttacttccaggcacacccaattaaagtgttaactgatcaacccttgagagaagttttatcgaaaccatacgcttctggaagattgataaaatggtcaattgaggtggggcagtttgacataacttatcgccctcaaacatccatcaagggccaagctttggtagatttcttaatagaaggaataactctagaagaaaatttgcttgtttagcgagacgcggacacttggaagttattcgtggatggtgcatccaacgagcagggctcgagtgcaggggtgatattaattttgccaaaaggcattaagtttcattatgctttgagattttaatgtgacgcatcaaacaacaaagttgaatatgaagccttgatccctggtttgaggatagaagaagcgctgaaggtcaagaatctcatatgtcatagtgattcgcaactgattgtaaatcaggtcctcggggaataccaggctaagggcctgaaaatgactaa

SEQ ID NO: 271740 - DNA, 1180 bp, Cannabis indica
aatcaataaatcattagtaacaaataataatcaaatatttgctaatcatcaaaacaaggagatcgaaaagtttgagttaacaagacatccatctcgctgtaggaaggcatactcctggtaccttcgctaatcagctctaaacatctttcaatgggttccactgctccgtcgcgtcagctctcttagaaagaagctgacattcaaatgatgttagctactgaagctcatcttggcaccaagagctgcgattttcagaaggagcgttatgtctttaacctcaaaaagacatgggaaaagctccagctcgccgctacagttattgttgctattgagaacataaatcaagttgtccaagtaccaagcgagataccccggtgagatacactttgcagcgtgtcttaatccacatcagcgttgactcattaaaaacagtttaaatcacagctgtacgattttcaaataataattgcatttatttacgtggagcgtaattaaggtccacaattttggggaaatattgttgtagaattcatatttgaatgtaattaactgccaccctatgacactataaataagggcagaatgtacagaaaaagggacagaaaaaccttgagagaaaaaagaacacactgttggtgaagaaccctagttctatatcagaaaagtcttaataagattgactcgtggactatgcagaattaactgcaaaactacgtaaaaaacttagtattatttttgctttattattctttctagaatttctgataacttctgtgttaaccctatcacgaaaataggcttattatcattaacgaaaatctgcgttaataggtttattattaatttttttaacattaagttgagataaaaaaatttctaagttataattttatgagaaaaatgaatatacgattcaaaagtaaaatttatcagtagaagtcagtgatagtttgtgagattaattggggtcatgttcacgaggtaaggtaacaaaagataaacactaagggatactagtggagtctagcatcttcttatttgttaatatcgtgattagtccaactaagtattgagttctatatattttaatataattactgttatggagtatcgctatccaattgtaaagtgacatgtttagagattccaaacattacttggtgctcaatagcaatgctcg

SEQ ID NO: 271741 - DNA, 1057 bp, Cannabis indica
tcccattcagcaaaaaagaataagaaacagaccgaagacatcgaagaataagatccaccgtagttgtgccaaaacccatcttcaacataacttggccaatgtaatgccattcaacacgatcaaaagcctttgacatgtccaatttaattgcggcataaccttgtttaccccgttttcgattctttagtgaatgcagcaattcaaaggcaataagaacgttatcagtgattaaacgttgggacatgaaagcactttgatattccgagataaccaagggcagaaatggctgaattctcatcacaattgacttagatatcaacttatagaggactgtacacagactaatgggacgatactgtgtaataagctgaggttttttcaccttgggaatgagtgtgatgatcgttttattaaggagagaagggtccgcaccgttgtttaaaacatctaaaaccgattttgtgacaagggagccaacaatgtgccagtagtttgtgaaaaacatgactgacataccgtcaattccagggctcttatcatcacccatggaatgtagtgcattgagtatatcagaagcttgataaggtgcaaaaatggcatctcgagactgagcatcaattgttgtgggaataacatccagtatagcatcaatcgcatgaacatcaactcctgaactgctaaaaatagactgaaaatatgtagaaataatgttcagcaatgcaggttcgcttgtttgtgtgttaccagcttcatctctgagttttttaatgcgattgttggccgatctagcatttgcacgttggtggaaaaatttggtatttgagtctcctgatttcatccaagaaatcctagccctttgatgccaataatcctcttcttttgctagcaactcatccaatatcaattcagaattttttaaagcagcaaagtgttgagcatccgtgtttgaagaattctgcaatgttgagacatgctgatgagactcttttatttctttcttcaaatgaccaaagttagcaaagtgccactgctgcaggttggaagcacaattcgaaat

SEQ ID NO: 271742 - DNA, 4485 bp, Cannabis indica
aaaaaaaaaatatttgtttataaatattaaataatttaataataaaaagtaaccaatccaaagtaaccgatccaatccgtacttttgcggattagattggattggatttgagctattgtgcggatttgattggatctaaaaaataaaatccgcactaaattggatgttgtttaaccaaaaaatgcggattggatcggataaacaaccctaacaaaatttgaataagctaacgcgaatgtcagaaaaagacaaaattataaaaaaaaaataaatcaaaatgacaaaattaaacgttttttaattaacaggccaaaactaaatttgatcaataacataggggctaataaccaaaattaaacgtttcttttaaattattttaacatttttattgttatttagacagaaagctaaagcaaaaacacacaataaaatataatataaaatagacgcattgttacacactcactcatgagactcagctctcacctactcgctagcctactctaaccaaccaacagcaaccgcctccattctcgacggacacctcgaggttctcaaactttctctctcttcttcaaagccaaaatctttgtagtcctcctcttcatcttcatcagatctctgtctctctccgaagaagaagaagatgcagagcgccgcatttactctctcctcttcttctctccctcttgggaagcctcgactctcttccaaccctactcttcttcggcctaggttcgatcctatacgcctctctttgaagaataataacgatctcgccacttccaacaatgtctcagtgtcttcctctttgccccgtcgatcttggtccctttcttcgtcctcgtcttcctcttcggcgtttaagttcaggccgtggagttctgttccttccgatggtgaagccaatcgttttgaggttagggccagtccggtgccggagagcgctggagaagtcgctgaatcgagtagcttgaaaaaaactctcgtgcttgggttgttatttggtctgtggtacctcttcaatatttattttaacatctacaacaagcaggtatacatatttttttatccctacaaatgttttgatttatttggctggtggaaatgtgagatgtgtttgaatcaaatgtttgttatgtgaagagttttggcaactcaaatcaagggtcgccaagattctaatttgttatacaatatattattataaatataggacgtggtccttggtgttgactatattgactaatcgtttgttaatcatctaatttattatgttgtttttataattgaaatgaaattgtcaacatagatctattaagattttgctgaaattccaatagtccttaatcttaattttaaggatgggaatattaccaagcaagttcctttgtatttctatgaaaaatttgaactgtgctaatatagatgaatttagacttgtgagaacttgctttatgagattagaattaagcatgacttgtttcggctcttggtttgtaggtcttgaaggtgtttcattttccagcaactgtgacactaattcagtttgctgttggaactgtacttgttattctcatgtggggtctcaatctctataaaagaccgaagcttactggtgcccaggttcttataatgttgttaaatatgtagtttataattttatggtttcgacttgttttcaaaatgatgcttattgcgagtaacttaatgacagcttctagcaatattaccactggctgcggttcatactttgggaaacctttttactaatatgagtcttggaaaagtggctgtttcattcactcacacaattaaagctatggagcccttcttttcagttatcctttcagccatgtttttaggggaggtgagttttggcatattcatttgattttttttatattattcttgaatatgtgagactgatatatattgctctattctcccacttctctattaatgaaattgagagcatatattggaattaattcccatgttttcattacatttcttaagttatttgcaatggttttgtgcgagtgtttacagtacaattttttaatatcaaaactgccgatattcaattctttactaatgaattgagagcatatattggaattaattcccatgttttcattacatttcttaagttatttgcaatggttttgtgcgagtgtttagagtatatttttttaatgtcgaaactgccgatattcaattctttactaatgaattgagagcatatattggaattaattcccatgttttcattacatttcttaagttatttgcaatggttttgtgcgagtgtttagagtataattttttaatgtcgaaactgccgatatcaattctttactaatgaattgagagcatatattggaattaattcccatgttttcattacatttcttaagttatttgcaatgattttgtgtgtttagagtataatttttttaagtcgaaactgctgatattcaattctttactaatgaattgagagcatttatttcattacgtttcttaagttatttgcaatgtttttgtgcgtgtatttagagtataattttttaatgtcgaaactgctgatattcaattcatcaccagtaaatagttttaactttctacttttgtatttccacttcagatgcctactatttgggtggttggttctttgttgccaattgttggtggagtggcattggcatcagttactgaggcctcttttaattggtaagtaattgtcatattgtcatttttaatttttccagatcatgtactttttggtatataattcgataagttttacttaccgtatataatgtagatggttcttgtctgactgatgttatttgtttattattcacttgtttaaagggctggattttggagtgcaatggcttccaatttgaccaatcaatctcgtaatgttcttagcaagaaggtcatgattaagaaagaggtaacgtaaacttccagattcatatacaattaaacaatttttttattttatttcatgcttttaacagtaaaattattgaacaggactccatggacaacattactctcttctcaataataactgtgatgtccttcttcttgctggcccctgcgactattttcatggagggtgtcaaattttcaccagcatacctacaagctgctgtaagtattttgctgtagcttaaacgtggtgactactgactggtgaagtgtgattaacgtttggttatatccaaaactaatttttctttatcacgtgttgtattcaatcacagggattagacgttaaactactatgcacgaggtcccttattgctgctctctgcttccatgcttatcagcaggtatatagacgttttcttcctatattaaactggaagatgtcactggtcttccatagaaatgaactcgtttgtcattttttttttcaatctaggacatgcggctgcctgtctgataggacttaacagtttttaataagttggtggaattgttctaatgtgtaactagataatagaacaattttgtgttttcttgctccactgacactttattgcacatactccttatgtcataatcgtaagctgaccctttatggattcaaccatgcaggtctcttatatgatattgcagagggtatcccctgtcactcactcagttggaaattgtgtgaagcgggtggtggtcattgtgagctctgttattttcttccaatcacccgtctcgttgatcaactcccttggtaaatagattgattttgatttttcggaaacatgttaaatgcaactgatttggatatggtttaaaagttcagttctggaagtttttctaaaacttgatctggtgcaggcactggggtggcgctctctggagttttcctctactcgagggtgaagcgcattaagccaaagcccaagactgcttgaaagtattccgtagaaattttgctgggtaccgttgatgagatgctagatgaaaaaactcccagattggctcgttgaacaaattgtttgtaggtcaggcaagaactgtgattgttttgtttttttttaatctttttggtgttacttttgttgttttattatcaggatacagtttcattcttttcgtgaaggtgagtaaatggtgggagtaaaaaaaataaaatttctgctgtcgtttttggggtcaaattgaaatgtatcaaatgtagtttaaattccaagcaattgtttttcttttcaacatgctaaaatcaattttcaaatggtatgtagagagatttatgttttgttttttatgcgagaaagttataggggtggcggggttaaattgtgtttcgacggcattactcgtagtgtgtagatgttcattcatttcaattcgcatgcactaagtgcaaattttatattttaaatttaaattcaattctcgcaaaagtattgattggataaattattttaattactttttaatatttattaaaaaatgttttttttc

SEQ ID NO: 271743 - DNA, 551 bp, Cannabis indica
tatctatttagaattgaggtattatataataacaataggatattaatattcataaataaattaataaaaacaagtaggatcaaaaccacaaaagattttaaattgtatttttgtagccggtgtggaaggtttgatgaaaaaaggggccagaaagactcaatcataggaacttaaatcacctacgcgctggtaaacgaaaatcacctcgaccggatcaaagtaaaaaacaatgtcgaattaggccgtcccttgccttgaaagaattcacacacagccaccaactttcccaaaatcaggggaaaacccttacataaatgagaaaatgaagattaattttctctagaaaacacaataggaaaagttatccatacattgtttgaattcaaaagtaaatgagaaaatgaagattaaaaataaatatatcaaaaagttttgggaaagaacatgatacctgagaaagtattatgctgtgtgcgagtttctattgtttcaagggtgactgattttttatattacctgtaaaaattgaatttatttatagaaattaatat

SEQ ID NO: 271744 - DNA, 612 bp, Cannabis indica
cgaaccacgccacgtactagtacaggtgaaactccgttctcagtggtatacgggatggaagcagttatcccgacggaaacgcaagtgcctactttgcgatccgaactaagtaacgaagacaacactttcctcggactacaagtcgctgacgacgtcgaggaaagaagggagtgcgccttgtcctgaatgcagaattactgttccgcggtggcaaagcaatacaataagaaagttaggcccaggaacttcctcccgtgagaactagttctaagaaaagtttttcagaatatcgaagaagcccgagcggggaagttatccaccaactgggaaggaccgtaccgagtgataagcccgacgggaaacggagcatacagactgtccaccatggacggggccgagatcacaagaagctggaatgcaaggtacctcaaaaaattctatgtataaactaaaagctaggaactccaaatttcacgataactgtcgtcgtactctctcttttaaataataaaaaaaggggcttcgaaaaaatatcaatcaagtcaaaaacgaaagggataaagaccttttacgaaaggcaataaaaagaccttttacgaaaggcaatacaaa

SEQ ID NO: 271745 - DNA, 754 bp, Cannabis indica
accagccaccttctttgtctgacttctttcagttggccatcgctaattattcagggccatctcttctaacagttcataggcctcgtttgcacttttcctcataaatgccccaccacctgtagcatctataagtgttgtagtattaccaatcaacccgttgtagaagttgtggaccagcatccacttctcaataccttgatgaggacacttcctgataagatccttgaacctctcccaagcctcatggagagattcattgtccatctaatagaaattattaatttctcctcgcagcttagcagactttgctggaggaaagaacttagacagaaactttgttgccaaatcaatccatgttgctatagaattcggtggcaaggagatcaaccaactcttgactcgctctctcagtgagaatggaaaaagtctcaagtggatggcatcatcactaactccattgatcttgaaagtctgacataaccccatgaagtttgacaagtgcagattggggtcttcagatgggagtccaccaaactggactgaagattgcaccatttagagtatggcaggctttatttcaaagttgttagcatcaacgggtggtcttatacaagactggaccccgtaagagttggaagaatgtagtctctcagactgcggccattagcttgatcttcaacgatacctccattattacaattgttgcctccattgttaccaccattagcattctcagccatgatttcttctgttt

SEQ ID NO: 271746 - DNA, 1027 bp, Cannabis indica
gtcaaaagacaagacggacaagagaaactaaaaactatgtcaaaagacaagactaacgggaaaacttaattagtttcaatacagaaactaaaaaactctaaccccataaaacattaattggaaataatctaaaaacaacaaataaataaaataagcaaataaaaacaaaactaaaaagagtagcttcctttgaacactctaaaaactacaaactattaagcaaacagtttataaaaacaaaatcaaaacttcagttggagaagtcggtcataagaaaaccgcaggaagaaattgcctgcgtctgtgaagaagacgtcaccaacggagatcacggcaccaacggagactagggaaaacgtgcaccaacggagattgctgagtggtcgctgcctccgtctgtgactgggaaacgtgcaccaatagagaggtcacggcatagttgcgattcctaacgaagcttcatgcgccgtcgcctgcgaagcctgagaatcaccgtcatccaaagaggggaagaccgaaaaccaccgtcgtctgtgaagggaagggccgtgcaccaacattgcctgcgatggaccctagagattagggtcgtgcgaagggaagggctgtgctgccgccgtcagggacggacctactcttaacaatgtgggggctatagcccccactaacaaaaatattgcctaaaattaaatgtattttttttaatttgataattataaactaaaataataaaaaagcccccacaaaattaaatatatctagtaagagtgattataatataagtataaatattttttaatgataaataagccctcacaaagtaaaaattctgggtccgtcactggtcgccgttcacagggctgagctaaagcgatggaaccctagagattatttattgacataattaaatgcatggagtaaggtttttataactactaaaaatcttattttcttagtactcaaaaagagatatgaattcctgacaaataaaaggaatagggacaaaagaaagagataccaattattt

SEQ ID NO: 271747 - DNA, 435 bp, Cannabis indica
ctttggttctgattctggtcagggttcgagtttgcgtccgggtccgggtctagctttgggtctgattcaaggtgtgggtttgagttcaggtccaagtctttgtccgagttttgtgtccaggtctggacgccgatctgggtctaggttcgggtccaggtccaacttggggtctcgagtgcgggtcaaagtttgggtctgggtcaagatctcggtccagatgtaggtccagcatttcgatcccagtctgggtcttggtccgagtcaaggtatgtatctggatccctatcttggtcgaagtctttgtttggtattgggtcccggatttaggtccaggtctgggtctcaatttcagtctgggtacatgatcgtgtccgggcccaagttccagtcccagtttgggtctgagggtaggtctgtgttcggttctacgtctgg

SEQ ID NO: 271748 - DNA, 808 bp, Cannabis indica
gtcatggggagtttatgagtatcttatacatgttacaggcactcaaaactttctcactcacatctggactatatcctaatgctaccaaaactgccctgtattgttgtaacatgaagcctgctgagcttaatcgtattatacagatatctggcttcagtagacaggaaatgcctttcacttacttagggataccaatctgtgggaaaaagatttcaggaaaggaatgtgatatcctagctgagagaatgactgctagaatcaaaacttggagttctaggaatctttcctttgctggaaggatcacattaataaactctgttcttattgctatacaagcatactggagtcaaatcatgatcctaccaaagaaagttctgagatctattgaagccatttgtagggctttcctttggaaagggaattctatgtttcaaggggctggttctgttgcttggcattccatttgtcaaccgaaggctggtggagggttaggaatcaaggacttggaaacttggaataaggctgcaataagtaagtatgtttgggcaatctcaaataaacaagagagtttatggcttaaatgggtccacagtgtctatataaagagtcaatcatgggagacctactctccttccatacattccagctggtattggaagaaaatggtggcattgaaagatcatatccgagacaaggtagattttgattcttttcataagcaaaaataccatgttgcagcaggttacaaaatgttctctcttcctataactagactgcattggagcaaagaggcttggtctagacttaa

SEQ ID NO: 271749 - DNA, 736 bp, Cannabis indica
tttttttttttttataaattattatttatattactaattatttaaaaaattataaaatatagggtctatctattgtagtattcgtagtgggacccaccatgatcggctgtcgcgtgccgcataggctgcttgattacgtggcacaattgcgaaatttcgagttggcacgtcactataaaaaattatttaattatttatagaaaaattaaaattaaaacctggtaaatattcagaagtggtcccttacaaatttttctttttattttcgaaatatatattacaatatatctttctctgttaccttttttttctctataaaaataaacaacccctgcttcgctaaacgaacctaaataagagcagagactctgaattgttgcctgctgctctttctctctctctctaagtatttttctctttctctctcttcattctcggttggttggtggcgattggtggtggtttttcgagctttgagatcttcagtgatttaacgaagattctgttgaggaagacgaagaagaaggactatttgacgtgaacttgtctggatatttgttctctttttttttttcattttcctgtctgtgtttgttttctcggaaaatagatcttgttttccattgttttctttggaagtttaatctggttcttaacgagtcagtgttggataatttctgttagatctgtttcactcgacgtgaaacttggaaaaacacatctgaagcgcgctctt

SEQ ID NO: 271750 - DNA, 721 bp, Cannabis indica
aaaagcttatttccccctatctctcagcactaagggaactctttaggaaatagctttaagaattatcaagctttttagggtttcttagcaaagtgttttcttgacagaaaacttctctctcacttctcaaatgagcactaaagacctccttttataatatgtataggtgatcacttagaattcaaatacacaatccatcatttttctcatataaatgagtattaatatagattgtaacaactatatttcataacatttgaattctatcatcaattttgtaacaacccttttatcacactaataatgtgttatcaatgagttacaagtgataacaaattgtaactcttctctaagttactatgtaggttacaaaagtataaattaaaattataggctatacatttatttactatacacttaatatatattattaacacaataataatatagggatatgattttgtcccgtgatgtactttcacggaatatattccgtggtacattagatggatctcatggtacattaaatgagtctcggggtacgtttctactttttaaccctaattacccctagatcaatctcaaccgtcagatcaaataactccctcatctgacggttcccgtacaccacggattacaatccgtgaaagtacaataacggaacaaaatcatatcccatataatatatattaccacattttaatctacatattattatatt

SEQ ID NO: 271751 - DNA, 1088 bp, Cannabis indica
acactacaacttctgcttgactgacgttaaaactctctacaatatctacttaaataactgaataatctccatacaaaaatatccaatataaaatatcagtgaatattttaataaaaaaaaaaaaagaaaaaaaaaacattccaaattttcaaatgaaactctacttttattaaagaaattaaaattatttatgtatatttatatatataaaaaaacttttttataaagtactcttggatttgatgaacctgtcaatattacaacttattacttatacaaacaaaattaactaaacaaaacataatacaacacaacaaatcattaaaaacaataacaatactatacatgtacttgtaagtagctagtgacaatgaacaacaccgaccatcaataatagtaatagttgagatattgaagatcagagacaatgatgagaaagggttcaatcactactctgccaaatgaccattaaaaaaaaaacacaagaagaagaagaggggttgggaaaagactagttcctactccaattttttgggattgggtatctattgcagcatccacatttaatttcaaatatcctataagctttagtctttgaagaaatagagacgactttccaacccatataaatatcacatacaaaacaaaatcacaaaaatatcaataaaacataaattatctattaattatttaaatctttctaaaaaagaagaaagaaaaccataaattattaaaactaaacaaaactcgataagcctctgatttatactaggggtgtacaaaaattttcgtaaactgtccaacccgaataacccgcccaaatcaaatcgacaaaaccgataaaaaatacaaaccgacataactcgacaaaattctaaaccgcccaatgaattatttgggcgggttgaaaattgacccgaactgcccaattaaaccgcccaacccgatttttacttttttttttaaaattttatatatattatataatatatataatatataatatatattaaaaaaagtacccaattcctaaaattctttctcagtctctcaaaaaaaatactttctcacatatattgtgtatttat

SEQ ID NO: 271752 - DNA, 638 bp, Cannabis indica
ttttccggcaacaatgctaattcccacaaatttttcggcaccggaagcaactccgatgactttttcggcacccaccgctactccgacaacttttccggcactggcagcaaactccggtgactttttcggcatcaatgacaaataaaacttcctaaacaaataaaaacattaaatatgagatttgaaaacctaattacatatatatggcatatcaaataccataaaaagacctaaaaacaaaaaaataccatataaattggtcaaacttaaatgtgccatatttatcataaaaacttttaaaatcccatagtaagtgtaatttcctcttttgtaaacgatgtattaaactttaaacgaaaacacatgaaaaacaaatattatcgtatttaatctatacatatttatatatatattttaaaaaaattatagagagtttctacgatatatccccataataatacactttttatttgtttagatttagatatttaaaagaattttctagtccaatttttttttttcatatttatgaacgttatatttatttaagatatcttacaaaaaagttttaactcttctaaccggttgtgtgcctttttggtctattgcggttaagtcattttaactacctatttttt

SEQ ID NO: 271753 - DNA, 649 bp, Cannabis indica
aaaactcttctccattacagtccgaacctcccatttccacttcaatgaaaactcttctccattacagtccaaacctcccatttctactcacaaccttgatgtcattgatattcctaaatcctcgacatctcatagacctttaagacatactaagaaaccatcttaccttcaagattaccactgttttctctctactaacagtgtttaatctcatgtccccaagtgctcaactactcattctatttctgacattattgattatagtaggttgtcaccaaaattttgagctactgtgatagcaatctccagtcattttgagccagaattttttcatcaagcaagaggcatccctgtttgggataaagctatggacaaagaaattgcagcccttgaatctaatggtacttggatcattgttagtctccatgctggtcaccatgctataggatgtaaatgggtgtataagattaaatataatgcaaatggatccattgaaaggttcaaggcaagacttgttgccaaagggttcagtcaacaagagggtgttgattacaatgagacatttgctcctgtgaccaagcttgttatcgtcaaactcatccttgccatggctgcttttcaagggtagtttcttcaccaactggatgtt

SEQ ID NO: 271754 - DNA, 642 bp, Cannabis indica
ggggccccgatccgatggggcagccccgccccggtacaatcgaatatctaatcgggttttcgccccgccccgccccgccccggtcagattttttcggatcggggctgacccgccccatttgccacctcaatttcagcgtatgcttatgtataataccagccctattgaggtaacatcatcacaacttaaattaattaaaatatacatattacataatataatatcagtaataatttggagcagatagttgtacatgtattatatactttagaaaattatcagataaaaaaactaatacatcattgtatatacgatttgtcaatttgtacctaaaaaatcctgaccaaaaaaagtttgcacctaaaatgtgtcgagcatatcaacttttgaatattaccatttaaaaacaaaatcatgatttgacccaataattaaagataaattaacaaaatatatgctatagcctatagtgaattttgttgcatgcaatgcattactaaatatctatataaagccaacatatctttttttttccatcgatttatatggtgaaaagtaatttttaaatttactcggttagtaaaaaaagtttattaaggaatataaaaaaaaaaataagagaatatatatttttattaaaaa

SEQ ID NO: 271755 - DNA, 620 bp, Cannabis indica
tctctaatggtggattgaaaattggtgtgaattgctgagttttgttgattgggattgatctattatgatatttacaggtgttctggaagttattgtgaagtttggggttgatttgaattaaggggaagattttttgggttcccagctcagaaccggaattccggttcctggggccctgttgcaaccggtcgaccggttggtcccaggaaccggacttccggttgggaaccggcctgccggttggggctttttcccgagccctagcttttcccgtttttaagtaatttagggtagtgacatcctttttatcgatagggttaagcttagtttgtattttaatccccgataagtgttttagcgagtctctcatcagtttttgaacatatttgtttagggccctgtaaaaacgtcgagttgcacttccactcaggccaaacttatccttcctcaccacggagatgaccgcgccgatctcgatgttgggggcttagtcaccacggagaattgtaggaaggccaaacttatccttcctcaccaatccgtggaggactccaacctctcgcgggtcatttgtcccaatgtgagggcgccggttgcggagaaggccttccgggatgagc

SEQ ID NO: 271756 - DNA, 520 bp, Cannabis indica
ccccatcacatgtaagatgcacagctggattcattgtagcactacaaggttttgctcccaattttcctatttcagttaacaaatcaagtacatacttcctttgagacagaaaaataccttgtttactccgagtaacttcaactcctaagaattacttgagcacccctaaatccttcgtgtgaagcagggtattaatgaaagacttaagagatgagatgcttttagtatcatatccagtaataacgatgtcatccacatacacatcgaacgaaatgattccaacagttgatcttttaacacacagaatgatttgacttacgtttcaacaaaccgaatttctcaacagcctgactaaatttaccaaaccaagcaagaggactttgtttcaatccatataaagatttgcaaagacgacaaacttgccccaactccccgtgagcaacaaacctaggaggttgctccatatatacttcttcctcaagatctccatgaaaaaaaagcatttttaatatcaagctga

SEQ ID NO: 271757 - DNA, 566 bp, Cannabis indica
tatatatatatattgatttcaaaaatagattacaacatttttgatgttttttgttttctagtttttaaaacctcagttttcaaaaaattatttttgaaagatttggtcaaacaccatctattggtttttaaaagggtaaatagcggcataagtaccaaagttttatgtttgtaagcggcataaattcagtgtttatttttagcaacataagtacccaatatttgtaaaactgtaattttcttctaatttcgtatgtacagactttgttattgtcttaaatatgacacatataaggcctaaattcttgattattggttctagatagaaatatatcatttacttctaaatgttcttttaataaatttaaaacaaagtttgtaaattggaataaaattacagttttacaaatattgggtacttatgccgcttacaaacataaaactttgggtacttaagccgctatttaccctttttaaaaattattttttgtttttaatttaagttacaaagccaaataaatccagtttttttttttttaaaactattcctgagttaaactccaatct

SEQ ID NO: 271758 - DNA, 501 bp, Cannabis indica
aatcacacaatttcactttgaaaactcaagcttttttaacaagaaatctatccaactagagcaagaataactagcatgcaattcaacctaattaaacatacttaaatcaacatttttaaacatggaaacaacaacaacaattaacagcagcaacatcatcaaaaatcatccatgcatttactcatctttttccatcaaaattttcaagaaaaacttaaaagggaagctagagaaaacataccaacaacaagaggttaaaatacgtatccaaaaaaccagctttgaaaattcaagaggaaatcctctttttcccttgctgctcaaaatggccgaatagagagaggaaaacgagagagcttttctcttttaaaaatttgtaattttttctaagttttgaaaaatgagagaaatgccacctaacccacctatttcagccaaaacttaataaaataaaacacatattactcaattattaagccacaaaaagacaaaactaacaat

SEQ ID NO: 271759 - DNA, 663 bp, Cannabis indica
caacgacaacgagtcattttttataagcaataagtgatttacaacaagaaatatatgataaagcaatgtaaagacacatgaattttatagaggttcagctccgagcagttcggtaatagcctaatcctcgttatttgtattgacttaagatcaaggagaaagattccttttcttatagctcttacaacaatatctctgaatgtataattcttagataatatatttaggatatagtcttagctcaactgcttttctgacctcttgcgcagtgaacatacatcactatttatagggctagtaagcttggggaggaagagtttcccctctcgttacaatgcgtataaacagaaagattgtgggatcaatgctgaatacaaggatcgtgggattgaggttgaatacaccgatagtgggatcgtgtgtatgccatatccacgtatccgcccagaagaagataattgacctaactaaggatctcaaggtagctggccgttttgaggagaccatcgagaccttatttgccgaagttaacagtcttcaggatgagaggacttctcttcgaacagttattcatcgaatgaaggaggagaaggaagcctaggaggaggagctttcgaccgaggtggcaaggttgaaagagaaggtcaatgccttggagacagc

SEQ ID NO: 271760 - DNA, 1897 bp, Cannabis indica
caattatggagttgactaaactttttaattatgtgtagtgaatattggacggtgataatcattcaggctgctactcagtgagtggcacttcttgacccaaagaatatgccaattcagaatgaaattaaaaaatgtgtcacaacaaaagttgtatcatttttttttcattaatttaatttttgttactaatttggtcactaagtaacttctctttagtgtagttcctaaaagattcaaaaaaatatacgaaacagggttgaggtaaagatcagacaatacaagtgtcgaggacaaccggacgattcacagtgtggatattactgcatgaagattattaaaagcttcatgactcagcacaatccagcaacttttttgaagaatgaggtaattaaacatatatgatttttatttgataattactttttattttaaatacatttaatattatctatctctcgttgtatagttcaaaaatgacaagcattgcatcaattaggagataaacgaaatacgggatgaatgaggaagttttgtgaaatcttatatattaaaagaatgagtatgcgagtttttacattttgttatgatacatgtaggatataaaaacttttaactatatgattgttacttttggtgtatacttagttttattgatatacttcatagttatataattttttatggctaacttaggaatttttccccctgaactttgacatgtaccaaatcatgccccctgaactttttggtcgtcaaaaataccccctaaactattgatattgctagatttaaggacttttgtcaaagttcgagggtaaaaaattcctaattagccttattttttattatgacatgtaggatacaatttttatgatcattacttttgatttttattagatgtacttgaaagtttataattttcttgattacatgaaaaatcttatcattattatattataaatattattgttagtcatataaatattattttttataagatataaatattattataaatattgttatcaaagacaattttaatatctgaaaatgcaggtgaggaaaattgcaaaaaaaaatctgcaattttcccctacctacagctatgcgtcattttatagccgacacaaaaagtaaaaaaaaaattgcgtaaaattatgtgtcaagttgtgcaacgcaatataaattagcttcggttacaatttgaagctaaatttcttgcttcattcaagaactaatgctaatagagcatactttttgcttcagctctcaactgaagcaaaaaacagtttgcgtcggtttagaaatgaagcaaataatttgactatttgcgtttgctgttattacgtcagtttagacaaccgacacaaaatatttttgtgtcattttacaactgaagcaaaaagttatttttgtagtagtgtgaggtgtcgttgtatatagtcattttgtaaaactttctataatagggatcccaagaacacctttttattgttgttataatgttcattttcagtgttttattttagtcaagtttttaatattctcacagtttttaataattaattaatatactagtattatactagttgataaaatcacacacatggcgtccctatggaatagggcgttacagcctagaacctgtatggaactctaccttttagcttgggacctgccaagaacgcttccttgccttagcccggtatgtggctcctataggaactctgtccattcttctgtacagttcttgtggggccttggccttatgcattttgagccaatttttcattcatattcggtcccaaggctttcgtgttctttcttttggcctataggcactatgtttttgaacactactattgtttagccttaaagccttttactatggacatat

SEQ ID NO: 271761 - DNA, 696 bp, Cannabis indica
aatatattaattaaaatttaataaaaaaaatattaaaaataacataaatataaaaaatataatatttattaattatgacttaaatttaaattactttttattttgttatgtgatatatttgtattataatatttagtatattattagaataaaattttaacaaactaaaattatattttacatttatatcacttatttgcatagggtgcctacacaacacatgtttttatatttaattctctagacttaactttgtttgttttttctttttctttcattgatgaagttttggattacttgtgatgatagggaaagataccctaacaacatgaccctaatagatatgtccatgcgtggaatcatatatcgaaatatatattttcgaaatgagtatttgaactgtttacaaaaaaaaaaaaaaagaatatttgaaagatattatattatgtagttacattattgctcaatttactatatgtacattatgcatcataagtctacagaccgaacacaaaagaagtactattgctgcagtttacgaaaatattaaaataatgataacactaatccaacagaagctttcattgatttaacacatgtatagggatcctatatatatataaatatatatacttaagtatattgttacatgcgatccacgtatgcagtgacgaagtcagaaatttagttgagtga

SEQ ID NO: 271762 - DNA, 933 bp, Cannabis indica
taattaaatataattaattaaatttttttaaaaataaaatttaatacttttgccggcgcaatagtgcgccggtaaaaggaggcaaaaacaattggcgccaacagtcagattggcgccaatagttttgccggcgcactattgcgccggcaaaacctaatcatagcaggttcaaggcggataagggcattttttaacaccggcgcttatttttcaccggcgttattcctcgccggtaaaacttcaaaaggaagttttaccggcgcagttactatacgcgccggtaaaaagtcttttaccgaccaagtttcccagataagttttgccggcgcagtcagggtacttttgccggcgcaacaatgcgccggcaaaagctgattttcttgtagtggtagtagtctaattaataacacatgcaaagttaattattagtggtacttcatttttatgatattatttataatttatatcttgttaatgatgttacttataattccatcaaaatcaaacatgaaaattttacagtttacacgtcattgttgaagagaaaaggaatgatcaatatatttataaattgatctgccttgtatgctatgctatgcttaattatattacaatatatcattgtatttgtatataattttaatctacatgtaattcatgtaattcttacgtcaagtaaacaagcttataaatctgtttaattattagttctcaaactataaatgcataaaaaaaaccagttaaagcataataatatgatctaaaaaagaaaagcaaaataatattaatcatgagtacttgatcacttatcaattcttcttctctctattttcatatatatgaactaagacatgcatttattatttatagacaaattagcttattatttgtcggccaacgaagtggcacatcgtatagctaagcatatttttt

SEQ ID NO: 271763 - DNA, 1293 bp, Cannabis indica
cgcctatggtagttagggtgttacagaattggtaactagctttaccagaatacaaaaatagactaagtgatatttcaacctgggcggtaggatgttaaccttggcgtggggtcatgaactgccttcacaaaaatggtcataactcactcaatattgatctaattgacgtaatttaacttgaatttcaaagatattttaattctctatatagtcatgtctcacacttcaattgcaattatgaagctattggccccaaattttacaaaaataagctccgagttacccacagtaggtcccgctgggctctgaaaaattggtatcaccatcggaagctaattttcactttatatcatcatatacagtcaaaaatatctaatttttatatttctccttttattgttggcctccttaacctataaaaggatagctcccttagctcattttttatattcagaaagctacccacaatgttagagtctctctctagtttctgtctctagaaattggagcttttgagacttagcctttatttgtaataatgtgaaatacctacaactatttcccataggtgtaatgagggaaatacttgcacaagataggtggttcgtatagcttccatcaacgtgcaagttccaagttgacttttcttgatcttacttcttctcttgctctcgcttcttctcttgttctcacttcttctctagctcttgattttaggtgattttatattgaccaagttttattgcccacttgaggtactggctagatgcttcaggcttttgcattacttatcaaaatggttggtcagtgtacactcttattggatgggcttgaaagtaaggtcttagctttctcaaagctaggaggaattagtatgtcagtttttcaataagtgggtattgactttcgaccttctgtaggctgcaagcggtctgggttgctggttatcttgccagggtcttatcaatacttgtgtatctctttattttctcttgacttggaaggttcacggaatgtacctgttcggttgtaattgtttttaccacatgtctgctgtttttggctatgtggaggtgctaagtcaggtggacaaaaattaggagagcatgtatatttatatcttttactaatcatttacctcttcctttaaagctttaaattcaaaagtctcctaatttctctaggattagagattgaactcatctataaataatagagttttttcgtcaaatttttcatttctccactttgttctccatgcccaagcctaagaaaaagccttggaatttcatc

SEQ ID NO: 271764 - DNA, 1456 bp, Cannabis indica
tgagggagtacgagacataaatcgtcgacagaggcttattgaaattggtaaggaaattgtactcaaccagtgtgaaggggttcctctagtactggaaaatttagggaacctattgtactcagattcgaatgagcaaagttggaatcgaattaaagaaagtaagatatgggaattacaaggtctcatgactaaagtttctgctacacttctactaagttatcatgatttgtcattcgacttaaagcggtgttttctttgttgttcacttttcgaaaggagaaaggaaatttgtagtttggaactgattcagctttggatggcacattgagttcttccaattgatgaaagcaaatgtttagaagatattggacatgaagtttttaataagcttcgtttgaaatctttcttcaaaaatgtaatcaaccatggatggtattatacattccatatggatgatatcatccatcagtttgcattatctgttgcgaaaaatgagtacctcatgctgaaaacatctgttgatgaatcagaagttccaaacacacttcgacatctagcaatcaggccagatggaattccaactgatcgagaacttgacaacgatgatgatgatgatgataatagctgccatggagttgaagttcccttcaccaagatgaaaagtgttcgaaccattattttcccaggactatcatcgaaaccttcaatcaatttcttcttcaacaaacagctgatcaagaattatgtcaacctccgaatgttagacctgagtaaatcatctttcgaaacgttgcctagttacatcggtggaatgaagcgtttaaggagcctcaacctgtcatggaattgtaaactcaccaaacttcctgattccatctgcaagctgcaaagtctgcaatctttacagcttcaagggtgtaccgagcttgaaggtcttccaaagaacattaagaatctaagggaaaatctcatatttctttccataactaccaaagaagaactctttgatcatgacaatggaatccaatacttgacttctcttcgaacactaatgattgatgagtgccacaagctgcagttgttatccgataaagtaatagaatcccttacagcattgaagactcttgtgattagtaactgcaagaagcttttgttttatgaaaaaccaaagatcagtcctaccataagacttcaaagactgaaactctccaacttaccaaaagcaaagatttttccctcatggattgaaggatgtaaacagagtttacaatacttgtggctctctggctgttctaacttatcaataacagaattgcagctacagtggctatcaaagagaaagtcttttatggaaattcagatcactgactgcccacagcttctgtcattattacctgatgaaatgcatggtgacgacattgttgtaagaatatttggtacttcgactgaggatcaa

SEQ ID NO: 271765 - DNA, 672 bp, Cannabis indica
ctacaaaatgctgtcagcctatactctataagaagaaatcaacccttcaaggtaaagagatcctccaaacttgactataagctagtttgcatcgatgaaaattgtaaatggagtttcttggcatcaaaacatggaaaaacaaacatgttcaaaatcagaaagattcagcattctcatacatgctcaatagatgtcacatctgtagaccatcctaatgcaacaagcaacctgattggtagtgtaataagaaccaaatttgtaaagccaaagagagactacacaccaaatgaaatagtggatgacatggcagatgactattgtgtctccatatcttaccaaaaagcatggagggctagagaaaaagctattgtagatgcaagatgctgtccacacgaatcgtactctgaaataccaagaatcttatacatgatggaaaaatgcaacccaggtactacttgacaaccctaaaaccaagttttccaaacaaaattataaaatataatatactaaatggtttattgaattacaggaacaatcacagaccttgtcacagacgaaaatggccacttcaaatacctatacttcgcaataggtgcttccaataatagtcaacatggtgcatcattattaatagctagtgcacaaaaatgcaaatagacacatatttccact

SEQ ID NO: 271766 - DNA, 568 bp, Cannabis indica
aaagtgttaccaaacggcaactaaacttagtatttatctattttcaaaaaaaacttagtatttatctaagcttttatttacttatttgttttcaatttcaagtaatcattttaatcattttcagtcaatctgaattttgtttgctctggccttcttcctcgatcgccactcactcttccgccggccataaccgaaccagtgcttcatgttgctgcccttctgagaaaaggtttttttttctttcaaaggttgataaagatcattctttttacaattgttatgaaatttcagtttcatcgagtttgaattttaattttgcgggttaaagttaggttttttataattttcccttattgcactttctgctaatttcattgtctctttgtatgatttttggttgagctatttcaattctcttactttttcctcttcttgagctgcccttattttgttcttatgccttttctaactttaagttcaaatagaattgttggttggttcttctgtcatttgcaacttgttttaacacattggtttaagtctttttatatgggttttgtatgttttt

SEQ ID NO: 271767 - DNA, 1959 bp, Cannabis indica
tgtccacaagcaaaatatacaaacaaataatgcccttgttcaaactgtattatatagtatttaaacaatctaaagcaataattagtttaggaagcttggcatcagccgccactttaacaaccctgttgatagcccacaattcaacagcaaaggggcttcagataagagtcctacaaaaaataaaacacttaatttggtgatgcctgttaacaactaattttgttgtgttattttttttgttagttgttagttaaaagatagttagtcgttactttttgttttacttactatgtgtaacagactctcagtataattaaaggcagggtctaatccttaattagcttttgctgtgctaatcatgattagtacaattttttttctctgtttttcttgctctattttcgttctgtttgtgttcttacatgtatcattcatccatgtcgtcttctatggctgatcctgcttctgcaacaatggctcatgccacgattcccactgctcctcctgctcctcccactcaatcatggaatccattttccaattccctcacatcctctctcactctcaaactcaatcgactcaattttctttcttagaaatcccgtcgttccagtcgtgataggccacgatcttgatgaaattctcttcactggagttcccccaccccaaaatcttatcaatggtgcccagaacccagggtatgctcaatggagaagaaaggatcaactcctcctttcctagttgcgatcatcgatgactgaatctattcttgcatctgttgccaactataataactcctttgttgtgtggcatgctctggaacaaaagtttgctagttaaaccaaggcacgacttcttcaacttaaaggccaattctctaatattcaaaagggaagtctttctatttctgaatatgttgataaaatttaatccatttatgatgctttaagtgttgttggttcacctgtcaataatcaagatttgattttacaactcttaaatggtcttagaccagactttgattctgttgtctcgaagattacatcaagaagtgatgcctagacaattgaggaagttcaagctatgcttctttctcatgaaagccgacttgaacatcatcaatccatgacaaatctttcgataaagatgtaggctaatcttacccttggcaatggcagatttggtggtgttcgaccatatgccaactccaagaacaatcaacctgatgttccccaatcctcaacaggtcgaggtagcagttatcctcaatacaatcctcaaagggtgatttgtcaagtgtatttcagatctggccatactgcaccagtatgtcattgtctctttgacaagaattgggtggttcctcaaaccaacccatatgcaacaagggcacaccttacagaggtcaattttgagtatgattcacaagcctactcaatcaccttggttcaagaatttaatgatgattgctgatggtatgctgatactagagctattgctcatgtcactttcgatgccacgaatcttgacagtcaacacgcctacaccggaactgaaaccttagccgtgggtgttgataaaaagctcttaatttctcatgttggtcattgtacaatttaatcttataatccctcatgccctcttcaattacaattttgtgttataagtgccctcaataactaagaaccttgtgagtgtgtctaagcttgttgatgataatgacatctttcttgaatttcacaaaaactgttgttttgttaaggacaagcaaacaggagcacctctcaaaggaaagtgtaaagatggcttgtatatgctaagtgaaggaccagtggcatccaattcatttctgcaatgtcaccttactactgcttctagttcagttcagactacctattgtaataatcaatctataaactgtactgacaacaatgatgttattcactataatcattccaa

SEQ ID NO: 271768 - DNA, 603 bp, Cannabis indica
aaaccaagaatgttaaaccaagaaataccgttagatagacacttttaatatataaagatatatacaattaatattttaatgtaaaaaataatttaaaaatctgatacatataatacaaatatattttaaaacttactatatcaaatgtatattcccattttatttataagaaaattttaatttaaaacaaaattaaacaattctttatacatacatttttttttcttcttttgaatttgttattttttattgtatttattttaatttgttgttgtagacataaggcaacaataatttattttattttgtgattagtcatgtgaaaaaaaaaattaatgaatattaaataatttaatattaaaaaataatcaattaaattcactcttttgcaaatttgattggattagatttgaattattatacagattaaatttgatccaaaatacgaaattcgcactatgaacaagcactatgaacaaagtagtgcatactgatttgaattagcaccctagtagcaaaatgtagttaaggaattggataattggtaacaaaactcttttagatttttatacatttcacccccaatatttttattttattttt

SEQ ID NO: 271769 - DNA, 776 bp, Cannabis indica
atctcgagccaatagcacagccaagtaatatggaagaaaaactgacctggaagctacatgtggatgggtcggcaatagatcaactatctggtgcaggaattgcccttgtcacacctggggggcaacacctgcacgcaacggttaaattcagattcaaagcctctaacaacgaagccgaatatgaggccctaatcgctggacttaaactagcgaaggaaatgaaggccgaacacattgagatctgaagtgattcacagcttgtggtaaatcatgtatcaagcgaatacgaggctcgtggagaaaaaatgatagcatatctgagcaaaatacatgatctgctcgcacaattcaaaagctacagcctcagacgaattctaagggaagaaaatacgacggcagatgcgttagctcgattggtgagcaacagtataagtgacaaggcaaacctggtccctatccagttccttgaagagcctagcatcactggcacggaagaaatcgaaatgatcgacacatctccaaactggatgacaccaatagcagcctatctcaactctagggaactcccaaataactgaaatgaagctcggaagatgagaagaaaggcaacatagtagatcatagtagaaggggtcatgtatagaagaggattctcgatgccattactcagatgtgtcacaccagaagaagctgcacgacttctatatgaagttcatgacggattttgtggaaatcatgcagccggacagagcttatgaaagaaaattctaaggcaa

SEQ ID NO: 271770 - DNA, 986 bp, Cannabis indica
gggacatggtgtctcaaattcacgacgtcaccaccatgacctgggaaaggttccaggaactcttcttcttcctcctctttcacatactcttttttttggtttacctactacaaaaggagagggttagcttttatttgagtaatattgtagacttggaaaaaaaaaagaaaaaaaaatgaagaagaagatgaacaggagagatagagagagctcaaatacaataataaataaataatgtgagtgttttatgatttgctcaagaggactatatatatataaatacatatagactctcttggaatgggagatcacgtgggcttgcctaatttttttttaaaaaaaacaaatattttaaagaaaaaagtatcacttttagcaattaaatcaaaactttttaaatttttatatatatatgtatatatatttgaaaattagcgtagtaatgcattaaataaagaacataactagacctcacggtcattacagagcaggttctcgggcaaggaggagaccggaatacatccatacttctggtgggtaaacgctcacttagccacattatgggcaacatagttacattgtctactaatattcataaagttacaactaataaaaggagtggatctcatacaaaaggagacatagttctcaagtgcccaatgggactccttcccattgagagcattgatagctagtctcgagtcactctcaataataataaaatttaaacctaagtcaattgccacagaaatggctgaacaacaggtcactgcttctccgcataaagcatccgaaaagtccaactgagtcgtgtggatccgaatcacctcacccaggttatatatatacatatacataacgtgagttattgcctaaaaaaaaaaaaaacagtacacagtataaaaaaaatagtaaaaaagtaattttttccgtacaatagtaaattgaaaaaaaataagaaaaaagagtatgaggtgtaaatttcc

SEQ ID NO: 271771 - DNA, 521 bp, Cannabis indica
aatagacaagcaattgattaagtgaaccaaaacatacacaagtgaatgaaaaattacttctgttactttattgatattgaataatctggttctatctcggtttggttagctgcgtttctcctttcaccttttcttatctttcaggtttgagcttcccagtttttttctttattttgtttctctctgttccttttctgcttctgcttctctggcattaattaccccctcatttttcttgcttccgaagatccctctttgtttcctgtttggcctcattaattactcacccctgacctttgatttaatagcctaatacgtcaccctaatcattatgtatctccccctaatttctcgagctcagtcgttgtttaatgctatttctctctcacacctgcatttaattatggcggctctatctcttcagcatttaatttctctgcacaaactatactcatttcgatcctcagctcgatctcatacaaataaaccaaccgtcacttggttgctcttcgtctcatacc

SEQ ID NO: 271772 - DNA, 771 bp, Cannabis indica
acttaatatatctatcttattttttttttcaaatgaaggatccttctctattgcattttgatttctaaaatccattgttgtatttaaaggattttattttatcttttcaaattatgcatttaaaatggtatttttgtaaagtaaggtaaaatatcgaggcgtcacacaacattgatgaattacctcgcaataaacagtcagtgatgcattgtctcgtatcacacagtagcaatgcatcttctcgtaatacacagtcagcaatatgctgcctcatattaaataacagtaatgcatcatctcgtacacacaacaatacatctgctgataaataacatggtctaaccaagtcaaagatcacttgaaagactacttctttgtatattaaatatacacaattatttatacttttctaatgttcagttatatgtgaaacatgagcattaaacaccatcaattgtaacttttcactaagataaggttgagtaactaccatcctattcctataaataagggttgacttgaaggaaaaaattaggagaaattctgagttacagaaactttgccaaattataaacacaaccaaaattcataaataatattgaatcgtagagtatgtagatttaactacaaaactacgtaaaaatatagtgttcgtttattatttttgtctcttcttttctcgattttattcttgaattaataatctgcttagattaagttgatgaaaaattgtatcaacagtttagtactttcattgagagaaggaagttt

SEQ ID NO: 271773 - DNA, 827 bp, Cannabis indica
gttctttttaaacattctaatgcatacttacattgccattttgaatagtagctcaaatatatttttttcactgatctggattataaacatgtcatgtctttccactggaagaactgttggaaaaatatggaaatgaagagaagaacccttttgtgggttgcatttaatcattgaaatatgtcaatcagtctctctttatcttattaaatatactttcctttttaaatgataatattcatcttgccagagaccttatgtcttttttaactaccttattgcttattttttcataattgtgtcttcttctatgcttctcattaagccttttcttttaatgaaaaactaaaggttgtttcagtagtcttggagaattttggtgatcttcaaaaaaagtcagatgccttaaccagtgataacaaagatttcagcagtgaatgttcagaaggggattcttatacaccagttgccatgacaaggatttcttcctggaggatgatagtgagtgacaaaggcggacttaatgtgtctatgtaattccgctgatcacaacatgtagtatctagttatgcacccctctgcttgagattgtgtatgatatttgtccttgtatttcaataatagggaggatgccaagaatccaagattttggtcaagggtatgcctacataacattgcaaagttagccaaggaagctacaactgtacggcgagttttggactctttgtttcgctactttgacaatggcaatctctggtctccttctagtgggctcgctctttcggtgttactggatatgcagttaataactgaaagtttgggtaagtgat

SEQ ID NO: 271774 - DNA, 965 bp, Cannabis indica
ctctctctctcttctaaaccgaagccacatagtgaaagagtgagtgcccacacacatcagagagtggaaggagattcagactcaaatcttagtgatactctgctagagaaaggatacaagggttagagatctgagtggaatgagacattatattccgctgtaaccattgtaagatttcttatactttatatgtatttatttcataccattttagaagttcatatttaggatgttaataacatacttgttagtaaatctaagatcctcgtataataattctaacaataacatgcgtcaattaagcaccccacgatggaagaactacataccaaatcaacggtcaaatggtcttattatcccaatttttgcactctaacgtagcatcacatgaatggtgacatgtggaatccacttggagcatctgttcgggaagcatagtccgagcaggatgtctcgctagcatgcccagagcaaagttttcagcaatccgcgcagagcaaccaacacttagcgaattcagctttcgcatcatgagtcatcaacgaaatccctataactcagggataaaactacagggatatggcatacacacgatcccacgatcaatgtattcagcatcaatcccacgatctttgtatcagcattaatcccacgatctttctgtttatacacattgtaacgagaggggaaactcttcctctccaagcttactagccctataaatagtgatgcatgttcactgggcaaggggtcgcaaacagtttagctgagacgataccataaatatattatctaagaaatatatattcagagatactgttgtaagagctataagaaaatgaatctttctccttgttcttaagtcaatacaagtaacgaggattaggctattaccgaactgctcggggctgaacctctataaaattcatatgtctttatattgctttattatatatcgattgcta

SEQ ID NO: 271775 - DNA, 828 bp, Cannabis indica
gagtttcagatgactagcagttccctcctagaagggagttccgaatagttgactccagttgttgtctttcctatccgggaagtcccttccacgtacgccttagtctttcttctaggaagcgttcgtctcatccggaagcacttcttcttgtgctgatgtggagatattgttacgaggagtgtgttaagttttttaagtcgtaactaacttaacaacttagctttgagtagccaccgtctttaggatctattttttgcatctataaataccaccgatacttacctttctagggtttattttttaccagactagtaataagaggtgatcttgagagagaaagattgagaggtagagagagtggtacagagaaaaaagagagattggaatcttctgtagatgaagaagatattcttggataagagtgtgatagaaaacactttgagagaactcagcatagaatcgatctcgattgtattgtgccctgttcttgctcaatcaatatagaatatttggtggtatttcagaactggagtagagccatagatcacatcgatctataggacttgaaccagtatatatcttggtgttgattctattattttattattttattgtttctgttcttttagtactctattcatccctgttttaagctctgattatcgtgtctgatttgttaatcttgtcattgttaattatttattgattaagttttagataatttaattctgcactttagttataattttttcacagtaggaattatcatggttccaatgaatcaaagttcaggtttcgttgcttaagacgatgtggaaaaagaaaaaa

SEQ ID NO: 271776 - DNA, 527 bp, Cannabis indica
tcacatattaaattacataataacataattccacaataatacatagtttactagttagggttttgctaatccattttcttaattctagggtattacactttagttgtttcataacaatcgaaaacataagtctaagaaaccctaatttcatatctaaaatcctcatttcttctttctttaccagctatctctcaacaaaaaaattactgccagtgctcctaaatatctattttctccatacactatcgtttctcctcatttttcttttgaatcctctagtttccttacccaaaaatacatatgcactataaaaaaattaatttattttaggatttgagggcaaacatgacatttaggccgatagttttttaagttttttggacaacaacggaagattatggcatcgatgttgaggattttgatattgtcttttaacttgtattgaagtataaattactttaatatatgtcttttagcttacattgcatttttttttgtatttttttttaatccaaaaataatattgt

SEQ ID NO: 271777 - DNA, 1726 bp, Cannabis indica
tgcttatagtaagtgattgtgtcttaagttctcagtgagaagtataaagagaaggaaaaaaaagtgtgagtttgaaactgacctcatcaattccatctgtatctgaaacatccagaaagcctttgataagagagttgaatattacaagatttggatgcactccaagctccttcattctatacataaaattcaaggcatcttccatgtttccttctttacaatatccatttattatgatgccacatgttcgttcattggggcgaaccctgtatttttgcatctccaagatcatcatttcagctctaaatgtctccccattctcagcataagctcttgctaaggtgttataagtgacaacatcaggttgtattccagatgcaaccattttatacaccacattccatgcttcatctatattattcttgttacaccatgccctaataataatattataggttctgtcattgggttttacatttccatactttgacataatctctagcagttttagagattcttcaggcttaccagcaatactatatcctttaatcagggtgttgaaagtgctagttgttggcctacatccattactctccattttctgaaagattttcatggcttcatccactttcccggattctatgaaagcatttatcattgcattgaaaagtattatatcaggctttatatcattttccttgagtctagaaaggattctaggaatggacttgaatcgcttcaggcgggtcaacgctcctataagtgttgtgtatgttattacagttggcctgtgtccttcttctattaaactgttgaaaatggattggacttcatgaggccttctcttttcaatcaaagtactcattagttttgttcttgaacgaacagttcggcaactgttgttccccaaacagacgaggcagcgtgattgaacatgtgaatctacagaattcgcaatcacttgcacttggtccttcttgtgcaaacttggttcctacaaagttcagaagtgatcagaatttaaccatttgcaggatctaggcatgcaataatgatgttattatgtatctaacaaatcttgataggacaaaatctaacaccattaatttaatgctcaagcctagtaaaaggcagcatatagatacacaataatagtgtccagtaaacatactatttgaagttatgtcaaaattaaacaaagctaaaggaagaaacacagtagcagctagtttacatatgccaatgtatgttataactatatgatagtttctgtaatcttaccataactggagaagtttgagcctgttccttgcttgtgattgttccatcttggtgtctccccatgctaattcactaaccctttcagagaattcctcctatccctcccaccagcacccaaatctcagtcaaccaacttcttcccttgaaaaacttcaaagcttggctggcagaccacaacagagaattcttcagtaaaaaagaccataccagggaattcttgttcacccaacattcagtttttgcatatataactagagagatatattcttcataatggaccctgtgaagaacatatgaacttgggaacatgccacttgtagttggaacaaacaatgaataagctcaatgtactaatatagttcattttggcaagctgatgatttatgacacacaatatacattaccaagtatttttagcaaaaccacagatatatatatatatata

SEQ ID NO: 271778 - DNA, 1006 bp, Cannabis indica
ccttttcgagtgtagacttctgggtacagggtccgtcttcttctcaataagtgcgccatggcatcaagttgctgtgttccaaaagaaaacagtaagacagcaatcgcataaaagtcgcacaaatatcgcaggaaatcgcacaaagaaattaccaaaattgtttcaaaaatcgcacaaacatcgcaattttatcgcacataagtcgcaaaaaatacataaatcagtgaataatcgcacatacatcgcataaaaatcgcataaacagatcaaacataaagtgcaaacatcgcatataaatcgcatacaagtcgcacaaacatttaaaaacacaataaattaattctgttaagaaataacttacagcatcgtcgagccattcgttcagcaccatcaatttcacgaaccaggatctagtggcttcgccagtgtgaacatccctaggacggccgttgtccctagcataagtgatccacttttggaaaaattttaacagccgggggtccgccggtttcagtgtgtctactaccacgggcccatgtcgttgtttcttcttcccagctgtgtagtcattcaagaaaaccggcttccgctttcgcctaaccctacagaagtccaccccatctggtggcccctgcaactcttccacatcctgagattctgtatcacccagcgaaatgacaatggcgtttgcaggagtagaaggaacgtcacatacgtcaggttgccaatcttctgggtagacatcatcatcatcatcatatgtcggcggtgatggatgtaccgtctgtaatggctctgccgtgtctgatggatgtgtggggtctgattgatgtgccggccctgatggttgtgtcggctccgaaggctgcttctgtaacaaacttatcacggtcgcaatttgatccatgataagattcttcatctctttctgacttctcttgaagtcagccttcatctcagtctgggcagtgagaatcgcaagttgttgcgcttctaccttctccaa

SEQ ID NO: 271779 - DNA, 828 bp, Cannabis indica
gatgaccctgttcataaaagctgttgtcgcaggttcgaaggaagccgactcgctgaagaggcacaatgcccagcttcaggagaacatgaaaaggctgaagcaagaggcagctaggaaggataaagagcttgaagaactttgcaaagctaaggagcaggcggagctggaggtcaggaactcgtgggtgaagatcgagaagatgactcgcgacttggaggctgagaaagagaatgggaagaaacaatatgatcaggcagtgtctgattacatttacaccactctttccaaagttccagacttcgacttctcgatcctcggagcagaagccgctgagatggccgaggcttttcgtgctatgtcgcctactcagacccaaggtggtggagggaaccttcctgaagaggtcgagggtgcggatgctgaggaagccgagaacgaggtcatcagtaaagtcgcggatgagactgctcctgttgttccagatgtctgattttcctccatgttaaaactgttatgctttttaactttactttttatgcgatacaggggtactctcgctttgtacttagacaaatttatatcctcgcggggataattatcctttaatattttcgcagtacacgggtactagcgttttcaatatatatctgcgactttaattacagctcggtgtaacaagtagaaatattttcaagtttgataaaattttgaaaatttaacaatcatgaatcaatttcctttatataatcaatagtacattctggcatatatatccccctatacttaggatttttttttttttgtgtgaaaaatatctgagtataagta

SEQ ID NO: 271780 - DNA, 519 bp, Cannabis indica
agatcctggtaaaataaattccaacaagaacactattgagaaagtaaatctaaccattcatatggttagaaataacttatctgaattacgagaataagatagtagaattcttgcatagtctattcgaaggacttgggcgaaaattcctaatcctcataaatttttatggtatctcaatttgattactaaattgctatgttgatgacttagtctagaaggaacttacaggttcagactaaaataatgtgtcacaactagatatccctcaaaacaatagtaagaggttaaatgtacttttatgtatagtttaaccagacacctactgttgagtgggagccatctgagatgtaatcaaagaaggaacattaagcgacaataaagaaagatttatgaaagtgacctatgtgttagataataaggatgcatgcattagtagtccttatatctacaccaactcatacagaatttgaggatgtggttactctgggggtggagaaattattctagaagagtgtagaa

SEQ ID NO: 271781 - DNA, 786 bp, Cannabis indica
ttatttgtaaagtttaaaattattaaaagtaagattttcattccactacaattaaagtttaaattttcccgctcttacttttctagtaatcccagtttagcaggattaggttatattactggttgtcgtagcgtgcctaattgttagggcgttatagtttggtatcagagcgtcaaggtttttaaacttcctgtagaccggctgaatatgtacaatcatcgttcgagataagctcggatcgtggtgcagtaagtgttgggagtaaatacttagggccagtttggcacagctgtgctgtgagaaaaaatagttgtagctgtgctgtgagaaaaagcagctgtagctgtgctgtgagaaaaagctgctgagtttctggtaaatataattttgaaatagttgtgagttagaaaagttatgtataagtatttggtaagctaaataattgaatagctcttaaatatacaattaccaaaataagtatgatatgtgttatctaatttatttaaataaattcatacatattaatatatttataattattttttattttattacaaattacaataatttttttcttataatattttttttaaaatatatataataaaataattagttagactttactaataataataataaaaaaaattacataaatattatctattacataaagatgatagagaaagatatactggggagaagagaattttaaaataaaatggtaaaaagggaattttataattagaatgagggtaattttgtcaagtgaaatattcattaaac

SEQ ID NO: 271782 - DNA, 700 bp, Cannabis indica
gttgtaatttttcttttgttagcaaaacttgtaactatatgacccataatgtagctaaatgggcctttacccacaatcggtatggtcgtatgtgtgtttcttccattccgaacaatatcttttgtaatgactgtgatgtctaattttatctaagttcatttgtttaaaaaaaaaaatattagggttaaataatttttatatatatatatttcaagtttttttagttttacaattttttatttttttaattataattttactgtatcttataaaaataacaaaaatataacaaataaaaaaataacaagaaatcaacatcaaaacaacaagattataacacaaaaataatataaaaatatcaattgtctatgttttttttagtaaataaaaacttataaattgtatgtattttttggtaaattcaaacttataaaccaaagaaaaaattatacactgccgtatttatttttgtaaattttttttaaaaatatctcattttagatctacaatttgtaaaattaaagagattatcttttcaaattttatgagaaaaaatttatagaatataaacaaaaattagtaaaacccaaaacatagttaatattaaaaatgttaagcttatactgaattttttactaaatatagaacattgaaacccaaaatcatagaataaccacttctatcttatatctttgaacat

SEQ ID NO: 271783 - DNA, 3926 bp, Cannabis indica
cacaaataattaacctacaattggagcaagctgtggccttgtcaccaagcatattgtggaatttcaaacaaagaggaacatccatcatccccttctttcaatccgtctacaagtgtttctcctactgaaactactatttctgaacatgattctgaaatatagtattgagcttgtagatatttgttgccttgcatgcgtaggatttaacatcgagaattagggttattgtgtctgcaattaatctgtatgaagttgggggtagcatttctttgagctttggctctgttgaggtacattcccttcagtttggattatcatgtttgcctattaattggggttttttggctcgggtgtttaggtcaaatgtttttgggtttgaaatagtttcttaaattatccccctttgctctattatatgtgtttctattctgctttgtctacaaaaatggggatttgggctttttttctactattttgtatatgggttccaatttgttactatgatgggttacttcataaaagcaaccttgttaatgaaaactccggagggggacttctccaattagttttgcgggaggcttcgcccggtaccctatatgtccgttggatgtacggtattaattgcatggatttttcttccactttttaagtgtctggtgaacctcgagaagattcataaggcgtctcccatggatgtacctcctatagatgttgatcccaaagactatgcttcaaatgacagaccctctgaagttgttcggacaaaaatacgacaaaaggcaaaggaaaggcacgcgtcacatctctagctcctcttatacttaatgattccatctaggaaatagaccaaaggcaaaactagttgagaaattatggtttgctagaaacatacttggctgatggaggcatacgaaacattttgggactcatctggcactagaggtctgttcttggagagtcagcatcctagaatgtggatggtttcagagcttggagttgggcccacatctcatccagagcccatcttccgcttaagagttacttttccaagttttgcatcaaagctggacaaacccagaagaaatattttacttctatgagttaaaaccgtaaactatgcgaggatatcctacaatgattggcttttattgcctttaaaagtacaaacacactcaatgtcccacgagcacttcatctaactatacagacaaacgcgacgcaaattcctagtgatctcaaagagaaaacaactctagaactgtctgttatgataacaaaggcacccaaggatgaagagtttcttgccgctgcctagaacagtcatcatctcgaactcctcacaaaagaataggaattatagcctaggttccaggtattgcacccagatgcaagcacttctggagcgagtactatttgaagaggtaaactatccttccgcataatttgtaccctcaacatgtctcatatgtcataggtagaacaagagttttttgaccaattattcctaagcttggatcctcgtagatatctgatgaaggattatttcgatagaatagattaaatagttaggcatataaacaacaagaaattccccctaaaattactaaggtgggtcctttccttactatgttcttcctagactttatagaatatgacaacttcattgaccaggaagaaataacttttttgacaagaggggaaccttaaaatgactcattccacaattgcaatcacatgatatctttgttattttatggtgtgttgcttaagttgctatttcttgcttctttgactgatttgatcatggtggtgttttgatgtttccttatacacttatgtccaggatgttgagtgatttatgagcactattcagaaagttaatgttgtagttgacaacaaagggaaatagaaaaaattccaggccaaaaaagtcagccacattgtggaccctctaacacccccactcaggatcaaggaaactgccatgatttgagtgattctttgaggtggaaacagcggagccacccaatagataactccatcaggcatagtgtttgaagagagggaacctatgctaccctctgatgaagaagactctagagacggattggtattcccaaaggcagctacaacattgaaatgtgccaacatcgctcgtcatcctaaaagaaaggataagagggctaggtacttaattcttgggaactctagatctgccagagggggaagccttccaacctgaaactagcagccactctcatcaactcagcccctaaatggcaacaccagtgaaaggaaactggtcctagtgaccacaaatacattgacccaaattcagtaaaaacaacaacacacccaatccaaaccacaccaccatgttttaggcaaccaagcaatttttgcctcaacctcctttgctaaccctactaagcaaactctggacctcaaaataaatttactaaacattctacctttgcccttcaagtttcctgtgaagccaactcatattgggggtgaggtcttggtgctagtgcggaaggcaaacggatacctcaagcaaacgctggtagaggaatgtagtgttgttcaattttgaaccaatcaactatctactgttaagagggtcgagatgacaaagggcattcatgacctaggttattcggcacctataacggatgtcctagttgtgagcaagcagttaatctctctgcttggtagggaatcgacacccttaatgctgaggcaattgaggatattgcggtcagcctgatggagctgaccattaagaagtgggccattggcagtagctctgatcttctgctccagcccaacactttgaggcaacatgcagttgggatatttcttcttttttctttagttttcccttttacttaatgcaaaattcaactcttgtccttgactattttcaactacttctagattgcattcttcctaaagcgaacctgaatggaggtgtagacgatggtggtccagctgaaccttttcttaaccacctggaaggacctagaactacggattgaagctatcaagaaagaggctaagcaacattacgaagaggcagatttagtagctaacaagaactacttacaaaagtacaaagacaataaggtatcctttccctctgaaacagagaaaaaatttaagtctcaccttgaggagctagaagctacctagtccacacttaccaaggagcgtgaggaagccctgaaggccaaaacagaccatgagaatcaggcattactctagacacatgaactctagagtaaaagtgattgcataaaggggttcgaggccaaggtcaacatggtcgaagggctacagaaggtcacaaaagatcaggtaaatactttaaagggttccattgaggagaaggataagcaaattgaagcacagttgaagatcataactagactacatgagatcaaaccctcaaaccaatgtggctaagatgatgctttgaaggaaatttgttccttgcacaaagttctggacattaagagggacgggcatcaagaagagcatgagtctcaccaataagccctaaattgttccatgaacctagctcatgttattttgttggtctgccttgaggaaattatccataatatcttcaaccatcttagtaaggatgctgagaagttttccaaaagggtcgaggtcatcaaatgcagtgtcgatgactatcttttagttacgacggggctacggtcacaatagatggcaaagaccaaactgctttccaaggggccaaggacgtactagttagtgaagaccaactattagagtttggagagattccctcaggagaggatgatcccatgccctagaatacctccaaagttccaccttgatggaaatattttaccaggatctagatttactaccaagtatgtttcattaacatc

SEQ ID NO: 271784 - DNA, 1242 bp, Cannabis indica
attggggtggcagagtgcccagttagctttcaggatttaatcttccttgacagcctctgtgatgattttggcttagtcaaggctatacctccatagcctcttttgaagtatgactttggcccctaccactcatgttgttgatgctctagaaactggtgaacaacctgtgttcatagagaaactttatgatgaccatgctttcaactttcaactgtgcttcagtgaaatacttgtaatgggctgcctttcttgtcatttccaagttttaaagctccaaggcacatgctctgccaaaaatgaaaagtgaaaaggcccaattagcagtgagactagaaaaatttcgaaagaaggaaaaatagaaatcaagatgtttacctgggatttgtaagattagttggaaggtagcaccctcttcactgggaaaccaatggagaaaaacaagtactctcggagatcatgggagcgtaatgtgtagctgatgggacaatgagcatctgaatacctctctaacttgtaaaagctaacctttttatagttggtgcacatgggatgaggtttcacaccaaaaaagtaaaggatttcctccgaggtaggcacatctaactttttgtacttgcgaaacaagtaacatccagctaggatcttataacttggaggtatcaactggaagggtgctatcccaattcgcatgatgaattccacaaaataggttctcaatggaaggtgtgtgccactcgaatgggcccgattgcatctgtgctcatggaagccgattgctctgcgatggatagcttgtgccacattagccctagattgttgcatgattcaacttcagtggtgtacatctccgacatatcgtgagaatggaaattattgattttttgacccatctcccaaatggaggcatttaatacaagtgctggaggcgggactttagctttaccctttcttttggatatcacaactaccctggataaagcaacctctaggatagtctccagggtagtatcttgttgaagttcctaggcaggagtccttaccagaacttcttcagtagccacctcctctgtagcagcagtagttggattttccttaatacccactacctcaagatagaattctttgttcgatccatctctgggaaaagaagaagaaaagaaaaaataagaaaattgacacctaatatccaaatgacaaaatgggtatcggggaaggccttccctaaaattgcttggagaggtc

SEQ ID NO: 271785 - DNA, 1238 bp, Cannabis indica
aaaaatttattattttaatgtaatctttaacacgaatatataaaatgtaactagttttgtcttaacattttcagattaaattattattaagtgttctatttgtacaattttaaaaaatatagtattcattttgttatttaacaaaataaaaaatccaattaataatttttgcaaaatacaaaattcaaaataatattataaaaaaaacctcaaaactacgctactaacccttagcatttcttttttatcctctttccctttgttgataggtttcaatagcataaccacaaaagtatcgataagccaaattaaacgcacgttggaaattatgttaatgacataaaacttaggtaaccatgaagactactttttttatttataattatggtattttgattattttattattaattttagatatcaatattaaatgtaagactttttactttattattttattaaaatctttaattatcacaaataaataattaaaattatttatctttaataataaaattacatctgaataatgatttgacatttaattgttaagtacttatatagttttagaaatataacttaattattattactgttaaaaattaaacttaaccatttatttacaaccagaaattaaacttaagtatttatgccgcaaattactctttatcttttatatattttgagtatggggaattttaaaaaaattatcaatagttttacagtttaaaacttttatataaaaaaatatgtttgtaatattttaaaattataaagacacactttactcaataaaaggtaaaagaataattaaacaacaacgagaaataaatcacaggacaataactataaataaactataaaataattaaaaaaaaaaaacataacctcatcacaactagaaacaattaaaaatatattttattatttattgatgtaaatttttagtgttaaagatggattgaagcaaatatatcacatatttaatttttgtgttaacacatcacgatttgtgtgtctccctttcgagagagtaccataatgatagtcaaacaaccattgtaagtgcctggtaaacttagggcgtgtttggtatggggtttgggaattgggatcatggcaacagaaatgtaaatcaaatctatgtttggtatattttagtggatgatttatgtttgtgtcaatttcatccttaagtttatttttccactcatgtcaaactctttaaacacttgagt

SEQ ID NO: 271786 - DNA, 4795 bp, Cannabis indica
ttaagttatattttttaacactgcttctatgtttttctagaaagattctataattttaatttgtcttagtttttttttttaatcctgttcccatttagtaaattttttataaaatttttaatttaataagagcttttcttcaaaaaagaaattatctctaaattatcaaattaatatatttaatttgtgtgtatatttttttaaaaaaaaacaagaaaaaaagaaaaataattgaaaataatatgagaaggaatatatgttatacaaaatttttagggtgtaccaattaataaattttaggatatatattatacgtttggaactttatttagcatttaattttaaaaaatgacttcaccatctaattttaacttttaataatattttgcttttttttagagaatattttgccatgtttgaatatcttttattttgacataacttttgatgatgatctttcttttttctttttgttaactttaaaaataatttctacccatatcgttactcgttactcggatgaccttaaaagaattataattataatctaactcttcaatgtgaacatttcaagatatgtaaattataaatttttttgctattacgaaaaaaaaaccatttactaatatataataaagttaaataattttttcaaatcttagttatcatttatttaagaatttttttaattgaatatattataggatgattctacaatgcacccccttaaaagggatgcactgatgcaccttctacttatttcggcatcaaacaacaaattagtctaatttttttttcatattcatgtatgttatagctatttaagatatcctacaaaattttgagaaattcggaataatttacaatatagaaaacaatgttcaaacagtatattttatacgcgtgcaacacactacttgaaagcaatttttgacgtgttaaacttttctaaaattcttaaaattttgtaggatattttaaataactataatttatatgaccataagaaaaaatttgactaaaaaattatttcggatactaaaaaattcttaaaagtgcattatagaattttcctattatattatacagataactaattaatttacaaaataataaaaaaaatatgtatataaatagaagtttgttatattacatacctcattagtttcgaaaataatttttaagattacctaaatgtattttaaattataagttaccataatataatttaaaataactaattgattgctaagatatatacaaataagttttggagtcaattaaaatatatttcaaattatatgatataaaattgaatttttttttttatgtaaaggtaacgatagtttattagtagccaaaacatttatttttataaaaatacagaaaaatacaaaaaaaaacaaataaataaataaaaaacgtacaaatatgtcaaatttcgctgacataacatgtcaataatagtagtaaaataattagataaaaaaatatatatattattgtaaactcccctaatttttataatatatataaatatacatatatttttgtagatgtatagtattaagataatgttgtcgttaactttttaacccaccatatctctctacacataaccccacctatcaactttaaaagcgattgtgagtttcttcttttgagttgaacaattttctaccttcagtatattaattgggtcgtgctataaattatatacaatatatcttaaattaataaaatgatttgatatatatataaatattattataataaacctggtcagtctgttcgagatgattaacccagtcatgaatcatgaactgaatccaagaggctgctataacgttgaattgttttccagtgtccttgtaactccttcttgccattagctttgtggcaactaccatagggtctggcctaagtacctgtatatcataattattcaatattattattattatatgtgcgtacaaataagattaataattaacaactgtaatatatatatatatatgaagacaaacaatattatattacaaagtactttttttcttattttttaatgttactcagtatatttaaaattgtttctaattaatattaagaccaatactaatattgatgcactatacattaattcattcagttgtgcattcgattgaataaataagtaacacagatacattatatatagagaggatgatgtaatatttttggtaaaataatttttttttttgggcactgagctaagtagactctagacacacatctaataacctacttattctcaagtctgtcctatatataaaatgcgctattgtatattatagttcagatatcttactaatttttgaaatttttttattaatttacaatgtaaaaagaaattaaattataaataattaattatacgtgtacaaaaaatcacatgtataaaataactatatgaacttatttttacaagagtattgttattgagcgtggtgtctttttttatagatatatagcgttttgtgattggttagcaatatcttctcaaatttattttcttaaattatacaggattaaatatttaattgccctgtgacattgaaaatagtgctaagcacatcttgtagctatcctcatttttacaaagtataaaaaatgtatgttgtaatctaaattaattaaaatagctaaaacagtactttatttattttttattaactacatgcctgcatgatcaatagaaagatctctactttaatatatatagtatatatgtcaatattactaaataaagaagtataggtgtctgaaaattacaattacctgtcaaatattacatatatataagtattaataccaatcttgcctcgatcgatgtatgtacatgttatttaaaattctgatgacaagtatatataaatatatagtagtttttgcttcctaattaaattaaaggacaaactaattaatgaaactaaattgtgatatatgttaattgggatattaattaatattggaaggtggtagagtgcctgattatatatatatatagatatataccttatgtttctgaggaaaaggtagaatgtttcggccgaagaaagttccttgactaccggtatcttcattgaagggatcgttatattcaccgtcggctgttctgtaaggataatctttggggtcaaactgagggccatctccattaggcttttctccaacgttgaacaagttgtagttctggtgaaggtgccgccgaatcgctaagtacaatagccctaaaatcactggcaacctgtgccatattcccaatttatctaccttgtgcatcacctgtacatttatatatatatatatatcatcatgatctaaatatatatatcatgtatctatctatatataacagcgtattacgaaataagaatcaacttactattccatctctccttattataactatatgccaaaaaaaactaataataaaggaaaaaagggtcaaaacataaaagcttagtaactttgcaaatcttgtttgaaagaaaacaaaaagcataacatgagttttacttcttcttatttgttaataatttatgtaccatatctatatagatgtaaatgcaagagagagaagatatttacaagaaaaagaagagtatcaatgaaagacatcctggaaacgaccccatgaaagtctcgatggacaaaatgaagcaaaaatgaactcataatgaataattagagagaaactacaatattatgatcaactttggttgctctatttatgttatttcatagtcttaattaactcttaatagaactacccatatttatactattatgtctacaattgatattgctgataatttgtgtaacgcacacaactgtatataattatatgcatgaatatatgatatggtcaaagcacgtgattattagtgcacctaccacttgctaataatttcatatataatagaaagaaaactatttgtcaattaattttgtgtaataatcaatacgaatcttcaatatatataaaatttttgaaaacgtgtgtgtgtaacgtgatcatctctattttgtgtacttattattattattattattattattgatacattacatgtaaatttgttttcatcttcttttctttttatatagagagaatatataggcacggaaaataatgcatagtggacatagttaatcacgataatgtataatataatgtatacatagccatcagccatgtgataaaaaatttgaatttaaatttaataatgatccgtttaatctcgttttcaaggatatatatatatatataagattattaatcacataccaatgtgtgttaatattatatagccatcagccatgtgataaaaaaaaattatgaatttaaatttaattataatatgatccgttgaatctcgttttcaagaataagattattaagcacataccaatgtgtgttaattgttggtatgttaattgtttatttatatattgttcgaataaaattttatttatgtgtacatatctatgtgtaatgtattatatgttattataaattataatttaaattatatcgtactaagtgactatgttatgagtattacaagagattaaattatcatgaaaattacgtgtagatattgtaagttaatttatatttgatgggcaaattaattataaataccaaaaacacattattataatgagtctattgttataaaataatataaaataatataaagtagatgagaagaaagaagaagaagatgaagagataaagagaaagtgaatg

SEQ ID NO: 271787 - DNA, 1620 bp, Cannabis indica
ttttttttttttgtttttataatttttaaaattttgattcttaattaaaaaaattaaaaaataaaaacaccttattagaaaatattttttatttttctaattaaaaacagaaaattaattaaaaaaatgttaccaaatgcactttagatttattaccattttctttcttcaaggactaaataaacaaatggtgaaaactcaaaggatatttatactaaaatccagcaaaaacaaacaaacaaaacagctatgacaaagagaacaaaatatgttgtgtaactaactccaacattgccatttacttcattgtgttcttcattcaatattgtcatcatggcaataatggcctcataccatattctccttccttattttttccttatgtttactaattttcatggagtttttccacaaccagtgaatgtcacaacttctattatgacccttttaattgctctgccaaaatcaagacctgtaatgctttattgtattacaacaatgaaggtataacaaaggaagaagttgctactttttaccatgtcaatgcatcatctcaaataaagtctataattcatggtaataataaagaagattacctcataactgtaccttgttcttgctcatccatgtatggaaataacagctatttttacaacacaacctataaagtgaagttaggagacacttttcagaatgtttcaactaagtattatagtgggcaaggttggagatttgaggaagaggataaatctttcaaacctgataatgattataccatgcatcttctttgtgggtgtttagaaagtgattcacaaattgtggtgacatacacagttcaggatcatgatacattatcaagtattgcaactcttttgtcagccaaatttgatgacttggtgggattgaatggaaatttgactcaaaacccagatttcattaaagaaggttgggtcttgtttgtccccatggagaaaaatggaatcaaaatatctaagacaggtgacctctttttctatactagttaccaatatacaataattttgggaatcctatagagatcaagacgtatttttttaatctatatcttagcaatcctctcgacagtagaagatattttcatatttttttttgtacataattcttgatgcaatttcggtttcttttgacctttcttcatcaggtatgagagagaagtggaaaattataactgggatattagcaagtgttacatttctttcaatagctacaatgattgtaattcttgtcagaaaaaaaagaatccaacaaaagaatgtggaagatccaaaaggtctagccaaaattctcagtgctaagaaatccttttccttgcagaaccctttcattcctaaagaaaatttagaaggtcagataaaatttagttatgacaagaaaaacaaacttttcattatggttttgtaaatcatgcaaaattgtacatgtgtgacagattttgattcagaaaaacctgtagtatttagtcttgaagagatagaagaggcgaccggaaactttgatgagagtagaaaagtaggagagggtggatatggtagtgtgtattttggcatcttgagaaataaggtatggaaacttttgtttttt

SEQ ID NO: 271788 - DNA, 1051 bp, Cannabis indica
tattactctgaacttcattttaacaacaattagcccaaagtcaatgtaccttttgaccttatagagttcatgttgttactaaaatgcaacttgattaatttattatcacaacatatatctttaatagcttttaataccattcctaattttgcagccatatgtgacaaaaaaatctcacaactaaattctttataagatcagaatcagaaatcttaatgatctccaaaattttctgttttctgatttctaataagtgaacatatagtattttgttctccttaaattctttatagcttatttggctgcataccgaaagtccttatatggttacttaaatatctatccaacattcttaatatgtatattacaaatacatacatgcttgaacatatattatattctaatacaaattaagaatcttttatattttttgaattctaaggttgcttttaagacaatgacttagacaaaaattttgagatctcggtagggtgggggccctagatatagacttattctgcctactcttaaaactagtcttgtgtgggtctaagtcaaaattctaaataaggtcttttttaggcctgtccttaaggcaaagtggatggacgaggcctaggctcttagtgagttattataagtcataactactaattatgtgaattacacatcatgatacgtgttaaattaaataaaaatgtagaaatttttttgtcttctaaaattgtggagctttgggcctagacccgtccactccaccctaatgtaatgtttggtagaagggagggagaataataaatggaaaattttaaaaggataggaagtaaaaataatgaataggatagttgctctctttcgtattgtttgatattatgagcagaactgaaagaataaaaaataaaataaatattaaaattactattttatcatttttaaaataataatatttcttattaaaatatataaaatttgatattaaattacatttctaccttttttttatactagatagctggctagagatatgaaatactcaaaaaaaaaaaaaatt

SEQ ID NO: 271789 - DNA, 443 bp, Cannabis indica
ataataaattgtacgtgtttctagatagatttaattactttataatctgtataaatgattaagaaatatgctagcttttgatttggtaaataattacatatttgtatattttgttaataaataatattttagtaaaattttacgtaaaaagtgtttgtacgagttcatgtttaacgttaaaaatattcgtttgagtacatcatatgtattagtgtcaatcatagtgataaatgattgtgtttggtgtgtcatgcaagtaaaattgacctacgtgttgtgtagtttgacgtaagatttcattgttaatattaggttatgcttgaatatgttttaagtgttattgtgttattggatttaggatcttgttctcaacaaagaaactcgacgagaggttcgagggagagaaaaggatatacttagaaactaaggtaagaagagtggac

SEQ ID NO: 271790 - DNA, 1429 bp, Cannabis indica
aaatgcgatggatggctagtttgatcaaaagggtaagtctagaaccttagttcttagtgggatatatattggagaaaataaaatattgaggttgaggggggttattgaatttgaccattttacccctagtcttgaaaatgcctaagttataagtttaggggcattttagtaaattgccaaaagaagaggtttggtggttgcttatgggagtgacacttggatattctaatttcaccgaagtaattaatttactaacctttattcacttagagaaaaacaaaggaaaagaccaaaaaatagaaaatactcaaagaaccctcttttccccttctctttctcttcgaaccagctaggaaccaagggtttgatggctgaatttttcgttttcagcaaggattggaggaagatttaatcaaggtaagcgctagacacactttggttatgtttttcttaatgtttgaattagttgtaacttgtgattttaggaaattaggactgttaggttttgattaggttttggttcagtttttattttcaatttgagttgattctaagttctagtagctggttttgctattttatgttggaattgcacaagtttgaactttgaaacttatgtttaggtctttaatggcatgtttggattcaatgagtttttctagatgttattggttggaatatgttgtttatactctttttatgtactttggaaggtttggtggcaattggatgacttttgagcaagtttgaggttgtttggggaaacttggtgcaaactagtttgccaggacatgtaataccggttaaccggttttgacatattccccgaacaacccattttctctatactggtctatttcagtgccttagttgggtgtttccctatttcctaggttaatgtaatcactagagagtataacagagccttgagttgtagactcgagtttcccgaattagggttcggacatgtgattgacccaattttaatatgtgattagggcatccatccaacacgagactttccgctcaagttggccaactcacttgaatttggaaaagaggtaagaactgtatataatgtgtaatatgaatatgcgagtgtatgtatatgttaagtgtatattcatgcttatatatttgttacactaccaacacttgtacggttatggtatagagtgcattggtatagtgtatattgttaaggagtacattacagggatacagtatagggtgtgtgtggtatatcactcagtggtacttagggtacgaaacaaaccctaccaacactcgtacaatgaggtacgtaatgtatgtggtatagtggttgtaccctagtatggaacgttcttactcatctattaagccttgtaaataggtgtatgggcgcctagatacaagtcggtattatatgatatgttatatgcttttc

SEQ ID NO: 271791 - DNA, 719 bp, Cannabis indica
ccaggtcgcgctgctttgacatgtacaacctcatcccaactcagactcactcctgctcagctttcgcatttcctttacctacacatggaagcagaactgtgaatcaacaaactcagtaagaaaagcatataacatatcatataatttccgacttgtatttaagcgcccatacacctatctacaaggcttaacagttgagtgagaacgttccatactagggtatagccactataccacatacactacgtaccttactgtacgagtgttgatagggtttgattcataccctgagtaccactgagtgatataccacacacactcagtactctcccgtactggtgctggtatcactgtaatgtactctcaaataatatttactacaccaatgcactctataccttaactgtacaagtgttggtagtgcaactaacatttttaagcatgcatatacacatatcatatacatacactcagatattgatatcacacattatatacagttcttactttctttcgagattcaagtgtgctggccgacctgaacggaaagtctcgtgctagatggatgccctaatcacataatgaaaccgagtaaatcgcacgatcaaaaaccctaatctgggaaacccgaacccacaaccctaggttctgttatactctctaggggttactcaaactctggaaatagggaaacctccaactacggcactgaaatggac

SEQ ID NO: 271792 - DNA, 1653 bp, Cannabis indica
gtctcttggaactctgatttggcggtttctgcaattgagacctcagctcaggagcagggtgttgaaccttgtttctcttgttcattgccttcaacttgggtgaagtcttgggaaagatttcatgaattcaattcgactccttatgtatcaccatatttggaccctggccaacttgtggaaggaacaaaggaaatggagaagaggacagtggggttggtgcatgagctgttgtcgttgactctgtggaagaaagtgtcaatattaaagcttggacattttaagagagagtttcgattacctgacaaattgaatgttttgttgctcaagcaccttggtatattctatgtttcgaataagtatcagctctatactgtacttcttagagaaggttataagggatcagagttgattgataaggatcccctcgttgtggtaaaggagaagtttggtgagctgatgcaggaagggcttcatgaatataatcgaaggcattgctcccaaaatttagaaaagaagagaaaggcaggcatggttttgagtagattgcacgaaatcgaagataaaaactcagacctttctgattctgaggatcaggtacaaggagacaagctaggtggcttatttgatccagaagaaagaaagcggttttataaagttctctttgatgatgatgctccaggataagctgttgtggtatgtatctggcttttctcctatccaatgtttcgaaatttatattcattattttaggtcttttgtttgccaattactgccaagttcttttatctcacaacttctattgagtatttgatttaaatgtcaacagcagctttggcaatatggttgaaggtgagtttgtcattgtgcttctgtttcataccactgagacaaatgagatgaatatagaaacacaatggatataacttagtatggaaatcagatttcgaaaaccttcttcgcagtctagtcttcggttctccctgggacgcctctacagctcagccacaaccacagccgaaaactttagctcaaaggaagtcaataagaggtatgagatcgttaaaacaaaatttttgttcactgagaggattttcgcctggtgatttcgagcttccatttatattgctgaagtcattgaaaagcataaatgggaaacattttgtcagcagccattgaaaagctacaatttcgattgtaagtgagttctatgctaatcttgtgtcaagttcgaagttaatatttgcaaaacattacatgaatacacaccattttgaagatatataggttgtttctttaaaattatttatcctatgtattgttattattgctatttcagggtattatgcatttttttttcttgaataagtttaaaatttgtttatttcaattggtagttgctacattatttgtatcaattcacattgtgcttattatgttacttttgccatttttttttacaggggaggggatttgaattaaagttgaggtgtgaaaatattagacctttttttagttgaaaaatcaaagatatattgaccagaagttttcagcaaaaataaataaatcaggtcattacaatccaagattagagggcaaagaggaaacatcaatgcaacaagtaaccttaaaacttcaacgcccacttggcaatgc

SEQ ID NO: 271793 - DNA, 786 bp, Cannabis indica
ccgagagagacagtagtcacaatagaattctgtccattttagatgctactggtaacaaattagaagatcctgagggcataactaaggcatttctagagttctatcagaatttgctgggttctaagatgatgaacagaagggttgtagactccaaactaattagaaatgggacatgtatcacatatcagcatgttcggatactcactgctcattacacaatggatgaagtaaaagaagctattttcagcattccaccagcaaaggcacctgggccagatgggtatagcagttcttttatcaagataattgggacttgatcaggcatgatgtgtttgaagctgtcacctctttcctccacatagggccagctgctcaagcagttaaattcgataattatcacacttgtgcctaagagtaagtgtccaaatgttataagtgactatagacctattgcttaagttacaatgtcctttacaaagttgcaactaaaataatttgtagtagattgaaacttattctcccaaacattgtagctcaaaatcaggggggcttcataaaattaaggaagattcattgcccatactatcataatttgccaagacttgataaggcactatgggaggaagaatgctaaggctaattgtatgatacaacttgacctacaaaaggcatatgatacaatggaatggagcttttaagaagagatgttatatgcttttcaatttccagcatctttcatcaaacttgttatgatctgcatcaccactcctaaattctctttgattt

SEQ ID NO: 271794 - DNA, 1324 bp, Cannabis indica
ggtagttgattccctgctagagttttggtttttttaaaccttagtcccggttgtgatttagccactcatttatgttgttgttatcgatgtgatttaggagcctataattccctgagcaatggttccactcaggttgaccgacacacctgaattcggaattgaggtaagattagcataatatcatgcatatgttattacatgtttagcgtacatgtgttattgcctgttagattaaattgatagcagtaatagtgtacgtagagttgcactgattactgataaatgtatgttggctgaaatactaatcgatgttgtcacatcattatggctagagtatgactagcatattgagtataggttgacattatgatcgatagtattgtcttatgaacgttttagactcagtaccgtgtgggacacgggattagggttatgatcaggtgtatgggcgccaggttataacccgggttatttgtatgttttatgttattcttttcttactgagtctgtcgactcacagtgttatttccatgagtaggtaagggcaaggcaaacgctgaggaatcgtgaggacgagcagatgaaggttgtacatgtcagggcggttaggcctggagcgtacgatctttgggacatcgaggcttttgctgtatagtcgttaggcgacaaacttttgattatatgtatagcaaacttttgtaaagtatttttgtaaacgggatgccggaatattatatatgtaatactttaagtttttaattaaataaacaaattttaattaatcacgattttcgttaatctcgttgattagcaacgagctacacagtatgtttaacatcacgataacacacctatgctagttagggtgttacgatttccttgatggcatatagaggctttggtaaaaagaatactatcatcagcgaagaaaaagtgtgaaatcgctgaggtcgttctaaccactttgtatccttgaagaaattgagacctttcatgcttagatatgagggaagagaagccttcagcacacatgaggaatatatagagcgaaagggggtcaccttgtcgaattccccttgagggttaccagaacccaagatctgaccgttaatgttaaactggaaagtgaccgtacaaagacaattgaggactaaattagtgaaagaagggggaaagtggaatttggtcatgatggctcaaatgaaattcccttccactttgtcataagctttagccatgtctagtttaaagccatcaaactgttagtttttatgccctaaataaaactccattttaatgtaatctattttattcaacatcaata

SEQ ID NO: 271795 - DNA, 1345 bp, Cannabis indica
ctaccacttaccgctgaaaaagtcaaagaaaaatgttaaagagaactatagttgaccatttatatactatatttattaacagaaaaaaaaatatcttgcttattataaatgtttttatgccatgtgaacttattatgatgtgactttactcacaacaaccaacagttgtagtggttttttcgtttttgtgtaagaattggttgttgtttaagggaccatatggaaataaactataacgtataaagttattattttcctactttctgcctgagacataaatatcaaatgaatttaagttattttttttcttgggctgaaccattaaagaaagtggttggattctgaaatagtgtggcttttgttaagtacgcaagtgagttatgtctaagcctctaaggtctctaacatcataaatatatgttagtagtatgtcatagagctatattaatgactgtgtccaattaaaatgtgatatttaacttttattaattcaataccactatttccatcaaaacgtggctcatccaaatgaccccatttgcaatacatgcattaaggaaaccaatgcatgtagatctttacttttagcatttcaaaaataagcacatctcactaattcagaccttttttttcaattcacacgggtcaaatgtagtttataactatatctacatgttttaggctataaatttcttcaatgacaagtaatgagagagttaataaagaaaaaaaaaagacacttatatataactaccgacaaggtacatatataaatatatatgtaatacttataaagacacttaccaaaagtaagccgaacgaaatgtggtccaaccatcaatgaaactccggttaccggaaataatggtggcatcgatcccatctccgatcatcataatgttccatactcttcttcttaatctcaacattctcatgataagttcctttcttaatatatatcacgtaacgttgcatgctatactccggcgccgctagaacagcatccatgatcttcgtgaagtttccggtgccgtcggcggcgaccacggcgtccgcttccaccccatttgcttgtacaagcttcctgtctctgggcttcatccatgctgggaaatgggccttgttagcctttttgggcttggaatcaaacattgggttgacttgggtcagaagatcttggaccaaagaagtgatttggttaagcccaccagtgactagtcctttcactatgctgtttgtgccttcaaacccatcactgcaagtgtcctgattaataagagccgcactcaaccatgttcttagatcagaacttagattccccgtgctattatgtttgcctgtaaaa

SEQ ID NO: 271796 - DNA, 1197 bp, Cannabis indica
aaattatgatataaaaaaaactaaaaactaaaataaaattaacatacgtgacttggcacgtaacatctatctagaatatatatatatatttatataggattatagtaggtgttatcccaagctgtccaaatctcacgatcagtgtattctgtatttattatgtaatctttcagcttatatccattgtaacgagaaggaaaatacttctttcccaagctcatatccctataaatagtgatgcatgttcactgggcaaagggtcggtggaaaacattctggtagagagatattgtctaagaattcatattcagagatactgttgtaagagctataagaaaaggaagctttctccttgttcttgagttaatacaaataacgaggattaggttattaccgaactactcggagctgaacctctataaaattcttgtgtctttatattgttttgctatatatcaatcgttataaactacttgtcgcttactaaataagactcacagttgttggctaaaagcgaggttaatattttagtgctttcattgagagaagaatcaagaatcgctgttcattcaaaatctaaccacaagtacgatggtggtacagactcgtaggccggggcctggttgatccaaaaaatccacaggcggtggatcccgtattgcagaacccaggaaacgtaacggttctgccagctgttaatcttaaacagccgtcgaacgtaggtcatggtgtgacgactcctgtagatgaaatcgcgcctagtgtgcaagagactgggaataccagttcagcacccagctagggcattcgtaacacagctgttccgcctactaccaacgttcaaacgaccactagagatgatactgagatccaaaacctccgcgctgctcttggactcatgcaaggtcataccaacaccctacgtcatgatcaagaagaactccgcgctgcggtaaatctcgtgttcgaagaataaggacgcacgtttctcgagtggagggacaaagagatggaagcgttaagggctcatcatactgagattgaaaatcgtagtcggcaagacactgtgctgatacgaaaagcctaccaaactgttagacaacaacctccgaatgttacccccctgggtgagacggatgaagatccagcgatgaatacttcccagactataaatggtcagccgccaaatccccggtc

SEQ ID NO: 271797 - DNA, 2435 bp, Cannabis indica
tacaagttacaactattgcttaatatataactctcaaaaaatagatgtgatctcattttctttttcctttttccaatatgagacgtctttaatatcctttttgccgtgccgacctatagaaacagaaagtaattaagatgtactttagtaaaggtttgaacagggaaattaaaacaacgataagattattatctttcaaaaagtgaaaaggaaacaataatatatcatcatagatatatgggaaagattaaacgattaacgattaattgcatgaatatatatttatatatatacacttgttaaaaaaaaaatatcatgtaaaatcaatgccaagtatacgtaattagtaacagtatttagtttatacgttattatgatcttaaaaaagtgagatcgagcagtataactactgtgtgtggtattattatgcttttttctttccactaattgctactggatttccactaatataatagggatatagtaaagtcaaatagggaacaattcttttttgttagtattggacaatttagtatttttttttttctagactcgaaatttctagatgaattaattatatatatcaacattaattaactcatcaacttacataaaaatatgtatgccagtagttttcttatgtatatgtatatggtatcttgtttttctttttcaatggaatattttatcttattgttaagtatcaagtaattggtatcactaacctaataaaacactacgctcagctcacaattttttatttaaattttgtgcacagtatctaattaaaactataaaatatgacatagttggattagaaaaatgcagaactagtcgatattaatttacaggttcatatataaggttcagtgaacaataaactttttgatttataatatattaatgtttgacttattcatagcttattattgattggctttttgaaactaacgaagagaagaaaaaaattgtcgccgttagtaaatgaactctattaaaattcaaaatggttctaaaattcaacccaaagactgatataatgtcaaaccccaattattatgtcaaatgaatatatatcatcttttaattcaactatatatagcacacctgtgctatttatttatttattaatgaacaaacaaatacattaaaccttatacatatatagtattatagattattatagtccttctttttttaaaaaaaaaataataaataagaaatatattttcaattgaacattactatatatattataatagtaaagcagagtattttatacgtgtgaattgtacatgcacgcactcgcatgcaataacataaataataatatataaatacaaatatacatatgtatctatatatgtatatatgtgatcaaattaagaaaaaaacatcaaaaggataattgataatactctggtgtgtttagctatgaacgcaaaaaggtggagacgtgggtacgtaatagtactgtacactaagctttaaaaatttgaaactactgttgaagcagcacctgaagaaaaaacaccctatataattaatgccttatcaactggtccttattgtaaggttgatgggataaaaacacaaaagaaaacaaacattattatcagcttggtttgtaccctagttatatatatagaaaagaaccgcaacatcagtggcctcacaaaaagctaagaacagtagtcctcactgtagtaccagtacacactactactggtttggtttttcatagggagttaaatagtaaatcaaatatatatcatcatcatcaccataaatgttttcagtggataacctttttttttattattattattaattactcttattattattttgcttcttatagtagttatttgcataatgaggggcagcactagtaccaccaccaccaccaccttttgttcccctgttttctctttctatataatatatatttatagatctatatatgtgcctcaccaatttaaatttcttggtggtcccttttatctttttcctatatacaaaattagttactgttatggtgctagaaattgtgtttcgcacaagccaaaaatttatattaagtgtactatgaatcttgtaccaggactcatgatgacagttttttcttcttgcattttattctaatgattataatataaaatattcagagagttatccgaaaatatgtttcaggttatacgtctctctattttttttatatgattctttaattaatgaattcaatattgtttatggataataataatgatcaagttggtggatggatctggaatgacaaaaaaaaagaaaaataaataaagatatatatatatatatgcacaataaaatagaatgatttagttttggttaacttaatcttttcattcattggttatatttcctgcaaaataatctcattttttatatgatgctgt

SEQ ID NO: 271798 - DNA, 1710 bp, Cannabis indica
aaataatacaaacactataaaaaataattacttttagttataattttttagtcacaatataattttttttgtaactaaatgcgacttttagttacaacaaattgtcacttgtgactaaaacatagcatttagttataagttgtccctaatttattagttttagtcacaccaagtattgtgactaaaaatacatttagtcacaacaaattataatttttgtaactaatacctttagccacagactttttagtcaaaacataagagagatattttataattagtcacaatttttttttattttaatcacaaattttattgtgactataaagtatgatttctaatgtaaatagaaaactacaattaaaatctataccaacaataatcaatttagtactcaaggtaaattttgacctttccctagtccaaccttaataacctcggacaatctactaattaaagcactaccatttcaagaaataagtctaataatctaaaaataatctagaaacacttccttattcactacacacacatcgattagaaaccctacaatagcaagttcgactcattgttgggatatggtaagatttcatctcaaaattaagggtaaatagtggcataagtactcaaaattttaaatttgtaagtgacataaactcaacgtttatttttagcggcataaatattcaatatttgtaaaactgtaaaaaaaaaatttctaatttcatcagtacaaactatgttattgtcttaaataagacacatataaggttcaaattctagatcgtctagataaaaaacatgtagtatcagttacttccaagtgttcttttaataaattcaaaacggagtctgtactgacaaatttggaaaaaaattacagttttacaaacattaggtacttatgcctctaaaaataaatattgaatttatgccacttacaaacttaaaacattagatacttatgctgctatttaccataaaattaattatcaatcagaggagtacacccttgaatgtatatatagtattcaatttccacacattactagtgtgagactctctctaaacatcattctctaagatggtagctattttttttctcatcaattttaagaaaactactacaagaaagaagacttttaacgacacaaatttgcgctgataaaactatgcacaatgtgccggcaaacttttgtcagcgtataaacacgctgaaaaaacttgcccgcaatattcaatcggtaaaatagtttttaccgacgcaatagctaaatgcaccaatcaaattggattatagtgacgagtttatgcgtcagcaaaaattaaaacgccaatgttaatagatggctaaatccatctattgacggttaaaatgacttttaccagcacaattctacgttggtaaaaggttcacatatcttttctaattggcgggtaaaagatttaccggtacaaatacgcgccggtaaaaccattacccaccaattataatatggtgggaaatagttatactggtgcacttatgcgccgacaaaacgcttactcaccacattttattgatgattaggtaagttttgccagcacaattttgcaccggtaaaaatttataataggattataattaatttcaaatattgaattatatttgaaagaatcataatcaaataagaaaacagtattcacatatataattaaatagtatcccga

SEQ ID NO: 271799 - DNA, 598 bp, Cannabis indica
aattacttagaatttagttaataattcaagttaattgtttttgattttgtattaatggttttatttcagaatttattataaatttattaaattaaattttatgtaaatatttttttaaaaacaaacttaatttttactttaatgattaatattaggtggctaattaataagatgatgtggcaatattttaaatgatgtggtattattttaaatgacgtgtcatatttggtgtccaatgtgcaagataacagcaaggtacctacggaatatctgaaagtgtaacagaaggtatttatgccgccaaaattttaacttaggtattaaattacaactagaagataaacctaagtatttatgccgcaaattactcaaattaaaataacataataatataaaaaaaatataaaatacaatacaatttactataatactaatagaatacgatctatataatgtacaaattaatgggagttgctaattattagagtggtcttgccattgccatatatgcaatattgtgtcaagactaattttatgtgtatatgtgttgagtattgctcaaaagagaccacaaccacattgattttttttttttttt

SEQ ID NO: 271800 - DNA, 693 bp, Cannabis indica
ccgacttgtcagaaaatacctaaagaaggacaaaacaagtataatatataataatatagtccataaacacgcaataatattaatattacagttttacccttctcgggtcaaaattacgaaaatacccctgctcaccaacagggttttaacatattatttatcagtataattcacatatatttaattatatcataatataatctcatataaatacacatttaactagctagggttcgctaatctgttttcttcatcttaggatattacaattatcccctccttataaaaatttcgtcccgaaatttacctgaacaactctggatatttctgttgcatatccgtctcgagttcccaggttgcctcttctacttttttgtttctccataacacatttgccagtgcaattttcttgtttctcaagactttttctcttctatctagtacatgcactggttgttccttgtatgatagattcggctaaagttccaatgcttcataactcagaatatggaacgggtctgagacatacttataaagcatcgaaacgtggaacacatcatgtacagctgccagtgctgggggcatagccaacctatacgctacttgccctatcttctcaaggatttcaaaagggccaatgaacctcgggctaagtttccctttcttaccaaagcgtttaatgcccttcatagg

SEQ ID NO: 271801 - DNA, 712 bp, Cannabis indica
gattcttacaacttttgttttagaaatctaagaatttggatggctaggagcatgatctacaattatagaatcttgactttcttaacggataaaatgttggttcctattatcccaatttttgtcctcatgacatggcatgattacgtggacaacataaatgccacgtggcagtacaactcgctaataggaaggccaagtcagcacctgaacaaacagagaccctgtcactcgaataggcatcaagtgacagaccagctccatctcatgagctggccgaccacctctgctcggccgtatggctgcccaaccttgggaatgcaccatggccggccagcctggcctccacatggggcctggccagccaagagatgcactgtaggcttttcaagacacttctacacgtggacagcaacacataggctacgaattgggccttaaaagcccaatagaatggctgagtaatatctagattcaagagcaatttagtcttttgtaactatctaacaagctatgcaagtattaagggatttcaactgtagcctagggttttaggcctcctatataaaggccttaaccttagcctagaaacctaagttgcctctaagcctgaaacctgctactaaatgttggattaaaatcttattgtgggcacatatgtataatgtatatgctattataaagtgtgatacaaaattaagtgaccaattatgtt

SEQ ID NO: 271802 - DNA, 1446 bp, Cannabis indica
aaggagaaaggttttcttacagctcttacaacaatatctctgaatacgaattcttaaatagtctctctagtgtaaaatctctcgtcctttggccagtgaacatgcatcactatttataggactatgaacttggagaagaagtatttccttctcgttacaatggatataaggagaaagattgcatgataaatgcagaatacactgatcgtcggatttggacagcatgccatatctctgtgatctgatccccaagttatagggatttctttgatgactcatgatgcggaagctgaattcactaagtgtcaattgctctgcgtagattgctgatcgctttgctccagacatgcataagaggcaacctgttcggactataccctccgagcacatactcaaagtttattccacgtgtcaccatcatgtgatgacacgtcagagtgcaaaaactgggataacatttgccccccaagtctgtacgggacttccaaaattgcgtgtagacttcatccgagctgcttctacctttggatggggacacatgtcgagcgcttctgtccgagaatcgatgtgaggctgactgggcgtcccttcgatttttggctaattaatgctctacaattaatattgcaaaatctaatttctctcaccacggttaacggctgcacttgattatttttgatttcccatgttcgccttttagagggaaacgaggcatctgatatccttttgaaattattacctctttttgtgactttcccataaatagcaaagagcattggcacataaactcattttcaccacctttctttgctaagtgagttcagagtgaaaagagaggtttttttggcttcaagtttgctgaactgcattcatcgaaactgctcgttggtttgacgttgcctgaatccagacatctgactcttgagtaagttctcgattttctttatgcttatttttgcatgtttatttttttgaatgcaccttagactttgtcgtagaacattcacaggaaaccctaggtttagaaactctgcgattcttctttgtcatggtttcatgcgattttacagtccacaatgcttgctttctgaactgcataatgcctgtcttctatcttgcttattctaagcttcatgaaatttttaccctaacttgagaaaagttcaaacttcctgagttttggtttttctttgaacattctcactcttcaatccgtttagtactcttggtcggcatatttgcttgtttatcgcttgatattccgtacaaacactcatcttctctgttgtcttttgtagatgaacccaagtgagttttgggacagcgaacatcgaatcgaccaggacttgcttcaacttttgcaggacgaccatcctcgtctctactctagcccaccttcttccaatgaaggacattctccctcaaatcttttatctagccatagaa

SEQ ID NO: 271803 - DNA, 956 bp, Cannabis indica
aggggcgaaactcgttagatcctttagtagaacactaccttaatatgaataaattagcatcatcaacaaaaggaaaattaaaggaaaaagaattaataatggaattaatcaaatagggttcatatattgaattatttttgattaatgggtttaatcaatatatgaacaataatttgaattaatcttataatcttaactttaatcaaatagggtttataaaagagacataaataattaaatagggttagaagtacggtaattaaagaaaatctataaccctattttttttttttgatttaatggaatttattatattatatataaataaaaagtgacccataaatttctcataaaccattttattttttaataataaactattttatttttaatataaataaaaagtcacccataaatttcttctgttatgtagacacaatagatatatattgaccaaaaacggcataaatgccaattgtataccgtacatttacaaagtttagatatagggcaaatagaagagacccaaagatatagtgggccgaaatattgggccaaaataaaactaaatggtaaatctaatactcctctctcaaaatgaaattaatgtataaatttctgggataattttaaaaataaaaaatataaaaccaacaaagaaaaattataaaaatagtatggaatttttaatatttttacaatttttcagattttatttacatgaaataaagtcttttgatatatatttttatgttgtactcttgttatttttgttgttgattttttgctcattacaaaaaaatctcacttttagtcataacaaaacttgtgaccaaaagtaaaaaaattgtgactaattataaattatcattcttatgttctgactaaaatatattcgtggctaaatgtattagtcgtaaaaattacaattttttgtaactaaatgtatttttagt

SEQ ID NO: 271804 - DNA, 801 bp, Cannabis indica
aattttgattgacacagtgaaacccaggatttccaatgagccttagattgattcccaaaagatccccaccaaaactgagccataagactctcaattttgcgacagatggaaactgggagcttgtaacaagacatggcataggagggaattgcctgaataacagcttttaaaaggacttctttccctgctcttgagaaaaacttgtgactccagactctaaggttagagctaacacgatccaagatgaagttgaaactgtttttcttagacctaccaaagcattggggcacaccaaggtatttagacagaaaaggtctgtttgaaagaccaaaagcttggtaaaagtgatcagagatctgagggggggtgtttggggagaataaaatggacgacttgccaaaattaacgcgctggccagtagcttgattgtaaagatgaagagcagcttgaagcgcattacatgaagagaaggtagctttggcaaagataagggtatcatcagcaaaaagcaagtgagaaacagcaggtgcggatctggctatagagataccaccaaagttaccatgctgctcttggatacgaagagcagcagccagaccttcagagcagagaaggaaaagataaggagaaagaggatctccttgccttaatcctcgagagggagagatttccttagtgaaattcccattgacactaaacttagtggaaaccgaggaaagacactggtgaataagggaaacaagtttactagggaagttgatatggtgaaggatggcaaggaggaaatcccactccacacgg

SEQ ID NO: 271805 - DNA, 2065 bp, Cannabis indica
tttttacggaattgcacatagaaatttccatagcaactaatagagcaacttaaatcgcaaccaaaatcagtatagcaacccacatagaaactactgagaaaactaccaaaacaatccaaaccgtaaatttaaaaaaaaaaatagttaaaaaatattatataaagtaatttccttttatataattatattgtaatgtcagatgaagcccagcaacgatttattagagaggaaaaacgacacgaactcaaaccactcaaagagtgtcgtttttcaaacatggcaaaaaaacggaggtgtttgcccagagggaagcgttccaattcgaagaatccaaagaaaagacttagtgagattgggcaactctaatgttggccgttttgggcagaagaacccttatgttgtaaggcaccgccataacacaactgtaaacgatacaccaaatactgtcgttttgctaaacgacacccgctcagtctctttgcctgatttagtcaaccgctctgtaagtaaacgaaatgaatattcgagtgtgacagttgaatattttgaatttatgtaaaattaatgttacaggtggctttgctagtaacactggggtacaattatataggagctcaagcaaatctaaatctatggaacccaatagttttgccaaatgaatactcaacatcccaaatttggctcaaggctggcattgcagacacctttgagagcatcgaatcaggctgggtggtatataaatatatgttataattaactaaaatacatatatattttttctcgattttttttcggaggtgactgtctcctctagttacaatgtcggtcggtccgtccctgcatatgtaattattaataattaattacttttattattttatatgattatgattctcttattattttatttaattatttagtatttgattttatatgtaggtaaacccaaatttatatggtgatacacgcacaagactttttgtatattggacagtaagtagtagaaatgtatataataattttattattaatttctcattttgaattaattaattattaatgtttgattaataatatgtatttgtagacggatgggtacgtttcaaaaggttgctttgatctcacatgctcaggttttgttcatacgaatccaaatgtagtcttgggtggatcccttgagccttgctcatcccaatccggaccccaatatgaactaccaattaccattacactcgtacgtatataacatatagtatagactacgtttaatttcttaattgtgtttttttttaacatattttgttaatatatataggatccacatgttgggaattggtggcttaaagtgggacaagatgtggcagtagggtattggccgggtactcttttcgggtatttgcaacacagcgcggtgatggtgcaatggggcggagaagtgtacagcccaaatgtgagggagcaaaagcctcacacaaccactgccatgggaagtggccagtttgctcgcctccttcatggggaggcggcttatgtgaaaggggttaggatcatggactactcgttgtccctcaagtaccccgaatgggtggatacttggggtgatgaggattattgctactcagcttttaatgaggttaagtatggagttgagcctaccttttattttggtggtcccggtagaaattcgctttgtccttaattaattatgttatattatttaaattgccttaattattagtttatttctcttctaatataatatcaaatctcataatctcaatgtaatactaaattatttttgagagttgtattaataatctcaaccttttaacaaaacttgccaaaagatgaaaaagtaataatctaaaaaaaccttcaagtaactattattaacatatcaatccattcaaacatttatagaagttgattttcaaaacagatgtgacgaaatcattatagttgatcagttgaacttgaatttaatctccaactattaattttttcacattgacaaatggatttgttttgaaaacaataagtaaaataggatgtcgtgttcttcact

SEQ ID NO: 271806 - DNA, 1109 bp, Cannabis indica
ctaaaaaagtaatatataattttgagtaattaacttctaatatttgagttaataaaatagcacgggtttttttttttttttttttttgttagtaaagagcataataaaaatacagttttattttcacttgtatctttctaaaatatttatttttttttttgaaaaaaaatataaaatatattaaatcaaattaactgttacaagagcatttaagaatttaagaaaaacatcagtttaaacatgtatggacttctatcaaactagaaaccgacttagctagtgcatgagttatactattcataacacacgaaataacacattaaaaaccactatcaacttcaactaaaaaaaataatctcgtcaataataaatttaaacataaaattagaatcagaacaatacacctaattacaaattattgaagaatcttgctaaaatatttaaaccattaaactatgagaaaaaccgaagatgcatgtaataataaaaaataaagagacaataaaataaagcattaattaataattatacatactacatatatatagattagttttttattgtaaggataatattatatagttgttacgtaatgggttacataacaaataataaatacatttaattattggaaagtttgaaagttggattttcattttagaaatattaatcaaaattaagagctatacccacttttgggatttcttgtcgtattgagaaaaccttaataatttgaccttaattgataactaattttaataatacaacatcaatgttttttcatatttgcaaggtcactaattgcgtcacctcgtttctagtctagtcttgtcagtctagtttttttatttgtgctgaaagcttttcgacattactttgtcggtacgagcggaatcaattaatgaaagagtgtcgtgtggctaagagtacttcgtaaattttttcatgtattatttgttgatgatagctatctttttgtttaagctaacacaagaagggctcaaagagtgatagagattctacatagttatgagaggatgtcagcacaaaaaattaatttggtaaaatctattactttctttaataggtatgtgagtggagctattcgg

SEQ ID NO: 271807 - DNA, 6827 bp, Cannabis indica
aaaaatgctcagtttttaaagtacataagtcgaatactcttgtgcaactcaatattgagtcttattgttttactttaataaatattataaaaatttctaatcaattataagctgacaatttatcgtgaaattaagtattatagagtactttatagtaatattctttttatatttttaattattttatattagttattataagtgctctaaaatgatacgcaagtaaattattagagctcaaactttatcaaaaataaaataaaagttaaatataataaattgaattggatcgtgttacgaccaaaattgtaatagttttttttgttatcaaacttacgatatgttattagttatattataaaaaatatatatataaaaaattgagttcatattattatataaaaaatataaagttaataaaatatatggtacaaaatattatttaccctatgtataaaaaagtgaatattgtggtccctttaatcaaaatttactgtaaaaattatatgtggtgcatatattgtaacggttatatataatatgtcatgtaagaattaaatgtgttatgtcacatatatagctagctagtacagtagtactattatttgtttgtgtatttttctggacacatatataagtgaacaaattaagcgatgtttaatcatttgtagtaaaaataattactcgtcacacatctttttatacaacagaaattaagtaacatgttaaattacatttacatctatattgaagagaagagatatctaagagatatactaaataaaataagaagaagagaaagaagagataagagggagagacgagtgaggaagacaaatgttattaatgaaaatattcctttggtatgacaagattctctgtcgtaggcatgaagaacaaaatttaattataacaccacccaagattgaaaatgacttcaaactacaaaacaagcctacactctctactctctaccaacggtttccttcatcagcatggccaatattttttcttctccatattaatttcttataataatactcttctaaaatgcattatttgcatacatttcttatgtaattaatatatttatagggtcatttttataatgccttcaaaagaatagtgtattgtgcttttttttttctctgtacttggatagttttttaaaaaaatgatgataatgtacattatatttattgagaatattttattaaaaaaaatcttaataatttactctagcaaaactaagacttaaacaaagtattgtatggacctataattaatacgcatagcatacaagaacttgctggaatccttttcggaatggccacttggagatatttatcaaattgttgaaggaaatttattttatttagtgtattgataattatgtgcatcaatgtaacaaattctctaattcatttttggattataatttctcatttatttttagacttgataattttgtgtcccataaaatgactaaatgagcttacttaactggtataattaaactctaattttcaataaataataaaaaaaaaatccttttcttaattatctgaaaatttgaggatgtttagaaaaactacaatatatctgttacttagagtaaatatttaaccaattgatacacgtaaactaaaacaaaacaaaaacatgcttttcaaattatagtgttacggaaagacacatattctaatatctttctgtttcgaagcgaagctgtccctaatcatcaattgttcccttttgaggctcctttggatcccaaataaggattttttttttcctgccaaaaaagagccacaacccacaacaacacacacatattttgaagaaaataagagaaaatgccaggaagatatctcctgggtccagccaactttttcattttagagtagcagatggcacgtgaaattttcatttggggaccattttttagttaccattatgtaagtaaaatttattgaaccgcactcgtggcccattgtctctcagcccttaaaacggctaaatggagaaggcccattctgtagaccaaagtagggtatgggattacttagctaggctcatggctataataggcccacaggtggccttatcatgttcgtaccaaatcctgttggggcctgaagcccaatacagcaaaataacagagcacttgagcccaaaagcaatagctgaatagaatagacatgactctagcatagagtgttgggtttcattcatttgcaataattttattaaaaaatttaattaaacaaagttaattaaatccaatatgcttcactacaaaatatgtaaaaatttaaactaaagaaactgtgaccaacttcatctattggaaaactggagcttataaaaagcaagtcactgagcattcttatagaacaaagatgtaaaatcctactaaccaaccaccagagaaatgaacactctcaacactggttgccttcattatcaactccacttattcatcttcctttttttttatgattaaacagaagagacattattttaaatgtttcggggagttggggtctcagatgagctagtgctggaatcgcctgcagttggattcaatgctgaaccactgctcaaagaaccattcccatcggcttcttgagacacaattgggatcttaacggccgctgctctctccatctccttttcaagctcttcctcccggcgcagagctgtgaactgggtgtctaaggaccttgcagccccgagccaagcaagaacaatgacaaggagtattcctcctaagtaaggagtggaacttgcaagtgaaccaaaggttagaatcataaattgctggatcaatgccccaccagacttccccaatggattgcacacaacatcaatggctgccttccctttcacctataagcaccaaaattaagcagtgagtaacaatagtctttcttagttcacacaccatttgagttgttaagataaaatcaatagagtttgatttttgtgttcaaaccttggtgtcctcatctaaaggaatgtatgccatttctttgcaaggatcgaataaactgtacttggcacttttgctgaagatgttttgcagtgcaccaacgtaaacagctgcaagaagaggagtcatcccaagaccggcaagagctggtgtgagtggcgcgccaaataatatcaaagagaagaaaccgactccagtcaagagcaggactgttggtgtgatagccgctgcaactccccatccatatttctcaaagataaattgacttgctaacatcattatgaaggttgctactccagttgcagatgaaaagtctcccatgaaagatgagtatgcattcgggcttgggaactacaaaacaaaacataccagtgtgaaagaggtgagtaaataaataaactagccaactaaaattgaaaggtaaatacaagttagtatcaaattttacctgtgctttgagttttgatttccatgtaacctcaacaaggttgatactaataccatatgcaacaactacagtggcgagatctctaatgtattttgaagacaccaaaaacttcaaactctccattgttcccatctttggcttctcctgcagaaggaaacatgtaaacaatttatttacaatcataaaacaactacaaatgaatcaaaatcgctcaaagtcatagccggttacaatgtacttcgtaaatacattcataaagaaaaagtcaacttttcatgaatactgaggaagtttaccttcttcttcctgctacgagttggcagaggaacataagcattcacccaccagtacaagaaacagattgtgaaccccatcccaacaacgatactcatcattgctttaagagaaagagcccagccatcgacaccaggaccaagagatgctctcatattagagaaatacttcactgttcggcctgagaaaataagagcaatattggcccaagtccaaacaaaggatagaatctttttgcttcatcaacggtcgttatctgcaaaagtaggcatgtaacaaatgtcaaaacacaaacaatcagatgcacaccatagattgtgatatagaagaataacaattatcaacaattgagaaagtgggcaaattttctttcaaggagatggtaccaaagccaatcacatcactcttatataaatatatagcttcaagaaccgaagtcaaaggaaaattataacgctatctgtatatgcattcaaaaaaaaaatgactggtttgacataacaactaaaccccaaagtacaactttgttagatatgatttaatcttcaagcatccattaccaaccaaacaggaatctcttagacaaatattactcaatcataacatcatcaagaattgaagcaaaaattcagatacctgattacaaactacaaactcagtatctattattttaaaccataatcttcaagcgaataatagaattgaaatttgtatttatgagttgatgatatacctgattggcgaacccccaaaagagcactgaaatcaccacacttccccacagttcagccatgacatagaacagacaaaaactccatatcctaaggatagcaagaggaccaaggaatcttggaccgagggtttggagaagcttatcagctaaggcctcagggtggatgagattgctaagaggatacaaaacaaacccaaatgccccaaagaaggctatgaagggaagaatcacagtataaaatagagctttcttagataaaacattagacaactttgtgtacaacaacataaacccaatagccatgggcaaattcacccaagtcttaagaaaaggaataatctccgcactactccctttagctgtgacaaccaggacatcttttgtgtccctaagaattgtatagttgaaaagaatacaaaagaacatcaacccaagtggtataatcttcttaagggttgtaatttcaacacccaatatcttaggagcctcaggctctttaaataaaggctggtcctcagctgcagcagctgcctctgccttacagatgaacaagtttctctctttcgaaccaaacccatgatgattttttgaaacaaagcttggaaatttattaaacccatttgaggataatgaaatcccagcaaggggtttaggcttggttgagaaaaccctttgctttaagccaagggatgggaccaaaacccttgctctcgggttctgaggcaaggagagaagcccctttgtttgcagaacagcttccatgtctctcttcaatgaaacccaatactcaaaagttcaacttttttctctttcaatggaagaacatgaagagagacacagataagaggaaaggttaacgaaagcaaaaaaggaagaaagaaagagagataaggtggtggctgctgctggagaagattacttttttattcaaatatcaaacgagggcattacaaatatctttatatataccacactcacaataataacaaaaccaaccaaaaccaaaacccttgattgatagaaaaaggtaacttaaaaatcatttttttttcttctaataaattcatttaattcattattattataataaatacctacaaaaaaataaaataaaattggaaaaagaaatattctaattttctatgaaacggtttgagttcaaatcgggttggttcttgaatcaaagaaacccccccatgacactcggtaaaattttcaatctttgtgaacaagaagacaaattttagagactaattcagaatggactctttgaaattgtggtaatttgcagtgtcagaaaaaataaaagggaaattaataaaacccaaattaaaataagaaagtgtacgtggaacggccaaaccaaaccaaaaagatacctaggaaagtttagtatgggcaaggacttgaattacccaaaatacccttgctttagtaaatgacagaaaaaaccttcttgggatatttttcagaggctttgcacttttttaatttactttttggtgtgttagtaggcagtgatagtgacacgtgagatataaaacaagaggaatgtgagataatttattattgagtttttctttttagagaatgggaaaaatatatgacaaacatttattttgattaaatatcaaaaatgtttggacaataaaataccagttgtataaatttactaccaccacttataatctattagatttagaactttcacttttttatatttatataaattaatatacataaaattcttacattttctaatgggattttttaaaaaataaaatagtacggttcataataaacatagcatttatttaaggttaagagtagtatataagtgtctaaatctttaattgttatattagttggttaatatcatccctacatattttccaaaccatttttatgaaattattttttatataaaaaaaagaaattattttgacaatattaattaattctgtttgctatattacacactttttttaaaatacctattttagtttgctaaaattacactactataaattatataaataaaactttaagcaaaaagttataaaataaacaatttttaaactacacttcatcttacaacatttgggttttttattttttttactagaaaaatgagaaaaattactaattataaacaaaacaataagattttgggccagtttggcacagctgtgctgtggggaaaagcagctgtagctgtgctgtgggaaaaaagcagctgtagcagaactgtggaaaaaaaagctgagctgagtgtttggtaaaattataatttttaaaagtgctgtgagttgttaagattctattacaatataaataatatttttaaatctagttca

SEQ ID NO: 271808 - DNA, 921 bp, Cannabis indica
ccctgatcacagtggctctttgcctactttttggatcagtatttttagattggtggctcttctttagctctacttcgatcgttttttttttggtcgaatagttgctagaggttttttatattttattttgctctgataccatgttagaattgggaataagatgaatgagattctatctcaaaactaattggcaaaatcaattgacaatgagagaagtagcacattcatcttatgtattctattatcttttcacacattggcgatgtaagactatctaacaatagaacatccttgtgtaatttagttgtgtaattaatttcatgtatgttcattttttatttttagggttcatttattttagagtattgtttaggcaccagtagtgtctagtaacttctcgacatgttgcgttgcgattggctaacgatactccctaaaagctattatattaatctatatgagacccgatacttagttggaccaatagcaatattaacacatagaatggtgctaggcaccagtaataccgtttagcatttctctttattttaatatgatttgattgactaaaaaatagtataattaatgctagtaaatgtggtacattattttatatatatatatatttataggaatgtacatcaccatcaatattgataataactcataataattcattaattgaaaattggagtgattaaaaaactattagcttcgcaagagctggcatgactgagctgctagccgtgcaaaataattaaccattaacattataagatatatataagtgtgaaacacaaccacttaattcaaccatatatgtaatattagaaattgttagaaaatattattactgtctaaaccctcctcagtatagtatgatattatcataagtatcgaattttatataatttaaaaaaa

SEQ ID NO: 271809 - DNA, 666 bp, Cannabis indica
tttgaaaataatagtattattttatgcaattacgactgacaagatacaaaatttaagagaaatgctaaagggcaccactggtgcctagcaccctcctacgtgtcaatatcgctattggtgcaattaagtatcgggtcccatattgtttaatataataatttttatagagttagccaattgcaagtcgacacatttagaaggtgctagacaccactggtgcccaatagcaatactcaaaattaataagagattataatttattttttctatttttttattgtatgtttatgaaataaaaggaccattgactcaactttagtcaactttagaaataggggaaaaaataatgagtttttgcttaaagaatgccaagagtttgagccttcaacaacggcattgccattgcctataatgttgactatctatcatctatctatactcaaatcattttcaataaattacaaattttttattcgtagtctactcaaaatgatagagttatttttcagtcaaaattggacaacaaacacttctaaaatatattaagctcataccactttgtcacattatttttgaaaccacaaaagaaattaatatgttgcctctattatatgccaattattgaaaataaaaataaaaaattggtgatccaatctatatatatat

SEQ ID NO: 271810 - DNA, 510 bp, Cannabis indica
acacttaaattatcaagttttcttaaacactataatatattacatcctgtatttacttttaattgtcaaaattataaattacattatttagatatacataataataatctcacctaataagtaataatattttttctttaattgttaattatatcttttaaataaagtaaaaaaacacctaacataaaattagtatactgcctcgcacgtaactttttactagtatatatatatatgatagttgtttgggatatagttctctacaaaatcgagtggtgatgatgagtaaatctagtagtttcacaattctctttagttgtccgaattagaatttggctatgctgactactcaattttatattttagttttaatgatggttttaatatacagaagtatatcctaaataattattatatatttatataaatggggtcattaattattagaaaattttgagtttttgtacttaattttattatttattaaataaaaaaaaatctgatttttta

SEQ ID NO: 271811 - DNA, 570 bp, Cannabis indica
gagctaatgttgtttgaaaaaaactagaaaatctctttcccaaaagaatggttggtaataaaatttctctacttagaagacttataaatttgaagtacagggatggcgatagtatggttgagcatacaagtcaattttagaatcttgcaaaccagttagttgccatgaagatgaatatggatgatgagatgcaagcatcatgactcctcagttctttacttgacagttgggaaacgttggtgataacagaatctaattccacaccagaagggactttgactatggatttggtcaaagatagtttgcttaatgaaaaggccagaaggaaagcacaaggtgaatcttcttcttcttctggggctcttgcacctgaaatgcatgataggtagggacgaagtcagactagaaatcagcatggttcttgaagaagatccaagtctcgaaaatgtatcaagtgttatcattgtaacaagctaggtcactttataagggattgcaaaagagagcataatcaagggaagaaaaatgagaaagagaacaattttcgctgaaggtgatgttgttattgta

SEQ ID NO: 271812 - DNA, 508 bp, Cannabis indica
aatatcttttgttccttgtcacttttaatttgtgtatattattctttctcatgtgtgcatatagacagattctattattcttaatgaacgttgaaaaaatgaaataattagtaatgtttttatataataatatatattgaaatttatacatgtgcattattgaataattagacattatttttgttgaacactagaaaaaggtttacttttagtcacaataaaatttgtaactaaaattaaaaaaattataattaattataaattatcattcctacgttatgactataagatctcgatctagctaaaagtattagtcacaaaaatcacaatttgttatgctaaatttatttttagtcacaattagttacaatttctatctatatactatgttttagtcacaagtaattttttgttgtgactaaaagctacatttagtaacaaaaaaaattatgttatgactaagattttttgagtgaaaatgcgcaatatatgtgtatatatattgtat

SEQ ID NO: 271813 - DNA, 671 bp, Cannabis indica
ccaagattgaccatagatatcatgaatggccatcttggataaatgggtattgaggatggtagagggaagaggtttggtgaaagcatccgcgagttgaagattactgctaacggggatgagtcgaatggctgacttggtgattttttcacgaatgaagtggcagtctaattcgatgtgtttggttcgttcgtgaaaggttggattattggcgatgtggatggccgattgattgtcacagtagatgaatgcaggtgcaggttgaatgatgtgaaggtcttggagtaagtattggatccatgttatctcacttgtggtggaggccaaggcgcagtattctgcttcagcagaacttctagagacagttggttgtttctttgttttccaagaaatgaggcaatcgccaagaaaaatgcaatatcccgtagtagagcgacgagtggtaggacaagttgcccaatcagaatcagaaaaaccccggagatggagagatgatgtggaagagtataaaattccttgaccaggggatcctttgaggtagcggagaagatggtgtagagctgtcaaatgtgatgttcgagggcaagacatgaattgactgagagtattgaccgcaaatgtgatgtcaggccgggaaagagtcaagtataagaggcggccaatgagttgtctat

SEQ ID NO: 271814 - DNA, 595 bp, Cannabis indica
tatttaaaaataacatccaatccgatccgattacaattgaatatccaatgtttggcggtcggttataattggatcggtcggttctcattggattggattaatttatgcacacccctaatttcgtcacaatatccaccttcccaatagtagtttttccttcacatcttggcatcatggccatgcggcccatgccatgatgatcgaaaatcatcccggacactacccggggtgattagagcaaatgaaacattattaatcacaaatatataattaatgttaacaatacaaaaaattattattttttgtgacaattttttagtcacaacataataaaatcttacttgttactaaaacatagtatttagatacaagttgtaactaatttagttttagtcacaagtattgtgactaaaacatagtatttagatataagttttattaatttagttttagtcacaataagtcttgggactaaaaatatatttagtcacaataaattgttatttttgtgactaatacaattagtcatgggcgttttagtcacaatataagaatgataatttataattacacataactttttcacttttagtca

SEQ ID NO: 271815 - DNA, 4805 bp, Cannabis indica
taaataaaaaaatatttaaatttatataaaacgtattttataatttgttgtttttttttttgaatttgtgaaataagctctgtaataaatacatgaaaaaagcccaatttaatttaatctcaaacttctgtaattttaattaattcggttttttttttttttttgtaaatatctttaagctatcttaaataggtgggtacggatagagaagagggagagaaaagtaagtagctgtgtatgaaatgagttgagctcgccccaagcctttttgtttcccggtggggttacccgaaatatcaggatcgtgcagatttcgacacgtggacccacgcttataatcggatgcaaacctatttatattccactctttattcctcttttctggtccgccctctctctctctcttctctctttcttcctcaacgtcgttcttgtttctcactcctgtatcctcaaaccctagaacccttctcccctccatccttgacccgatttcatgattcggttctttaacaccttagattttctctcctgagcatttactttcccattctgtttcccggagaaaatccagcttggattcgttattttccgaaacatcgtcggagtagtaggaggaggcggtggaggaaggaatcatcgagagataaatggcgactgcaacgagcagtgtgtatgttagtgttatcgaagatgttgtcagcaaggtccgcgaagagttcttgaacaacggtcccggagaagacgttctaaaagagcttcaaggagtaattttagccaaaatttcatctttcttgttatataatagtcttccattttgaattttatagttctagattcactttttgggtatttccactgatttattgcggttcttgctagagtggtgttacgggggttcgatccgatcttcgttttagggttttgagatttggctgagatttgaggttaagttatggtttaactgatccaatgttgtttcgggaaaatttcagatgtgggaaacgaaaatgatgcaagcgggtgtagtaaatgcccccatagagaggtccggtgctgcgaagcccacgcctggaggtccaattactccagttcatgatctcaacgtaccatatgaggggactgaggagtatgaaacccctacagctgagatactgttccctccggtgagtattttattataaatatatatattgatgtatgtcaattcatcggtttcgttagtcttgatttatcatagttgacttgggttctttgaaatggtagactccgttgcagactccgattcaaacacctttaccaggaactgctgacatttataatattcccaccggtcctagtgactattctgcatctggaaatgataatggtggcggtggtgctggcacacctagcagtggcaacactgagctgaaatctgctactggaagacccagtccatacatggtaaaccccactctgtgagtgtgtgtgtttagagataatatgtaagaacgatttcaataaataaatataaaataataaataataactttctgtattcattgttgtagcaacctccttcatcttggatgagccagcggcctccactagatgttaacattggtaagcatggttggatactgctgacgttacgaagcttctgttctttatgattttatagtaattattgctgtatggatgtagcttatgttgaagggcgggatgaagtggacagaggaactgctaatcaatcttccacacaagtaagtcttgtttgttttgctttcttagaaacttgaaaaaaagatgctggtttctgatttgaagaaaattcatggttaaagagctgtagataattatggtttatatgattcttttttctaagttttaatgtttattctataattgttgttgttgttgttgtaggaggtataacgttgtatagcaatgcaatcaacatgtcatctttatggttaatttgtgtcttatgtgggggaaattccaggacttcttcactatgaattctggtaagcggaaacgtgaagatcttcctccacagtaccaggctggtggctttgtcccccagcaagatggagctggggatacccctgagctttttgagattgaggtttgtagttttttttttcatgtttccctttttggaagttctattatgccatttcacgtacattatcattattggaagttctgttattttaatttaacacgatcagtttggccctcttgaatattttgtggtgcaactactgttgtcactttgcatttttggagtccttgtattatattctacttattatgtccattgtttttgttgtcctttatttgtttcttgagtgcgacaattaagttgaaattggtatcctacagaagggttgtctgtagataggtgaatatgtggcagcaggtggttcaggcaatgacaggttttagtctgtaggagaaattttgacagaaaagagacatcttctgagtagcttgttgtgttaaaagcattttttggttgaggattcaatttatgttgcagtttatgtattttttagtagcagttcgtccttgttatacggtgcatttttttaagtacaatagctttaagtataaaccttttacctttacctttatttgtatcactttaagcttgattcacgctttcatattaacttgcatatctattttgctatttaccaactaattatttaattttaaccttccaggtaatgggtggaaccacttttcatagtagaggtgggaataatgagatggtagagcgcatgcttaggtcatcctcaaagattcctcaacttgatgggccgattcctgatccttatgatgatgtgctttctactcccaatgtatgcatatttatttgttgtttcatgtggctaaacattatccttttgtcactgtttaagccctgtgctcatctgtcatggaattatttttcattgtctcagttcagtttcctcccttaaatttatgatgtccactcacacagattgttgatagaattgaattcttttgttgtttctatatgatcactgtaataattttgtacaattatttctatgctatgtactgtattatttaaaaagataataatgcttagacatttatttgttagggagtgaatcatcttctactttgctaacttcatttgtcgtagattactttgcagagtagatctaaatactatatttctctaagttatttagaaggttgggatgtcatgtttgtggcacgcaggaggagggggtagaaaaagccacccacaacattgataatttggtggaactttttattttttatttgactaccacatacattttttggattttgggtctctttgtttggttggcctgaattgactagaagtttattttgaagttgaagtagatatatgctattcttcatttgcttagaaattcaaatatgttgattgatattgagctgcagtttgtttctgctagcgctagtgcaacttggattgttgtagtttcttttttttttttttgtaactaggatacccccgcctagccctacagttattggggggggcgaggaaagtattgttcatatatgtgcatgcattcttagtaaagttgcgtcactgtgcttatgtactaagaaatttgtaaagtaccattaaaatgctgttccctttactctcttctttcccccatttattgttgtaaactcctgtttgtacctataccttacagatatacaattatcaaggagtctataatgaggactacaacatagcaaacacacctgcacccaatggtaagtattgggatataaagaaaaatcatttttgttaactccaagttgatggcatatttctttatggtggtgacattttgttgtggaatttattattttatttttttttaatttgatctctctctatttcactctttccttcagacattccagccagcactcctgctattcctgctccagaagatgttggagaggatgatgatgatgaacctccattgaacgaaaatgatgatgatgatttggatgatgtggaccaaggagaggagctaaatacacaacatttagttttggcccagttcgacaaggtaactctctctctcttcactgtgttgttgaagtcagctattctgatatttatttttttttttatttcttttgttcggctattcaatctagtaatgtaaaatcttgtgtatctaatctgattgggtaggttacgcgcaccaagagcaggtggaaatgcactttgaaggatggcattatgcacataaacaataaagaccttctctttaataaggttaggatgtgctgaacaatcttatggtatagtttcatgaggtgtttgtcgccatctctcttactgaaattgtgccaatggcaggcaacaggggaattcgacttctgaatctgattagccgaagatatatatgagtttcgcctacatagtggatgtggccagccttagaggagaacaaggggatggagcggtgtggtcggatgtttaggtgacttttgtttcttgattatatattaagtgaaaagcttgaggcaagagaaaaaaaagaaaaaaaacttgattagtacttttttattaagattgggatggacgttggcccggtgtacataatgaatgagcttttttggcctaagtggatggtcgctcgaggcatttccagaagttgaaattctgtaatggaatattatatcattccatggactttgtatacttgggggacgttttttttttttttttttggggggggggggggggttgggggggggggggcgttaggtttaatttg

SEQ ID NO: 271816 - DNA, 3598 bp, Cannabis indica
ttattatatatatatatataatggggtgtcatatatatcccgacacttagaagccttgtttccccttcttccaactttgagccagatgattaacacttaacagctattgggtgactaagatttcagagttattaatcactattttaaggtactaatcacatttccatattcaatttataatttaattattataacaaaaaagaaaaagagcattataattaagacacacacccaatacttttacacctgtcatgatcatactctaaaaaaacttacttttttttggttagggatatgcactactattggtcccttccctctagggtttattagatctaagatctctcacatcacatgtaatcatgtcaattagtttaattagatatattatgagcacaattgtactatatcccattccaaattctgttaatttgttaattaattatacctaattaaattatgatcactactagtagactagctatatggagactttagagatgtgacataaattaaattaaaaaaggcaaaccaaacataaatatttgtcctaacaatttcgaatgaaagatgcacactaggaccatatatttatatatatatatgtactatactgcatcatatcacatttcaattttcaggagaaaaccaatatattatggctacctagctagtccaccaggcccccacaatacacctttatatgtatatgttatatgccacaaaatattattccttatctatatatataaatataaattcaaccttataataattttaaaagagtgtctttatataaatatgtatattttcccttcttccctattatcaaaccataaagtttttctacatatatatatacttagggatacgtgtatataatcaatgtcatatatacacatcataatccattatccactaccaatactactacacttttcagtatttttttaaaaaaaaaattaattatatgtataaattaaaacatacatatattataagacctaattaatttattattgactttttctgtatgtagtggtttgtttgtgttgtaaatgccacacagtcttcttccatgtttccctcccaccatactaaacttcatcacgctttcacctctaattgcgtgcttatattactaattcccatcttattatatattaattacactagttaatctaattggttgtgatcaccttatgacttgtaagagataaacgtaaataattaataattacaaaatacgtaccctttaaaattattaattttaaaatataccttagatttcaccaatcccttgaattacgccttaaattaagccattattattttggtggattatgacttcaactagtctctatacagtatacatttgtattgatattaattattttattataataattacaatataagctccaaactcaaggtttagggcacaatattgtaagtctaccctatatatttatttatattgtctttcttgattcttctattctcaattaatttataataattatgttgtgacacactgaaaaaaatagtgattaaaccaaacctaacctcactcgtcgtgaaaaagatggtagtcaaatcaaatacacttaaaattaaaatattaatatttacaaaaataaataaataaaagagagctagcttttttaatttttgctattgggagccaaacaccactatggcatagcttgtcactttcagtaaagttaaagtccatatgagaaaatgcacatatattaattttatataattattcattttttttgaaaaaaatatatattaattattcccaatatttaatgtatatatagtttttctaagaaaaaaatctccaacagctaagtcagtatctttgaggggttataatttaatgaaacaataaccaaagattctattatagtacttaattgagacttaattaatgattaaatttgaaagagttttgtacaaaatgtggattgttgacaagattgggaggtggcattccatagtccctccttttttaaaattcaatatttaattaattaattaaaattttaatcagcttttaatcataattaattaattaattaattacttgatcttctctcacacactcttttaagggatttccaagaattgggttttctctatccttatgtcgactaccaacctctagcttttgcacatggtaacccactacctaagaaatgcatacaaatgctgtttttatttatataaatatatatatatatatatttactgaaaaaagatctaccaatctttgctttgataataagtagtgtttagtggagtattatattagtaattaaaaataaataaaagtatatattttcatgtaacacgtgtaaggctaagcttaagaatatgtgtatatatgtgtggtggtagatactgattctttggagctaattagctaaattagttaagagtcttctggattgatctttcaggtgtcttagatccgaagacagtgctatatggaacctccttttatgttctataatacaaatactttggtcaatatcttggggaccgatctatctgtgtatgtatgtatatatatatatatttatatgtatttgtatagtatatggcatataaatcaccacctagctagtatgattttcttgttagctctataaagatttatgttctatcctatatgtgtagtgttattggtaaatttcaaaagtggcaattggaattggaagctttaaaaactttttatttgtttattatactctttctttaaagatccaaatcatatgatattataatctaataatctcatgggaagagatgaaattttcctaatacacttggagagtactgtagtagttttttctctcactctttaacatgacataaatcaattgggctcccattaatttctcagctccaataactttattaaaatgatggagaatgttatttgtatggtttttaaagtataagggtttgtaaaaatatggtttatttttgaaaaagttattttattagaaattttagaaaaaaaaaattaaaaataaatggaaaaaaaaaaaagacatgagatacttggtttctcacatctggtaattggttacttaccccttaggttaccatatggttatctttactcatatttttctaattttttctaaaaaataaataaataaattattgacccactgacttaacaggtctataggcctatccatctaggcccatttaatacagtacaatgtgaaatttacctttttatatggttttgttaaggaatcagaaaatttaaattaaattacaggaaaccaagtatgctttgatataatcctaatttttgtatattttccttcatctcaataacttttaaaatattattaccatcatatttatcatcaatacaacaaacaagagtaagttataaaaaaaattattcctttacatagattgtagagaaaaaataaatagaaaatacatgatatatggaaaaaattatatgagtttatttttgtatgatataaataaataatgctaaggggttatgggttatttttgttttttaacatttatagagatttttttatgctatattttt

SEQ ID NO: 271817 - DNA, 998 bp, Cannabis indica
agatgaataaattaagcagaaataatttacaacagtggactcagcagaccatgatctaattgaaccactatattcccttgtcttcattttatttttccagttgttttattttctaggcaattttctttgaatactcactattctaagtagagtaattgctatttttcttttgattatttagtgtttgcatacattttggtgttgtctgaattcctccgacaacatttggtgccttttgtgagaactctcttatcgattttggagcaaaatcatcatggctgccaaccaaacaaatggacataacaagatcctttaatgttggaaccatgcacgttcctatccctagaaatggaacaaatccaactgatacaatcataggacgagtgggacggaccaacgtcaccccctcgatctattcccaaaagttgctggacatgctggggacacatccacaccagcgactacagtaggtcacttcccgcgcgattacaccagtggtggcctccgaaggcattatccaacttacgacagcatagtacacgaccatgcaggaacagatgcgtgctctgcaagctgaagtcgatggaagagaatgagtcaggacccgacgtccaccccaggtcctaaacccacgttcaggcaaccctcaggtaaccaatacaactagacgtcatactgagcgtcctaacaatattcgtaatcgaagggaacaaatgactgaacaagaaggtctcgacctaaaccaacctacacgcgactctgcctgaagtagggaacctgttgtccctgatgccagtcgtcaacctgagagaagagaggagagatcgcaagaggaggatcctgaaaaagtcactggtgccggaagaaagttattgtcaccggaaacttgtcaaaaaagtcattgttgtcggaaaagtcattgtcgctagaaaagtcactagaagtagatatctcaaatataaataaaaatagaatcggctctataacataatgaataa

SEQ ID NO: 271818 - DNA, 609 bp, Cannabis indica
ataaataatataaatgaaaattttatttgataattaatttcaattattaaataaatagttttggcatttatatgattgaaagtgcaaaaagtgatatttgtgaaaaatagataaatgattgagaaaagaggcaaacatctaactagtgatggacccacataagggctggcccctaggtcctatttttgctctatttttatcattttttattccaaataattcaattctaaccctaattgaattagtataaaaagaagagaaaggtctcatgatccaactaatgcttctatagctttaaacctaattttcattctataagataactagagttttgagacttcttcttcttttctctctaataattttgaaattcttagtgttcttcaccatcaaaattcgaaccttagtgattgagtgcatgcccacccatagcaagttagtcctcaatcatggtgtgtaagactgtgaagaatccaaacaactaatggagtgtcgggctcagatcttggtgatactctgctacaaaaaggatacaagggttagagatctgagcggagggagtcattgaattctgctgcaaccaatgtaaggtttgtcataccttttatg

SEQ ID NO: 271819 - DNA, 3141 bp, Cannabis indica
aacaaagcaccacacgcgacagttatttacgcgacagaagtaactttcttgatcaaagagaaaaatatgcaaccctttttaaacttacccagagcaatttgcatcttgtctgtcagaaataggcgtggttttgagactctatcagcaaaagtatccaaaatatcttccagtctccttcatgaatccagtagaaaaagaatgtcacagaaataaatcgtcaatcataaacaagacgtaataataatcattccatgattgactgtatagtctgtattgggattctgcaattactgtacatcattataaactaagaattagaggaaaagcaataaaagatgcccagtaaaactgactagctatgccaaaggaaacatgtattcttaaccaaaaccagagagtcactttaagttctctagttaccattaactcaactataattgaccagaattgtaaaaattgatcttataaccaccctaggatgtactactataacctaaaaatgtttgtaaacaatttacaaatctaaagctcttccagaatttatcttgacatttccagtacatttatattcccttcccaaatttcttcaaagcaaactcaatgtctattgcagctattagagaatgctgatgcgtccaaccctattgcatcatgactgaatgtgttgtatgtagtattaccaagaaattgttaccatgtattagaatgtgtaaacatggtttagaaaggaggatgtacagaattccatcaagtggagtagcccatgcatattatatatggtgttaagttttcacaaattattaatgtgggactctctaacaccatacaacaattaaatcacgtttggaaattaggatatgactggatcatttcaatatcaaattggagatattgaaaatttaatgaacaaccaaaataatcctcctggctaggtaatcccattgaaaattttgaaaatttgggacaaatcaaacctatctaatccccatctctatccgtttctatggtaagaaaaaagagttgttacttagaatccaatctaatttcttctaatctattgttagaatatgatcatctcattcatttttctataatttcttatatttttcaatccaacaaggcaccccatcaagactactaaactataaaactaaagtgatggtttatgtaattatcaatttaagaatgcaagagagagtcagatttccaattctagcaaatgaaaaagaaagaaatgagtccaatgcaatcttgaaaaggaagttggcatgtgtagcttaaattcgtatgtgataatcaagttcatttaactacataggtataggatatccaagaaatgaatgagtaatggagaatgaaacatacttgtagactttccagaagagaatccgcaggccctcttgaaaggcaaccgcggtgaataaaaggactccataaagccaccatgtatccgatttcataggaagaaacgccctccatagtccagacaatatgatcaggcttattagccataacagggtactgaaccaaaacaaaaagagcttttctaacttccatgaattaaaatgaacagaaatcgtttccatacataatatttattaaaattgaaagagtaaaagaactagagaagaagaaatagaaaaacccttaatttgaaaataatattataataagaccttgagaggacggtgaggatgagaaaaggctttttggagataactgagaggaagagggaaagagaaggtcccaatgctatcaaggcatacccaactcccgctgcaaccgtcatctcattcgccctctcttctcttctcttctttctcttttctttctttcttcactccattctagcttaacatcctccccaatttttatttttattttatttttttagtaatccccaatctctttttaagaataatctaactttaaaaaaataatataatgggagttctaatgtccacctttgtttttgttgactcacgaaagtccgaccttttgtttagtaggtaatgacccttttttttttacgtggtgaacaaagtcacacataattaataaagtagcaaatcacaatcggcgttaaaacctcatcgaactaggatagctcatcgtctaaccgaataacatgttttatcaaaccatgagctacataattcttatcgcgagctacatagaacaaaactgctccgaaattttagataataaaactataacgttttcaaacaacacctcataacatttaaacaacactttctcattgtttatagttgtcgccaaagctaacgaaactaaaaaaaacatcacaaactaaaccaaaaaatacaattatattagaataataatatttaaaataaaaattaataaacaaacatagaatttaacacaacccatatcactagttgaacattactaaaatactaaacaaccaacaaaaattctaaaaataattagccaaaggtactatcttttggctaacgtatatatgttaggccttagatagatgattaatgctaccacatcagtacgactagggtattataggtgttcgcggttagtcatactttgtctagaacgttcttgacccagttattagatcgtgaataggtgtatgggcgcctagttacggtctggatatatgtttatgtttatcattatactttttttactgagtctgtcgactcacagttattacttgtacgtgtaggtaagagttagaatcgaaccgggatgagtttaaagctaagggtgaagattgtacatatcaagatggttagacctggatcgttcagggtcttagggacagtttaggctcacctttttaatagtcatataaagtcaacttttgtaatgcaaatattttgtaggcttatgcgtattttaataggatcccgaacttataaaaattatttttattttaaaagttatataatttaagaaaattttaattatccatgttttccattaaaccctttaattagcaaaagcgtgcacagtacttaagaaacacaagcctaatctagtagggtgttataatgctagccttcaaggcaataacttggtattcagtaagtcggcaaggtgtaacgccctatcccatagggacgccacgtgtgtgattttataaactagtttaatact

SEQ ID NO: 271820 - DNA, 574 bp, Cannabis indica
atttttgtaatttttttaaaatgtttgattttttttttgcaaattttccatcgtaaaattttactctgaactattcataatttttggtaatgtaagataagacttcttttaagttaatttatctaatgtgactaatattgatgtattttttaagtgactgatgtctgcataatttaaatttcaacactgtaaataattttaaaaagaaaaattaacaagtaaaaagtgtagataacacatcttgataataataatagtgcaaagtgaaaatcctacattagctagcctaaacaaaattaactaaattgatgttctttaatcggaaaactataataaaaattagctttatttagaccatagaagctttttttgtttttggaaagaaaacacatacaactaaataactattatttatatgcaaataaaatgttttaataaaaaatattaacacatgcaaaatgaaattagttagaaatgcaaataagagcatctccaaggactacatcaaatttggtgttacactatcaccaaatttgatgttaaaaattatcttcactccaaccacaacaccaaa

SEQ ID NO: 271821 - DNA, 2693 bp, Cannabis indica
aaatagggacaagccataaaaaatgacacaaaatgccataaaaggcacataaactgtaaagggcaacaaaactattaaaaaatagtgcaaaaacttgtgtagtctcacaaatactttaaacatataataataaaatactatcattaatacttcaaaaacaatcaatataacatatgagggaaacaaattaaagatactttgtgaaattcaaaattgatgttataagcgaaacaaaatataagaaaagatttcacaataagactaaataaattataaaaaatgtctttaataatatatataataaaatagaagttctaaatttgatattaattagcattattacttaagttgagagttgagagagttagagagattgattgaatcatcaatggaagtcatcatcatcatcaccaccatcaccctccttctaatctctttcttcttcctcaaattcattaccagaagaagaaacccaactcttccaccgggaccctttgctcttcccatcatcggaaatctcttattcatccgaaaatccttctcccaactcgaacccatcctccgcaacctccacgccaactacggtcccatcgtctctctccacctcggctcacgccgcgccgtcttcatagccgaccgtgttttagcccaccaagcactagtccaaaacggcgccgtattcgccgaccgtccaccggctctacccaccgctaaaatcttcaacagtaatcagcacagtatcagctcagccaggtacggctcgacttggcggctcctgcgccgaaacatcagctccgaaatcctacacccttcaagggtcaagtgctattcacgcgctcgcaaatgggttttggatattctcttaaaacgactcgaattggattcacaaaacgctgccgttttggctcattttcagtacgctatgttttgtttattggttttgatgtgttttggggtaaataataagattgatgaaactaagattaaagagattgagaatgttcaacgtcgatcgttgttgactttttcaagattcaatatactcaatgtgttcccaaggttgactaagattgtgtttagaaaaaggtgggaggagttgttgaagctgagacaagaacaaactcagattctgttacctctcataaattctaggaacaaggttgatgatgatgatgattttgtggtttgttatgttgatactttgttgggtttagagttaggagaggaaatgaggaagcttgattcagatgaaatggttagtttgtgttctgagtttttgaatgctggtactgatacaacctcaactgcattgcaatggatcatggctaatttagtcaaatatcccaaaattcaacacaagatttatgatgagattaaaggggttgttacagccaagaccggttctaaggtatataatattttctctatatgttttcttattatttaatagtttatctatatgctaatatatatttttttttcttcataatttcggggcggtgagcgttcggttgaaggaggagaaagaggggtgattgaagaggaggatttggagaagatgagttatttgaagggtgtgattttggaagggttaaggagacaccctccagctcattttgtgttgccacatgcagtgagtgaggatgttgttttgggtggacatttggtgcctaagaatgggagtgttaatttcatggttgctgagatgggttgggatccaaaggtgtgggaggatcctatggagtttaaaccagagaggtttattaatggtgatggtagtaaggttgagtttgatgttagtgggaatagggagataaagatgatgccttttggtgttgggaggaggatatgtcctgctcatgctttggctatgcttcatttggagtattttgtggctaatttggtttggaaatttgagtggaataaggttaatgatgttgatgatgttgatttgtctgaggtacaagagttcacagttgttatgaagaatcctttgcattcatgcttgactctcaggaagcactaggagactatcttgttaaaagaactattatgtctatctactgttgttggtttaattgtcttaagttaattaagttgatcaataaagacattatttgttgtggttttcatatggctggcttgatgttaagacacatatatatgtagtagtcctagacaattaacaaagactaattgaaaactttataaaagaattgaagaagccttcatttgacagctgaggtaatccatcatccatcgagatcaattccattgtattttgttaagacactgtttcgattaaccaatctagtagcaaaacacacacaaaacagtagcaaatagcacaattgatatgtatattgaatatatgagtaaactatttacaattgatagaaacccttagccccctttgatgcaaaaattttactcacctatatatagtaattcctcactcaaagcatgagcatgagggattattgacttgaacagcatctgattctcatcatcataaaatgggtaaataccattttagaccctgtgttttgtaaaagttacagattgaaccctgtgttttattaaatgacaaataaaccctgtattttctaaaatagtaaaaataagaccttaagcttaattttgtacaactttttttaatacaaccaacttgaagacaatgcttaatacgaaca

SEQ ID NO: 271822 - DNA, 823 bp, Cannabis indica
cacacagctgtgattagtccgcttttactgggtcaaagtaatcgtgtattaaacacgttataaatcttaacgctctgggatgtctcgataagaacccagtaccaatgcctttgatagcgagctagagcttttcccatatcttttcgaggttgataatgtaaatctcgtcgctcctgcgctgaagacataatgctccatctgacaattgcaattctcggcgacaaggtgaacttctacagtcatgtgcatgtcttcctatggcgagatggatgcctcgctatcatttgcttggatttactcgtctattatacttagtttgtatattatatgctaagtgtcttcacagtcattatatcttgcttacgtctactcatgcttaacgaggttgatgcctcgccttatgcatcccttgacgtatggtttctcgctaatgtatgaggcaacaatttgtatatctttatcttgtgtaagaccttatagtcagcaagttgtaaatatactctgtcacttctgcatttaatgaattatttcattttcagtataattactatttcatgcattgatccctactctttccaatctgacatgtgttttccgttgaaatggtactcgaatttcgggtataacacttagttcctttgaataagtgatatgaatgattaaaaatataccatctaccataaaaattaaacctaaaaggtatacaataattatagtaaaaaataaatatcgtcttcttatacttcttaagttataaatacaatacacacatatgcacatatagtttcctatgagcagccggattgtgtgaagatcatggagg

SEQ ID NO: 271823 - DNA, 1095 bp, Cannabis indica
atattatatatatatattaaatggaataaaaattaattatttattattttctatcttcttccagccatgttatttttacagattaacaatagattttttttgtaaggagattaacaataaactttgattctcgattcaaatgctatctttcaattctattttcatatattcaaaattcgtattccataaactttctactaatattttccaatcaatgaaacaaaaaggcaaactttaattttcatatgaaaaatcaaactctcaatcccaataatcaataaaaacaacatcaaatttcaagttctcaaaatttatgaaaataaataaagggtgaataccattttggactatgtgttttgcaaaaattatcaattagaccatctgttttattaaatgacaaaatagaccctatatttttcaaaataataaaaataggattctaagctcaattttcaacaattttattttttaatataaccaactttaagacaatttctaacacgaacgaatacagaaaatgtaaccagttttgtcataatatctctaaatcagattattattaagttttattttgataaaaaatcagttcagggtcctatttgtacaattttagaaaatacagagtccattttgtcatttaacaaaacatatggtctaattagtaacttttgtaaaacacagggtccaaaataatatttatccataaataaataaatataaaaataaatctcataaacacaaactcaaacagtggaacccctgtaaaacactaaaactcaaacattaaaaacacacacaataaaatttgaacctagaactcaacatacactcatcaaaataaaaattaaaccttaaatgaatcgaatctaaactcaaattcgtcttcttcttattctttggcttggtctccgttcaagaccattaaatttggtaccaataaaattataaaactgctaaatttagtcatttgaggatttatgctacaatttttcgaattccgatatttattagcaacaaatttaacattttaagtatttatgtcacaaattttttaataataaagttaaaattttaatataattttattaagtaatt

SEQ ID NO: 271824 - DNA, 939 bp, Cannabis indica
gatcttgtgtgagtttcccatttgttagatcagacttcttgaggagaaaatcggagctaaactttcctttgctataaaagaaagtcgcatttactactcacaattctgtaggtattcctaggctgattgaagatttattttagggaattttctagaagaagatccaagtctcgaaaagatatcaagtgttatcattgtaacaagccaggtcacttaataagggattgtagaatattgaaaagagagcagaatcaaggaaagaaaaatgagaaagagactaatacaatttccactaaaggtgatgttgtcattgtatgtaatgatgggtgtgttaatcttgctacccaagattgaagttgggtgattgattctggcacttcattccatgttactgctcgtagtgattccttcacttcttacactactggtgatttcggcaatgtcaaaataagaaacagtggtgcatcgaagattgtgggtattggagatatttgcttagaaatcagtgttggtagcaaattgattctcaaagatgttaggcatgttccagacattcgccttaatttaatatctactggaagacttgatgatgagggggttcataaactgatttggtcaaagtaaatggaagctcaccaatagttttcttgtagtggcaagaggaaagatagtgaatactctctatgttatggaagctaagctacacaaaagagagatcaatgcagttcaaaaagatgcaaacattgatctttggcaccaaaggctcaatcatatcagtaagaaaggacttcaaactcttgctagaaagcaaatcttaccaaatttgtaaggtacgcctcttaaaacttgtgatcattgcttagctagaaaaacacatagagtttcttttcatacacgtccaccatctagaagatctaatgttattgatttgattcacac

SEQ ID NO: 271825 - DNA, 560 bp, Cannabis indica
ctcctgctataaacacgaagttctttgttacctattgcttgagtttgaagtggtggtgagtttgaaagagtgtttggattttctgaggaggaaagtgatgttggattgagtgtagagaatgacgggtttgatgtgttttctggagatgagttggatgtgttttctggagacgggttggatgtgttttctggattgatatccaattggacagggaaaagaggcaaggaaggcaaaggttgagcactttgatgttcgtgcgccataacattagattgaggaaaaacagcttgatgattctgaaggatttcccaaaactgatattcatgtgaatgctctccctgaataccagatttgggaaagaaaggttgatgttcaaagaatgtgacatccatagtgttataaaccctttttgaaattggagagtaacatttgtaccctttttgagtgttggaatacccgatgaagatgcacttgtgagattttggatcaagttttgttctgttgtgatcataaacatgaacaaaggctgtacatccgaagactttgaatggaagatctga

SEQ ID NO: 271826 - DNA, 752 bp, Cannabis indica
ttttttttttttgtcatttttaaggacatctacatagaaatccctatagtaactaacaaaataacctaatattgcaattaaaatctacatagtaacccacatagaaactaccggagcaactcaaagtctaaatttgaaaaaaaaaaagttaaaaaatagtatatcagataatttttttatattttttaaacactcgtcacgaagcgcgagttgtttactagtgttatataattatgaataatcatgtcgtctctcctctttattcttggtatggaatacatgtctcggattgtggacaaagttgagactaagggagatttcaagtatcatgatatatgtcaggtctaaagcttaatcatctttgttttatcggtgatgtccttttttacggagactttatatcatcctaccggttgttacaaggactagaattattttcacagacatcaaaactatagtcgagtgaagaaaaatcaacaatttattattccaggatgaggcaaagtgaagtacagagattgttggatgattcggggttcactagaagccaattgccttttcattatcttggagtgtcgatatgctccagaggaggggcttttaatgtctgaatgttcaaacttgatagataagatgattacatgtatcagaacatggagtttcaaaaatatctcctttgcgggggaagtgacactcatcaattcagttttgatatccattcattcttattgggagaaaatcatgatgattcc

SEQ ID NO: 271827 - DNA, 1134 bp, Cannabis indica
ttggactttgtggtaaaaaacatcatatgtcagttcgaacttccgcacaagattgtttcaaacaatagcaaatagtttaatagccagatgtttacagatttctgtgtgacacatggaatcataaaaagtttcttcgcagtggcacaccctcaaacaaatggtcaagtcaaagaagtcaataagacactcaaagacaccatgaaaaaattgctcaaagaagccaaagggaattggctagaggaactacttgaagtattgtggtcatactgaataatggagaaaacaataaccgggcagacaccattcgctatggcttatggttatgaagcaatgttgtccgtagagttagaacctctatcccacaggagactaacctataatcaaaaagctaatcacgccctcctggcagaatcacttgacgagattgaagaaaaacaaacctaaagctagtagctcatcactaaaaggtggctcggtacttcaacaagcaggtgcgggcaagaaaattctttgtgggagatatggtccttagaagagtgtttctaaacacaaaagatagcacgactggcgtactcaaacctaactaggaaggaccgtatgaagtagttgaagtcacagattcaggagcatacaagctgggagggtatgatgagaacatggagcttgttctggtaccaaggtactagaacgggaaacatttgagaaaataataccagtaagtgcataaggtctgatgaccccctccaagtgcacgatgctcgaacatttactcttaagtaggtggccttttgagcagacctcgatcaaagatttagatgaaatgactggtactcaggtcggatgactatttctaaagtacaacttcaaaaatataattgttttatgttttaattagctaaagatcgggtagatcatgtaataactttcataattcaataaatgtaagttactatggttacaaaatcattcagacaaataaatgaataaagatacttatcatcattctaattgtgtcaattatttttctttaaagcaagttatgaatttaccattaaaatatgtacaaagggtctgctcgaacccaaaaaagttaaacagacaaaaaatgaacttgtgcaatacaagtgaccaaga

SEQ ID NO: 271828 - DNA, 1266 bp, Cannabis indica
tggtatattatcttacaccatgtatttgctaaacaagcttttccttgagaatgctttatttcttactaaattaatgtgatgtatgctgccagcatgggattattctgcttgggtccgtacgtatgccttattcttggaggagagacttgaatgctttcgtgttcttaaattacgataattgagacagatcgtccagtaaagaagacactggaagttttccttgttgcttctttcttatctctcattattttagtgaaatatgacacttcttgttagacttagatttatttccttgtatcaccctctgttagttccagagaatttcaactcagaacttatcaaaaatgatttctaaatcaaggatgctgttagaagtaactaggtctctgtttcttgtttattattcttaagaaattagattttgtagacatttcatagtatcttttggcgcagagaaccaaggagttggagactgctgagctgcttgagcaattgcctgctctacaacagcttctttttcgtgttcttggttgtcaggtaagttttcttttaagtagtcagaggcacgcagccagttcaaattggttttttttttttactattcctgagctcctgaatgagttactgattatcattatctgctgtttcatttttctacagccacaaggagcagcaatccataattttgtgattcagttagcactttcaatggtaggaaacacttgtaactgttcttttacgtatgtttttttaacactcatgatctatcatttggacattatcgatctattgtcttatgattgtcttctaatgtgctaaataggttgcctcagaaagtgtcaggatatatcaagctattagtgatggcacagtaaatcttgttgacaaggtaggagacatgatattctccttttaagataagaagcttgtatactataaaacttactcgtgatactgtatttctgacagttctttgagatggaacgccacaatgctgtgaaggctcttgatatatataggaaggctggcccgcaggtaattccttgaggaatatttgtctagtgttcatctagagtttttaactgactgttggtttaggcgaaaagaagtatcatatctgcatttaaaaatgtatgcaatttcaggcggagagactctcagagttttacgagatatgtaaaagtcttgatattggacgaggagaaaagttcatcaagattgagcaggttagttgtcttacaatttcttcatggcttctatttcatt

SEQ ID NO: 271829 - DNA, 1543 bp, Cannabis indica
ttagagatacccagatgggattttagttaaattatcaacaattttttcagctagtttgcattttcctttttggttggttttcttaaagaaaacccttttctttttttcccttttaaacttagtggaaaacccagataattttggaaatttaagtagcatttcctttcatgatttttgctttagtttgaattttgatgagcattttgttctggggaacatttggtttgtggagtattaacttggtctttttcattgttatgattggacaactgcattttcttgtttatgttcttaaaggctaaaatttgagcttggtttatgttaagtaattatgttacagcaattcttctcaatgtgtatgcaaatgagcttgaaatttgaaacttgcgttggtatggttagtttgggtacaaatagttattgttgcttagtaatgtgttgcttttgttttggttaatttgacctattcatcatgctcatatcatcatttttgtcctagattttgatcaatgccaacttcaatttgttgtttatttcattgaatagtatgaacttaaaagacaaaaacaaaaaaaaaaataagaatatgctatagaaattctgaaattgctttttcagggtgaatgaagagataagattaagataatgtatggttgaggagtctccatatggggtttttgattcttaaaagaaccgatttcggttacttttatagctcttttttcttatactgcaggttctttatttcctatgttatgttgtttagcttgtagaaagttgtaatgggggtatggattttgctatatcttgcaatctaatcccgaatattttgtaggtggattctgtatcatgttattgcaaagtagatgcgggtttaaaaacagttgcaggggcgagaaagtttgtcccgggatcaaaactctgcatccagcccgatatcaatccaaatgcacacaagggaaagacatcacgaagagacaaaagccggttccaggcacctctcctgcctggcctacccgatgatcttgcaattgcttgtctaatcagagtcccccgagtcgagcacagaaagcttcgccaagtctgcaagagatggtaccgccttttggctggaaatttcttttattctctaaggaaaagccttggaatggcagaagaatgggtttatgttgtcaaaagagaacgcgatgggaagatctcttggcatgcttatgatcctacttaccatatttggcagccacttccaccggtaccaggagagtattcttatgcactcggttttggctgtgctgttcttagtggttgccatctttacttatttggagggaaagatcctctcaagggatcaatgaggcgcgttattttctacagtgctcgaacaaacaaatggcatagagcaccagacatgcttcgcaagcgccatttcttcggtgcttgtgtcatcaacaactgcttatacgttgctggtggggaatgtgaaggaatccaaagaactcttcgttcggctgaagtttatgatcccaacagaaaccgttggaacttt

SEQ ID NO: 271830 - DNA, 476 bp, Cannabis indica
ggaagttttccctttagtattgatacgatactctgttgtgatctaacaactgtagtttccttattttgtgttggaatataaagggaaatcagaagggccttctaggaacgcacggttttatctctccaatctcgttgtaccgaacatgtctttcgggtacaaattactgaaggcggaaggctttacgactgcagaaccaagatatgttcatggaaggacatatccaggtgggattggcttacttctcctttgctgagagtcccactaataggtctgcagtgctgacttggagtccacgtgtccaataccaaaaatgcgaataacagttacaatttggatcgcacgtcatcaaggccaaaatttgggataacaattatattgggcaattgttatattttattgtatacaaaaattataaaatttaaaaaaaaaaaacaaagtgtataagatttcccataataataagtttaattaat

SEQ ID NO: 271831 - DNA, 1218 bp, Cannabis indica
caccttttataaaataaggtctgatcttttacttctaagtaattacaaatgattacaattcattaaaccatgatgtatcccctattgaaaccttcctaggccatacactttgtatcctagttttacaaatatttttaatcctctgtacaatagacttcgggtcttccttagtctgtagccacaatgcattgttccttgctctccaaataaggtaaagaagagctgcacaagcagcagtatatacctgtcttcggaaggcagagatggatctcttctcaaggactcgcaccagatcagttaagttagctgctggggtcttccatcccaaccagttcttaacctgaattaaacattccatagagaaagggcataagaaaaacagatgctcacaagtttctgcactccctaagcagagcaaacatgagggatcagttgctatttgaaatctgagcaaacggtctctagttttcaatctattttggacagcaagccaaaacacaaagctgtgtttaggagtattcagccgattccagacttccttgctccagttgaccctatttactgtaggacacagccacttatagccatctgctactttatatgtcgtttgagtgaatgtgataggatcaaccaagttcagcaacgtaccttttagagctacaatcttcctccaataccagctgcctgtttggggaatctcatagctccaccaatccttgcctttgatgtatacactatgtatccacttgacccacaagttgtcttctttagttgcaattgcccaaatatacttaaacattgccgctttattccaatcagcaacttttttgaaacctatacctccagcttgcttggattggcaaacattttcccaagcgatttgcccagcccctgtcatcatatgttgccctttccatagaaaagctttgcaaatgctttcgatccctttgattacattctttggaagaagcatgacttgactccaatatgtatgaattgctagcaaagctgagtttacaaggacggctctgcccgcaaaagaaatgtgtcgagtactccaagctctgattctctgagtcatcttttcaaccaaactagaacaatctttcggtgacaatctttttggactaatcgggatccctagataggtgaaaggaacttcacctctttgaaagccagaagcatcaagcactcgttgaatctctgagtgagtcatac

SEQ ID NO: 271832 - DNA, 776 bp, Cannabis indica
cttgaccttggataagtggtatgttctttccagggcattggttaaagtaagcttcggttggatgtatggagtatgcatcggaagggactgatattgaacttggattagatataataaacttaccatactatctattcaattcaatatcacctagttgatcttagatcaaatgatctcaatctgagatgcataggttctagttcaattgtattatttgtgttcttcaatctgttcgttaaagtaaactaatggatcttctcttgacgtatagatcaaggacattgtagttcaattgagtgggagcactaatcatagatacaaaatctatagcttctatctagacgtagaagtgaaacaatgatttcctttgagcttggctaaatagagataaatggctgagtactcatttcagtgattatattagttcactgaaatatcatttataggttgttaattattttaaggataaaatacattgaagggtgtaacggtaaattttttgctactcaatgtagatcatctatagaggataattgattattaagattataacaaatggataatttatagcgtatctatatcatgaaacatatagagtgctctacataattgagagtgtaattctaaatctatagtggtgcaaggaggaattaataagttagagaattttcttggtaaattctagatctacttattggaagctcgattacataggcccatggtccccatactagttaagaaaatactacttgttcaattaattgattttaataaat

SEQ ID NO: 271833 - DNA, 2203 bp, Cannabis indica
ggtaaaagtaatgggtaaaactacaatgaacccttgattaaatggatgttttggcaaattctttatttcttcgccataaaaaaatttgtaagttatttttctctggtgattgtgtatgacactataaaattttttatatttagtcacaataaaatttgtaactaaaagtaaaaaattgtaactaattataaatcattattcttatgttagaattaaaaagttcatggctaaaggtattagtcacaaaaattacaatttattgtgattaaatagatttttagtcataatacttattgtgattaaaattaaattagtgacaatttatatttaaatactattataatagcgatgatgataattgatggtgcaggagagctatggtgatgagcgttgtagagaagcatgggaatactatcaatgcaatgctatatgggctctaaacggtaaatgattgtatagaatgacagattcaattagtaaatctagataacaagattatgaaaacacatcaaaggcacgcatacaattggaatagagtttaattcgaagtaggcatatcaaaaagacctatttagttggagcaagttgaagctctaatttgacggatcacttctgattctaaacattcaaatatttattggatctcagatcagatcagatccgctctgtcccacctaatttattttgagctcagattcgatctgatctggtatcaatatattaaaaaaaaatcaattcaagactcgaacccccacaccgaaccccttgggatcccaggacccgggacttacttggtatccaaacccggacccaagattcgggaccgaagtcagacctagacctaggcttgagacctagaccctgacccaaaatggggatcggacctaatcttggacccagcacccagtttggggccctgacccaggaccaggaccgaccccggatcccagacccaaacccgggaccagcctcggacctggactaaggactcaaactcaagacccatacctgggacttgagacccgaacccaagacacagatccacacccgaacccgaacccgaagccagacctaaacccgtacttggacctggaccctagaccccgaactgggacttgggaccctgacctgaactaggagccagacccacacctagactcgggaccgacactcagacctgaaacctgggactcgcactcaaacccggacccaaactcgaacccaaactcgagattcaaacctgcgcccgggactcgagatctaaacttaggacagacccgagacgtgaacccaaactcgggactcgaacccaggactcaggacccaaacgcgagacttgagacctaaacctaggcatcggacccagacccgaaccttgggccaaacccaaactcggaccaaagacccgagacctaagacccaaacccaagcccaaaacccatacccgagacccgaacctaggagcagaaccgaatctgggacccagacccaaacccagacccggaccttgaccgaaactcggaagagggacccagtcttagactcaagaccagggagctagacccgggaccaaagacttggacctgggacctagaactagactcggacccgggacccaaaactggacccagacccgggacacgaggccaagacccggacccagaacccaaacctgagaccgagacttgggacccagatccggacacgagacccaaacccgacctagccccaaactgggacaggaacctgaacctggacccaggatccaaacccaagacctggacccgggaccgaacctgacccataggttgtgttggggtcgattttattaaaaatatattataattttacacaatctattaatacaagtcaatgccaaatatagtataaaattaaataatactaatacataattaaaatacatagtaaaattagattctttaaaaaagggtgggtcaagtcggatcagatccaatccgaataagtcgggtcagatctgatacgatccgagtatttgatctagcagggtggggcaggacagatccttagatgatgtggatcaggtcggatcatagccagatcagatccggcccgatccatttacactcctaatttggagtaattataagatttaggacttgtttaatacacaatattagattgcattgtattaaattaggttatataccatatttttatataa

SEQ ID NO: 271834 - DNA, 627 bp, Cannabis indica
ttaatacaacataaaattagattgataaaataactaaactcccactaaaggacaaaataaatatagggcataagaccattttgccccccacttagccaaaggtcataaaaggtcacttaggggtatttttgtcaactctaaaatctcgactattcctgacatttccaatgtctaactttattgccccgctatactaaaattactaggatgtgattctaatagccaaacactgcgttccaatgttgtcgggcacaaaacatgcaaaattatgaaattctatatatgacatataaaatgcattctgaatttaaataaatcatcgtaaattaataattcaagactaatgtgcaagtttcataattaaaccctaattatctgctaatttctaaattaaagctaagcggtctttacaaaggggtcaccattctcaacatacataaatgccttgcccttgccgaagtttaaaatgccggtatggaagatgtataccggtcgagaagacccgccagctcatatcaaatactttgagatgcaactcaatctctagaaggttactcaatcgtgatgtgcgctgccgcatattccaacccacattatcggagacaactcaacaatggtactttgaac

SEQ ID NO: 271835 - DNA, 1626 bp, Cannabis indica
accatgctccccagactttgatatctaccaaatcatgtccctcaaattttgatatgtacaaaatcatgcctctattactttcatccatgttagaattttttattaaaattagacaaaagttcttaaatttaacaatctcaatagttcgggggaatttttaacggccaaaaaaattcagggcacaatttagtacttgtcaaaattcaggaagaaaaattactaataagccttaattatattgtaggcttgtagccaagctcgaagcagctgaaaaattcttaactttatcatattttgtttgggacttgaaaaaaatgaatcatacaaaaataactcctacttatcaaaaaaaaaaaaaaaaaaaataagctctatataatagataacgactctattttaattttttttaagttattttaactaaaaaaaatagagaagaatactagagagatgctgactatgtataatattggtagtcagtgggaaatagccatttactttgggagctttcacctttcagcgtctaaacatatgggtttgccggttttgcattgacacattccttctaatctctgcttattttaaattaaggttttcttcttcttcttcttctttcttttcttttctttatacatattgattatatatctttggcgtaccttgtctagtttacttttcttagtcccttgtaatcataatggaactaaaacaaattgattatcaacgtcattcttcccttaacctcagttacattgataaactcgacgaatatagctttgaggcttttccttcttttcaaatagaggaccctttattcgtggcagatgttatcaaagatggagttgtagcttatacccatgagtccatggatagattggtccaaattgaagctggtctaatggaaatcgacacaatcaaccaggatatcgatgtattgggccttgatagtcatatagaaaatgaattcggctcctatttggataaaaaagtagaggaaattgcacctgtagttttgaataaagaaggctccacttttgaagacagtcaagtagaaatcagggaggagagtagcttgggtgatctcttactgaacggagcagaagctattgaagtgaaaaattggcttcttgctacaaaaataatatccaggcttaattgtgttttacttgatagacaacatggagatacctcatttggcaggttagctatgttttttactcaaggcctgcataaaaagtgttacaagactcctgatcatatggctctttatagtcatcaacctgattttgagcagagtaatagtcagtactctgcctttcagatcatccaagaactttctccttatgtaaagttctcgcatttcacagcaaaccaagccatcatcgagtccactcaaggcgacaaggatgttcatgtcattgattttgacattatggaagggatccaatggccacctttgatggttgaccttggtaagaggcaagaggcttctcttagagtaactgccattatatgggataaacaaaatgcagtttttgtgcaacaaacaggtagaagacttaaggagtttgctgattcgatcaacttaaggtttgtgtttgatcagttggaaatttcaagtgagaa

SEQ ID NO: 271836 - DNA, 1159 bp, Cannabis indica
tattttaggcattataaattatttgaaattttttaaaaatttatattgtgttacatgattataacgagcaaaaaaataataattaaaaactttttaaatactaaatatttaataccctaaaatataaattaaaaaaaatactgaatgtcaaaataccaaaaggcctatttaaaacgatgttacacttttttatttaaagaagatgttacacttatagataagtacagaatgatagtactttctcaaaaaaaaaaagtacagaatgatagtagttaaattgagagtttcttttatcattatgagtcatcatgagtctagtaatcatcacattaataaacttttttttctatgagtatagtaatcatcacatcacattaatagagttcttttaaaaaaataaatttacagtacagtaaaaattattataataataataatactgtaaattaaaaaaaacattattattgaacataaatatagtgcctaaaattattaatatttcttaaaattattatagaagacttaatatgccacgtgtgaattaatctacagtagagtactttatcaaaaaaaaaaagagtagagtaaataatattataataataataattaaaaaaattattattgagtataaatagtatttaacactatttacgttttatttgatttcacgatattttgtaaaattattaaattaaattatataaaactataaaaatttataagccacgtgtgaattaaatttgatatatcagtagctcctaaattataattgaccaggcatttagaattaataaataaaggattgctcagtatgaagaaggggcacattattttaatgtgacaaaacaactcgaacgaccatgattaatttgttacaaattatggatgtggaaaattcacgatgaattataggagcccacaccactaattaaactgacacgttatgataagatggaaacaaggcaaataaatatataaataaattattttgaaaggtataggaagagaattctgatcaaaactataacaaattattagtagtacgactcaccatgaaataaaggaatggaaacagagacgatattggcaaagctgaaaatattaaccaaaatcaaatggaaaaatagttagggttccgtacggcatgaaacaaaag

SEQ ID NO: 271837 - DNA, 618 bp, Cannabis indica
ttatttttaacattgtttgggccttttaataagattatgataatatgatattataattatcttaataaaaattatataataataatttattatataaaatttaattaaataatgtatatataaaacaaaagttataaaatcatataattgtatccaatgagataatcaatgatgccttgccgatagccctggagaagcgacgatttcccccttactggaagttgagaccgctgaccatggaggtttggaagcttatggatgaattcctggcttgccaaattatgcacattaagcgtgaagaaaactattatgttgattaggggtgtacaaaaattttcgtaaaccgcccaatccgaataacccgttcaaaccaaaccgacaaaactgataaaaaatacaaaccgacataactcaacaaaattctaaaccgcccaatcagttaattgggcgagttaaaaattgacccaaaccgcccaattaaacccaacccaatttaaccgatttttatttttttttattttatatatatattatataatatataatatatattaaaaaaaagtctcaaatcctaaaattctttctcaacctctcaataaaattctttctcacatatat

SEQ ID NO: 271838 - DNA, 1117 bp, Cannabis indica
taaatgttagtaaatggtggggatattcatcacacttaattttactaattttatttaagaacttgtgtgaatttcattaagaaaatgtattccaacaagtcaaaatcggagcacattaaaattctatcatattagaaatcatacaagtcaattaattttgtagacatggacattttgcatatcaatttttaatgattactctcataaattatatttctacaaaagtatagatttatatgtttcaaagacatttaaatcttaagtagagaaataatgcattttgcatattaagatagtgagatcaaatataaaatggagaatactacattaaaattcgtgagtatggataaactcccagtccatttgcaaagtttctttaaaagcatgggttcattgcccgatacttatgcctggttcactcaaataatgggtgtgagagatttaaaaaactaagcattgttggacatggggtggatcctacatagcaaactctaaactttcctaaatctttgtcgattgatactcttccatgggagtgtacatatcgaatcgtgttctaaccaaagatgtttcttaaacgcattttgagtcgtgataaggctggaacctgactttatgatatgtacacattttaaaaatacccgtatacatttagggtacaattgtcaaatgaaagaacttggcccaaatatcataaatgataatttcatcagatttattacaaggtataagggtaacatgttttattatggaattgagaattgacttgatcagtgggagtgatcgatctatgaacctagtttttagaaaagatcatttattttttcaaacttacacctcaagtattagattaattataattcacaacaacctttaattttaatggttattgagaatccataattaatcattaataatccacaagttattgataaaaattttaataagtcatgctatttagtaattgcttacaatttctaaacatgcatgttgaacaatttgctccttaaagagtattttggttcattcttaagatgatttattagaatactaagatcaatgtttctagtgtttacattatatacaataagagtttaactacaatatcaatttgagg

SEQ ID NO: 271839 - DNA, 2355 bp, Cannabis indica
cacatcagtataaatctagtacaccgatgaatcattggacattattttttgaagcatataatcacaattatcttccactgtgttgatatcactgtaattgttaataactatatgttctggacttaacataaattgtatattaaaccataaacatgaaaaaattacatataaacataaatgacttctaatattctattaataacaaataagattatattaaaatagattttattttaggcataaaatttcaacagaatatacgttggttattaaaataacgcaataaatgcatatgtcgatttaaaacagacgcaaaattatcatttgtaatagtagtgttgataaatttttgtaatatatatatattgaaatattataaaatatttcgttcaagattatatttatccgtactccattattttttcatgatgtattattcttatattattttttaataaaatatttttatactgttaaaaaaaactatatttatcggatgtcaatattaattcttgaattaatttagaaattatttttcaaaataaataaatattaaaaaaaagaaccatatattattttttttcttcaccaattactacaataagaagggtatataaatatgtagctatatacttgactgggtgccagcgtttgcaagatgtaaagcaaattactctaaaattttcatttgtgaccccaagatgtgagtgtgactcctttgagatattagtgctccccaagacaaagaccatagtttctttcccctatatattcatatcctattaccatatgccatacatatatcttaatcatatccaactcactcactcacttctatataaactttatatataaataaatatatataccaccagatatggagcttggattttaagaggaaagaaaaataaatctaaaatactttattttctcatcattttttttattaaatcgatcaattcaaaaatttatttttagagttcattttctaccaggagaaaaaataaaatgaaatttaaatcaattacagatacattattgtttttttttttaaaaaaaaaaaaagaaaaaaactagctatcaaatttatggaaacattctttatgttttctttataatttccaatatcaactttttatttgctaaagatctttaactttatttaagtatgctattatatttgatcctcatgttatactcaccgaaaatctgattaacaacaagttacgaatcactatagatctcgagtgactcgactttgactgatagtgtcagtcgtagtcttgtgaggagtgctacatactctgttttgttgtttattgctgtgaactcaaaccgcaaagcactatgagttcaaaattcctctcgagttactaagatgagtcccgcaccagaaccgtgctcattgaaagatccatctacataaagtttccaggaaggtccatttgtccccctgagctgcagtctcaagcgtgtggacttggtcttcacagatcatgggatcgttttctttgagaccagtgcattcaataataagtttgctaatgcctatcctttgactattgtgtgatgctggtaggtgatctcaaactgacctagttcaactacccacttaagtaggcaccctgatgcttctggcttcatcagcacttacctatgtggttggtttgattgtgtgatcttggaagtatggccttagttttctagagtccagtaccaagcagtaggctagcttctcaatgggtggataccttgactcgaccccaatgagatgcttactgatgtagtataccggcgttgtaccccttcttcctcaagcaccagagtagcactagctgcatgcttggtgatagccaaatggatgaataattatttgccatatattagtttggataggatggcaagcttgactaggtgatgtttgagagcttggaaggcttgtttgcattcatcagtccattcaaacatcttgttgctttctttaagtaaataaaagaagggaacacacttgtcgattgacttcgagatgaacctgctaagtgcagcaatttgtctagttaggctttgcacgtctttgattcgtgacagtgacttcatgtcttgcaaggccttattttttatggattcaattcaatcccacttgagttgacaatgaatccaaaacaatttcctgattggactctgaaggcatattttaaaggattaagctccattcggtattcctgaaggatgttgaagcactcctctaaatccttaatgtggtctctagatttcattaacttgaccaacatgtcatcaatgtagacttccatatggttcctaattaagtcatgaaactgttaggtttgtgcccta

SEQ ID NO: 271840 - DNA, 3212 bp, Cannabis indica
atgacttcaatgccaagcactataaggtatggcctaagcctaacaatgaaattttacttcatttacatctctactgctaaaaaacacaccactagagttcagtaccttatttatagctataactattggtactccagcagctctggcatgagctattgcttcagttgtctgagggcgaattccatcatccgcagccactacaatgatagcaatgtctgtcacccttgcaccacgagctctcattgctccaaaagcctacatgagttggcattatattgttatatcacattatattattctttgtatatatacatcatatcaggcaagaaaaatccatagatgtcgctgttcataacaatcttttttagcaaaatgaaattggttgcaaaaattagactgcaaatacagtatttgttgtcggtcatgcattaagtgattgttaacaagcatacctcatgcccaggagtatctagaaaaacgcatggttgcaactttccatcaacaggaacaagcaccttatatgctccaattccttgcgtaattccacctgcttctgaggaggctacctgtaaatgttaatcaatcagcctttagttatattatgaagaggagtgctagcataaattctacatagaattttgttttctccctgtctaaccatacaatattttcagacctaaaaattacagcagtagctgcctagaatagagtccaacatcagaccttaactacatgtctgaccatttcagctaaccctctcgggtaattctacataggtctattgaatacaaaccaactacatgagaactaacaggttataaataagatttcactataactaaacttcaaatatccaatcaaataacatttctccaaaatcgcatgaaagaaccgccttgcatactaaaacatcttaaacaagagaatgatagcaaaacagctgggaaaaaaaatcaaaataagataaacaacaatatgtgaacatgtaccttgctttttcggatgcaatccaaaagggttgtctgccaagcaagaatacgataagcatatcagcattactgggataccaaagtctacaagtacataaagaaacaagaaactgactaaagaaaattgccaaacccaagggacaagactgaatatcacttaccttgccgtgatccacatgtcccataatagttagaactggaggcctctcttctagtttgtctaagtcttcttcatcaagaaatgccttctttcttgccatttcttccacttttaccggatcagcatcaatgacttccacatcatacattttgcaaaccatttttactatatctctgtccaaagtttgaacaccatcaggcttgattcccttcgagtacaaatacccaagaatttcaccatcactggtggccagatcgtaagccaactcctcaactgtcataccttcttcatcaacctctaggatttctactttgacaggggcagcatctctggcagcctgaagtcgagctgccttcctgctcgctttactccatttcctacctttcctggctgctccaggaatggaaacgttaagttctgatgaatcatccatatcaacatcattgtcagctttcattcgcctacgtgagcctccagcagcattttttttccgataatcatctttgaattttcctgggggaggattctttactggtttcgtaggagctaaaactgcttgagcaattacaggatcaaccactggtttcttgcttgcaaatttgtcaatcaaaattggcttcctttcttttggtttcacagtcgaatcagcttcatttgttgcttgggaacttttagcagctcccacatccttcaatataacaggtttcttgaccgttggagttggagctacagaaggtttcgtctgtaattttggctgtggtctcaagggtggctgcggccttaaaggagcagcaggggttcgagactctaccttcactccactcccagatttaggttcttctctatcaaccttgccatcaagcttaggtgagtccttcacaacttttttaacagatgcaacagtatcacctttcctccacacactcttcattgttttagatttcctattcgccactgagttcacaggtggagcggcatttctagaaacagtacttctattagagagtgctggtttatttacagacacactacctgtgttattactggagtcacctgatgttgaagtttcaagcttttcagccttctccaaaacctctccaagtgactcaatcaccttacttctttcttgctcactacctaacccttcatcatcagaacccttactatttcttgaagggtcccaatctgttgagttcccacctaaaagggtttccacattggaccccgaggacttcaatactggcttcggggaaggcttaagtacaaagtcagcttggccatcagtactattacttcctttatatgtgttagaatcaagagaaacggcattgccttgctcagcaattaaatctgtcgttgtgactgaatatttacagacagaaactgacaaacaatgccatcttttgttacctctaaaatttcttttagacaaagaaactctcctaacaaatgaacgggacctttcagacgaacccactatcataacactccctaaactgaccagggaagccatggaagccattgttccttgcatgcttccagtaaaaactaatgaactctatgataaactcatttcatttgtctacaattccacaagtatatagtcaattatatgggggaaaatactattaccagaaacaaaattcaggggatacaaaagccaaattcagcaaaaacagcagaattagaagtacccaacaaaaaatctgattggaaaaacagaaacccaagtccaaaaactaatagttcgacacaaaaagataaactttcttacctctctcaaagagacaacaagaatagaattcagacacttggcgttggagttgagagagggagaaagagtgagtgaaaaggaaatgagaaaagagaaaagagggtgtgtggctataaaaagtggggataatataatggtaacgagagaaatggagagcgagagagacaagccaaaccagttctccacaggctaatggaaatttcgaaacgggtatgtgtggctgcttctctgcctgacaaaatacaatggcgataaggattttggtgggttttttggattttcatccgcc

SEQ ID NO: 271841 - DNA, 1124 bp, Cannabis indica
gttattttttgttatttttttgtgattttataaaatattgtgaaaaaatataaaaaaaactttgcacataaaattgtaaattcttttataaaaaaattgtattttatgtaaatatcctaaatataaagtatgtctaataaaatataacacaaacacaatacgatgagtcagtaacacgtttggccaaccctagcgacaccaagattttggaaagtgatggaaaattcaatcaattttgttagttggaatggaatttaatttaagagtgatgaaaagggaataaataaataaaaatttgagatgaaaaatataaatattatttatttattttttttttaaaaaaaaagaaagggatgggtctctatcaagaatcccttttaaaatggagaaccaaacaaagagggtatgatgcatgaacagtaattattggctgtgaccactgtcctatcttaccaggcactacagtcaaattaatgtgttttatgcttcatcttcaaattactattttacccttcaatattacttcaatttcattcaactattcttcttgataaagaggtatttcatatttatatctcaaacacattgtaggattttagggttgatttataaaaaaataaatttataatttttatatatataaatttaatcacactaacttaatatttatataattaccaaaatcatatgagattagggcttgtaaaaatacaatgggctaatcagtgacggacccaaaaattttagtttctgagggcttattatcataaaaaatattatacttacattataactactattattagattttatttaattttgtggggacttttctactattttagttcataattatcaaattaaaaatttacatttaatttttaaaagacaatattttgtaactagatcctggggctaaccttactagaatagtgtaattgtatgtagggctagctcaagaatattttagtcttgtgcaaaattttaaaatttaagattatttcacaaataatacaaaaataataaagaaattacaaaaaatataatttatattttttacgattttttataatttttatttaacaaaaattaacggtcttttttaactgttgtactcttgttaa

SEQ ID NO: 271842 - DNA, 1080 bp, Cannabis indica
cgttaatggcagagtagggagaggtaatattagacctctcaatctattccatgaaacagctggccctcaagtcggagaaacgtccacaccaccagcaacaatgcactttctacctgttactccggcggtggtatctgaaggaatcgtccaactcaccaccgaccaatatactgcgattcaggatcaactacgcgcactgcaggctgaagtggatggacagaacagggcccgacgcccccctcgagcccctactacccgcatagataaccctcaggtaacaaactctagacatcgtaataatcgtgttcacagcgaacgaagaaccaatcctgaaggtctggacctaaaccagcccacctcgagagaccaatctacgaggtatcttaaccaggaaacattggttgatgaagaccctgagcgacgtaatcctcgcagccggccatcaagagataatgacgcagaatccacctcttcatcctcgcatggtcgcacacctagcagatacatgaggtctggtactgtggagacgcaacagggaggacgataccaagtccatagggacgatctgcgtgatcacctcaacgcggtgttcatagcgcgctcccacgcccctcgcgacgaggaaataccccgtgatccccccgtgggtgatcaaggtgtaaacactcacactgacctgcctaacgcaccgacaacgactactggagttaatgtcccaacaaatctcgccccagtaatcagagctcctgcagtcgcggcagtcccggcccctatagccaggggaattaatcaaagcatgcttttgcaagctttgaaaatgctcgaacaacagagaaagcccatatataagttgcatgggacttctccttttactgcagaggtgcgacaggctcagcttcccaagggatttcgactatccgaatccctaaaatataaaggtacctctgatcccatagattatctagaaaagttcaatactataatggaagtggatcaggtaccgcagctcgcaaaatgtcgcatccttgcggcaacgcttgaggaaaatgcccacgattggttcacccaattgcctgaggc

SEQ ID NO: 271843 - DNA, 684 bp, Cannabis indica
tgagtgatataccacacacactcaatacatttctgtacttgtgcaggtatcactgtaatgtactcttaaataacattcactataccaatgcactctataccttaactatacaagtgttggtagtgcaactaacactttaagcatgcatatacacataacatatacatacactcagatattgatatcacatataccctcaacaaaaaactcgaggaattcaacaacttgcaatctgaggtccacaagaaagtagagatggaaatttataccacagtgatggataactgtggggggcggtgggcgaggacattttcaatacccaaagcagaaattgagaaagggcggggataatactatccgtactatatccaaccccgatatagatatatatataatttcctatttattcttagcgtatatataatatatatatcattgataatcaaagttattttgattatcatccataatcaaaattatatatcatgtgcttaaattatgaagatctaatgacgatagtgaactgttgatcattgtggattacaagcgtaaagatattttcttctcaatttttagtttcgtctttgtttactttttaacttgttgggagacttgagaggtatgagactatgatactatacttgggttatgatttttttgttttttttttcaaactttgagata

SEQ ID NO: 271844 - DNA, 776 bp, Cannabis indica
tcacaataaatgcattacttttaatctacttttatgtcattttaatattttactactaaatttagttattgcattaaattataaacctattataaaccttttacatttagcttgatttgggggtaggaaacaagagtttgatagcttgatttcttggaggtaatgcagtgtaattaaatggagatgaataaatttttattctatttatttattggttttattttaaagtattagaatattattatttttttactttaaaataaaagaaaattcgagattttttattaattttttaattgtgtacgttgaattttattttatttctattctcatttcgatttttattttaatatttttatttctcccaattaaacacaacctatttgaaaacaaagaggaaatatagaagtgagaacaagaaaattgattcataattaagaaattcatgctgaaagggtgtcaaagatacaagtgtttccttttttttctctcctaatgaatcacttatttccaaaaacataattactgaaagatacaattgaattagttaaccaaacaataacattttattcagttgataccacaatattttataatactgattgagtggaaatagagtactaaaacatctaaagaaagaggactatgagtatgagaggatttcaaaagatcagatagtaaaatcataacttgtatttagattcaaatattaaagcaattttatacattgggttttcatttcagttcattaccaccatgaattttcactcaacaac

SEQ ID NO: 271845 - DNA, 1385 bp, Cannabis indica
aagattacactctgatttgccaacaacatttcaaaggtgtataattaaactaaaacttcagtacttgcatgcatgatgatcttataatactaactcctcatatagcaaagttcaccaaatctgtacaagctgttaggtaatcgattctaagaatatattctgtacaaatacatatgcatgaccttgaatatgattgcaatcaaagccccatatcaaagactacagaagagagacaccatttacccgataagataaagatgctttacagaatcgaacaaccagaagacgagtgctgaacttgtaaagactgtcaattccacgggtgccaaatgagtcaaccttttttcagtctgttctataagcccagccatgtttgcttaaaaaggcttggacagcttcctttatggccaagttaggaattagctggtcttcatcaagagcctcacgtgtaatcggatcaaatttaccaacctaatttcaatatacaagaagtgtcagagcataactaggattttacagaagaacgagaacacgaaagctagtggacacaattcacaactaaaaaccacacctttgagatatgttccataatcacagatcgctcatatgtaagaccactaggagtgatgaccggatcacggaataagtctagcgtaattttacaacataggtaatctggcacctgtaatttttagtcagtgtcattcactatatacctagtaagaatttgtcaaaagtgcaaactagaaaggaaaaaagttatcttgataattaaatccacacctcttgtagtgtgtctgcatcttgagctatctgaaaaacgctttctagagtctttaactggtcaatcagagttgtagaagctgcatcaacaaacccctctgtttcataatcatcaagtgagtatttctgtttgagtgcgatttcacaagcatctctacagcaccagaagaagaacaaaataggccattaaataacagaatgagcagaggcactaactaacaatcacaaaattgtttcccatcccaaaggcctaaagttataaaggatgcttacttcaaattctgcaattcccatgaacgcttcgtagatgcatgctcccactccaggtattttgcttttgcaagctcctgccaaatctcatccactatattactcttgggatcagcacctctcccaaggtccaaagcctacacaaacacagttcaaactttagacagtattgagtcttcattgtgttttgcgtttacaagtacaatttttttttgcatatatctataacttgtaaatgttatttgatttccaggggattaatagatcagtggaaagaataaaagaggcataattggtgggattctattgggaatcaagttcttgaattccat

SEQ ID NO: 271846 - DNA, 1148 bp, Cannabis indica
ttacaactaggattaggatttaaatccaattaatcctaattgcatgacaaaaacaagaaaaaatgtaaaagataagttaaaaaaaaaagaatatatttttttctctttttctttgttaattaattttcaaaattcccaagaactaagaaaaagagttcaaagtcctaattcaatgggtaatgcatggataaaaaataaaaatacctaaaaatttcgaaattaatgtccatctagtagtttcaagtgaaacgggcttggttcacgtcaacaagttagctccacacaagtgtaaaattgactaggaggtaaatgttaacccagaaactttccatggtgatatggacatcaatatttgaaacttggaaagaaggatgacatcatggagttgagtagacccgagtcatagcagtcgacctgggaggggaccctagcccagtgcctaggctgactttgggagctccggatggaagttcggacttcaataacttaaatccaactcactatctcttattactctgtaccatgaagacatggagcaacctaatccaattcttgggagcttaaattacatgaacctgcaacctggaagccaacctgggcacctagggtttcacctaacgcccaagttgacattcccaactagggtttcaattttcgggaccgtcttagtgaaaatgggtcaatacttgcattgggacatcaactatgcatacaatgaacatatttaaggcataaaaatcaaaattggagaaagttcatttttaagcactcgaggcctcggggcactgagcacccctggacccaggttgacaatttgccaatttgggtgccttccaagtatcatatcaacaatataactttgtatcttccttgtcttcataaaaaacatggaaataggtcatttcggggaagaaacagcacttcataggtatcagaaacaaggtccagtgccaaggttgacattttgtcagcctaagctaattttgatgatgttttttgagaactcttccggccatcttctttgttttcagaacatattgagattaaactatttctggggaccaagcagaacttttaaagggccataaaggggatccaacgaccagattgatgcctagtgctaggcctagcgcctaggttggcatatt

SEQ ID NO: 271847 - DNA, 702 bp, Cannabis indica
ttcatatatatactctcttaattactttaacatgttgtttaaaaaaaatactttaaaatgatactgtgctggtttattagacactcaaaaaaaatataaaattcattttggagccaaattttcgagccaagaaagattagtgctatattaaacgcatctttttctaacagtttataattgttgggaatactaagtattctccacagttataaaccgttgggtatacttagtattcccaacagttataaaccgttgggattgactatttttttttaaaaaaaaaaaatatttagtattgccaacggttatccaccgtgggcattagctatcccaacagtttttttacttcggtcctaaaccgatgggaaaaatctccacttaccttttccaacggttcccatagttcaccctcttctaaactgttgggaatagccctttttgtagtagtgacagtgggtttattcataaagtttaaaacataaatcaacccagaaaattataaacaaaaacctaatagaaaaatgaaaaggaaatcaaatccttcatgaactcgccgacatctaacgagcttcaaatgccaccaaacacgaagcctcacactatgaacaccgagatcttatacgagcatcaaactccgtcttcatctaccacgaactcgaacaataaacaatgagatccctataaagaaaagagagaaagaaa

SEQ ID NO: 271848 - DNA, 3550 bp, Cannabis indica
atactaacttatttattttagtaatgaatacatacatatatatatttagtgtaaatttaaagatgagtacatatatattgacatacatgtatattagttttatttatatataaatagagatagaaatagattattattggagattaagaaacaatagtcttttttttaaatttttcctatgaaatattaaataatttattattaaaaaaaataaccgatccaatccgcactattgcggattagatttaaactattatgtagatcggattgaatctaaaatataaaatccgcacttagtgcggattttagatgttgtttgataaaaaaaaaatacagattggatcgaatgaacccctaataaaaattatggacgtgaaaactggttctttcttcagtctgcctaatgtatcacacttttcatgcccaaattgattatgcaaatctctggcatctttgtacttgtatacacttcaatggagacaagaaaggacattttatcaactaaattttacttttattattaaataaataatgatacttgatacacacttaaacagcaagcaaataacttctaaaaaataaaaccgctgattggttaaaaagattgccaatcattagagaatttataacccgggctgttaaatgcgtttagggatttttttggtataaaaatattgcaattaccatcattcctattatacataataatgattcaagttgttgaaccaatttataatttattattggggcgcatatgatatcatttgggtttcaaaagcaaggtattcaagtaaaatggcaattgcaagaaaaattcacactgacgccgtccagtcctgcttaaagtgaaacaccattatacctttttttttctccatcccaaccaaaagaaaaggaaggtgagagggaatggaggagaaaggaaaggataaagaaagaccaatatccacgatgagagttgcagatctgagcaaaagacaatgaatacattgatgtatacaggcgttttatatctactatctaaacccaaagcccatgtcaagctcatgaccatacatcccatggctgtgtccaccagcaccaggaccaggaccagggccagggccagggccgccgccacctgtagcaaaagggtgaatctgctttgaatttgacctgagttccatttcgataagcctctgaaatgcctctggatggttgcttccgccgccaatatcaggtgctgcagaccccaataatgataaaaacaagagcttagagacgcaaacttatcaacactcatcttcgaaaacacaatttgatagtttaattttagatggaaattgggacagataataaaatcagaaggtggaaacaaaattagtactgcccaggttttacctggttgttgcatgccaacactaccaaagtttgggtgaccaggcataggagcacttcggtttgaatgtgcaggaagtggtgggcccctatgtaatccttgaagcaggttaggtggaaaattgcttgtcatgtgcatctgctgcgacagagggtgaggaatgggttgatcaaacccaggtgctctagggccagactgatggaaagaaggacgaagcatattcacgggaatttggtgacttagtgaagaatcatgatgagtggcagcttctggagccataaacttcatctgggaaccaacattagcaggaagtgaatctaaatgatggaacaaagggcccatgttattcaattgttgatgatggagctgtggaaaagatggttgaacattaagattctggtaaggattactagactctgtcctatcataggggccacgagggaaaggtggttcttgacctcccctaatggacctttcatctccaaaagaggaattgaaggttgccaactttccagcaaattcggcttgcagatttgcagatgagagcagctcacttttaactgtatttccagctggcataaagctttcaacattcagaggcccacttgctgtaatcaagctatcctcttcagggaaagcaacaccagcaggcacattaaatccaacaaccttagaccctatgttagtacgaagatgcgatgaattttgttcagcttgagagttatcaaagcttaaccactgctcttcaatgttattgttctgggtttgcttccttttatttgctgttaaaacattaatatcatgaacagtagtgctaaatcctacgtcatttgaagttggaaggcgattatctacaacaggaaaaggaagtccatggggatcagagacatcatttttcgaagatccaactggacccctttggatggagactggagctccaactgattgcaactccttcataaaagcagacccaaatagtgtttcaagagttaaagaatttgccgagtcagaaacattttcgactttaccctctctggagttgttaagtgcactgccaatacttgtgtcattgatgtcataagaactgtcagaagacaacttgtctggattggaggatgattccatttcattcaagctagtccccttctgtaataatgagaggaggtgatgggatgcatcactattaacttttggcagcttaggctttccatcggggtccctgtggctctgaacaggtggctgcatgattgaactgttgtcactaattcctgaaaggatcgactgttcaagatcttcacacgtaagaactgcagaaactggctgtggtttattcttgtacaactgatcgacactaccaactatagtagatcccacatctgatgtcataagcttctccgatatttcagagttttggaagggaaaactaggtagaacattctcgcttgtgttcccagatactcgagatccatctttttcactgccaactatcaatgagagcaagttatttggctgcccagttgactgcttgttgctaggtttcctttctgcaataatttggaaagaaaacagaatacattaagtaattattcaaaggacaaacaactgaagttagagggcactgaaactagacccccaaatattaattgaaactaaccttcttcatgaaaccattgagcaaacttggaagattgtacagagtctgggctctgtatctcatccactgagttatcatgatgctaccataaagtgaaaaaacataagtcaatctcaagccaatgacctagtattcatggatgcctccatagaagccaatgacctagtattcatggatgcctccatagaagcaaaagatacaagccaatctcaaacagatttgaatgctttctaaacaaaacaaaaagaaatggtttatttgctctaaagcaagatagatacaaacatatagatgcgtatctgaatattaatccagaaactatagacaagaaaaagcaatgaatatagttttctcagcatcccagaactccaaatccggaattatttcgaacacaagaaaaagcattgaataaggcagaattaaaataggattttcaattgtaattgatccaataaaaagattcttcaaatcaatggaaatgtaaactagaaaaaatagtatatagcactaaaatggaa

SEQ ID NO: 271849 - DNA, 2370 bp, Cannabis indica
ttaaagaattcggaatgaatcaaatctccttaagtaggattcgaacctacgaccaatcggttaacaattaaccactctaccactgagctactaaggaacaacaggaggttagatctcataaagttcaattctcgttctcaacacatgacccatatgagctcgaagtttcctttgtaactctcagaacttcttcttcgtggcttattgctatgaaaggtggtgctgtattagggctttttttttgaaaataaagaattagaataatatgaaaacacttaccttttcttttcctttataaacccctcaaagaaatatctttactagtaaaacctaaaaccctactaaatgatatgtattgtatatgcacttgtgtaagtagggcctcttctcaaactctaacccgcttgtaatactaaaaagcgccggaagtaaaggcttccttccttcgcccctttatataaatacattgcaatgcctttgtggtaagctcagacctcctcaacccttcttcccaaatccctttgaggaagaagaagaagaagaaaaacccatcacaaccataacaacaacatcaacgctctttctcttcccctcctaaaatgttggctgacaaaggaaagaaacctaaggttgcttcagttgaggaagctgaacccgttgacgacgagctcgttatctcaatcgagaagttgcaggagactcaagatgagcttgaaaaggtttaaagctttttatactttctggggtttttctaaatgtttcaaacactgtttttgtcattattgttatgggttattttgggttttgaaatatgattgtggctatgggttttgttaatgatttctgttttgttgtttcaattgttgaatattaacatctaatttgaaaagaaattatgggttgagcacaaattaacattttgacttagttttaacatgttggtcatttatgaattgttgtagaaaaagtcaataacttttgcaatttgtgaattcttttagaaactaaaaaaattgtagtgatgaggattggaataatggacattctttgtgacaggttaatgaagaagccagtgacaaaatgttggaagttgagcaaaagtttaatgagatacgaagacctatgtacttaaaacggaatgatgttatcaagaccattccagacttttggttgactgctgttagtgtttctttgtagctcataactgtttgtttgtgagtaggtagattgatacatacaatgaatgtttttcatctttgtgacttttgatttattgctttgtgcagttcttgagccaccctgtactctgtgatattttaactgaggaagaccagaaggttggagacataatatgtaaaatttatcaagccattggggctatttttggtcgaaaaatcgtcaatgttcggttttctttcttgttgattcattatatgctcttttatgtttgtatagatcttcaagcatttggattctcttgatgtggaggacttcaaagatttaaaatcggggtactccataacatttgtaagctgtctttgtcctttaatttcccttaagtgtgcatgtttctttctctggctataaatttaagtaaagggattgcttttttactcgaattaatgacattctaactggcgttttttctcccagaattttacggagaatccttattttgaagacacaaagcttacaaaatccttctcattctccgatgaaggaacaacccagataaccggtactcctatcaagtggaaacagggcatggtaatactattatagttactccactgcacactgaagattttctttttccaccattacaattgttaacatataatgataattttgtgccaggctgctctagttaatggagttattgacgagaagaaaggaaagaagcgctccattgctcatcagaggtgattttctttaactatttttgcttttcttggtgcctcataatgcctggtttggctttagaatcactagctagagaatcatagactagatggggaggccattattctataataaactgaggatttaacagttgtgtgactgaagtaatatggtggttgctttttgttcatgtacatattaagtaacttatctacacgattgacttatttctgtttagttttttatgtgaatagtactactgttgaaaataatcttagcatgcatagagattcttttcatatatttggtcgatgtggtttcatcaactcttaaaaattcctcctgagaaaatgttttttataatattttgtttgttagttcaaattcttagctagcaactattaaaggtgaaacatggttgcagctatattcatccacaccttgttgaaagatcaattcttcttttgt

SEQ ID NO: 271850 - DNA, 691 bp, Cannabis indica
agatcaccctgatgactagcccctggcccttcacggtgtgggggatagatctcattgggtcattaccaataggaaaggaagggaggggtaaagtatgccatagtagccgtagactacttcacaaagtggacggagtcatcaaaagcttctccgcggtggcaaggccactgttgaccttggttttagccaacgcagtgagtcttatttattaagcgataagtaatttatagtaaagcaatgtaaagacacaagaattttatagaggttcagctctgaacaattcaataatagcccaatcctcgttatttgtattgactcaagaacaagaagaaaggttccttttcttatagctcttacaatggtatctttgaatatgaattcttagataatatctctttggtaaaatctttcgaccgaccttttgtccagtgagcatgcatcactatttatagggctatcaacttggagaggaagtatttcccttctcgttacaatggatataagcagaaagattgcatgataaatacagaatacactgatcgtgggatttggatagcttgccatatctgtgcaatctgatccctaagttatagggatttctttgatgactcacgatgcgaaagctgaattcactaagtgttggtcgctctgctcggattgctgatcattttgctttaggcatgcatatgag

SEQ ID NO: 271851 - DNA, 1993 bp, Cannabis indica
agggagttttatatgtatttgtcaattatattgtttagttcattattttagatatagattattcaattttatgttgacaacatgctttcttttttcttcttcttcttttttctttagatcgtgatttatatagtaaattttttattatttattttttagttaaaaaatcatatggtaaattttttataaatttattgatttttttgaaatatctatttagtatatagatttgatcgtatgattgacaacatcttttcttactctttcttctttggatcaaaaataatataataagttgttttgaagattttttttttaatttatctttatcttgctctctattttaagtataaattattcaattttatattgacaacaagttttttttatcaggaattatatgttaagtttttaattatttgttttttcgatcaagattcatatgatgaattttcgttagatttgttattttttttttaatttctatttggcatagatatagttaattgtatgtttgactcttttttcttttattcaataattatatgatgagttgtcctgctctggaatcctctaggtttctttggtccttccagtccctcttgttcatccttcgtgatgctatcctccaatttccctcttctccgttctattcatcttccccaattaatcattacctctcatttgttacttcctgcaccactatcaggccaaaatccccatttaatgttgtatcagagaacccttagttctcctcctccctggcttctaccccttcatttattaactgtcactttcctcaggaggtgattcgatataggctacaagaataagctaggatctctgtagcatctctccatctttcagggtcgatcttctccaggtactatctctgcccctttgtctatttaaggataatttatgaggttgctattttttccctgttctttctagccctaagtctgcccagatattacccatctcccatgcactcaaccatgtctaacaacccagaaaaccccacccaatctatccaactcactgtggacaaagctttggtccatgaatttgaccatgtttccatacactcaaagacctaacctgagtccttctaccttgtcatcaaaatcccgtctcctaaaacgatcaaacctgactggatttgcaaagctatgaaagatgcctgaatcgctcgccttcccttcaccttcttggaataccattctggcttatttctggtgacctttggatgcgaaggggatcgacgctgtgttgttgaaggccaatcttggcacttcgaccgttctctgatgatgtttgccattcccaatggttttgataccatcattcctaaatagctttgttatatcccccttcgaatgtaggttcatttcattccttttggcaataggtcccatggacttgctcatttcattgctgacactataagggaactcattgaggtcaaccttccatccctatatgattctatcacccctttcatccaaatccgtgtacttctcgacaccacaaagcctccgtttcggggaatgaatgttcattttaggaaactctcactcaccaaatggatgaaatttcactatgaaggaatccaaaactattgttatcactatgggaagcttgatcatactttcaataaatttgattctttcctccattactgcgatgctcatgcccatcccccatctctcagctacaaggatgtcttaagggcccctgctaagtccttttacaaaaaaaaggattttttaactctctaactcaatcccttttgaagagatttcatccctcaacatcctgtccagtcaaagcctccaagatgttgttgaccaattcctggttccaaatattgctaatacttctttggttaatacttctgatgctgagaaccccactaccctgcctcctcccagtgtttctgttgaagataaccttcccccacatgtacctacttctctcacttttagaaacc

SEQ ID NO: 271852 - DNA, 571 bp, Cannabis indica
accctaatatatatttatatatacatatatgtatttacagataacaaagttctcatgtggaggaatttgcattggttttggaggaagccactcctgtttgatggatttggagccttcaatttcttagcctcatgggctcaaatttcaagagccaaacatcatgatcatgatgatgatgatgacctaatcaataacaatattaatcttccaaaccattcaagacaaaagctttttaatgtcataaataatattaataataatagtgatcatcttactatatcttcttcttcatcatcatcaatatatgaacaacaacatattggggcaatccaagacctgtatggaatccccatgcgagctatggcggccaatgacacgtgctgggagtcagagctcgccaagctcagccaatcagctgaaagccgaggcattcagcttcttactctgtctatagagaaagaagctgttgagaggttgaaaggtgtggttgttcaaagtggaaaactcttcaagtgctctacctttgatcttctttgtgctcatgtttggaaggtatgaatatatatatata

SEQ ID NO: 271853 - DNA, 925 bp, Cannabis indica
tttgcacgaggatcatccgcgtcttcgttctagcccacctatttctagtgaaggacagtctcccccaaatcttatacccagccatagaatgatggctcgtacaaagaaaacaacgtgtttggctgacgtgtctgatccccaagtggctcgtcatgccactttactcagcgctgaacatgatccagccgcccaggtgggggggatcatgaaggggacgctaaggtccagcagattgaggagcaggacgatgtacgtcctagcagttcctccgaggcggaggaagaggcataggttaaacccccaaactacggggagtacaatgaggctggggagccatttgatccagacagagacgtcttggttgagggcgtggactacgtcagtgaggagcttactgctgcggttcctcatagaaggcaaggtgcttaaggcgccaggtgggtaagccctccgtctagggttacagaggcgcgccttcggactaccgaccagggcggataactgggcaaactggattgctacattcccgcccacaacaatcgtgccacaaaccctgaaaagggggatgtgcgcctggtcgggtgcccatgcccagcaaggggcattgatgcctttgcatcaatattttaggaatgtggaagacttcttcggcctttgcctgtcccaattcactcctaagggcattaaatatctgtttaccctcttcgtcctctacgtttcccagaagaggggtatgccttctcctcacgaagtcaactagttttttaatttgaagtccacccctaagcaagacggggctggatacttctatttctcttaacaagacttcaagtggttgacgggcaccgatgattcggccatcaacaaaattgggcgttttactaataagtacttcatggtggatggcacgggcatcactcgcact

SEQ ID NO: 271854 - DNA, 2808 bp, Cannabis indica
ctataggctacagttttaaactgtcgcctatagtgtttactataggcgacggttttaaactgtggtctatactattttctcgactgttttcaaccgtcgcctattctacccagtattcgcgacgctcgtataggtgacggttttatgaactgtcgggaattttttacctgacagtataaaaccgacgggaatttagagttttttagtagtggcgtgatgacggttgaatcatgccagcatacctataaaaatactataattgaaaccaccacgattcgcatgggttgcattcaatgtcaacctttctactcctagatcgttggatttattttgtattttttgggatgtaatctgggccattaatataaggggcacacaaatcgtcagctcttcccttataaatagagcacaaaatttctattcaccacttttacctcttttccattttgaatccagactctttgagagagaaaaaagataaacctcttctagtgaatgaaacattattttgactagtacctttgccttttactttggatttaagcatgaaagaaccttggagcaccacccccaaaactaacgactcctcctccagacccatcgagactgctagatttctaggtagctatcaatagacttatagctcgggcttgtagatttctagatttcttacctaatctgtctttgtttaatattcttcatgtgctagaattttattgtaatcttctttctatgatttctcttactaactctggtgactattctttcaacttttattcatgttatggtgaaatacagaacaatttaaggaagttgatgattgggatgggtgaaagaataggcaagctttactatttgaattctgatactgtcaacaacattccttttgttttttcaatttatgattcaaaaataacaccaagtacagtttgggattacagattagggcattcatcttgtatcaaaactcattctctgaataaagccttgcaattaaattcaaatatttctaatgactttcattgttttgagtgtcattatgttaaataaaaaaagttaccatttgtgtctaatcacaatgttactactgcaatttttgacttaatccatattgatatttaggatccttttaatactcctactattgatggttgcaaatacttcattactattattaatgatcatagtatatacacagggttcatttcatcaaaactaaatctaaagctcagaaggtcattcccaattttttatagcttattaaaactcaatttggtaaatcaaaggcatatataagatctaataatgccaaagagttataatttacaaaaaaatttagctctttaggtattgttcactatcactcatgcgtacaaagaccccaacaaaattttgtagttgaaagaaagcatcaatacctcttgaatgttgcaagagctttattgtttaaatcatacattccttcatcttattagaatgaatgtgttgctactactgcttatattatcaataaaacaccaactcccaatttaaagctcaaaacacctttcgatattttgcattccaaacccccatcttatgaacattttagagcttttagatgcctagcatatgcttctaatcttagggcagatccaagttcacactgaggtctacaccttgtattttatttagggtatcctactggcatgaaagcatataaacttttggatttaaacaccaatcgaattttttttttagtgatgttgtctttcatgaagccatttttccttttgtcaatactgatgttttgccatcagaatactaaaaaaaaatttcttgcatcaatgtcttcctcatctcattcctccattcattttgacaatcttgtgcctgatcatgctgcaacacccgagactgttaggccatctaaacatatcacaaagccttcatacttaaatgattaccactgttatctggcttctcacaatctctatgtttcctcacaagataacatgccagccactacacactccttatcgaaggtgcttgattactccaggctatctcccaaattttgagttgttgtcctgtccatctctagccatcaagagcctttctgttttagtcaagctaaaggcattcctaagtgggaccatgcaatagacactgaaattgatgccttggagaaaaactacacttggattgtggttagcctacctacctgcagagcaacatgtgattggttgtaagtgggtttataagattaagtacaatgcagatggctcagtagagagattcaaagctagacttgtggctaaagagtacaatcaacttgaaggcatagattactcagacacatttgccccagccacaaaattagtttctgtcaaacttatcctagccttagtagttgttcatggtttgttcttacaccagcttgatgttaacaattcatttcttcatgagaccttcatgaagatgtttatatgactctatctccagggtatagtcctaatggggagaatccattaccaccaaatgttgtttgcaagcttcaaaaatcattgtatggtttaaagcaggcctctagacagtaatttgaaaagttttctacagctttaacagaggaaggtttttcacgctctacaacataccatttaatgtttatcaagcactctcctaccattatcatcatcttactggtttgtgtagatgatggcatacttgctagcaagaatctcaaggacatagaagttctcaagatcaaattgaatgatgttcaaactcaaggatctaggagatttgaagtactttctgttgggtttt

SEQ ID NO: 271855 - DNA, 537 bp, Cannabis indica
tatataatatgaatccatataattcttattattatcagtaacacgaacatattctttgtactatttcatctagaactctcacataattcaagagcaaaaaatcaattttaagatctgatcacaacgatatttcctttaccacaattctaaatagattatataaacaaataatcatccccacttatattcacacaaagagaattaagctctccttgattaattaacacgtagttctaataatgagttcattacgttcattacaatcattaaagcccgacgtaactctttccctcaacttatcatcacaatcaaacacaacgtcgttttcaattgagtatacaaaatttttattaactagagtgctcatgtagtgatatttgtaaagtagtcaaggtttatttgattaattagagtgctcatgtagttagctatagagggataataggtcaatagtttattttttccaatttgcataataactaacttttaatgctgattaagattcattcttgagttttttatggtatcaaagggcaa

SEQ ID NO: 271856 - DNA, 555 bp, Cannabis indica
ctcgccccttgcggttaatggatcagtagagatccccacctaaagggctgtaagttgcgtgctgtcatccaaattcctaaccatagccgcagccgtgctaaaacgacttaagtacgccttaagtgtctcaccaggttactgctttatattggttagcgaggccgcttcaggtcgtctatccctagcagtctggaattgtttcttgaaatccctggacagctgctcgcaggaggttattaaatgatgagtaaacttgttaaaccagctactctcgctgctccaacaagcgaggtggggaacaaaatatagcgtaaattgttcgtcacattactcgctcgcattattgtgttaaagttatttaaatacgaaactggaacaatggttctgtcatatgacgagacatgcgggtttttgaatcttgaaggaaaaggggtattcgttatatctagatgatacggctcaagttccttgtcaaagttgtatccagattgtcttcctaattcccccacttgatatctcctaaacttgtcctccagctcgtttatccgcaattgg

SEQ ID NO: 271857 - DNA, 1821 bp, Cannabis indica
aacatcctccaactcaagagaaacatcctccaacttttgcagccaatccttgatagcacgattagttgattgtctctcctcagcatcttcaagcacagcagaaatggttgagagcatgctacgcatcttctccatctctttctccacacccaaaacagatccaacttggttttggatgagtgagctgagattgtcaaggacaacagtgagaacagcttcagccatgattcgtgatgatcagttgagaaaaagcagatgacaaaaatcaagcaaagcaagcaaattgtgatgagacagacttgtgaggaaggaagcaaaagactttgctttgagatatttgtaacttagcttcgtgctggaccttacgtacgttatccaatccacacaaatagattagatttattctccttcacatatttaattatattttattatactttttatcaatcatgcatatatactaatactaatactcatatagaaaaatattgactacgaatttaatttttttttttttttatgatgatgaattggaaattatttaaatatataattatttattggaaattacaaggaaattgtttgtgaaatttgttggaaagttgaaacacatatatttactgtaaaattacaaaagtcaagtcttccactaggacattagttgcttatgctgccaagcattgtaaaagtaaataatcaagttttaaaaaaaaatgcataattaatagatgaaaaattatgcaccaaaacgatatttgaacaatctcgataccatcaatctcatctaaattttatagtctacgacacatttagataattatgaggtacgttatgtactattttaaaaaatacaagacttaaactgtcatttaacaaaataaaaaatcaaatcaataacttttgtaaaacactaatttttaatattatttgattttttttaacaatcattgttattattattttgaaattattattattattttagtaaaatttatataaattaataacatgggaaaaggaaaaatatatggtataatttaattgaggttattaactaatctgagtgttaatttacactgtttttattaagttagtgcataaaagtaaaaaaaaaaaatctaagagcactcacaacacagttcctctaagatagagaagttttattaaatttaaagaagcatattaaaaatacacagttcctctaaactctttcatttttaagtttttgtttaaaatacactattcatgttctacattatttatagaatactacttactggtctaaatatatttgttaattattttttatgtagatatgtgtatatagatattaatattatatatttgaaatgagtcaatataataaaaaaaataaaaaataaggttttagtaatgtattttaaaaaagttaatgcatagtgtaatataaaatgtgctgtaaaataaaaaaaaaagattttaatgatataatttaaaagataaaataagaaaggttgctctaaatattaatcaattgaggttgtattattattattattattattcacactaatttttataattttatacaaagtttaaagcaagtgggcctagaatttagaacgtcatggaagacgccgtcacacatgcctccacgcgtcagcacgtgggaaaacacgcagaaactttaagcgacacgtgagccccacgcgcgaggaatccggcgaccagacctcagggtttggtagatcggcggctgggcaaccctcttgagtgggcggtgagaatcaatttgcactccaaataagattttcgaaaaagaaccctaaactcaaaccctaa

SEQ ID NO: 271858 - DNA, 908 bp, Cannabis indica
ggtccttgatgtcctcatcaatgaccgaccaagcggtctttaaacttggaattatttttcattttttggacaacgggctgaccgggcagcttttaatcccggtactacgtgcttttgtcatccttaatgaatttcattctctgtttataattgtcgtgcaattgtgattgttttatttttaccaaatgctttgtacaggtataggtgccccccaagtgaccgagcagacgtatgactcttggtcacttgtctttcgcaaatatattgcttatctgttcggtgttttgggttcgactaaaccttttgtacgcactttaggtaaattataatcatgctgattttttcgactcaatagaattggaaatactatctttattcatttattgatcgaaaatgtatttgttaccgtagtaacttacatcagagctagtgatctaatctgatcttttagcttaacatgacataaaacaaataagaaactgtactttaaagtggtcttgccgacctgagtactttgtttctgaaacctttgcgcgtagtccgcccagaaggccattcacttagaagcgaatgttcatttagtactttaaagtggtctagccgacctgagtactttgaagtggtctagccgacctgagtactttattggtagtatttccttaaatgttctccattccagtaccgtggtactagaatgagttgcattttttcgtcatacttacccaatttgtatgctccggagtcgagaacttcgaccacctggtatggtccttcccagttaggtcctagtacacctgacgtgctgtctttggtgtttaggaatacccttcttaggaccatatctcccacaaagaattttcgagctttcacttgtttgttgaaataccgagctactttttgttgatgag

SEQ ID NO: 271859 - DNA, 844 bp, Cannabis indica
aaaaattattaagcttttatttaagtaaattttaagtgtattatacgcaacaaacatttatgggttcaaatcctataacactattttattaaatttttttgtatatatttttgagggccccaaaatttaatttgtcttgggcctatatattttcagggccgccttggtagttggtagtatggatttttatttttgttaagagtaatgagagaaaaaattaatatagtttattgtctataacaaaattaagctaattaagttcatccatgaatcacaatattatagtggaaaatagaaagaaagaaaagttagaagagaaaagtggaaagagggtaaaaaagagtgtttaattttagagaaaaataagaaatagggccccacgaaaattaattcaagtaaaaatgaagagaaaatggaaaaaaaaaataataataaacaaataagtatatgtgaatttattgaattactctcacaaatatttattaaaattaaaattatataagtaaaatagttattttcatgaaaaaattttctctttcttatttaccaaacaacataaaataatttccctttccttcccttcatagtatttttccttctaatttttttcgtccctccaaatttctttctttcttactaaacataggtagtttttggttaaaaagaatgaaaaatataaaaataataatgggaatagaaactagaataaaatttaaaatgtataaaaaaattattaatttttttcccatcatgtattagaatagtctttcttctcatttcaaaataaaatagacattccactaaaatagtataaagatcatttccaatactttaatatacaacc

SEQ ID NO: 271860 - DNA, 836 bp, Cannabis indica
tattgtgactaaaaagtctatggataaaaatattatcacaaaaattacaatttattgtgactaaatgtatttttagtcacaatacttgttgtgactaaaactaaattagtgacaacttgtaactaaatactatattttagtcacaagtaatattttattgtgactaaaagtcacatttagttacaaaaaaattatgttgtgattaaaaaattatcattaaaaataacagttttttgtagtcagcataaataaaatatatttttttcctgatataatttaaatatatatataatataaaaatgtaattgtattatgtatatacttattatttttacatttacattaatgcccttgctcacaattatgcttaggtccgtccctaagtaaaacaattatgttgaatttatttttaacatcaaaacttatttgaaatttctctaaattaataaatttgttggaaatccactataactactatgacccataaaaaaatatcatatcacccataaaaaaaatcaagggacctcaatgtatccatacaaaaatatcatatcacccaaaaaaaaaaaaatattactactattttcaataatttttttagggttatgaaaatctttttttttttttttttcttacaaaattgttatgaaaattcttaatactacaataatgagtattagggagtgagatttaaaaaataaataaactctaaccatacaaaaaaaaaaaaataataaagctcaaattataaaaaaaaataactttgtataatagagaataaatatagggctctttatgtttttcgctaaaccttttctaataatattttaattcag

SEQ ID NO: 271861 - DNA, 968 bp, Cannabis indica
cccattcccaacaaaacctcaccagaccattagaagcactcaagccctgactgttttcgagctccgaccgactaagacatcccatgaccgagaacacccatgatgacttgcgacgacccacgagaagcacccgacaacccacgaccaccgcaccacttccggcgaaacccactcgcttgttttctgcatttttttttctggtttttgacgatatcacgaaacatcgctaaatgtcgcaaaacatcacgaaatcatgaaacatctctaaatgtcttcaattcacaacagcgcttgttttctacattttttttttaatttttgacgatgtcgcgaaacatcgcaaaatcgtgaaaacatctctaaatgtctccaattcactatatcgtgaaacacattgcgaatatcatcgctaaacatcgcgaaaacatcgctaaatatcgcaaatcatcactaaacttcatccctgacctcagatttgttctatcattgcaaatacatcgctaaatatcgtaaaatatcgcaaaaaattggtaaaccagaagaaaaaaatgcagaaaacgagagaggtcgtgagagaagatgacggcgaggccttgcgactgaagttctgggtctgtgtgttcgacggtaggggttctaggtcggggttaacgccggagaaagagagagagacatggatgtttggtttttaattgtttaattagggtaaaattggatagaaaaatagtgtgagtatattttgcatgatgcaaaatatgctagcatatttttagtggataaattaattttaagcatataatatcaaatttctcttattattttgttttttttttaaaagagattatgtatttaattaaataaaattaactgttacaggaacactaataaatcttgaacaagcataatctgtccgcaaataaatcaaattattattatatgaatcagattaagattattattgttattat

SEQ ID NO: 271862 - DNA, 2582 bp, Cannabis indica
ggtataatggttttgtattaccagacatctgtacattgatgcttattcatggcagatgccagtagtgctttgtatttcatcttatgaacaatgcgtaatggtttgattctgattgtgtataaatgataatattcgaataataaagtatatgattattattgcttttcttgctgagtccttgtgactcactggtgctatgcggtgcaagtaagggtaagaaaaagttagagttgccatgaggtgactaccttctctagcaatgtacatattgaccccaccggcttgtgtactgagttgcgaggagttgttttggactggctgtatctactgtatttgaattatgttttgaattgctattgtctacaaccttttgggtaaatctttttataatagggatcctcggaacaccttgttactgtcgttataatgttcactttaagtcatttattttagtcaagtttttaatattctcacaattttttaataattaattaatatattagtattaatctagtttataaaatcccacacgtgacatccttatgaagtagggcgttatagcatttgtcttgtgaactccacttagaagggagttcacctgttactaagtagttaacaatgtgcgcacacaacggtaacttagtaacaacaaaaaattgttcatcatggaaatcatcatgaatatttgggccatcagcaggatcactgaattcaagttgagacaagtgatctgcaactacattctcaacacatttcttgtccttaattgttatgtcacattattgcaagaggaggatccaccttattaagtgtgccttagtatcctttttggaaatgagatacttaagggcgaagtgatctgtgaaaattgtaataggtgatccaatcatgtaagctcataatttgttaagagaaaagacaatggcaagcaactatcttttagtagtgatagttcatttgagcactattaagagttcaaattgtatagtaaataacaaaaagtttcccctccatttgttttcgaagaagagctccaacagaaaaattactggcatcacacatgattttgaaaggaagagtcccattgggtgactgaataatgggagcaaaagtgagtgaattgacaagtgttttgaaggactcctcacactttggtgtccactcacaagtagcatctttggctaggaggttgcataatgaacgagaaatcattgaaaaaatttgtacgaacctcctatagataccagcatggctaaggaatgatcggatgcctttgacagtcataagagtaggcaatttagagatgaggtttattgtagatttatcaacttcaatcccttttttagaaacaatgtggcctaggataatgcaagaagataccatgaaatggaacttttcccaattaagcacaaatcttttctcaatgcatccttttaaaacggcttcaagatagagaagacatacgtcaaaagattttccaaagacagttatgtcatccatgaaaacttccatagtttgttcaatcatgtcactaaaaatgctcatcatgcatctttggaaagtggctggtgcattacacattccaaatggcatacgccaaaaagcatatgtgccaataggacaagtgaaagtggtattttcttggtcctctaatgcaatctcaatctgatataacctgaataaccatcaagaaagcaatagaaaggacgaccagtgacatgctcaagaatttgatcaatgaatagttaaataggagtagaaaatgatctttatgggaggcaccatttaattttcgataatcaatgcacatgcgccaatccatcacagttcttgtgggaacaagggcccctttttattttggaccacggtaacacccgattttttaggcactacttgaactggactgacccatttactgtcagccaccaggtaaatgatagtcgcatcaagaattttaagtacattttttaccacttctttcattggtaggttcagtctccttcatgggatagtctcttcttttagattaattcgatgggtgcaaatttgagggctaatacctttgatatcaacaagcatccaacctattgcaagtttgtattttttcagtagcttgagtaactataattcttgagaaggttgaaggttggacgggatgataactagaaaggtttttccatccctgagaaaaatatgttcaagcccctagaagttggttcaattgaatattttgagtctcttcaccagaagtttttagcgttcccctctcacggggtagcgcttcaaagtaaggcttcaaaaatttcttctctctgttttgtgtgtccaagtgatcaacatcgagagcagactcgacaaaactaggattttcattttcaaagtgggaaaggattttatcaagattaacaaaatttctttccaattgaatctcctttgaaacaagattgtcaatcatgaatgtttgatgacattcattatcctcttagagttgcttcccaatgtggaagatgttgacatcaagtttcatatttccaaatgacatttttagtagaccattctgacaattgatcaaagcatttgca

SEQ ID NO: 271863 - DNA, 515 bp, Cannabis indica
aactcatacgggagaggccctgataaactaccagaaatctaattagattgactcgtggactatgtagaattttaactacaaaatcacgtaaaaaatcccttgtgtttatgcctcttacttcattgctttcattttttttttgtgtgaaattatcactatttggctcaaagtttggttaacgaaaatctgcattaacaaaaagtatactctattttcagtaaatttatgtggttgttgtttgtatttatttggttttgatgtattcttcgatgaaatcgtgagatctagttttcttgagtatcctgtgttcataattttctcgacgctttatcgatacgttctcgacgggttctcgatgcaaatgtcccaaggtcagggaagacatttatcaacagtttttcaataggttctcgatagttcaagttttgcaaaaaaaaaaacttagaatttgtttattgtcgatatgtttttgatagattatcgatatgagtgaaaattctttttgttgtcgttat

SEQ ID NO: 271864 - DNA, 2254 bp, Cannabis indica
tagtttaatagtgagcaatgttatctctaagcatctaatctaattatacatatttagaatatattatatatgtatgaagagatacgtggacgaattaaaattatgaatcgagattttatggataccctaaatccaaatgcaatgttgtctatttcaatcaattcttttgaggtataattttgaagttgtgtcttaatttgtgttttacaaaaattattagtgagcctcttaaatgacaaaataaattctatatgtttcaaaagagaattgttaaaagatattattagtgtctagtatttttttttgatgtcatactactatttttgtaattaagtaatgagtcttatataatttataggaaaatatataactcctaagaaatatcactaatcaatcgtaatgtaaaatttatggaagatgctgggcaccactgtgcccaataacaatgctctttccaaaatagtataaataagattatgtgctcaattttttaaattattttttttataatatagccaacttgaagataattcttagcacaaacacacacagtaaacgtaattacttttgtcataacatttctagatcgagttattattaagttttattttgacaataaattagttcagggtacattttagtactatttttttaaaaaaaatacaagggtcaatttatcattaatcaaaataaataatctaatcagtaacttttgcaagacacatggtccaaaataatattaatttttttttcttttaatgtactcagaaatactaattcacctattttctaaagagataaagataagttgacactgaggatcaagaattgagtacattattgggagttttaatttttatttatttatttttttttcttttgacaaaagaagaaaattttcattaaacaatcaaatcgttcatcattatagaaatgaactccgagtcgctcgctcaaataatatgatcagaaatagaacaagtaaatctcgctagaaagttaactacattattagcagatcgtttagtaaattttaagaaaatatgtctatcatttaattcaactaataacctcttacaaacatcaataattatgctaaaataggataacatgatagttgaactcctgatagcttgaacgactataaaataatttgtttctagatcaacttttctccactgttggttcttaaaccaacttaatacttcacaaataccaatggcatctacaattttaggatgtgcaagagattaatttttgataaaggagatttcagaaagaaagatcaattgacacaaaagaagaagaatttgcactcattaatgaacaatgtgaaaattggcttatattctctttttattaagttttgcaccacatatgtgagatgagtttgacctttcctatattaacttatatagttaaagtaaaaacaagaaagcttcatatacgtacgtatcattattattatactatatataagtaagcttatacaacaaaatatatattaattcaaaaagtctactactttcggcgttgcataataattaattaattaaaatgacttttcaagagatttaatttatacaaagtggatagtattactttgtcactaaataaatgatctatatttaataatggaagagaaattattcctttttatagataaaggggagaaaaaaattatcaaaccagccctgattacttatctgcatttatatatgtaattaatggtatttatttttctataacaaccttatatattgtttagtaataaagtaatattacatattaggtcatgaaaaggcaacctttttcatagtggttttcatatgcagagacctgaaagtgttatatagatatatatattttcttttttcataccaataacaaaaaggatgtagtcatgaagcagcctatggatttcaaagcacacatacatagcaatgacaattcacccactgaaattgaaagtaatctagctgaaagatatgtttttcttttcttttcggccaaagaggactttatacatataaatatatataattatatatgtgaaaagactaaagcgtgatttgtaaagttctttttttcatgattaaaaaactcaagatgatgactacaggagtcgtgattcccaaataggccttttttcctggaaattcctcaaaggaaaatcaatatgtgtgcattgacacatgacctcaccgttgtgaattagtgatgtgacttattttgtagatgagtatcataatat

SEQ ID NO: 271865 - DNA, 834 bp, Cannabis indica
cataaaacccaacagttatagcagagatatatatgttgtcgcgagatgaaagtgtttttagggaaaaactttttatcccgggttttagttaagaaccgggataaaagggtttcacactaaatccttttatcccagtttttaactaataaccaagataaaaggtttccctaaaaatcttaatccccgttttgctaagccataaaaatcgaatcttgaacttacttttttacctttgatattttttttcaacgttctaccaaatatgacccttgtctaaaaaaatttttgctccatatttgaggctccaaatctaaaagtggaataaaaagtctcaatatatcttttatcccatttattatttttgttaactaaacaagtgggataaaaggtcccttttcttgtagtggattgtcaaggtgcatcctaccaagtcaatacaccaggtagagttctctagttcttgtccggagatggttctcctcgagccctactgtcccctaccccttgaagttgggactgaggagtcacaattgagctcgcaacacgctaccaacaattggcgcaacctcttgacactcgggtgtcgcgattgggatcttgctattcgcagcaataccgaggatctgactaaaaagtaaggagcttctgcatcaggtcagtcttcgtactcctttattcttactcgtccctactctgcctttctcactaacttttctcctcaggcatcttttttggtttacgctacacattattggtcgtctcaaagggtcaaggtgctagagactgaattttgacagattaaggaacatgaggatgtcgtagccaagaagtgga

SEQ ID NO: 271866 - DNA, 486 bp, Cannabis indica
ttaatcattttaaatgattaacaaaattaaaaaagatagaagaattttaaaattaattaagcattttaaaaaattaattgttttttattaaaaaaattcatatagacataaaagtatattaaaattcaatttttgtaaaaattaaattttatgggaaaaaatttaagtttatttttttctctaaaaatttagatttgtttaagtaaatataatttttttctagtttaatttctaattatttttaaataattttatattttatcttttattttgtaaaatacaaatttgttaataaaatgaaatttgaaaatatatttttgttttaagaataatttacatacagtatatgtcggctacataccaaactatatacatgatatatactagaaagaaaggtgatttttataaataatttaaactacattatttttaaaattatgatccaaaaaagagtgtctaatgtaaaaaaagtgaaatataaaatga

SEQ ID NO: 271867 - DNA, 815 bp, Cannabis indica
aataattatgttaaatgataatattatttaataatctattttatttattaaataaatagttttggcatttaaatggttagaattggaaaattagcgtttttgagaaaatagaaataaaaattatgaaaactgcaaaatccaagtgaggcccattaacaccatggcagaccacttgttcaagtttttttcttattattattttcattattttaatgcaaattaattactaacctaaacctagtagttgcctataaatagaaagtaatggatcacaccaaattaagcagttaagcaattattcagtaattcaggaaactgcctttcagaaaaattgagcctctctctttctctctatagccgaaccctctatctcttctcttcctcttccaatttcgagataccctagtgatagagtagtgcccacacacatcaagtggtacctcaatcataatctggaagatagtggaggatcaaaatcaaagagaaggacattcggactcagatcttggtaatactctacgacagaaaggatacaagggctagagatctaagtggaaggagacgtattattccgctgcaaccaatgaaaggtttccttaactttatatgtgtttattatcgttttagaaagttcatatctaggatgttaaataatatacttgtgagtagatctaagatcctggtaaagtaatatccaacaactggcctcaaagccatggtaattgatttgcttacaagaaattttgacttaaaacgatttgtacgagatttggatggtttcatgttgatctatgtgttatttgatgattgattga

SEQ ID NO: 271868 - DNA, 2061 bp, Cannabis indica
agttcctggtaaaataacttccaacaaaacttatctctaacttttggtggggattaataggtagtaaggctaagactcattggaaaaattagaattctctctgtgtgtctaagtttcatgggggtttagggtttcgatctttcgtttgtcataatcaagcccttcttgctaaataagcttggcgaattttcactaatcctaactctcctgtgtctagaattttaaaagcaaaatattttaagaataatgactttcttttggcctcaaaaggacatagcccatcgtactcttagagtagtattctttggggtcgtgatcttcttaaacaggggctcattcggaaaattggtaatggtaaatcagtctcaatccttcaaagctactggattcctggtttgaaaaccataagtttcagagataatatgcatccccctgaaagtatagtgtctttttttattaatgagtttggatgcttggatattagtaagcttaatacttactttttcaatgatattgttagggttattcttaccatttcaattgattttactctagaggactcactcatttggggcaatcattcttcgagaaatttaactgtcaactctgcctaccacctagccacaaactgaacttctcacacagcttcccttccttcaacttccaattcgctttatttttaaagatggtggaaaacagtttggaatcttcacatccctcccaaaattaagcactttatttggagggctttttaccatgttcttcctacttcttaaaacctgttcaataggaaagtccttaatagtccaaactgctctatttgttcgaattaaattgactcagttactcatgctcttctaggttgttccagagctatcaatatatggagatgaactagtttaggcaaattttatgatgataataaaattcttgatattaaaggctttcttttagcaggttttgaaaaattatctaaggaaaaacttggtttatgtttcaccattctttgggccatttggaatggaagaaatcaatctttgttttcaacaaaggtttatcctatttgcagatgtggaaaaatgtgtgcttgattatttgtaggagtacttaagaggacaagagatttctaacattgcaggtcctatttctcatcatttagtccagcagcctactcctcatcctgcaagtggaatgtatgttctcagtacagatgcagcgatcaataaagagggttcaatgatggggtttggggctgttgtccaagattgtagtggcaaggcagttgcgggtttttgttcaacaatgcctagtgttttttctccaattctggctgaggctcatgcacttcttgcagctcttcaatgatgtcaaatggtcaaatttcctttggattctattagatcagactgttcgcttttagttaataaaataaataacaaatgtaaggatagatcttctttttctgatgtgattacaatagtaatgatatctctatccttttttcctactgccaaggtttatcatgtaccaagagatagtaatgaattggctcatcatcttgctaagaaggctttaggaacaggtaaagattgagtctggaattgtaatgtttccagtttgaatgtctgctgagtttgtaactgaacttcttcatttattctattgttacaaatcaatttcttcaaaaaaggaaaaaaaaacatttcctaaaaaaataataataatagagaatagtaaataaaaaatcaatccaacaaataatcctgatgtgtaaatcctataagctctaatttcaattacacctcttcgtagcaaaacacattacaagtgtgcctaaaggatctttacaacaaactctaacaatttttagcaacaataaatactcacagaataagaaagaaattacagctcaacattctttcacagccttacgaagaactgtttggagtaggatatctaatttaatttaatttttttctactcatttgaaaatcatcatccgatctgatccaattatacctcaaaatctaatctaatccaatcaaatcacggattgaatct

SEQ ID NO: 271869 - DNA, 1073 bp, Cannabis indica
aatgaaagttgatgctcaggaggagttgaggatgcggttttacgttggtcggaaggaggtcagattcggagtgcttgagtttgcactcattacaggcctggacttctcctcggggccaacagaagaggagaaggctgcgcaggttgctcgctcaggctcagaccgattgatcaacaaatatttcaaccggtctgatagtgtgaagacagaagcactccaagataggttcacaaactgtcagaacccggaagacttgtacaagctcggcttgtgcttgtttgtggagtcagtgcttctggggcgcgaggctaacgcgctgattactcctgacatacttagatatgtcgaagacctcgagttcttcttccggattccttgggggaagcactcatttgccagactcatgcactcgcttcaaaaagatatgttgaaacagaaggccaactacgagaagaagctgagttcggatgttcagcacgagtgcaaatacacagcatatggcttcgcacctgcagtacaatattgggcgtacgaggcattttggaggtagggaagaggtatggcacgaatcacgggattcggtttcccaggatgcttagctggacgagcaagggtgatattgggaagaaagaagtcagcgcattattttctagacgggtatgaatttcacttatgttcagagtaattatttaacataaatgcttgtaataaatgctaaatggttttattctgatattttttgaaccataaacagaatcttgaagtggtgaaggggctacttccacggacagaggaggaggcatttgtgaggaccatatcttacgatggtgtggaaaacctggttgatgatggtgtggatgacacagaggctgaggcagatactcaggtaccagacagtcaggtaccagacactcaggcaccagacacacaggtaccaattatgattgtttttatgattgtataacttgattttttattgtttttgttctgtgatatttgttacattgtggaattatcgtatgcttaccgtatttttttggtatatattttttcaggccactggttcagaccct

SEQ ID NO: 271870 - DNA, 1964 bp, Cannabis indica
tagaactttccataggctgaatatgtaataccctaagtttataaaatggattagcaaaaccctaactagttaattgagtattattgtggaattatattattatataatctattatatgtgaattagtatgagatatgacatggtaagaccccgttggtgagtcaggggcattttagtaattttgatccaagaagggtaaaactgtgaatttaatttaatacacgcttatggactatattattatatagtatgcctactttatcctttttcaagtgtgttctgacaagtcggagcggtatagtcattaccgggtatttcgggccgaaccggattcggggccgaaatacagtttggggattatttattggcatttcaattaactatgattaatttgaaatttaattgggcatatttacgtcgaaaaagactatgttatccttggaatgcttttatgtgttatttggccctagggggcattttggtaaattggccttttggattaattgcaacaaaaagaaattattttgcattttagaaagaaaattctgggttgttttctcagctcttggccgaaccctattcttcctctcccgtcaatcttttcacttcaaatcttcctctcttgtgtgttgttaagcttgttggagcttgggggattttggtgtgcttttattgtcagaactttgaggtagtttccagctcttatttctgaattttattgctttgattctgaaatgaaataggtatgaactcatgggttgtgttcttggattgcatgcttgtgggttttagattgtttattgagtttagccatggttgtattgtgaattatagggcttgctttgtgtatgctttgaatggtaaatttgaggatttctagttgctgagtttgggttagaaaaacatgctgaattttgattcattttggtgacttccttgtgtagcttctttatgtgtgattatgtgaattttgctctaggtttggagctttgattctatgttgtttgaatctgaatttctatgcacgtggactgtaattttgagctttataatttgtggtttagctccctattatggttgtttaattgtgtaagaggttatgttggattgatgcatgttttggctggatttaggtgtgtttgggctgatttttgtgttgctggtttttggtgttgttagagagtgaattaggtgtaattcttctctatttatttgatttatgctaggtgaaagtttactatgattgtgggctggtttagcatgaaaattagtatttttagatgcattttcgtggctggaaacttagtttcctgggtttttaaacccaatagccgcggccattttatggcagcttattttatttttttcgtgtttttgttttggtcataacttttgactcgagactccatttgggacgttctttatatcgttggaaagctcattcttgagatctatgtgaatatctgtaatttaaaagccaattttataatttgtggaaatggatttagggattaaccttatacttgtgtatcctgggattgtgattaggataaccgacactttctcaggagcacctagggatttggaatctccatatttgtgggacatcaagttagacagtagttagcacgtagagatataagcaatggcgcttatatgaaatatgatatatattagaaactagaaatcgggattagagttattactctaaagtgagcggtttattggcttagggttattaccctagtaaatggttaatatgtaattattatgccatgatgtaaatagatatataataaaattaagggttatgtgttcaaggcataatcgggttggactcggtaactagaaccgagatgaaccgttctaagtgttgggttttatgtcctaaataaaactcatttcgatataatcagatttacttattaatatagatcagaaataacatttaatgttgcatggtt

SEQ ID NO: 271871 - DNA, 762 bp, Cannabis indica
tctatctgtaggtattttttgacaagtcatcgctatagtcacaacagggtattttgggtcaaatcaggtttgaggcttacaatacatttttgggatttatttatggcatttatatgatatatgagaaaatttaaattattgtgatatatgtgtgttgaatgaaaattttacccatatatgtgtggatatatttcactttaggggtattttggtcttttgaccgaataagtcttttgttagcagtcatttttttggaaacttagaaaaccatttttgtgttagttcctttcttaaccgacccctctctttctctcttaccctcttcattgtgatttcaaaattgtggaagaaaaaggccttgaattggtgtggattttgtgctagttcttatgcttggagcttggagaaatttgtggaaaaagctaattaatcttttggtacttataattctgataattgaagctctagtaagttgttcttggtgttcatatgtgattggatgcatgttgatgtgattttgagaaatattggcgacttttgtgtgtttgagctattgggagtatgtatattgtatctaggttgttttgattgatttagggttggtttatcttgttcacattctgggaatatgctatgaatttctgggttttagttttgaaagctttgaattctttgagtttcaaagtttgtgagatgttatgcatgtatggttgtatgcatggccgttttaaatattttagaggctctgctctaattttaaaa

SEQ ID NO: 271872 - DNA, 924 bp, Cannabis indica
tgagtgattttcttgactgtgccgaaggcttcatcaagctcgaagaagccattcaacgagcggaaggtgagcaaaaccctggcaagtcaaaaaatccttctactggaacatcggctcaactcccccattactcaaataattcgaactcaagtggtaagcgttcagcaacaaccacaggcaagggaacgggaagaagggaaaatttgccggcaaatccgaacaagctccccgggagaatcaagaaaagtacactgcattcactatcatgactgaagacgtagaaagtatttacatggaaactcaatcattggtcccatataaaaaacccgggcccatgaagaaagatatcagcaagacggacatgacaaagttttgtcgattccacgaagactatggccatcacactaatgaatgcaacaagctgaagcgggaaattgaattcctcataaggaaaaacaacccacacttgcaagagtatgtcaagaccaatcagggtcagaggtacgacaataacaaagagttactacctccaccggtagatgagcatctgcaagtcatcattggaggcccgcatattgctagagatttgggcaaagctccggagaggtatgctcgaatagcgcagcatgaacaagaagaagttatcctagctgtggaagaaaagaagcccaaagttccatgagaaggagggccaaccataactttcaacgatgaagacgctgtcaaagttagatttccacacaacgatccgctggttgtggaagtccagatagccaataaaatggtggccagaaccatgattgataatggaccctcttccaatatcttgttcaaaactacttatgaaaagatgggactacagcccaagcatctaaccccatgtctccagcctgtctacggtttctccggtcaaggagtcgcacc

SEQ ID NO: 271873 - DNA, 4778 bp, Cannabis indica
ctttttagtgtttagtgtttgatctgaggaatcaaaatctgccttctacatttccaaattccctgctataaatatttaaatataatgaatgtgtatataaatggcttattaaaaagaaatgtgcatgaactcttattataaaaaagtattggatataaagtacttaatattacatcctttaagagacttcataaatttgtttattactcgcaggtttctttgtttcgttacattaatcttttggtcagtgtcaccttgaagattaaaatatgcagactaatactaataactcacacagtaagagagttgtgaccggaagaagtttgattgattttatcttctcttggtctatcaaggatgtcctcaactatgatctatataaaaaccaggtaactatatatcatctatatatgtatatatattaacatgtggtatgtgtatatatcatgacttccagtgaggcatatgtaagctttcagttccagaaaggttatgttatgtttatttctttaagtgcaaaaccatgagaagacatggtaattctttcatatttttgttctaagacgtgagaatttgacttgttataaaaaaaagagtgatttggtcttttcctggtcacaaaatctacatttttagctgtcttttttaacttaattattgtatttaactttgaacaagtttggatatatgcaggttgagcaaatccccgatacatttgggtcgaaagcagagtactttaaggccttcattgtaccattagtggaagaaacacatgcagatttgtcatcaggagtgaaagcagtggctcactcagtttggtgtgaaataaggtctgtgaagcaaaccaaacagtacaatcctcctaaagactttttctataaagcagtattgagaagcaatgaaatgaagaatcatcctaaggcatacaaacctgaaaatggagacttgatagcaataacaagtgttaaaccaagatcagttaatgatctgcatagacactttgtcattgcttcagttcaaggagtgaaagatgatgttgttacactgctatcgtctaagccaatcttgttcgaaaacagcattcttttcgctgtttatcttatcaatatgaatactaatattcgaatatggcaagcactaacttctgatcctaaagagcggaatatgaagattattgataaagttataaagtctgatttccctgtaagttattagccactaactgtttgatgttgcagccactaacagtacttctatttctgatttttagtcccatttttgcaggaagaagaaaagtgtatgatgtgccactttgagcaaaatagtatattttcttattctgatgtgaagatcagaatcaaattgtctgatttgaatgaatcgcagaaagaggcggtcttaagctgcattaaggctcgagattgtcatcatcagaatagtgtgaagcttatatgggggcctccagggacaggaaaaacaaagacaactggctttttattgcatacccttctaaggatgaaatgcaggacactcacatgcgctcctaccaatgttgcagtgttggaggtaactgagagactagtcaaaagagttatagagtcttctacacatgatacttatgggcttggtgatatagttttgattggaaatgggaggcgaatgaatattgaagaacgcgatgaactacaaagtgtgtttcttcaaaaccgagttgatgtgtttaactattgttttggttcaaaaactggctggaaagatagcttggtttccatgatttccttgcttgaggagcctgtggataagtaccgtttgtacttgaaagaaagagaaattcaaggcttgaaggaaaattcagatgagtgtggtaattctaggcctttgagttttggtaagttcttcaaggagaatttttcttgcattttacaaagattaaatatctgtgtagtttccttgtatacacacctaccaacctcttgtatatcattacaagttgtgaagtccatggtagcagctgttgagtcattaaagtcctttgaggtgctgttcaatggtgttggaagtgaaacattgaaacttctttttgagagaaatgtaatgagtgaagatcacatctctgaaaagttcaatgttgcaagggaaaattgcatttgtcaattggaatcacttccttccactttttctgttcctgacttttcttctacaaaagaggtaatggatttttgcttggaaaaggcatgcctagtcttttgtactgtctcgggttctgctgaacttcataacaaaggaatgcgtcctttggaagtgttggtcatagacgaggctgcacagcttaaagaatgcgaatcagcaattcctttacaacttcctggacttcgtcatgctattctcataggagatgagcggcaattgcctgcaatggttaaaagcaaggtgttttaagccttatagagcctataatgttatgatgtttttctcttatgatcttattgtaatgtccttatgatcttattgcttctttcagatttcagaagaggccaatttcggaagaagtttgtttgagaggttgtctttccttggccacaagaaacacctgctcaatgtacaacatagaatgcacccagcaattagtcaatttccaaatagtcagttttatgacaacaagattttggatggtcataacgtgaagttaagaagttacagcaaaacttttcttcagggaaagatgtatggctcatattctttcattaatgtggcacaagggaaagaaacttgtgataacaagcatagtagcaaaaatatggtagaagtagctgttgtttctgagatacttgatagcctttataaaggtattttccttcactttctcatgaaatatagtcatattaaacttgtaatatttttcggttcttatgatagtaagacccgtaatagagtgcttctttttctgcctttttcatcttcggtcttaaagaagttaaaggcaaaaagaaggtcagtgtaggtgtgatttccccatacaaggcacaagtttttgaaattagtgaaatgattaggaacaagtacagttcagatgcacaaagtgatttttctgtaagtgttcgctctgttgatggattccaaggtggtgaagatgatgttataatcatctcaactgttcggagtaatggtaaaggatcagtggggtttctctccaatatcaaagagcaaatgtggtgctaactcgtgcaaggtaacactttcaaacactgagtaaatgttagaactttgaaacatgccttttgtggattaattagctttgctgataatgatctaggcactgcctttggattgtgggaaatggatcaacactagctaacagctccactgtttggagaaaacttgtgatcgatgctaaggagcgaatgtgttatcataatgctgatgaggacaagaacttggctctggctattactagtgctttggttcagtcaaaccaaatccatcttttaccaaatcttgatccacttcttttcaaagaatcagtgtggaaggtttgctcatcattataaaccctttcaatttttttgagtttactttcattttcatcaccaatgttgtatattttcaatataggtatgcttcaatgattctttctggagttccatggcaagagttaaagacaaagaattctgcaatgaaatgttttctttgttgaggaagctctcatgcggttggcgtcaagagcacaaggacagcaaccttacttcatctcattttgtagagcattacattattaaggaaatgtaccttgtttggagtgttgatcttgttaaagaagattcaaatcaagttcagattttgaagatttgggatgtcttagtccaatctggtgtacaaaaacttacaaaccagcttgacatgctatatggaaacttttcaactgataaaatgcatcgatgcaagtacaaaaagaaagaggggtacctattcttttcatgcatatataactcattttagctcataaaacttctgtatgcttttacttttttgcctacttcttatcattttctaggtgatcaaacattaaaatgttcaaaattagtttagggtacttggaaaatacataatttttcatttgcttatttgatataggaatttggtgtttccaatgatgtggcgaaattcggatgaagaagatcttgatgacttcttgtcaaatccacttgctgcattgagtcttagaggataaaccagaaacatcatcaacaagtaagagttgagtcaagattgccaatgggaaaggctatccttgttataatgactactgaatttcaatgtgtactttcctttccttttgttattatatgtactgttgtatttaggcaacggacttagtttagcgaagcacaaaatttaaaactgaaagtcctactaatgacatttacttaaaataaaggacactatgttgtgtttgttagacatgtcctttgttttgtattttcttcatttttatcagtacaagtatcacaatattcattatttatgttcaaaaggaacaaattcacaatggaaattttggctgtataattaattattagaacagagaaaatggtaaacaattcagttacaaaacatgggacttggaaccaatatacgtgttagacaaaagaaacatactattagaattagtcccacatcattaatatgtggaaataaattatcaacatgaatgagctactcctctcattatcaattaattttgtagatagacccatttatcttattccaaattctaatat

SEQ ID NO: 271874 - DNA, 1203 bp, Cannabis indica
aataaatgaaatttaataattaatttatgtgggttcgataatctttttaaaattaaaattttttatgacaacactgtacgtttatagttaaaaaattgtgtatcactaaacatctctaaaacaccgtcgtgtagctgtgttataagcaatgttgtatcagcaatgttgtatcgattataaccacttgtagagtatgaggctgtagccctttctaagaaaaaattgtatacaattatatatattaaatgtgtaaaaaaattgtgtataattatttataatttgcacccaaaaactaatttattcataatttatccctcccacttcatacattctccctcccttctatatgtatgtgttatacatacaaattaataataacaaatcaataaatcttaaggccctttaacataaataattcatattgtaacacggtcacatattatagttcaatcgcagtggttgctattacaatctgtcataaaatttgggattctatttcaaaactaattgattatgagtaaagtaatctataattttatattcaatatttttatatttaatctatctgggataatattatcaaatacaatctatatatataattaataatatatatatatttatatatcctatatatactataacattatgatttctattggcaatttagataactcataagaaaaacaatagaactgctagaagatattactggtgcttagcaagtatattttaagtgttatatcgttgttggtgtaattaagtatcgagtcctctataatttgatataataatctttagagaatttcactcacctatcgtagggtgtgccacctgtaaaagtgttaagcactactagtactcaataacagtgctcgaaaaataagtgtagtaaatgattagcatatcaaccataaatttgtctttagatctaaatgcttattttttttagtttctagtcccaataaataattaatttcaactataattaataattatgatcactaaataatgttagttagtttgatattttgtttaatgatatttctcatgtttaaaaatcttttaatagtatattaattattgtctcaatgtaaaatgtagtaaaatatatttggtgattgggtcttcctataaatctaattgtctatttttttgaggcttttaaacttactttgttccttttaataaaattgtttcgtt

SEQ ID NO: 271875 - DNA, 630 bp, Cannabis indica
ctctctctctctctcttgatctcttaaggtgtgtgtgagatcaaaagccttaatctcattacagtgtctcatgagttaagtacacactgtaatacctaaatttgttcatcctataagctttaataggtcactctattcttgagtgttgaggctggcttggaagatcaaggtatggattcttcaataaaaattttggattggatgttcaattgctatacaaaaataatcaatgataccctgataagaggtaattgaatttctttcagtagttagatttaatctatatactttatgttgagatctttgtgcttataattcatattagataaaaattaatttaccaatattctgctttcacttttataactgtgatatggaccataaaaactaacaattggtatcagagtaatcttcataatgatatagattaaatactgtataaggtgattatgcatttatatatatatgttgatatattgtgaatggatgaaatttttatgcatgaatgtgaatcgttaattatatggtaaatttgggtgaggaattttttatagttttactagaaaaattgtataccatatttgtggtatgggttttgatataatttttattttaaattatttgtaaatt

SEQ ID NO: 271876 - DNA, 2097 bp, Cannabis indica
aggcccctaagtcacaacattcataaagttgataagtgatacgctaagtcactttgtaaggacttaaatcaaaactaaaagtttccatatcgatggatagcatggaaataccctaaatattgctaaaacatgaaaataagtgttctaaaactgctagaactggtaaactatattctcaaaatagaaaaccagtttttagggatctacccggggaaacgattaactagttcactggaagaaaccctaaaatcttcaccatgatctcaaatttaccccaaatcaaactaaactctccaaaccacctaattatgccataacaaatatacttcaagcatttaaagcaaatataagcctctaaaataagattcaccattaaagagcaaagtttgaactttgaagctcaaacattgtctaaacttaacaataaacataaaatccagcctaaaataaactcattactaacataaaaaaaaatagaattagacctaaacaattcgtactacagccctaactaagaattatgcatggaaacctaatctgaaaacatgaaattcaaggaataaagaagaggaagcttacctcaaacttcaatctacaaaattctacgaatttcctagctaatcccttttgaatttgctaagaaaacttgaatccctttttcttttggtgtggtcaaacctatgagagagaagagcttgggagttttctttctaattttttatttttattttgaaacttaacgataatgtggaataaagacttattttaattcagcttattcttttctaaacataatcttgaaattaaattcaattcaactcataaagtcaataatataaacctagggtaaaatgacctttttgccctttatttactaaaaattaaccactacacttagggataaaatggtcctaatccataacccggacacatctgacattttgaatgtctaactatttttgcacactatttctaaggtactaactcatatctatgtgactagacaagccatacatcgcattctatcgttaccaggcataacaacatgaaaaacataaaatttcacatacatcataattagtacacctataatactaatatatctatattaattgcgtaaataataattaaaagtataattctaaaaattaaaccctaattatctgctaattctcatattaaagctaagcagtcattataagttcccaccataccaaggcctcttcctaagttaaaatgtcgcacaagtcacccaatcattacttgtaactccaagacctttcatacaatggtttcatttggttaccaacactaggtttctcaacatgcaacactagaatagtaggtaagtgtgcctgagaaggaggtgcaataggaggaccatgctgcctaagtctctggttgtcctcatattatctctgaagttttgcttacatatttacaaacctctactctcaatctggcagatcctgtggtggattttcattaccactgctatcaccctggctacaacctctacctcagcaatgaggattaggggattatcaattctctaaccacctcttgcctcgaacatattaccctgatttctattgtttcatttggtgtccattctatagcacgagctaataaattcataagtcaggtcagtcaggcaattatcataattgaatattgattaccacataacatggaaatttaaacatgcacttattttgctatcatactactaacatggttcctatcatgcttttttaatcagtcttatcttatttaaactactaaaacatattaaggcttactaaactgtgagttaaccttgtctctaatgatgattgtatatatcttgacagtctttggagaataacttaacgtctctgataccaaattttaaggtcctaataacttaggctccctaaggtattttcttcattactatgctaaccttttctaatcaaaggcattttaaaataaagtgtcgttgataaatttttgaaatgataaaacatcactaaacataaattgtaaatacaaattatttacaaaaccggggatcttgaattctatttttaaagcatatatatgttgggttttatg

SEQ ID NO: 271877 - DNA, 638 bp, Cannabis indica
aaataatctccaaaaactagtctcagagctatggtaataatttgttttcatgaaatatggatttaaacaatgattgtgatgatttggatgtgttcatgttggtttatgtgcttgtttgataattgtatggaaattacgattttatgatgataaatatttttagtttcgctctaaaattattttttctggaaattagatgaaaaatgaataaatttaggctcttacagaacttaatttaaatttttattgaattagttatgattttttaaagtttgaaaacaaaatatctaagatgcaaagccacacgcgcggatgccgagatgcacctcggtcaagaccgagctacaaacagctcgtgaccgaggtgtctcggacatgattttgtccaaaggtgcaccatgccgagctagctcagccaacaaggttgcaatgcagcctctcccacacaccttgctcctcttgcgctcgtgcagagagaatgcaatgcatactccctgtgccaaatcttatttttgtgatatttttactttcaaaaattatttttcaatgaaacaaaatttaaattttggtagaattatgtgtagaatccaaaatgtcaaataaaaatccaattattagtataaaattaatttttatta

SEQ ID NO: 271878 - DNA, 664 bp, Cannabis indica
aatatttaaattttttatttttatttgtttggcaaaatattttatatttatattattaacaaacaatattaacctaagttttatgtaaaagaaaatattaacctaaatttctttcaaactacaattttttaagaagtaaatataatttaaaaatattttaaataattttaatcaaatgcatataaatttatattacgaaaaaatatataaaaaataatatttttatataatatatttatacatatatttatgattataataaattaaattataataatattattataaaaaaatcttaataattggccgcaattttaaaatttataatttaacaaacatttaggtggcgtttggttggagataatgaaatagaatagaatggaaatgaaacaattttcattccattcctttgtttggttgcatataatagtattggaatgtcattccaatggaatagcctttccaccattttggtggaatgactatttcattttgaaatgaaaggaaagactattccaatgcataattttatcaatttttttttattacattttaaattttattccatttcattcctatttcttttcccattcctactcctatatttttatttttctcaaccaaacgccaatttaactctattttacaattttactataactgt

SEQ ID NO: 271879 - DNA, 1037 bp, Cannabis indica
tctctctctctctctctcaaccgcgtaacctcctctcctctcttggctctcattcgaacgacgagcaacaccaacaaccaccgtcgctgcttccaccgagcctctatctctctcactccaccttgctctctctccctcgctgctccccgtctcttcttgttcatagtgaaccagaggtgagagtttgatataccttttcattttgtattagtattttcgttgtggaaatcttattaatctcttgaacatccatgacagaggaacaatatggttgagtacttcgaagaaaaattattggaatttgccttctccgtcaatggattggtgcaaaagttaaaatatttctaatgaatatatatatatatatactgtattgaactgaaatgtggtgagatctggttttagtggtgtagatctggtttcagcggtgaggtacggttcaagatttgtaatttcttttaagggtacaggcgacaattttgcgtaatcaaggaaaagtttttctgacatttttccacaatcgcctattctacctagttttcccgacggttgaataggcatcagtcttagagactgacatgaatactttatccgactgtttaaaataattagaaaaactcagttttgtagtagtatccttacccttgacaatgttatatagcggcgatccgagaactataaacctataataacaagccccaatacagctgtgaatgggtaagcattttattagagtacttgactttctccttttatattttgtagcaagaacttgcatttcttatacatactatttttctaatcctgcaacataatgtaaactctttatatgatatagctagctacctagcatattgctcatttaaaaaataaaatttccataataagtttggtggaatagttactctaaatttcaaatgtaatcattccatctatcattaaatatttaatcaaagagttatggaatgcaagtttaatgtttagtccatggatgtggctcagtgtaagaaaaaagataaaatactaatttaacccct

SEQ ID NO: 271880 - DNA, 1280 bp, Cannabis indica
ggacctggtcacgatcagttgcaaatcactatgaaaaatgagattttttaactttcaatgcctctgctatctttaagccaacaatcaaggcttcatattcaacctcattattggatgcgtcaaattggaacctcagagcatagtgaaacttaaagtcttctggcgatgttaatattacccctacacctgaaccttgctcgttggatgcgccatccacgtataacctccaggtttccgcgtctcgctgatcaggtggaatttcttctggagttatatcttctatcaaaaagtcagccaaagcttggcccttgatggatgttcgaggatggtatgttatgtcgaactgccccagttcaatcgaccattttatcaatcttccagaagcatctggttttgataaaacttgtctcaagggctgatcggttaacacttttatggggtgagcctagaagtatagctgtagcttacaagacacatggactagacacaacacgagtttttctagaggggtatatctggattctgcccttagtaaccttttacttacgtagtaaataggttgctggtgcttgccctcttctcgcactatagctgcactaatcgcatcttttgagatagctaaatagaggaacaaagtctctctagttattggtttcgccaaaactagaggcgttgctagatgcctttttataatctgaaaggcctcctcacactcttttttccactcgaactttttgttgcctcgcaatatgttgaagaacggcacatacttatcaattgactttaaaatgaatatgttaagtgcagccattcttcctgtcaaggcttgtacttccttgggttttgtcggtgatggcatgtctattaattccttgatctttttaagatttgcctcaatacctctcacgttaactatgaatcctaaaaaatttcttgaggaaactccaaaggaacattttttcgggtttagcttcatgttatacttttttgatattttaaagcattccgcgaggtctgaggtatgatccttacttcttatcgattttaccaacatatcatcgatgtaaacctccatgtttcgccctatttggtttgcgaacattttgtttaccaatcgctgatacgttgttccagcgttcttcagtccgaacgacatgactttataataatagagtcccatgttggttacgaagcttgtatgttcttgatttgggacatacatttttatctggttatatccagaatatgcgtccatacatgacataagctcgtgcccagca

SEQ ID NO: 271881 - DNA, 655 bp, Cannabis indica
taaatttccagaacagtaataaggtgaggacgcaagagttgtcacctaattaaatggacatgtgtgagtggactgggcatatacatacacaattatatattactgtattaattgttgacaaatatacaaagttgttttaaatggattgttccccttgttctcatcaattaattaatttatatcctcccaaccacaatcaatatatagtactgctcactttattattcatcttctctccaattaaaactcggccacgtaatgttactacaaatcatcaattttttgtgctcttttagctttctagtttgtgtgttctatgtcatctccaacttaaaattaatttctgcactaataattaaaaggtggataaacaatattattagtgctctatacaatcagcccaactaattaaagtaaagttaatagaaagtattaaggagatttatttgtctttttgagttataaacacttttttttgtttggacaaattgaagtctgctttttcagttcttttcttctttttttgattttcaattattgcctttgtccctttcaagaagaaaaattatattttaaatttgtcgtattgaatagttgtggataataaattgtaatgatataaaataccaataacaggtcccgtagctcagttggt

SEQ ID NO: 271882 - DNA, 1420 bp, Cannabis indica
gagccgagacctaatagagtttagatctgattgaatctcagaaagacaaaacactattagagaaaaacgaaataaacttacagaaataaaaaacccaaaaacttgaaacaccactcaaacgccaaaaaaactaaacgaaacagaagataataagctgaaatgagaaagcaaaccagtaagaaggaaaaccttaattcgaagcaagttaaaagtgaagtaaacaaagagagaaaaatggaaagaagtaattaccagtgaagatagaaagagcgaaacaatcaagccatggttgacctagaacatcgttgtacgttatgattgagaaattcaccgagaaaaccaaggcttatctgcaacattctcttctattttagcaatatacatatataataataaacaatatatataattacaattattatcacatatatatatatatatataaaagagaaagaagaagggcgttcaagaaaccctaaccattgaagctcagagcaaaacaaacaaaaaaaaaaggaaaaaattgaagaaaagaagcgaaggcggtgatttattccttctccaccattacgttttcatcccacctttttttttcctatttcccaaaatacccttacttctactcccaaatctcacttttgcccttctcccaaaatttagcgggaaattgagagtttttttatttagaatcaacgcaacgacgtcgttttggtctttaatttttttcaactgcgttacgattacggtcacctctcgttgtccgtacactaaatgcgttacgagttggtacgccgacatgacagccgacaatggttagtggacggtcgttgattttgcgtcaccgtcgtgtattgatagcattagttttatattttttttattttttttttatttttgactctgtaaatgtaatttccaatgaatgttgtttttggatttccggaatctacgaaatttccctctcatttttttttctttctataataatgaaaagaaaaaagaaaaagtaataatatgatttaaatatttattttactagtttaatgggtccagccagcctaatatattactaagaaattaatattaaatttagtctcttcgggaatggacgaacatcattttttttaatagatattattatgtgataaaaaaatgctaaaaagtagggctgaacattttgagcgggtttgacccgaacccgagcaacccgcccgaacccgaattggtgaacctgccaaaaaaaaatttttaaaaagtttcgggtgggttgggttcaacccggtaccgggttggcgggttgagattttaggggtaccgggtttcgggttgaacccgccaacccgccaacccacccgaatataaatatattatatattttttttatttttttattactattttttatatctatatatattaa

SEQ ID NO: 271883 - DNA, 1550 bp, Cannabis indica
aattataatctcttttttatgcttgaatcaatgtttgagtaagtagagtttattattttgttttagtttgggtttattgatgtaattcgttgagaaagttttgagtattgatctgtctaattaaagtttgaagagttggcactgagttaattttgggtactttggatttgagttcaggatcattagcaaggatttcacatttgcttccgtttcagaaattttggtactcctccaagctccaataggtattcaattttgattttgagattgattttcccctaatttagagttgtattatattgtatctgttgattatgcttttgtgtaaaaacttaatttttttttctgtgtaatttgccaatgtaatttggataaacatgttattgtgcatataattatttcctcatcacggcgattgagagtttgtctgtatagctttaatttaagttgattgaatgcggaagggttctaaaattttcaatcttgaatggtttcaaatacctagctggatcatgcctggctggattccatgagcagagccgttgaagaattcattcgtcaagagtatatatataatcagaagtcggtcaagagagctaagaagcttcgtcatcggcgatcaacaatgacgggtgtgatagctgttaatgagcacaaattatgttatttttaaattatttctataattattatataatctgtttcttaaattattttgtagtcatgtgtttattattattaatattagtttcttattgaatttgctattcattaaaaagtctactgaatatatatttattgatcgtttaaaatgttgtaaattgattttctatttcatttatttttataatgtatatgcttaaattatacttacgtatttcaattttttaatgaagtgcatttataataacatctaagtaatatagttgtttcttgcaccgctaatttaattttttttagtactataatattatttttttattattattttttataaaaacgattgaatagtttttcctttcaatcatatagttatatttttcctatcaatcattttgaattatttttgagatcgtatattctttttaaaatattttttcatcattaaatctttttatctaaagtagttaaattaaattactacaaatataatttaagttattagttatttgagttataaagttattaaagttataatagttatttaaatgattgaattagtgctcgtgaatcttcttcaattactaattgcatttaacaagataagtcatttcatattttttgcagctgcaaattcttgttttaatgattttttgcaatgtttttattttttttattataaaagaaataaatggtttgtttttatatatcagtaaattcaactacttttaattatttaatatctattcatctattttctcattttttacatgaaaagtgcaaaatacataaattaaactattgtctatgtcgaagcaaaggaagattaaaatccactcatgagtatcattatttttcttatctacaatttttagacaaatgttatcttc

SEQ ID NO: 271884 - DNA, 518 bp, Cannabis indica
ttgctaatcaaagaattttcttgaaaaacgtgtcaaattaaaacttttatattatatatatattaaactttataatacttcaaaatatttacaagacccgggatcccgttttcaaacttttaaacataatataccgaaatacataacaatcaggtcgcacagcgactacaaaatacaattaccagatgtcccaagaccgaacactccaggtcgcgctgcttcgacatgtacaatctcatcctagctcaggttcactcctgttcagctttcgcctttcctttacctacacatggaagcagaattgtgagtcgacagactcagtaagaaaagcatataacatatcatataatttccaacttgtaattaggcgcccatacacctatttacaaggctcaacagatgagtaagaacgttcaatactagggtacagccactataccacatacactacgtacctcactgtacgagtgttggtagggtttaattagtaccttgagtaccactgagtgatataccac

SEQ ID NO: 271885 - DNA, 781 bp, Cannabis indica
acatagtgaacccacctgagccagaccaaggggaccaagcgaatgctggtgccaatattgctcaacctcaaacagccacagatccggtgatccaggctcggttggacgagttaacccgattggtcaaggaccttaccgcaccaaaacccactgatttggacctcgaaaggaggagagggtctgccttctcccaaatgattaatgacctccctattccagcaaagttcaagatgcccacttgcaagtacacgggtagtgaagacccattaactcatgtggagaacttcaaaatccaaatggaccttcaaggaatcagggatgaccttaggtgtcgaattttccctgcaaccctcacggacacggcgcaacaatggtttactaaactacccccaggaagaattacttcttgggatgagtttgaggggttattctacacccaattctcttcagcccgacagataccagcagagttgggtgacttggtcgccatcaagcagaagcccgatgagccactaaaagactacattcaacgctttatgcaggaggcaaccaaagtaaaaaatctaagcgtgatggcaagcgggccgccatcatggggggcatccttgtgggaagtcggctgtggaaggatacaaggcggaaaccaacccatactatgagagactttcttgacagagctgatgagtttattaaattggaagaagccgagcgaaacgctcaaaacttcaaccacactaagaataaaaagaacggaacaagctcaaatagtcaaagctctcaa

SEQ ID NO: 271886 - DNA, 1898 bp, Cannabis indica
taatctctgatgttggtatgtggcttacagacttcaattatggcatttttataattattctcatcactatacttgtatattgaaatttggaactcagcagttttcatttatttatttatttattattttacacttgggcaagctgattgattggatatttcacagacctttttgttggatggaacatatgtcattggacaatgaaactgggttggatccctctggcataagggtcaggcctgtcactggacttgtggctgctgattactttgctccagggtattttgtgtgggcagttctgattgctaacttggctcgtgttggttatgaggagaagaacatgtatatggctgcatatgattggagaatctcatttcagaatactgaggtactctcttttaagattttttttgtatgatattaatgtagttgagtggttcagtatttctcttcccatgtttcattcaatttataatattgtgaactgcttgtattggtaaagatattcttgtcaaattcgtttaattcgtttaattaggtaagagatcagacactaagccggataaagagtaacatagaattgatggtagctactaatggtgggaacaaggcagttatattaccacattcaatgggtgtcttatactttttgcacttcatgaaatgggttgaggctccagctccaatgggtggtgggggaggaccagactggtgtgctaaacatataaaggcagtgatgaacattggtggaccctttttgggtgttccaaaagctgttgctggtcttttttcttctgaagccaaggatgttgcagttgccaggtttgattcttgttttccttcatgtacctgaatagtcatgacttaagtagcagcattttgtttgcttgtggagaatgagatgccttcaatttgaaatagttttttaaagcgtgtagactgtatgtaggttcgtatacttgagtaactaaatgtcgtgtacactgcatgatttccttcattttgaagtaatttgtatgtgaaataattttttcatagagtctagactgtaagttagtatacttgagtaactaaatatctctactaactcatattatgaatcctgaacgttgtgcaggctgactgtctaggttagctcgattctatctcaaccattattatgacaccctttgggtcatttgtgaaaagaaaagaaattttcaatggttgtgtttctgcttttacattgctagatattactttctacatggtctgttcagatatctttattcataagttttggatagctttctatgctttcgtgtaatttttaactacataaaaggacgaaacatcagcttgatgttagatgtcactaactattgttagcaacatgacattctgatttcttctctagctattagagtaagcattaatggttttcaacaaataaattttttagttttatttaatctgtttcaatcttatggaaattcctgtaaagtctgagaatcaaagaattgatttgaagattttcttgtattgaatcaattgtgtaaaatgagtttatatacaagtacaagatagtaaagctgagctaaaagttgaaataacagagcttaaccaactaacagtgattaacattaatagccagctaagctaactaactatagctagtgtccttaacaattccaacaatatttatggctttcatagttgaagatatgtttgtcatggttcgaatgcagggctattgcacctggttttttggataatgatatatttcgccttcaaactttgcaacatgctatgaagatgactcgcacatgggattcaacaatgtcaatgataccaaaaggcggggacactatatggggagctcataattggtcgcctgaggattgctataatcttaaaga

SEQ ID NO: 271887 - DNA, 1740 bp, Cannabis indica
ataaccgtcgcctatacgactgttgtaaaatgagcaaaacaggcgactgttaaaaactgtcgctaatgtgaacttctcgacggtttaaaatcgtcgcctataacctattataggcgacggttttaaaccgtactctaattgaacatacaacctgtagagtttcgtaggggtgtggatgagtttactagaattgctcgaatgcaaataaattcttttggagttactcgatgcccttgcatgagatgtctaaatgtgaacttcaagactcctaataatattagagtacatttgtttatgcatggcatttaaccattgtacatgacctggtattctcatggggagtcgttcacgctactgattgtaaaaatagtagacaacgatatagaagaaataacagatgtgatggctaatattttaagagaagaccatagtcttaatgatacaagtactaccactgcttcttttaacaatcacccactgaatggtagtagtaagtacgttgaattgtttatggatatggaaattgaattgtactcgggttggaaaaaattagcgctcaatgctttggtgaagctgatgtactgcaaagttctcaacaagtggagtaactattctttgatatgttactcttcatattgattaattgatttatttctaaagagtacaaaattacccaagtcccatagtcaaagatgaagttgtctaaccttagtttagtttatgactcatttgatgtatgcaagtattattgtaccttgttttgaaaggagagtgagaaaaaagatttttgtcctatttatagcaagagttgttgaaaaaagaaaaagatagactaaaaaaagttgccaaaaatattatgcaatacttttcctaacttcgagattgaagatgttatatagttcaagacattcagtcggtgacatgtggtggcattactctaagagacttaaagagtatgacgtgcttaggcatctacagatacagaagagtggaagcggtttgacaggcgccatctatccttcgaacttgaacctagaaatgtaaggttgagtttcgccactgatgggttcaattcgcttggtaacatgaacaactattatagtatgtggcgagttatcttagtcccatataacttacttccttggagagactaacttgctataataatgtcatttttaatgaaacacatggcaactctcaaggtacattattgatgacccaattaagaaatgattaggtatgagttccctataattaacacgtggttctctaattagttggtctaagatcaaaggggtaaagaaggaatcaatatcgttatttgcatagaaaaattatataattttttaaataataaaaatgagatcgagtaaatatactacgtacattaaattttaaaaaatgctaagggacaccttaaggtgtcaaagaccacaaaaggtagcatgtcactattagtacaatttaatattgagcccaacacattttaatttaataagtaatataaaaaactactaaccactcacaatgagtgtggaattgcataagattctttatatatatgtgtgcactcttaatgggtattacctatgaatgggtaatattaaaatttttttagtttttatgattaatttttcagtttaattaaaaaaatttctcatctttacattatatatgtgtcggggttgttccatcagctgaaaaaaataataaaaataaaagttttttggaaaaaaaaaa

SEQ ID NO: 271888 - DNA, 1768 bp, Cannabis indica
ataataagtttcgccgaaaaattcaccggtaccgaaaaagttagtatcgccggaaaagtcaccatcaccgaaaaaattaatggaaaagtcaccaaaagttgatgtctcagatataactaaaaatagaatcggttctataaacataaatgaataaaaaaaataactcaaaccggttataattgaaatataaccagttctgtaacataataaataaaaataaataacacaaaataactcaaatcagttataattaaaatagaaccagttctataaatgtgttatgatgcgtgtcgtatactgtatcgagattactattttttttaattctaatactacctccaattattttagtataattttaagtaagggtcgagcccacgagaactatgtttattcagttattcacaaattagtaactagaattagagaagaggggggatttcgagattaagattaaaatagcaggggtaaaaataaaacaataagtaaattaaaattgagactacgatatgagagactagttaaaggttatccgccaccctcaataatcattttttattcttattaaagaatgtaatttttcagtttccaatcaaattattaatctcgcagataaaactgaagcagttaattattccaatctcctcatgatatgtaatcaaggagaagcgctcaataattaactcttttaccctagtagtaaatctacgaagcatgaatgtatgcataaaaaattaaattttcttatatatatatgatatattcatataagttttctcttcatattaaagaaataaatgcttatatatatctgtgtgcattgaattcataagttattgtactaattacaaaattcaaacccaacaccacatgatatctcagtcttgtcttatgacatgtgtatgatgttcttatggttttaattggttgtatcattttgtttgaagttagtgatttctttcttgctgtggtgacttgaaactctgttcttttctgtgatggatgaacaatacgctgcaatgaatttaagggaggatgatgatggtttcttgatgtatgaaaatgatacagtggattctatcgaatttgatgatcgttggtgtctggtaggacgtttcttgacggatcgaaatatagattttgaagcaatgcaacataaaaaggcatctttgtggcgtcctgtccgtggcttgtttgtcaaagagttagagccgaatctttttcttttccagttttatcacgacatgggcattgatcgagtcatggaaggaagtccttggacgtttgatagaattcctctaatctttgataggcttaaaccatgggaaaatccaagaagtgttactccagttacattggaattttgggtgcaaattcatggtttgatctctgggtttcggtctgagagagtgttgaaagacttgggaaattatattggctcatatgtaaagatggatccgaacaacttctcaggtggttggagggacattttaagggtgagagtgcaaattcgggtggataaaccgctgaaaaaaggacagaaattgcagctgaagaacgggcccgaatgtaatgcgagttttagatatgaagacttgactactttctgttttgtttgtggtttgcttggccactcagagaggttctgtgagaaagcttttgatacacctctacacttgttaactaaggtgtataatctggaaatgaaagcggctccaagaagacgatcactataacaccctaactagcataggcgtattacgtgatt

SEQ ID NO: 271889 - DNA, 1253 bp, Cannabis indica
caattaattatgttactaatcaattttatggttaaactagtttaattaacctattacaattattcaaataaggtaaataggccttcacaattgggattattcatgtgaggaatggttgggttcagtatgtcgtacccactactaatgaccccctaactctcacacaaggcccaaaggagaggaatttaaccttaatgaaataattgttattcattgaataggcccaatactaattggacctaaataaaatctatcatagtatcatatgtgacaattttatttagcaacctagtccattttaattacaaaaattaaatgggcttcctatacgcatctaagcccaaaggaatcataaaggcataggcacacactgatttagatggatcctatcatgttactaggtttatacacagatgaaagaaaattgccaaatttacctgttacagattatttatttgacctattgacaattgaactatggttaaaatcagatcattagatctgtcaacaagttaatcatggcaatttggatcaaacaataataggttttattaaaaaaaagtttaaataataaacaatatttaaaacacacatatgcaacaaaactagatagttggatataagatttatttaatttaaattaattaaataattaaattgtttttgaaaaatataaataaataaatgattatttttgaaaattataaaattaaactaaataattaattttaaaattaaacctataaatttgaaaaattaggttcttaacaaacctaaatatctattcaaaaatgacaactaactttttaaaatttatgttatttttaaaagaaaacaaaattaaagatctaataaaataaatattatttatttgattttataatttaatttaaataatataacaaaaatttgaaagttgacgaaatatctagttagattttaaaaaaaaaaaaaatagataaaatatatcatattttgaatatcaaataaggtcattttataaaattaattagataatataaaatataaattatgtgaccttaaatttaaaaataagataagataatcaaatttcaaaataaaaataaggtaaccaattaagcaaaatatcagattttatctattttcaggttgaaaatctactaatatctaaaattaattaattttattctgataattaaatttaaaatttgaaaaataaaaatcaaaatacaaaattacacaaaaaaattgaaattaatttcatgaaaaaa

SEQ ID NO: 271890 - DNA, 623 bp, Cannabis indica
ctcctttgtggtgtattaatttattttatggtataacataaaaaagagaacgtacaaatttatttattttagtatattcatttttgactatgattaatttatggtatattaaatttttactgtagtatatctgtatagatttgtagtatatgaattttatatgctatgtcatacactatatataaaaaaagaaaaattaatagaatattagtttaaatttgtagtatattcatattattttaacgtacattatttatatgtgatatgaaatatcaataaaaaaataaagaaaataaaattaaattaaaataatgaaatattgctttaagtgtgcggtatatttattttgtactatgatatatcttttttatgtgttccagtatattaagaaaaatataaaaatcgtaaaagcgttatattaatttaagagtatggtatattggttttatatgtaatatatggtatataatgaacaaaagagagagaaaaaagttgtggaatattagtgcatgttggaatcataactaaagaattgttttttgtttttaaaaatagaaaattattattgaaaacaatttggcttctttggccttattttttgaaaacagttttcaggaaaaaaa

SEQ ID NO: 271891 - DNA, 661 bp, Cannabis indica
tatatatatatatatatgatgtggaaactgtctctcctctaagggccaagtgataccaactgtaaattacacgaaatctttgttatttttcattatcgaaactagctcattttttttttcttcaagtaaattgacttagtatttgattttctttttaacacttgaattttcgaaacttggaaacatcacaaaaagcttatacacaacaagtgtcacagtccaaattctcaatttcttcactcatggatgctttagaggctttttcttaaagggagttaggattgaacaaaacaagcaatacactagatactggagttagagttggttttaaaacgaagctaatagtgtcttttggttacagattaacactatgatttgggcaatacagttacaatgatttcaaatgaattagagcaattttttttaataacaaaattgtttgttgttgaccaattttttggcaactagttaattatagggagtttttcaatattatacttaaaattgaatttatttacaaaaatatctttaagaaaattatttgcacaaataccgttgtgccacgtcagcatatataccgaaattcaaaacaattaccgaaaattaaaaaaataaaaaaattaaaaaaatttcgtttccagaaattttcgctttttgggag

SEQ ID NO: 271892 - DNA, 794 bp, Cannabis indica
tttttttttttaaatttcaatcaaactcgattctattatcagattttaatcatgagttatggcttgatattcatgagtgaaacataaaataaaaataaaacaattaattaataattgaaacataacttctacaactacaacattcatacatttttaccaaataattttctacacatgtgtgtttgagtttgataatcgtttcctttttgtaggagtgaaaaaaaagaatcataaattttactttcaaatatacatttataaaagtaagataaccaaaatataatttcagtatatataattgtcccttttttttgatttaagtgtttatatattacaacaatgttttacgtgggactcgaacccaagacccccaacactcacacacccacctatatataattgtcccttgctttgcgtacatatagatttaatcaattaaatgttgagatatatacaattttgtctaataaagtgattttttttataatttaaaaataaaagtttcctcatctattaaattaagggggcgtttggtatgaggtgttcaaaataatttgattatagggaatattatgaaggataataatattatagagaaatgtgtaaattgtgtttggttgtgtaggataatatgtaatcatattcctgttaattaaattaaactgtttggttgagtacaggattttttatattttttttaaaaaattaaaataaaaatatttttttatatatttatttaatgttaattatatataaaaataaaaaaattaattattaaagaaatttatttatta

SEQ ID NO: 271893 - DNA, 1371 bp, Cannabis indica
aggtgccccccaagtgaccgagcagacttatgactcttggtcacttgttttttgcaagtatattgtttatctgttcggtgttttgggtttgaccaaaccttttgtacgcactggatggtaaattagaaacatgctgataattttgactcaatttgaattttgaaataactatctttattcatttattgatcgaaaaatgtgtttgttaccgtagtaacttacagcagagctatttgatctaatctaatcttttagcttaacatgaaataaaacaaattgtagaaatagaaattgtactttatatgttggtcacgtgacttgagtactttccttttgtcaaaacctgagtacttaagagcaaatgttcatttagtacttagtgtggtcgtccgacctggtactttattggtagtatttccttaaatgttccccattccaataccgtggtactagaacgagatgcatttttctcgtcatacttacccaatttgtatgctctggattcgagaacttcgaccacttgatatggtccttcccagttaggtcccagtacacctgccatactgtctttggtgtttaagaatacccttcttaggaccatatctcccatgaagaatttccgagccttcacttgtttgttgaaatatcgagctactttttgttgatgggctatccatttcaagtttgcgatggctcatctttcttcaatttcatcaagtgattcggctaggagtacgtgatcgccatcttgattgtacatcaaccttctgtgggatggtggctcgagttttacaggcaacatagcttcatatccgtatgccatagcgaatggtgtctgtcttgttgtcgttttctcagttgtccgatatgaccatagaacttcaggaagctcttctggccaatttcctttggcatcttcgagttttttcttagtgtatccttcaacgtcttgttgactgcttcaacttgaccattcgcttgaggatgtgccactgcggagaaacttttgatgataccatggtttgcacaaatgtcagtgaaggattggctgtcgaagtgcttgccattatctgaaactatcttgtacggcagtccgaactagcagattatgcgcttcacaataaagtcttgaactttctttgatgtaatggttgcgagtggttcggcttccgtccacttagtaaagtaatcaaccgctaccactgcatactgcactcctcccttacctttgggtaattctccgatcaagtcaattccccaaatggcaaagggacacgagctctgcatttaagttaacttgttaggtggagctggaggtatctttgaaaatctcttgcatttgtcacacttcttaacgtaggcttttggatc

SEQ ID NO: 271894 - DNA, 757 bp, Cannabis indica
aaaaaattacatcaatattatagtaaaatattttatcctaatacattttcgttgttttctaattttctaatggtgaatttattcatattaaatcacaaagagacatgtagatagagttatgtacgtggaaatattgttctgatttttaatgtttcgtaatagttgcataaatattttgctaacaattatttctccacatattactattaaggtacaagtaattatcgatcagtgacaaaaaaaaatactgataaatagtttcttacagatacacattcacatttaacatttttagttgcaataaagttacacgttagttgaataatagttttgctactacaatatcatagtattataaaaataggaatcgaatttgtcaaatacacgacttaaatagataaaacacgattgttgtaatattcgtttgtattaaatatgttgttttgtggttttatattagttggctcgcaatagatataactgttgtattacagtttgatcacagttgctttgaagttgacttcttcttccctttctggtcgtcagcgttggaatttttttcaagcaaagacactttcgacttcttcttcactggacaataaccacctttacccacggggggagcaaaactggaatcatcatcatcgatgattaggcgcttccctttagcgttggtaacaactgatttatgacctattattgaagttttttttagcaatggagatggagaagcagaagatgatatatatatataaaa

SEQ ID NO: 271895 - DNA, 787 bp, Cannabis indica
cagtaaaaacgtaaatttgggcgggtcacagatttttgaatacatggagaaaagttagtaaagagtgtaaatttcccaacaattatcatatttctgttatctatctccatctccatatagcttaccaagaatgaaagaaagatacaaaaatggttgtttctataatttgatagtacggaataattacataagacacttatttttttttttttttgtaaaagaattacaattttacgtttaaagaattctttttttttttttttttttttttttttatttttacggttttctacaaaaaaaaatactaaaacaacaaaaaacctatataaaactaacaagaaaataacatccaaataacatcaaaacaacagcaacaaattaacaagagtacaacataaaaacaccgtattttttgtaaataaaataaaaaaaatcgtacaaatatttaaaattccgtaaaattgtatttgtaatttttttgttaattttgtgtatttgtgaaataatggcttgatagtaaggaggtaccgtgccatataattgcgaaaacgacaatcattgtcaagccaatatcgcacaattaacacatgcagggccaacttgttgggggaagaactttctagctagatacacatttaagtatagtaaccttgagcctgacaagaatatatatactttagaaatactttacaaacacatgcaatgcacttcaatgtatattaaaaagggttttttaacagttaatgaaaccaaaaaataattaaaaaaaaatgtaggagttcataag

SEQ ID NO: 271896 - DNA, 566 bp, Cannabis indica
tttcatatcattgacaccgtatcaacacatcgccaggggtaatcgtctaagtcataacaataatagactaataagtgtttatcccaaaacactacttaacagttgcaacagataacctaagatttcctaccaaaacctgtagttcaaataaactaaaataaaacttacattttagctctaaatatacaccatatggtatagctcatcgtatcctttgaaacaatatatagaacgtccaaaacggacactcgagtgaaaagttatggcaaaaatatgatcccgagttcttgaggctgcccgaaatagtaaacaagttagccagaaccggttgacaggattgcaaatggttgatcggtttatcaggggtaaacaatatgattttacaagtttacgcactcaccgaaacactagtggaacctatcgaaactaccccaaacttcatagggcatctatatactatatatactgtcatacttacgtaatataatcttaaatcgagcccgtaattggcaaacgccactagtgttctgatttaagttataaaaagttctaaactcaatttgtaa

SEQ ID NO: 271897 - DNA, 2763 bp, Cannabis indica
aagtattaattaatagttctatatgcaaaagaaaactagcctagcttaatttaatataatgcatggtataagaaaactattagtattctattttaaaattagaccaaataataacatgtataatcaaaccatccatacaattttaattaatgatcatatatatatatcttataagactcagattaaattttaggtgagatatttcttattttttatttgtatatagagaaattgtaatttttttatataacaatatacattataatcatataaatagtaaatatgttgtttgttttcgagaaatactcatgttggattcactctaataggatttcatgttagaaattactctttaaagtgtaatatattttgtcggcacatttaattacaaacattgtataaatattttgtttttatttataaattttgttgtttttttttttttttgttgggatatataataatattttttttttcaaataaattaaaataaaaatatgtaaattttactattagagacgaaatattttttaccaaaacataaaatataaaataatatctcgttgcaaaaaagattggattttacaaaaaaataaataaataaaaagtcatatggtcatttattggtcatggaaagtatttttgcgcgatgcttttaaacatgcatcatcaatggctattcaaagcatttagcaatcaaatttcagcgatcgcgcgaaaatactttagactcatttctgcagtgttcaagtatttagctgcagagattcagcctctttcacattggctctgcaaaaaagaatgtatttagcacaaatcgaatattctgttttcaagaaattgtgtaaatgattctcgaagtcagattatggagaaattggtagtggggttggtgaaaggtaatgaaaaacatctgggaaatcctttcctcttttcccgtagcaagaagaaggactttcaattcctcaaaaccaatctctgtaatagattagagggttggcgtatgaaaactctatctaccattgggagaatggtgactattaaatcggtggatatggctatgccgttgtataccatgagctcttgtaaaatccctactacctcctgtcaggaattagatgccattgtcagaaaattctggtggaaaggtaatttggatgctctcggtttcttgctactaaagcctggatgtgctttgtcaacctaaaggctgtggtggcttgggtttcagaagatttagtgatatgaatgttgctcttttggccaagttggcttggtttttggcaaataactacaacagaccttgggctgtatctttaaaagctaaatatttcccttggattctttttggagtattcagaaacgccctaccgacaacccaatttggaaagggatcttggaagctcggaagttgatttgcgaaggagcttgtactatgcttgctaatggcgaagacactaatatctggtggcaaccttggatcccgtggcttgattactcggaattcagggaaaccatggagctagctcgagctaaagctccatctttatgttgtgtggcagatcttatgtttagaagaagcaggacctggaaccgtggcttcctaaactttgtttttggaagtgatcagatgggggatcggattagctctatctagattaatgcctatgctgagaaagatttgatcatttggaaggactcgaaagtaggtgccttctcggttaaaggggcttatttgagtagccagaagtcgaggcttgttgagaagcaggatttgtggaattggatatggaattgtaaaatccatccaagacagagtatgatgttatggagggctgtggtcggagctcttcccacatctgataaatatggtaggatttctactaatgactatttgttctgttgctctgataatgagagtcctttgcatatcttcgtaaaatgctcgatggctaaagctttatggtttgggggaccctttcctctcagaacagaatcaatccctggtgccactctttctgaagtgatttgttccatcttgcctttgttagaagggtcttcgaagctgtccttccttatctggatggcctctgtctttgaaaccatttggttgtggaggaatagagctcgatatgggaggatagtgaatattttggttgatgagatgctcaataatgccttaaaccgttttgtggaaatgagtgacactcataagccatcttttgaacagatgcttcctgtctctaacggcctcccagttccggggtttgtttcgaaggtgattttggctgatgaatcgtttaaggacgggaactttggaggagctattgtggctattgatgacgccaacaagaagtggtttatctagaccattgctggaagattggattgcccgatagcagctgaacttcaagctgttcatttagctctgctttgggctaaggaaaaacagtgggaagatgtgtgcatcttctctgattctcaggtggtggtgaagtctttgttgaaaggaatttctcctagctagaaatgttggactcttttctctagtgttctagatcttaaaaatagtttagttaattgctcttgtgcttttgtttcccgtgatgttatttcctttgttgatttgttagctaaggaagctagaagttcatctgtagaacttttgaattgtcggggagggatttccccctgtgaatcccatgaaccttttttcggtttaatgaaggactttggttctcttttcaaaaaaaaaaaaaaaaa

SEQ ID NO: 271898 - DNA, 1254 bp, Cannabis indica
tttttttatataaaaattctcttttttatagtttacttaatgcaataattaatatagatagatcccaattatataaaattttaggtttctagcgatttttgctcttgcagctgatgtagctggcgccatggcaaaaacaagatcaagaactcaaaggaaacctaattcgaccgctaagatttctaagaagaaggaagtgaaattcggtactgatgcaatacgcgactcggtggaggatgatttttctacaattcaaccattggagatgtcggatgaggagtttctggtggaagatgatccagctataaaggatatcttacaaactcctttatctcattcggaaacaggaggaggtgaaacacgaatttatccatttcttaagggctaacgatcaatgtaacagtgagattttgcaaggtaaggccccgactccccctattctaagatctggttcagttgttcgaaacctagacaattcttttataaaatcagatcagggtaatggtaaagtaagaattacatttgatgatattgaagatgaaatagcattatggaatccttctatagtctgctaggtattgggagcgaaccctcctctgtaggtactagaaggttttgtcaacaggatttggagagacaagattaatcgagtgaagcaactggctcatggtatcttcatcattcggttcaattctttggaatgcagagatcagatattgaatgggtgatatatattctttaatcgacgtctggttattatgaagccttggaatcctcatgagaattttaagaaagaagatgtgagaagtgttcctatatggattcaacttgaagacgttgaactgaagtactggggacagagatctctattcaagatagttggacagatggggaacccggtgatgttggattctgttactaaagaaaaagagaggttgacctaccctaaagtattgattgaagtacaaatggatcaggtttttcctgatattctggagtttgagaatgagtttggatcgaccacaacagtgggagtgaaatatgagtggaagcctgtagcttgttctcactgttttggattaggacatattgctgctgattgtaagaagcaaaccagtgggaaacaacagtgggtagtcaagaaggataataggaagcaagatcaacaagatgaggaaggatttgtgaaggttgttagggccaaaaatccagctagaaatggacagaaattggagaacacacaggtgcagacca

SEQ ID NO: 271899 - DNA, 1259 bp, Cannabis indica
aaaatattcgagttttggagagagaactttgatatatgctactgtctcacaattaatcaattcaatgcgctctatattattgttagatgtagatatgatagtttgtagtgttttgcaatttacgagtttcaaacactcgagagactctaactctgaaacctggctcgcaaaccactcgtcactaacttgtatgtttctcaagcttagggttttgagagagtacttacaacaatggagatcgaactgacagttgtactgaattcgttcaaggcttaattcaaacgaaaatgattcgagcttatcttcaatcacctgaataatgtaaaaatctttacaatctttgaactttacggttctgagtttaggacatgagactaccactctagcagccttagctgtggtagtgcaccactcgaaagtcaaatcctccaatgaagaacaatttataatgatcaaatcatcttcatcgctgaccaaagtaagaccgcacaaattcattgttttgattgatctcgcccataaaacttcaactggtaaaagaggtggtgtctgtcgttttttgggtcgaaaaaacttcatataatcaattgtgcaatcgacaatcaattttttgacagaattcatcaaagcataacttagtaaatcactaagaaagaaattgatgttattgttgccgccattgaataatttgcttaaaggaaatcgaatcctgaggctttctaaatcaccatctaggtggtaattctctatagaagtggtgattctatccataaacctgagctgagtggcgttgttagtgtaggtggagaataatcggtaatcaaaattgagggtgggaaaagaacgccaaatgaacaaaaagtgtttggaaaggacactagtgtgggttgcatccttgatgggaaggatggtcatgatgtggtggacgatgtgttcaggcatatgtgagaatcgatcaacatgatcgacaccacttgtatcatcaccatcatcattttcttcatctctccttatttgtttttctttgaaaactggtaatgagagaggatccatacttaggaaagaccaatgaataatgcttcgataataacaatagaatacttatatagtgagaataataagtaagataagcatgactactttgagtgtaccaaacacgtgtatcctactcaattttttcattttgaaggaaaaatttaacgttacataaaacacctgtcatattggtcaaatataaaatatataataacaattccttt

SEQ ID NO: 271900 - DNA, 1631 bp, Cannabis indica
agaaatgtaagagatagttcaaataggagtcatactatggccgagatggatcagtgatttattgggtgaagattagctagtttttactagaagctttaagagcctgagtattgtctgaagtggaaccttattaactggaacattagttagatttataacattactagtctaagtatccttagaggccagaaaggtagattcctcacgattcttgtcttccaagagaatgatttcaggatcactctccttagcaactttagcttgtttggttgcttcctcggctgttgtaagttccaaaatctgaggtagcatctacactatatcccaattttccaacatgtccaacattaatttgtaattttctagagttggaaaagataatttaccaatgcttgttacaaggttcccttgagtccctccttagagtaaagattttggttcttctcctccaactcctcagtataacactctgctttcttagtagcctccttagctttagaaatgtcttcatgagctttcttcgtggactcctgaaaggtcttctcagcctctttagtttgtcctgagagccttcaatttatcaagagcttcaatctcaaattcttctaccttttgttggaggcataattttatcgtttataatatgagtttgtttgtcgtactcttgagaaagggtggtctgtttctgatctagctccttatacttcatctcagcttcggttaccgtcgcttccaaattagtagcgcgagacagtgattgactacaggattctttgtatctgcgtatgtgcactctctatcctagcaatgcctttatagtgagaaactgtgtcttttaagtatttctcaactctctatgtaatagtgacctcgattctggcattggctacgttcaaagcttgaacaacctcctcttaccttttcttgacattgacatgttcaactgtcacgacctcaatctcataggccattttgttcactagagaggagcacctctccaccatcaaatcagccgaaaaattaaattacacaaatgttaaaaataatacaaacaaaattttacttgctataatctaaacaaaaattgaaaaaacttacaacaataatttggttcttcaggctatcaaccatgaagaatggatccacactagtcatcgtggcaaatttattaggacctaacttggtacaagtagaaactcttcgatccaacaaatttgaaagaaaaggggtcagttccattccaactctaggaaaaagcctttcaaacaattttgcacgatcaaaaatagtaggaattgtctctttccatttgctaaatttagcaaattctccattattccaggagcacaacatggatgacgtccttttcatctctttatactcgaaattagtcatttacacataaaactaatcaattgcctctagttgagcttgcacttcttgggcagtgagaaagagacgatcaacaagttgattcgagaaggcgagagtaatgggagagcagttgttctctgtaggaagctgacttgaagaagttggagcaaaatgttgggttttgtgccctaaataaaacccatttcaatataatcatatttacttattaataaagatcagaaataacattttatgtt

SEQ ID NO: 271901 - DNA, 935 bp, Cannabis indica
ataaaataagtttataaaagcacacacgtggcgtccctgagagtcagggcgttacagctaactaaagggaccgaacctttataaaatcttgtgtctcttttacttttttgttcttattgtgtgcacatggtaagcattagtaataaatatgactccattgtctgttggtcaaatctaaagtcaacataatcaaaaatattttcctaatgaaaaatctagctatacaaatacaaaaacttatataaattttatatgtttcttataagctcaaaaacttgatcatcaacctattacaaaaactaataccaacataatactaatattaaaccaattacaaacttctcagaaactccaacactagaccatcaacccactaccaaaacattcactttccactaatgaaaaacgtgcactaaagcataatattaaccgcaaagaagtagaaaatataattagagtatatttgctagagttgtaatcttaatgagaaaaacaattacagataccaaaattatatataaattttacatgcttgtattctagatactgtatggaatatggaataaattaaatacaataccaaaataaaactagttacaaacttctcaaaagcttaaaaacttaaccatcaacccactacacaaccaaaaatagtaattgttatcccaaattttgtccacctaacgttgcatgtccacgtgggccaagacttaggagacgtggaatatagcctttccaatagcaagacaacgtttctttgcaaggcatggaagaaccatcaaacgacaagcgagaggagttaagcaagtcgtcaagaagctacacaaccatgtctggccggccaaagggagtgtataggctgacaaggatgagcttatatggtcggtcaaggattaggcacaagctggccaaccaaaggtgacttttagaccaag

SEQ ID NO: 271902 - DNA, 1538 bp, Cannabis indica
gttgaacccggcctctgacttgaacctgaatccaatcccggacctagacccgacataaataaaatacaaaaaatagaaaatgaactttacaaaactactacttttgttttcttagtttttaaaattagaaaaacaaaagtggttacagaaggtcatttttgtttttacaaaaacaaaatttttaaaaactaaaaattttactttcattttgtgaattaaaaaaattaaaaaaacaaaagtgttaccaaatggcacctatatattttaagagatagaattaatattgtcaaaattttaaggagtaaaataactaattattcttttataattaaagataatttaattattatgcgattgaaatatctactacctaatacctatttttaatctattcatatgaatatataaaagatttaaattttatagggttttctaattaattttgatgatattaatttaaattgtcaattcatgaggtgattacttacttttcttttttttttttttctaatctagcttttattttttattagttgttaatattttaattttgaactatttttgtcaattaattttgttaatttaaattttttaaatttgtattgcctcattagaaattggattcaactcatttacatttacctcccttagttgttacattattactattcaataattattatatattttattagttattatctcaattattcttcaaatttgatatcttaatcctattatatattttaattttaccaactcaaaagatcaatatatgttcaaaaatttattttttcaattctcatctctcgtagaaaaatgaaaaactttaaacttagaatttttctcaatttaaatgtgttaaaaataattatattatatgtttggttcgtatataaaatatctctagaattacttattattagctaaaatagtaccaactaatttgtcaaaatatctcatcattgcaaaattaattttaacagattttgactcaaattttcaacaatataattaattttttaatattttacgcaagaatttatttactactctaacttaaacgagagagtgtcatcaatgtctaaatatgtatgataaacattaaacaaatgagatcagaatatcaaagtagtttaaacaataaaaaatgatagattttgattatctagaaaaaataatataaaacaaaataacataataaaaaatagaaaacaaaatgaaaataaataaagcaataaataatagaaccagaagcgaagtaatacacataaagaggtatttagtttttttttttttgataactgttacctccaaaggagcaacacaacaccaaacgaaacagagagaaaacagagcacacaaaacaaagctagaaactaaagaaaaaaaaactaagggttcccatttgcctccaaagtcggcagggaactgacaaaattggtcaattcaattgtcccaaactgcccagattgaattgccaagtgagccacaaagtcggctacaccattgagacttctcggaacccaagtagcctc

SEQ ID NO: 271903 - DNA, 1207 bp, Cannabis indica
ataaaatagattacattgaaatggagttttatttagggcataaaacctaacaatatccctgtagtctgatccccaagttatagggattttgttgatgactcatgatgcgaaagctaaattcgctaagtgttgattgctctgcgcggattgccgaaagctttgctctgggcatgccagcgagacatcctgctcgaactatgctttcggagcagatgccccaagcggattccacgtgtcaccatttatgcgatgccatgccatagtgcaaaaattgggataacatttgccccccaagtgtgtacgggacttccaaagttgcgtgtggacttcatccgagctgcttctgccttcagatggggacacgtgtcaagcgcgaccgtcagagactcgatgtgaggctgactgggtgtccctttagttttcggctaataaatgctctgacaattaatatttcaatcttcaattttctctttccacggctgacggctgcacttggttatttttatttcccatattcgcttttaaggagggaaactgaggcgtctaaggttcctttgagatgattacctctttccgtgacttgcctataaatatcaactagcattggcacataaactcatttttaccacccttatttgctaagtaagttcagagcgaaaagagaggttcttggcttcgaagttgctgaagtgccttcatcaaagttgcttgttggattgacgttgctcgaacccaaatatctgactcttgagtaagttttcaattccctttaagcttatttttgcatgtttatatttcgaatacaccttcgactttgttgtaaaaaatatccaggaaaccctaggttcagaaacttctgtgattcttctttgtcatggcttcatgcgattttacagcccataatgcttgttttttgaactgcgtaatgtctgtctttcatcttgcttattctaagcttcataaaattttttgccctaacttgagaagattttaaacttcttgagttttgacttctctttgaacattcttgttgttgaatctgttgagtactcttggtcgacatatttgcttgtttatcgttcgatattctgaccaaacactaatattgtgtgttgtcttttgtagatgaactcaggtgagttttgggagaacagacatcggatcggccaggacctacttcaacatttgcacgaggatcatcctcgtc

SEQ ID NO: 271904 - DNA, 1161 bp, Cannabis indica
ctgtccaagcttcctccccgagattccttggacttagcagctttaggggtagaggggtttgcagccgttagctcctcggaaagatcaatgacctccccaacaggcctcttttccttacaagaggacccctcaccgcctttagacttcttggccggaggagaggcgctcgagcttccgcccattcttttcctcagagcatcaagcatctgccgatacatgtctgtacggaacaaaaaacaacatggttagagaaaacatacatcagaaacataaggcataatagtcaagaagctcaaaaataagaccaaacaagactcaaaagtccatcatcacctgacatcgctcttatttcagacgtaacagctttcccttttctgaacacgggaggggacgaccgagcagatgagatgggctcccttatgcgaattacatgttcaacaggcctgggcagggccagaagtttcttcttcgtcttgagtggagtcacctcctcttccttagcctcatcttcaggattaaagggctcctgagcataattgcttggcccttgcacctctcttctacttagcctcacgcttaagttgaatgatttcagcctcctgatgagctcgttcggcccgtccagcatcagatttcctcttcctccccttcactggtttgggaatgaagtcctttggatagagcccgtacttcacaaagttatcctcgaaggtcaattggatgatattccgatcttcccccggtgatatgtcggaatctgcgggaactgagtgtgactgatgcccgtgccatccactatgaagtactcatcaacaaacgcccaatcttgctgatggccgaatcatcggtgcccatcaaccacttgaagtcctccacattcttgaagtattgatgaaaaggcatcaatgccccttgcttggcatggccacctgaccaggcgcacatccccctttcagggtttgtggcacgattgttgtgggcgggaatgtagcaatccaattcgcccaggtatccgccctggtcgagagtccgatggcccgcctcagtaaccctggaaggagggcatacccaccaggcgcccaaagcaccctgccttctgtgaggaaccgcagtagtaagctcctcactgacacagtccacaccctcaaccaggatgtctcc

SEQ ID NO: 271905 - DNA, 1067 bp, Cannabis indica
tccacaattaaattaattcacaaataataataaaataataaaaatcagtgctaattgccttactaaaccaaattactaaagtggtcattacatttcatatttttgcatattcagtgctcgacaacattggaacacggtgtttggctattagaatcacatgtgtgaaactagtcttttttagtatagcggggcaatatagttagacattgggaatgtcaggaatagtcgagattttagaatttctcaaaataaccctaagtgccctttttgacttttagtgtgggaggggcaaaatggtcatatttgccccattagtcttttgtcattttgtgactttagttatgttaattaatctaattttaagttgatttagttaatcaaaatatagtgtatttatctcattttcaaagaaaaatcaaattaaagaaagaatcacattttcactctcaactctctctctcttttgaatccacctagaggcaggtagggtttgtcaatttcttcttcatttcaagtagaattcagcaagattctagtgtaatccaagccaaggtatagtctctagcaacctcctctttgaattctttggttttaagttagggaattttgcatgctttgtgagttttgttgttgtagttgctgctagtgtttgttattgtttttagtggttaaattatgcttagatatgttgttttaggcttgttgtgatggatggtttgatgtttgagcaagctttgagttttagaactcaagcttggctctttaatggcatattttgtttccaagcttgtaatagtgttttattgctttgatattgttctttgaggtctaaatagcaggtctggaaagtttcattgagtttggggttgaattggttgagttatgaatttttgttggattcctgcactgaaccggaattccggtttagagggacttgtaggaaccggaattctggttggtccccaagaaaccccgtagaactggaatttcgattgggaaccggtctaccggttggggcagttttgggaaccctagtttttcccattttgtgatgtttagggtattgc

SEQ ID NO: 271906 - DNA, 2637 bp, Cannabis indica
aaaaaaacaagtgaaaaaccttttaaataaataaaatctgtaaaaatatgtataagaaaatgaaaaaaaatataaatatatatttatatatatgattataagtcaattgtgtaaattttccttcaaattttgagtattatactagctactcatttagcatagactcgttaaccaaaataaaaatgcctaccatttatttgttttctttgcacaatagtaatattttattttttttgtatagtgttttattattcatagctttgttcgaatacatttcactaatttttattacaatgatatgattattttctttttcttatgaatttgctggttatgttgttctttattgataatatatttaaaaataattgtctaaaaaaagtagtaatattcctacaattttacaatttaactattttttagctttagaatcttccttagatgtttaaccttatattctcttttgtatggacttgttgtcgtctcctaaacaaaagaatatttttttttccttgttgaaggtattaccttgactgcaacactagtgtatggacaagaagaagaagaagaaaaaaagaaaaagaagaagaaaagaagactacaactattaacaaatataaaagaaacatctatcaacacaaaagtaatcctcacagcctacatgacatcaatacttatattttttttactaaaatcttaaatcatcaaaataaattgaaaaaattctcatatgaaccgcaattgaatgtacatatcttcccatagaacatacaccaacacaccatttactttaaaggtagtcgcattttattcaaagacgacaatacaatagccaaagaaacaacaactcttttcattgtctgatgctcttgtaattaaaagatattttcatcaattaaaaataaataacaatgttggctttagtaacaaacaaaaaattaataaataaataaatagcaataattcaaaaatatatttgtacacatatttgaccatttgtgtaaacaactcttataagttgtatcacatatataccacaattaaatccacacattgttttttatgaaatggctttggcataatagtaaacttctcaaatttaaaactcctataaaaatgtatgctaaaatcattagaaaatgataaatcacatatcacgagctacaagacaggttaagtaataaaaaatttgttaaagaaacaaataagctaaattataacttctccaatccaatactcacaaaatcattgataattttcaatcctaacacaggattcaccaatgacacattgctaaaaggggcagaaatatctacacaatacaaatacatattaaatgttagattgattcacttaaatgatatagaccaaaatataacaagaaaaaaaaacaagtaaaatcaaaagagtaccttctcacaaattgatatatccccaacccatcttcgtaaatcagtaggatctttaattgcacctttttcaataatgggtctctaacataatattcaaagatttttataacctcaatctaaaacaatttagtatctataattgactaaaaataattaacactaacagaaattctcattggtataaactaaaacttcatggaaggccctcttagcttagcctcataatcacacaataaatttatcaccatgttcaccacctgcaaaattatttatcaaacaataggtaataatatattaaaaaatcaaagcagtactttgagccaatatttattcaacaaacccttgtcccaatcaatgtataaacatttagtgatagaaagtcttctctctgacccacgactctttcacttaaatataaaacttccttacaaaaggaaaaacgcaaaactaataaaagtaacacaattattgttgacaattaagttacaaatataattcttaatatgagataatagttattacttatctacaatttattgagttgtcaaatatatatttagttacaacttcttcacaagaagaaaatgaggactctccaataaaacagggtgtcgagcaaactaatagatacaatgtgaaaatttctaaaagcttaaggtgctccttgcatctctcacaagccaattctactttgctatcctgatatatagatatataaaattttaccatttacacacactactaaaatatatatttatacgagaaaaaatataaaataaaaataattacccacttaccaattcagacaactcgaactgactaatatcatataagtttaaatcaaatctagaaccactgttagtagctactaactctttctcttccttaacataaggattaaaacatccatatcctcgcataaatcttgtgttcagaattgagctataattcctctttgatgattctacgcaactatagttacctttaattgatattgactccttatcttttgttgaaactaacacattagctttcaacaaccccccttccatataatctccatcattcgtctctaaacaatttcactcattcaacattgatgattcattttcaaatgacacttctttattcttcacaatgtcttcaagctgaatattgtcctcactaatgtaataatttggaccacaactaacattcaaaccattttcatctaccttatttacca

SEQ ID NO: 271907 - DNA, 1153 bp, Cannabis indica
attaatatttatatttactaggtaatatcaacatgcaattttaatcaatcattatgtttgcttagacttgcattgcctggtactattaccaaattattaattcaaataataataataataataaaagtataattcaattctatcattatttttttttaaatattacaaaatttaattcaaatttaatagtttttttctttttttttcttgaaaaaagagaaaggggtctttgtcttagactagccccctgatatgaataaaaccctcacttgtggtggaggaaaaccgaggttacaaagttaaaccaaactccaatactagaaactatttatacaccctgaacatactcactgccccaaaaatacgttttaacattcatctaggatacacataaaaaccagatccctcacagtagaaattcatgtggcagtagcaaagaacttacaacactgctctccagtctctaattaagtctaaaaatgaaacattttcaaaatgcttagtcttgtacacccaagatgcagtccaaaatctaatatttcccataggacctctgctaatcattgagaaccttcaaagattctattatttctaaccaaacagcccaaagaagtaccaagacacccccccaccttactatcatatgaggaaccgaacaaggcataacccattgaatctcaaattcgtttatcagttttatccagagaggactcgcaaggcagcaacttatataagaaaatatctatctaatttcattaacacttttaaataattatataagttatatttttaaactgaaaaataaataaatttgttcaaaaaaatatttaacaaatttatttaacggtgttattttgaacttgtagctttaacggaaaataacagaataccatcaaaacatcaattttcgttagatagccacactttatatatactagataaaaattacgtggcgagccacgtaaatattagttttatttaagttttagtgattttttaaaaaaattcggtaactaattgtaaattattttttaaacaatttgttttataaaaatagacttgttaagaatgctataattgtatatataaacttatgatgtacacattattattaataatactaaaaaattggtaatattagaagtacttatga

SEQ ID NO: 271908 - DNA, 605 bp, Cannabis indica
aaatattaatattgttcaggggaagaaaatacctacagttaaaaaagtgtcaatagagataattaagtgaaagaaatgagaaaagagaagagaaggtagaaaatattatttaattatttattataaataaatttatttatttatttaatattaattaaaaaaaatatgataaataatctactacaacccaaatattatctctattattatacacttatttatttattaccatctaatctattatctatggctataaaaatattcatcccatcaaaacaaaacaataatcattaccatagatatatcctataattataatataataattaattattaagtaaaaataggtcttagatgatggcatttgttattatactaaatagaatgtgtaaaaaagagtgaaaaaaaatagtttccttaacatttctttaaaaaaaatactaactaataataatactttttaataattctttttgggtgagaccagttattaaggtatataccaagtgctcgtttggaacgccgtattaggtcgtattgtattgtattatattaaattggattatatatcatatttttatataatactatgttaaactttaatt

SEQ ID NO: 271909 - DNA, 735 bp, Cannabis indica
ttttttttgtttgaaacagccgcgcgcatcgagccccataaagccatctcttcagtttccaagttccaaataagttcccatataaaattagagaaagaaaattaaaattacgttgcaaatggaacaaaaaataacacaaacccagatcgagcacgttgtagaagtacccaatgagttagaaaaaccgaagcctaataacatcatcaccaccaacaagaggttgacacggtcaacaacaatcttaaccagatctcatgctggttactttcggataagtctctctctaagcagccaagccttgttatggaaaatcttactagagcaaaacgacgacgttcattctttacaacgagtattattccacatggtaccctcctccagcagggtcttcattattcttctatggtctttagcccttttcacgttactatctcaatcacttctctacctcctcagatgttttcttcatttcgaaattgtcaaagccgagttcttacaccatgtgggggttaactacctatttgctccctggatttcttggcttctcttgcttcaatcctcaccgttcatcaagccaaatgagaatttgtactactactactacctagtgttttggtgggtgttggtaatcccaatagtaatactcgatattaagatctatggccagtggttcactaccaaagggaagaggtttctatcaacggtagccaacccttcgagccagctgtcggtgat

SEQ ID NO: 271910 - DNA, 575 bp, Cannabis indica
cctataaatgcattcatattatttaaaactaaatattattagactattttcaatgaaaaatttgattttctatacttacatatatttaatattttttctcttaatattttttctctaaacacataacatttaatatttgtgggatatgacacattttaaaatattcttaaaataccctcatttacattaccgcatcctctctctcttcttctctctttgttaaaaacaaaaaataatttaaaaaaaaaattaaagtgggcatcgggctcatcgggccagtcatctgaccatcgggcccatcgggccagtcctataaatagaaaaaaatttaaaaaaatccaaaatgggcatcggaccatcggcccctacatcgggccgaccctcgaacctacatcgggccatgcatcgtgccttcatcttcaagctcatattaaactagaaaatcggattttcatgcccagaaggatcacgaaggatcacagacgctagatctactccatctaatcctagatctaatcaagaatgcacatatccaacctaaatctatcaacaaacaacattttcaccataatcaa

SEQ ID NO: 271911 - DNA, 581 bp, Cannabis indica
ctaaaggcttgggacaagctttgcctccccaaatcgttaggtggattgggtttccgcaagacaaaagaaatgaaccaggccttcttggctaaatgggggtggaatattctaaccggtagccaatctctatgtactcaagtattgaacgcgaagtacctccggggaaatgactttctctcttgcaggtataaaaattctgattcttggttttggaaaaatgttgtcaaggctaattctatcttgaaaaaaggggcttgtaagttgattgctaacggagaatcaacgaaaatatggtcggacccatggattcctcattctaaaggcttttgcccgaagcgtaggaggggtgcccctaccatctttaattgtgtaggggagttactctgtaatgatggtcactgggaccttcaaaagctgaattctctgtttgagaaggacacggttgcggccattttgaaagggggtcacccctctggtgttggtcaagatagatgggtttggacgctggaaagtaacgggcagttctcgtgtaagtctgcttatctatcccaagccctggaaagagctcctcactgtgatgt

SEQ ID NO: 271912 - DNA, 658 bp, Cannabis indica
ctccacatagacgacgtagattcttcattaaattcatcaacaccattaatgccacgatcgaaattgaattcccaaactttcaaaagaaaacgttatttatgattgtgaggttgagttgcgaaagccttaagcgtccccgaaccactccaatacgcacacttgtgatgttacagtgccttgagttatcacaaggtcaagaagaaagttaatgtaacgattatttttggtatgggaaaatggatcaaatgcaataattccctcaacacatttagtggtcaaattactcacaagccagtattgcattccattacatgaaaccgtatttcatccaattttctccctttaagaaaattatacgatctactccatttttaagtctcaaaacaaaagacttcaacacaattatttaacgaaactgacgcctaataataaaatagtactattgctttatacctttttttcacataactattattattgttattatttggttgacaaaccaatccgcccattcctcttgatggtagaaaatctgattctattgaattcaatataagctttggtagcttatgttgggttttgtgccctaaataaaacccatttcaataaaatcagatttacttattaataaagatcagaaataatattttatgttgca

SEQ ID NO: 271913 - DNA, 1068 bp, Cannabis indica
gtttcagcattttgaagcaggaactctggtggtgaaaagtctgaatcttgacggagttttctttttccttagtttaattatttttgctggttgtgtttgcttgtttattagtttacttttattgttgtctgtagttgttagtgtattagataatgtgtggttaattttgtgttagtcatgttacttggtaatttttattctgttttgtgttagattgcaactgagaagtatatttcgttaattttagtttggtttagcatggcgctcaatgacgaagaaaaaatatccctttccatccaattgtgtatgccttgatttttgtgtgttgaaaatgccaagtttaagtgctattttgtccaaattctaggttaggagtaattctttcaatagatgtgtacttgtgctatcccactaggttttgaatttttagaatggctaacaccttgagagagtttatgcttctagaattggttggtgtacccttaaggcaaaatcctagctagctttacaagttagagatgatcaaggccatccttggaaaattgagactttcaacctaacccgagcattattaattgtcaatagtcaccctcgttgagccaaattgcctaattttcttttggtcttaacacccattaaagtttaatataccccatacacataatttttgtcattcacaacccaaacctaattgttgaaatgtatcaatgacaaatcaaatattattggggttagggaagtgcgaataaaaattagcaaaatgtggtgaaacaagtttacatgggagataatgatggaaagtaagttcgggttggtgagagttttgattcacataacataaaagtccctctttcgctatatatatgaaaaaccgagtttttgcaaatgtcaataatacatacgaaaatataaaactgtatacgcctgcagaagcataatgtaattctgttactgcagaaaccagtttcgcaacgacaaaacaaaactggcagaatataaaattatttgtagaaatttaaataacttgacccaagagatttgtacgtggtatcagtgttctcccgaaca

SEQ ID NO: 271914 - DNA, 909 bp, Cannabis indica
tggatgatatgccttatttataggcaaccatcttaatgggatggacgaatccgatcccaactatgatttttttcatgtagaaagtggcctattaggggtaaaatacaatatttttagcatatgcatgattgaatttattgggcatggtaggtcattagatagtatgagaaaatgacatgtcagagtagtggtgcaatcctaaaaaagtttacacactgttagcctttccacgagttggtagaggggatattttcccatatttcgtaggattgtgtcagaggtgtgccacttaagcatcttttgggacgacaaaaaccaacttgggcacctctttggcttcccttcccgaatggctcttgagggcgttcctgtctgattggaaagaatattctattgaccatgggagtgctattacacgtctctgggaactatttacctagtcggatccctagacctaaaatttggaaatgaggtccgacttgagcttgtgtttggtggtaccgctatatgtctagtcctcttgagcttgatgataggccccagtggcggaacctcattatgccgtgcagtggccatcggccccccccccccccctaagtgtttaaagtaaatgtatatatacttatatatataaagggagagagaaagaggaactagagaaaaatatatattatattttttaagtaaaaatatatatattatatattaattacatgtattgaaacttattttcataccattttgtttttattaataaatctttttattgatatttttcatacattttgttttgtttttatgtaaaaattataatttggttaattagaattttttcttcccgaactttgacatgtactaaattatgccccctgaacttttttagccgttcaaaatttctcctaaactatt

SEQ ID NO: 271915 - DNA, 1241 bp, Cannabis indica
aagtgaggataaatctttgcaagatgtggaaaaacaagttcatactagagacgtgatgggatgtgagttcgaggtagtgagagtaatctttctcttgttatatatatgtagagatgtaaatatatatatataaaaaacagaaaagaaaacaaaaaaataataaaaatatatatatatatatacatatatgtacaatcatagtattaaataaaataagagagaaaaaaacaagtctaaggttaagtttggggtgtaccacccctaatcaaagaaaaaatgttgttgctttttctctctttatctagttgattcgaaatatatatatagtatatacatatagcaagagaagtggaattagattgagcaatcattgtgggttgagaatgaaattttgggtaagcatttgagaggaaaagaaaagtccttgatagattgaggtaattaggtcatgagcctaaaagaatcatctttatcaaacccgaacctaagcctcacattacaagcctatgaaagtcctttggatctaggatgtaaagctaagctacattagtggagagggttacactaattcaacttatggaagcaaactttttaaacttgaggatcaagggtagttgttatagaaattcaaggtgttggtgggaagcatttgcacactttatttgattaaattattcttgataagtattaaggacatagatagcatgtaaaacttgattgaaaagcacaagttcaaggcatattcactaccaccatttacacttccattccatctaattctgagagcatttccgtcgctaaatcaagtttaaatgagcaatatgttctctgttgcaaatgtgttaatgttcctgtcattgttttttttttgttcttgttgttttgttctttctattcttcattactcgagcacgagcaatactctaagtttggggtgtgataactctatggtatagaattattttttatgcttttaaactgaaaatattgtgaggagagtagtaaaaatgtgtttggttgtttaattttaagtagttttagtttaatttctagttaggaagctaacatttgagtcttgtaaaaattattgtgttaattgtgtttttttaattaaatgttgcttgtttgttgtggaaagaagagttaatttgctaggaaaaatgaagtgatgcaaaggagaagtttgaacaaaagttgaaaactggacagaaatgctgaaggaatgctatagcattctgggc

SEQ ID NO: 271916 - DNA, 633 bp, Cannabis indica
aaaaaaaataactttggagaaattttagaccgccacatcaccgcctcatacttctcctttatatatactaggaaacaaaccgtacttcgcgtgcgattgtattttgtttaaggataattaagttataaaactgtatataatttcaaattttttttttttacatatacatgtatatttttaatagtataagtaactattttactaaattttcacttttttactcgcataaaaatattaaaaattcatcatacaatcagggccgtctcaagcttttgaggggcctagtgcaaaatttcaaaattgggcctttttaaaagaaattattaaatataccaaattttcaaaaatttatataattataacattaaacttaattaaaaacaatcaaatgtcatatattccatgtaattataataataattaaaaaaaaaacttaaaaacaatattcaaatatatagatccatccatttaacaagcgacttttttctccatatttcacgcaacgaacaatcttcaagccgcaaaacctaaaaagaacataaatttgaatgcaattattaaaatagaagagataacaataaatgaatcatttaaaaatgtatctttcttactttttgagatgcaaatttgcta

SEQ ID NO: 271917 - DNA, 537 bp, Cannabis indica
ctaattggatttgatcggttttttaatttgaatatccaattacatacttaaattttagtattaacataaaaatatgaagaaaaatacgtaaaaattaaatatcactctttatttaaatttaatactccataaacataccatcgttacaatgtaatacaactaaagtttcaaataattaaaacaacaacatttctaagtaaacatcatgaaaataataaacaaaaacgcaaaaaaacaatccaataaaaatataatttatatatattatatttttattgtataaataaatataaaaaaaaaattaacatatataaatgtaattagatttgatcggtttttaattggattttgtgattaacatctaataaccgattcaatccaattaaatccaacttttagcatccaatccaatccaattgtaattggatatccaaatttttgtaattgaattagatttgatctgttcaattggattagattggatgttgtctacccatatgaagaacacatggaagaaaaaaagaaacaacaaaaaaa

SEQ ID NO: 271918 - DNA, 757 bp, Cannabis indica
aactgctttcaaatcatatagaactggacgacccaacatgacacaaaaagtagagagaacattaatcaccaaggattggggtgggttgtctgagaggcaatcaaaggactttatgggaatgctacaaccttgccctaaccaacaccaaaaaggaagaaacatctagctagagttcagagaaaggtaaaagcattaccaaatagggattcgccgaaggtggggatgaatatatggatccctaccttggggaactaagtgcaaatgttgggtaggtcgaagaattagaagaagttgagattgatcctactatgcctaccatgaaactcaaaattggcaagggtttattgctcaaaataaaactagctttaataaaaaaaatttagagcaagcctttacattttttcctcgtcacatgaagacatggtcggaattgatccaattgtcatgtcccaagccctcaacattgatcccaacttttgtcccgtccaacaaaaaatgagactgatggataaagagcgtgcacaagaattgaaagaagaggtagaagggctctgggtaaatagattcataattgaggccttctacctggcctaagtagctaaccctgtactggtacccaaaccgaacaagaaacggcgagtatgtattgatttcaccgacctcaacaaagcatgcccaaaagactttttccacttccaaggatcgactagctggtagatgctacagcaggccaagaaatcctaagcttcatggatgc

SEQ ID NO: 271919 - DNA, 1085 bp, Cannabis indica
tacccatgataatggtttcgttagattagagaaagatttgatcatatgaacatgattcaaagcggaagtggaaaggatggtcatttaattttgatgtacctcgaaacctcacaaccgccaaaatcagaggatatgcatcttttcaaaaaagaggaacatgacaggaataccctttgtaatcattaaaaagctcttttgaattaaaaagaactttttaaggggcaattgttatactcgaaattcggtatgcacatcagaggaagacacgtgtcaagctgggaagaacgaagaactcaaatgcacaaacaaaaagtacagttagcatggaacgactcgttggaaatataattcgcaggatatgtttataactcggctggctgaaaagccttctacaagacagaaatgtacgaactgttaacttatgtattgacgagaaaccatgtgggtgcacgtgtgcatgatgaggcctcaacctgatattatacgatattatacgatatacaaactgagcgtagatagtgtggcgagtcaagataacagacaacgaggcatttgtctcgctagacgaaggtatgcatgcgaggaaggtcatctcgacaccagaaaatattgttatcaaagttaaaacaatattagtctcaataagccaaatgacaagcaactactcgctatctttaattacgcgttcatctcggcccaataaaagcaagatattcacagctatgtaaaaacttcatttatttagcttgatttgtaatccaatcctctaatttgagggaataatcgctgtaatgattattgccaactttagtaaattactgtccactatgtaattataaatggtggcagacaagatcaagaagggggacgaaaaaaaactcatatgaaaagaggctctaaaaaaaaatactcagaaatctgaataagattgacttgtggactatgtagaattttaactgcaaaatcacgttaaaaaccatgtgttcatattttatttttctatagcttttattttttctgtgtaaaattatttaccgtgaggacttaaagttgattaacaaaaatctgcgttaacacctaccact

SEQ ID NO: 271920 - DNA, 611 bp, Cannabis indica
ctacttattgaaagttcagttatatgggcccattatactgcttgcagactcagtcaattgattttaattaattaattataattctaaaattagactttatcttatttatgaattttcactaagcaagggcttaattgtgaagaaaagaggttttggagtctatttgttaattaagagactttgcatggtctaattaataaataatataaatgacaattttgtttgataattaattataattattaaataaatagttttggtatttataggattaaattagaaaatatgatattattgaaagaagaataagtggttgtaataaagtggcaagattgtaactagagaattgtccctttaatggccagccctagtgttaatttttgcccaatattttattcttttttaatccatataattcagtcctaagtcctagttgaaacactacaaaaggaacatgatgctctcactcatccacttgatgccttcaaccaaatcaaatctagttttctctatcagacaactagtagatgagagagttccttccataatgatttcacctccttcattgtgcttcgccatattcgaacgttgagtgatagagtgccatgccc

SEQ ID NO: 271921 - DNA, 900 bp, Cannabis indica
gttctaaataaataaaaataatggaattggagtttggggatatttttgtaaaaaaagaataatatgtaatgggaggaggtcagaaaaggaatatggtggcagacaaatgttctgaagtccaatgagcaggcttgttggtcatatattttcaacggaagtaagtaattctaagtctaaagtagtatttttattactaaaaaattataaaatcatcaacacgcgcaactctcgttttgttttttttttattcttttctggaagggtgcaattctcgttttgaagtatggtcaatattactatacgatgtttttttcttaaatgaactattactatattctaatttcgtttaattcactaattagggtttatcatttgtttgtatctcactaatactatttctcaccacacattcaatactaatattacacaactaatgaatataaccaaaatttaattgaaatcatgccgtataatattaacaatctaacttttaagtatggaattaaggtgaacataattttttgcttgattggtaagaagacacaattttaggatcacattaaattaaatacacaatattggtactagtgtggtaccaagactttgaccctcttcacatattagtaatgatattatcaaaatttgagtgaaacttaaatgaatatcaattatcattcctttctcttataaggtataagagataaatatattttgtggatttttatttgtgacataatatatagttgatatatattctttttttaaaaaagattataaaatcagtaagatattaatgatgttagaactaaaaaaatccatgcactgactatgaatggatgattcaagtgccctgcacgtattgtatcatcatttttatattcatgtgattaacaatatcac

SEQ ID NO: 271922 - DNA, 1218 bp, Cannabis indica
tcccataaaaatctaacgaagctttgttccactttgatccatccttgaaccccaagacctccaaaggcttttgggaggcacaccctctcccaacttatcaagtgagttctagttcgattatctttcaacccccaaagaaaacccctacataatttctcaatctcttttatcacactttgaggaaggaggaagactctcatccaataattcctcaatccaatcaatgtaattggattaattgaactcggccagcataagaaagatgcttattagcccaagaatggagtctatgtttcatttttttttttaaatcaacccacaatcatctagcctccattttgttggtcttagagggatcccaaggtacttaagagggaactcaccgatagaaagatttatcttttgagcaagaggaatcggttaagaaaccccaccaaagtaaacttgagatttagcaaaattgatggaaagacccgaattcttgctaaactcatcaagcataaccttgatagcacttaaagagccctcattccctttacaaaagataactaaatcatctgcgaaacatagatttgtaagtttcatttttttgcataagggatgatactagaaatccttttctctagatgcttgttggatccttcgggaaagatactccatgataggaacaaagagaaggggagagatgggatccccttgtctaagcccctgctctcctttaaaagacccctgaattctaccatttagcagtaaagagtaggatgtatttctcacacaattcatgatccacttgacaaacttagcagggaagcaataggacaccataaggttttgaagaaagtcccaattaaccgtatcataagctttactgatattaattttgatagtacatctgggggagcaattcttccttcggtagttcttcagaatgtcctgaagaattagaatattataagcaatggatcggccattgacaaaagctccctggttctgactaactaaagcaggaagcacattagcaagccgagaataaattagtttagaaacacacttgtataatgtagtgcgacaggcaataggctggtaattaatagctttagaaggactatctatctttgggataagagagagagtcgttctatggagctcttccgggaactgattgttggaaatattttaccaggatctagatttactaccaagtatgtttcattaaca

SEQ ID NO: 271923 - DNA, 1249 bp, Cannabis indica
ctcatattgtgatcaattactatatttactagtacagtacacaatggttctgctgagactcttcgaactctagttggtatcataggtatatctatttttttactttaattattattatatatatatatatactttgagtatatatatatatatgtgattattctcaacatatatcaaaattagtatacttataatttaactttattaatttcaggaaacatcatatgcctttttttctatttgtcaccagtgtaagtttatgtatatatatagatagttttgcttattaaaaaatgatcttctctatatttgtcattatttctatgataattaaatataaataatttgtgtgtatgtatatatttatataggccaacatttgttagaatatggaagaaaggggcagtggaagattactcggcattgccataccttgcaactctaatgagttgcatggtctggactctctacgggctgcctattgtccatcccgggagcactttggtatttaccataagctttttaggggttgtgatcgagactatcttacttatcatcttcttgatcttttctgacaagaaaaaacgacttaaacttcttctattgttgtttctcgagctcttcatcatagcccttctcgctactttatctctaactctatttcactcatataagaagagatctttgattgttggtgtcgtcggtgttttcttcagcatcgtcatgtacttttcgcctttgtctgtcatggtaattaattataatcattaaattttttcttaatattgtttatatttttaaatttttgttttaatgtgtattaaaaatatcacttgcaactcaaatttggtttcttgtggcaaaataatcagctgagagtagtatttttcaactaacttttaaaacaagtagtgttatttgtaaaaaaatttaatgaaatattgaaaaatgtgtgcatggttataatacattataattataattataactataacatattgttgtaattaagaactagtggtgcatgtatgtatacacacaataaatttcacatagtataataatgtaatttttttcctaatagctgaattatatatattatagtgattgtatatatatgattaattgtattataataattaaataatgacaagagattttgtatgttattatattaattatacagaagctggtgatatcaacaaaaagtgtggagtttatgccattctcactctcacttgctgcattc

SEQ ID NO: 271924 - DNA, 570 bp, Cannabis indica
aaacatacaatcacagaaattaaaaaaaaaaaccagctaaaaaaaaaattacacttaagctttaaaaagaatttttcttttaaaatgcaaaaaagttatcaaaaccataaatgacaaataaaaaccaaaaaaccagtaaaaaaaaccagtaaacaaaaaaaaaatccagttaaaaacctaaaaccaaaacaataatacctataattttttaaaaaataaccgattccaaacaaaacattacaataatattctgatattacatttttcctaaaattgcaggcatggaacaaatcatgtgtgtcatcaaatatgggggtcaatggagggaaaatacaaattatgatgactatacaatgacaggaattctaattccaaccaattcatcactagagataaactgcagcataagcaacatagacatatcctaccagatatcaccggggacaacattgatgaagctactgagtgacaattctctcaagttctacattgaggtgagaaaatcacaagctggagtaactgattctccactatgcatcaaaactatagaagaaatggctatacaaacag

SEQ ID NO: 271925 - DNA, 812 bp, Cannabis indica
gtaaaaatccttctcttaatttcttacagctctttaatctcttattattttattggttgccgaaaacctcggtcaacagtaaatttaaaaaaatatttatataattttgtaatatatgcaaataaagaataaagaaacttttttttttttaaaaaaaaaaagaaacaaatgtcaattcccaatgcaatgataataattgtttttttgactaacagtttctaaactaacggaaggtttgtagttaacataaaataaatataaggacagatgttagttttctattgttgggacaggtgtggaatagagaatttgggacatgcgattttgatttcttttgtattgcttggtactaaggtgttccaaaatttataattatcaaaaatacgcataaaatctcaaaatatacagttttagtttctcttttgttcacataaaatttcatagatttttttactaaaaataccataattttttcccctaggaatgagatgttggcttcccaacagtgagatatttcatctcttccctaacgaaggtgttgttcaggtcgatgaagctaactacaaaacaagcctttagaggcgcttttttctagcataattataaataaccgacgccataaggttgaaatttttagtacgggatttggacgccactttggttgtcggttatttggtaactaaccgacgccataggacccgtactggcgtcggttagtttcctaaaaaccgaacctactggcgtcggtagtttcctaaaaaccgaacgccaaacggttaagttaaccctaacgtcccactccacttctactc

SEQ ID NO: 271926 - DNA, 539 bp, Cannabis indica
tttctttatttttttaatttttgaaaaatgattctggttagaatcgcataaaaatcgcacattaatcgcataatatcgccaacaaaatgaagctcttgtcagttaacatcgcacaacaatcgcacagtaatcgcataatatcgttaaaattgcactaaaaataccatatatatcacacatcgcacaaacatcgcataatgtcgcatagaagttgctaaacataccgaaaagtaataacctaggagaaaatcgcacaaaattgcatataaatcgcacaatgtcgcatattgttaaatattcatgcgatagtcctgttaaacaacaaccagcaatacaacacatattcatttaaatattagagaaacagttcaaactcgagctttgcatgtagctctgttgtgccctgacccatgacatagcgaacaatgacgaggttccactaccacctgaccactagacggtcgacgcttcgtcggtcttctacctgcattgctcttcccaggccgacctactgttttttctccactggtaccccgatt

SEQ ID NO: 271927 - DNA, 843 bp, Cannabis indica
ttacaactagcgagtaataacctagttatttatgtttgtacttttcctttaacatttatgtttttttaataaaatttgatccaaattctaccgaaattttggcagcataacggctgtaattggacgttcccaaaaattttaaaagtgcctaaagtaacaaacaaaacaaatataacaatacagaacaaagaaactaacataaacaatacaaaatttatccacccatccgaccgcagtacatgtattcgcagaacctacttcactacggatgaatatttaagatattcaaactcaactaagcatgcattgataattaattatactaacaaaaggttagcggatggatatacctattgcaaatccgatcaacaccgaaatatgtcgaccctcaaatattagcacacaacctataacataatgcaatatacaaccaaattaaaattttaattattaaattacttactagttattaaacaaagtagcaagttactactaaattctatagttatttttttaaaaaataacatatacatatacttatataaccaattatatatcacactaacataattttaaaaactttaattctaaactaattaaatccctacaacctcattctcattcacaacaaatatatatacaatacaattacacaaaatacacaaatagcatatacacaatatacatacacacaatatatatagacacatattcaataataaaatataaaatatatacataaatatattatatatcaagttaataaatatttaccttataaatgtaattcggcgataaattacgacaaaaatccggtcacctatagcacacacaatataatat

SEQ ID NO: 271928 - DNA, 1494 bp, Cannabis indica
agctagcattgcaaccagaaccaaccacaataaagatgagtcaatctctaatatatgaaataaatactaaagtagatatacaacaaatacaaggttcacaaactaaaagcaaaaatctctcacgtataaatttgctctactttcaaatgcacttgagtctaggaacgatcaccggaaaatggtaccaaagggtcaaatacattaacaatacatggcagtgaattgaaaaatagcatataacattaaaaataatgcatcaaaacgtgatttttatacacagatacccatttttctttgaaagacagatcaatcctactaaacaagactaaaaaagtaattctctttcaaaataataaagaaaacccagttgagagaaacatggacacaaacgaaccttcttctttgttgggtactgtaacgtagacgacgatgctgggaacagtgtcgctaccactctccattctcatagaactcgaggtcttagctggtgcttgggtactgaactttgatctaaataaacaacaattagcacacgcaaaattattaaattgaaatcaagttaagaacgtgtaaagagagagaggtacttcaagagaggggcaaagggcagagactgagcacaacccgtattgacagagaaagatgaagaaaatgaaggagagaaattgcagaagccgaagctgagcatgcaaaacgccccaattagaggcaaacgacgtcgtatagtggaggatgtggagaaaatgggcgaagctctggctctgcaacacagtgtagaagccattatgtgaagtcgaagtggctgtcttttaatagacgttttgggtttgggtttctgctaaaggggcctgtttgggattcatttcttgatgctcttaattaggatatggataataaaagcaaacccgattctcctttcatgggagtgccacttgttcacatgtagaatagggattaataagaaaagataggacaatttcatattgcttaaaaatacaccccatatcaaaatttagattctaatctaatttgtaccaattgatacttataatttttcaagatacccaaaatacattttaattaaagtttccctctctttgtttttctctcttccccgcgctctctctccttcccacctacctccgagaagttgagaagtcgagaagcccaacagctaaattaacctattgtctctccctcaatcttcatcagctttcgctttccctttctttctcactctctctctttctctctctcaatcttcctgaatttcggtttctctcgcattcactcgctttcccacttaactctgagaagcctagtcgtaacccaccaccaaactccacatccacaatcaaactatccaataaaaataattccagaatcgaaaattcaattatttttcataaaattttacaagcatcaatcaatcatcatataacacacagatcaacatgaaaccatccaaattaacacatatcatcgttttaattc

SEQ ID NO: 271929 - DNA, 635 bp, Cannabis indica
agtaattgacttatgcataaatagactccatcttattgtatgtcgcaagcttgatgtattccaccttctaattgaatcttgctaaaacttcaagtgctcgaactcccttctatctccttgaagagtgcttgttttctctcgaggtaagacttaaaagacaatctcccaaaagcttgtaaaactttctcccgaaggtagcaccgttgttccacttctttgtagacttgaatacagactcaagacaatacaaaatactagggttgtacataaatttttgtaaaccacccaacctgaataaactgcccaaatcaaactgaaaaattcgacaaaaaatacaaaccaaaataactcgacaaaattctaaatcgcccaatcagttaattaggcgggttgataatagattcaacccgccttttcaacccgcccaattaaactgatttaacccgaaaatgtcaaaaagatatataatttatatatactaattaatatatatacaaaaatataatataataatagtaaatcgttttttttttaagataataacctattggaattaatattattttaatatgtatagttgtttttttaaaaaaaaaaaatcagttattacttttattataacataaatataataa

SEQ ID NO: 271930 - DNA, 500 bp, Cannabis indica
atccgaacccatggacgaaaggtgcttaacaatcgcgttagggaacataacacgccaatccggagaagctaagcctctatcaagtctggctctttttgttgaacccccatgattattgctatctcgatccttagcccaagtgtaacaaggaccttggaatcctaagtcaattagccccactccattaaccatcctccgaaagtcaaaagcgtatcttgaagagttcccctggttggcgtaatgaaagcattcagagtcttttaaggttccattcatgtctccaataagtagaacaggccgaggggattgattaaccatgtccccaatgttgatccaaaaagcttccttgtcttcacggtgaggtggcccatagattcccattagcatccatttgaagccttttggttcagagtcaattgcagcagagattacatattttgaggagatatcaatttcacatttaacatcctcattccagcacaatcccaaaccacctgatc

SEQ ID NO: 271931 - DNA, 971 bp, Cannabis indica
agatttaaaatgatgaatgttgtttgtttgttgatttggctttgttcatgttggtttatgtgttatttgatgattgaatgagaattacaaaatttttccatgaaaataattttgttctgaaaatattttatttggattccttgtgaaaaattaagcaattttggtttttacggatgttgattccgataaaaattaagaaagttatgaaagtttgaaaatcggggttcaatggtgtcgagattgggtgcatacacccaccagcatctcggacaagaccagatgcgcgcgggcaaaggtgacagtccctgtttgaagcacggtttcacgtgtgtgttcagacacgattctgtgtcatgatcctacatccgcctgtgtgggatgctgcgcccgccgagatcgcccgcacatgcaccctccaactctcctcctacgtgcgcagacaggcctgctagcagcctctcgaggcctccacgtgcagccttgctggcagccacaccccgtatgtgatttttgtgagatttgttcacaatttttaatttattcctatttttaaaccccaaaattaaaataaaatattaattgaaatatatttaaatttaaatatcaattttaaattaataatatttaaattttaatagattattattaattctttaatattttgaggtttaaatttaaaaattgattattttatttttaaattatggctagattttaaaaacttgttaatttctttaatgtttatatattatttaattataacatcagatattttaatattagtcatattttaaaggctaattaggatttttgcctcctgaacttttaaggtcgttaaaaataccccatgaactattgagatcgttggatttaaggacttttgtcaaatttcatacaattttactatttcaatgttatttatgtactaaaccatgctccccatatttaaccctcaaactttgacatgtacc

SEQ ID NO: 271932 - DNA, 511 bp, Cannabis indica
aaaccaatcatcagaaatttgcaaaaaattcaaataaattaggaaaggagaaaagcttaccgattatcggggcattcatcgttatctgtacgaggtttgagagtcaaagcttaggcttttatgatgcgaatggaggcggagagaatttggaattgagaatgaagatatgcgaaacaaaatttgaagaagaaagggaatcaaaaacactttgtttctgagcaaaaaaggaggagggttagttgtttttttttttttctaataaacaaggaaggttagtttgtttgttatttttttttttcttaagctaacgtccaagtaacgtgacgttaacttttgtacaaaaaaaaaaaaaaattaaaaccaggttttaaaggaaaaaaacgttaaaccaacaaattccgttaaaccaacaattgccgttaaataggcacttttaatatataaagatgaataattagcttttttagtccctgtacttatgacactatactatgatgccccttaatttata

SEQ ID NO: 271933 - DNA, 828 bp, Cannabis indica
gaacctaacactttaaactattaagcaattaattaattataaatactcttttcaaaaaaaaaattataaatactattagactacactcaaaaaaaaaatcaaaagttagaggaaaattgtttgagggattaaaagttgagaaacatattttgttacatgaggtacaaaaattaaattgaaaaagagatgactcaaagagagagaacgtaggaaattattaaataatgggatactttaacattcttttacatcataaaagagtattacgatggtgtggagaaacaaacaaagcagtgttgggccatatcgacgtgtatgggtagcccctagccggtaattaaacagctttatttttctttctttcctataaaatccaagagaaaaaagttaatcgaaagtaataagatgcttgctttattagtactactagtctactagactgtgatttgaaaacgaaaagatttttgtagccacaaatactcatggacatatacgtgcatgtttcggattatatatgtcttcttgcacatgatgaagattttgccaaatacataaagggactgatgttatactcgaatttatatagatatataattcaaattttaagggctatatttataactatatagtctgctagtattggctaccatactacatattaatgtgacaaacatggggatactgcaataaattctactttcgatcgaagctttctccatgatttcattactactcaatccccaatttagtgagcatctatctcttttctttttaatattttaattaatatctccactgtacttcacactcctataataataataataa

SEQ ID NO: 271934 - DNA, 2049 bp, Cannabis indica
cgcacgcattgaaaatacagttccattgtaaacatcgcaggcttcaacacccgtctcccacatctgtttcagttcatcaactaacggtctcatgaacacatccatatcttctctaggagatgatggacttggaatcaataaagtaaataataaggattcagaattcatgtacttccagggtggaaaattatatggaacataaataactacccacaggctctaagagttgctcatgttcccaaatggaataaaaccgtcagtagccaatccaggcctgatatttctaggttcgatggtgaaagacggatgaagccggtcaaactgcttccattcttcagcatctgcaggatgcctaagtatatcgtcttcttttggtctctatgagtaatgccatcgcatgtccccaacagtgtgtcatgagcaatataatcattttagtctccaagtgagtgggaagtaccgtataactttgtgaggaacttttttcccttacctttttttttcacccaacgtgattcgccacatacagggcaaaactctttcttctcattctccttccaaaaatagcacaattatacttgcacacatctattgagtcataactcaaacctagattgctcaatcgcatcttcgactcatagtgcgacttcggtaattttgtcccctctagaaatagttcaatcaagatagacaacaacataacaaaagagtggttactccacctattcaaaatcttgcacaacataagctttaccagcgcattgagggtcgattttttgcaactaggatacaactcagactccatctccttaaacaagtcaccaaactttttgttgtcattgatgggggttcattgaaagaatcagtagtgctagcagattcgtcaagtctaggatcccctctgtaacgtcctgatacttaggcgcgctacagtgatttttcaattacagtgctatctttgctaatcaaagaaattttcttaaaaatcgtgttgaattaaaattttagatttaattactaaattttataaactttcacacatttatttacaaaagtcgggatctcgtatttaacttttacaaaatattcaaaatacatttagttaggtcgcacagtgactacaaaataaaaccatagatgtcctccaggtcgtgccgccatgacatgtacaatatcatcctagctcaaagctcacttctgttcagcatttgcctttcctttacctacacatgaaagtagaactgtgagtcgacagactcagtaagaaaaacatacaacaaataatataatatcgacttgtatctaggcacccatacacctatttacaaggcttaacaaatgagaaagaacgctcttacctaagatacaactatgtaccactgttccacatgcactcagtactgccactgtactagtgttggtagggtatgaaccgtaccccgagtaccactaagtgttgtaccacatgcactctgtacctacccgtactagtgttggtaacaccataatgtatcctttagacgttgtacactataccaatgcattctgtaccgataccgtactagtattggtagtatacgaataacaacaagcatgcatatatatcacacatacatacatttgcatatatatcatatgctctatactattcttacctcgtttctgaattgaagtgagttggctgacttgaatgaaaaatctcgcgctcgatggatgccataatcacataacataatcgggtaaataacacgcctaaaggcctaatctgggaaactcaatcttcaaccaaaggttctaccacagacaactgaaactacaataccctaagtaacagggaatcacccaaccaaggctctgaaatggacacgaatcgacgaaattgattgttcgggaaaccagtcccagaaccggttaaccggtattacaggacctggcaaaccggttaaccggtttgcaccaagtttcctaaacaatccaaaacctgctcaaattgtgtccaaacctcaccaaaatttctagaacagctatattgacctcccacaacatatt

SEQ ID NO: 271935 - DNA, 1018 bp, Cannabis indica
tgaaaccagtttctggtgtgctcggttaggtgtataattctcttcctcatactcttgatcgaattaccaattcatgtacaatcattccttgcatacttgattaatggaaagtaccttaatggctgaatctagatttcattctctctagttaaattcagtttgttttactgtttttatttgcaatcttctttgtgttgagtattgcaagtctgttatagactttgatcaattaagttgttcttgatatttggatattgtgatctgtttgatcacatcacattcctttctcaatcttaggtttaattactttgttaaattttattcatttaaggtaaatactattttggactatgtattttgtaaaagttactaattggactctctgttttgttaaatgacaaaatagatcctatattttctaaaatggtaaaataggaccatgagctcaattttcaacaattttattttttaatataaccaactttaaggcaatttctaacacgaacaaaaacagaaaatgtaaccagttttatcataacatctctagaccagattattattaagttttattttgacaaaaaataagttcacggtcctatttgtataattttagaaatacagggtccattttatcatttaacaaaacagagggtccaattagtaacttttgcaaaacacaaggtccaaaatgatatttacccaaattaatttgttggttactaaagttttgagttttcgactgattaagaagcataattattatttcttaattttcaaatgtatatgttttaattgtattcttataaagttttcacgtgaatggataaaaagcttatagttaagtgtttttcttaaaagtaactacttaaagaaagtaatggtctacacaatttgttaattctcttgatatttagaaaatattatagtattactaatgagagaaagtattgatctaaaaagtagtttttatatttacatttgagtcttcgaatgagttttgtttttataaaaaaaaata

SEQ ID NO: 271936 - DNA, 588 bp, Cannabis indica
aaaattaaaaatttagtaaaaatggtacaattactttaaaaatataaataattataaattccacttaaatcgtggtttcgaaccaaaccaaaccgttcttaatggtttggtttgagaaatttattggtctggtttggtttctaatattcgaaaaactgttatactggtttggttcaaaaactataaaaatccggaccaaaccaatccgtgaacacccctatattgcatatgtacttgtaatgttattattacattattattattgtatgtatttcacaaagaaactttttttttatatgtatatatgaatggatacaaaatacagcaattaatgaagtcatcttatttttagttttatttttttacttgtgaggtgccccacttgtctgccagcatgtgtcctctttgtaaccacatattttgctcaagaaaaattggaacattttccataacaatgggagcagaagcagatcataggaaaaaattagatggaaactatatactttgtttgattctaccctttaaaaagagagattaacaaatgttttacatgttaaaacttcagtgtctgaactaaaatggtctttg

SEQ ID NO: 271937 - DNA, 1939 bp, Cannabis indica
ccactttaccgccattttcccactactttattttttatttttttgtttattttatacatgacagactcacccggttacctgtaatttatctactcttgactatcatttcatatataaatggctatacacgtcgtgcacacgttatgaattatatatatttttttatataacaaaacatttattctgagtaaaaaaaaatagctataaataattaaagatttataacatagagctagctgtaggaatttttatcatttcaataaaataaaagaaatagtaaaagaaagataaagacgaagaatggtagatggagtagtcttaccaatatataagaaagtggaaatttacgtacaatctcacacggtttcaattctgactgtggaatgaggtaaggtacaattcacgatgcaaatctaatctctgctgtgctgtgctgctttctgtttttattgggtttttttagtgaacaaattacttgtcactttactgccgagctgagatactttaattaacacataatgtaaaaattctgcaaatccacaattcttgcgtgtattttccattacacgtcaaagtactatattttactatttactaataataacttccatttttttttttttttgaaaagagaaagaggcctttgtcttagactgacctccccccgttatgtatagaaaccctcacttgtggcagaagaaaaccgtggtgttcaaaaaggaaaagcaaaaagaaaataccgataaaaaattctccttaggggctaataaaacagcacctgaaatgataaaaatgtctaaagaagtgttgtccactctctacacagatataaaaagaatactatatgttaatgcaccaatgtcaggaattaccaacgtcaggatctttccattcaccaatgtcaggtattaccatatgttaatgcattttccaattgatattggcattaagtcatcaaacatgccattgaactgaacaatacagtttttgaagccattaaaagtaattttaacttttgaattatgtcacctaggttcctttacaaacctatagttccaattacattaatttttcttcatttttcatttcatatttcttcctagaagagtgcaatagcataggcagaaagaatctgttcccaaagtaagccttacatgtcaaataaattatcaagggttgtcaaaatttaatttctcaaattattcattttgaaactagaggtcccacaaaaccctatattctaagggaaactcgccaaattgaatataataccccgattgagaaacttaatgaattcttaaatggtggcctcaggtgcttgacatcaatagagtggccaattaaatgctaattacttttttaaaaaaagaaagaaaatacaagaaaccattcaagctaaaatattcatgatagtcaaatccccttactatatgttccatcttgtccacgaaaccattgcctagagaaaacaaagtctcttttagaatgccacctgtggaataatcaaatagaagttaatttatgttgtaaaaacaaaacaaaaggaacagaggccaatgtatccaccggtcaaaacaaccatctaactgatcagccaatcaataagtatacagaaaccatgatcatatttatcaacattaccgtgtcagatatttcggatcatatgttccatacacaacatcaatgtgtccatcaaaagaatcgatcagctccaaatctcctgtcagcatatcccacctgtaaatataaaattattaggtgaaagttaattttatcaagcatccagtaatcaaatcaacttactcatatctctggtgtcggtcaaggtttaaaatcacttcaaaagcagtgtctgcactagcatctaaaacagcagcagacttcacaagaacatttttctcattctacaaacaggcacacaatgttgacttcttttaat

SEQ ID NO: 271938 - DNA, 548 bp, Cannabis indica
ctcctaccagcctagaagacccgaacaaagagcttgggactctagctatcttaatacttctctttttgtctttatttttaatatatatctatccggccataaggccttttttaagacatcatgacccgccaagcggtttttaaacttggaattatttttcattttacaaacaataggctgaccgggcagcttttaatcccagtattacatggttttgttatctttaatgaatttcattctctgtttataatcatcatgcaactgtgtttgttttatctttaccaaatgctttgtacaggtataggtgccccctaagtgaccgagcagacttatgactcttggtcactcgttactttttgtaagtatgcttttttgtctattcagggttttgggtttcaccaaaccttttgtacgcaatggatggtaaattaacaacatgctattaatttcaactcagtttgaattttgaaataagcatctttattcatttattgatcgaaaatgtgtttgttactgtcgtaacttacatcagagctatttgatctaat

SEQ ID NO: 271939 - DNA, 1491 bp, Cannabis indica
gatgatagccttctcttcagctcagcctccatcgaagctacgacatctatccaaaacattcttcacgattatagccgtgcgtctggacagctagttaactttgctaaatcggcattatatttctctccgaatactgcccctgagctccagcatacaatcgcttcgcttcttggcattcctattagtgaaactatggaaaaatatttgggccttcctcaaacttttggacgatctaaaaaagatgcattcaattacattaacgatcgtgtctggtctcatttaaataaatggaactctaaatttttttccaaaggtggcaaagaagtccttctaaaatcggttgttcaagccattccatcttatgccatggcttgctttaaacttcctgcctcctttcattcaaagattgaatcactcatggctcgattttggtggggcggaactgagcataacaggaagattcattggaaaacatggtccttcctttgttattcaaaatttcatggaggtcttggatttcgttcaatgaaggctttcaaccaggcgatgttggccaaacaagcttggcggctactccaatatcctcactctcttgtggctacccttcttaaagctcgttatttcccacataccagttttcttcactctggcaagggtcatagaccttcccttgtttggtctagtattaattggggcaaagagcttctccagtcaggcctcagaacatcgattggtgatggtactaccattaacatcttcaatgacgcttggattcctggctatggcaaacttcagttccttcggttttactccaatggcaatagaactgtggctgaccttctcacccctacaaaagaatggaaccatgcccttatccaatccatttttcccacagacatccaacaagctatagaagccatcccccttcattccatccccacccaggatactcacttttggtccctcacccctcatggatcctatacggttaactcaggctaccatctcgcccatagtcaacttcatcacaatgaccctaccccatcggaaaccaattcttcaactacatggtggaaacatctatggacccttcccctgcctccaaaagtgaaacatttcctctggcgcgtttgtcatgatatactcccaactagccacaacctgttcaataggaaaaccatctgttccccacattgcagtcggtgtcactatcataatgagaccctagaacacgctctcttcagatgtcccactgcccagaaggtatggaaattaactgactttaatgattttgtttctaaacactctgcacttcattgtatagatttattatatattgctgccaatgaatttgttgctggacattaccttctctttgcttgtttgctttggaagttatggaactgcaggaacaattggttacatgctggcataactcttcccccagaacaggtcctttgtgatgccacaaactaccttcaccaatactcg

SEQ ID NO: 271940 - DNA, 3033 bp, Cannabis indica
tatatatatatatatatagaagccccattctctggttataagtgaaatagttcttggttcgttctgccatcctacccaatgaatcattaggattcattttcaatagaatcttatgcactcacgggttttgtcgtccccatcatttcacaattaatgattaggtttgacctgtggatccatttgttgatgttgaaaagttagaccctcaaatccttttgactcccaagttgcaaaacaaaattgtttagtgaggataatgactataactaactcctactaacacatttaatgtagaattataggagaaacttttgaggaatttcgtaactaaagctttctattttctaacacctatcaaaccttgtggatctcatgtgtatggattagatcaacaaggttcatgacttcacggtcattcatgtatctaaaatgtgaaaaattctagctacaggcatgatcttctacacaatttttagaaatataatcatttatcttttcagttagccttgctagattggatttagtctctagaagtggtgtttcccatgaccaaacgtcttcccaaaatctaatgttttcatcgttgccaaccttgaatttacaaactatataaacaccttgtaaagaagcaatgcctttcttttccttttttttttcccaatacaaactccaagaagttccacacctcataatcataattgcatttgaatggaagtttttggatttgctatggaaaagaagaatattgggaacaaatagaggaagtggattgcatggtgttcgagattttttttttcctttatcttcaccaacgggggactagggggagggttcaaggggtctagaggagatcctttgtcaactttcctttgtcgatattatggaatggttggtggatatagtaaaggaagcaaatatgttatgtggcattagagtgggaagagagagataaggggaagagagagatgagggtgtgatatgagaaatcgacctttaaagtatttagggctgccgtaggagatagtcctttgaaagtgagttttgggagtcggggataagtatggtttttgaaagacttccaagatgaagcaacatatttttttaaaggagaaagattaacccttattcaatcattattaccattcaatcatttctcatccttgggaagcatgtgaatccctcatgaagatagtttcatggaagataagaagtgctttattctctaaaaggagggattgcaaactttgactagataatttttggttttacaagaaagaaggttgatgtcaaattaggttgtagaagagtacataagtaaagacactagtcacttggtgtttaaagtggagttctgggagccaatcttggcgaagtaaactaaatgacttgatggatggaaatgtttattcttgtctagaagggatgattaacactcatagagtccgttctttcatctctaccaacctatactctcacttttttgtgctctgaagacaattatcacttagatggaaaagatgatgcgagattttatatgggaaggggagatcttttggggggtgatcattttgtaacttggaatgcaatatgagttgaaggaggaatgtgcattggaaggctcgaaatgagaaacaaattattgttgatgaaatggttgtgtagattttcttgaaggaaactttctttgacagtcattaaaagtcgatatggaatagctgataatttgcggtactccaaaaaaggtgagagattgtcatctaaaggcccctggagaggaatagcaacattatatgatggttttttgatgttggtttattttaaggttgggagggggattgaatttggttttgggaatgtgctttgattggggactcaacattgaaattcattccctaacttaacagtaatttctatggctcaaaatgtatgcattaaggatatggtggttaaagtgggtgggggagttagtttcgacacaaatatgaactttaattttaaaaggttcctaatagacaagagaggtgctaagtctgcaaaggtgcaacaattagagcactttactctgattaatgtggtggaggacagttgtgttcggagttcagagcccagtggagtggaaggctgaagtaggctaggccaaggctttatggaagagttgtgtgttcctgcaaaggtgaaagtgtttggatcgctagtaggagaattgaatgtccacgacaaattgcaacaaagaagaccacaccacgtgtcatccccatgttggtgtgggagaccatcaatcatttatttgtggagtgtactttatcttagaactatggtcaagaatacttttggaattcgggattctttgggttttgtttgccctctggcttgcatatgatcgagagcaaactggtagtgggtaggtgtacgctgaaattgtggctggcagtagtgctagctattatgtgggcggcatgcagtgagagaaacactagaatatttgaggtgaggtatgcagtagagggctgcgagaaagataaaattttgggtagcaacttggacttttaaatcaagatatttgaatagctttcttttttagatttgtgtagtgtagaaagtggataacctattgtactggatgttttgttctagtggtcagtcaggtattgagtttctcaaatcacttccttaggaaattcttgtttattctttttctttttttcgtgtcttcttgggagtcccaagttttatgtaaccatggtgtttctttgcaatatgttttctaataaatttgggtggaggtcagtcaaagacatttgacctcagtctctttttttttttgtaaaaaataaatattgtcttggacaaaatagtcatgaagaaataatttctttggaacattatgtataagtttttgtttggatttgtggtattatatttgcacctcggaatttgattaaggcaccccataattattaaaaaattgatggaatatttttttaaaaggcttatacttttggaaaattatacgatgcatcctataaaaaggtg

SEQ ID NO: 271941 - DNA, 1351 bp, Cannabis indica
aaagaaagaaagaaaagccggtataaccctacagttgagggggcaaaaggaaaggagagaagaagacgacgacgacgactttagttttttcaaaaaaaaaaaacgaaaaaaataagttattgtgaattagattttagcaacttaggacagaaacatttggagcttttcttggctgcccaggttggcagatgagtggcacacacaccacacttgccttcactagtggcagtatctggtcaaaaaaatattatgtgatttttaagaaatttttaagaacaacaaactaaaactactactattactactcagaaactccatgtcctttcctttcattgttaaagaatatattattcccctttaaaaaatggggtaataattaaaaagaagaagaagaagactattattggtcatggagaaaaattgttgttgtggtaacaaaatttgcctcagttattattattccttacgtttttgccttaaagtggcttaaattgtaatggcatgtgtttgttgcatccctaattacttgtggattatttttctctattttatttgcttcttcgataaaatataaagaaatttcctttttgctatataaattagcaaattaattcttaagtttttttcgcatagtaacttgagtcttaagtttctactgttgtgtcttttgaacggtagatgaagttgaatataagtattattaaggttaaatgtgatgttggaatttttttatttgattttatttttaatttttttgtgaaacgatccgagaataagatagttgattagactcgtttttttaattttaatcttggttgtgtcttcaatgcgggagatgtttcgattgtattgcagactattattttaacttattggtattaataaaaagaattgtataaataaaaattatgctactatcactttcttttttttttttcctctcattaagggtaggatttttgcttttctatttaaatttttctaatcacataaaaattgtagtatttgtctttgttagatctcaaagtttttaaaaagttatttttaatatttttgatcctttggcaaatatatttatatttttgtaatgaaaataattattactcttaaattttgtatctatataatgaacagataattattttgaagaaaatactttagaaagtgtttgattttctccctctcctttctttctccatatttctttttatacatttttatgtggaatctaatttctaaatatgatgttttgggttgaaagacctaagtctcgtctagagttaaatgatacaaatagctaagattcatttcagacactttggcaaacccatggccattatcgtcgcttcag

SEQ ID NO: 271942 - DNA, 741 bp, Cannabis indica
atataaaagatcgttgaactgcatatcattcttaacttttctccacccctatcagatcaaaagatctttttattaaacaaattctcaataattattttagaattaacaattattcataataatttctagtgtttatgtagtaataactctgtaaagagtttaaataactatagaatttgtatcaataataaaaacaagtacacatacaaagaaaataaatataacaattggtaattgatttataagataaagtactgaagctcaactcatagattgcaaaaataaattttattataaaccaaaaaaaattgtttgcaatattatgagaaacgaacagggaataaaatcccaaacttgaaatccaaattgtttgaaaaattaaacaattaattcaaaaaattaaatgagcttcttctttatcatagacgacctccatccacaatccagatttcagatccaactcgctaagacaacatctgagtttaggaagcttaagctataagaagaataataaaaaaggttagtagtccagaattaataatccaaatggataataattcactaaaacacatcagtttataaagaaataccttgtttctttgcaagaagcttaggacattgggatttccaatgtcctttctcattgcagtagaaacattttccttttggtgtatcaccagaagctccagcctttttgttcttagctgctttcgcagcttgagctcgcttcttggcattttt

SEQ ID NO: 271943 - DNA, 748 bp, Cannabis indica
taactcttaattcttaaacctaaagatcaacccggctactaattttccatatttgggttacctatatactcagctatcccgtagattagtttagtctttactttcatgcacgaagctatataggtttcgtaataatataagtacagtacatttgaaatttccttatatcttcaaaaccagttcttgaaaactgcttcaccagtactagtactaacgaagttaaaaccttctccaatgggcctggaaaatgatgagtgtgacgagtgtggagatgactcaccctcataactattttgtacgttcacattcaaagccatcgaccctgagctattgttaatattattgcttgaagaagagtgaccaacattattaacatacgatctaagagatggagtagtagcattaggagtaaagttcattgtcgtatgtgaatgagattgagtagtttgctgctgtgtttgaagatcctgtatttcttcaaccattggcttccacagccttacccttgagtttataaaccaattcgaaacctgcccaaatgaaaattaatcagttacagtagtgttacacaacagtacttaaaaattaatgcacgattcaattaatggagaaagattcacttgagtcctcgatagcccagtttgttgagccagcatttgcttctccgaatcggtaggataccttaacacaaaacaacatgacgttacttataatttgtttttaatattttaatatccaaaaaaaaaaa

SEQ ID NO: 271944 - DNA, 576 bp, Cannabis indica
ctcctcagcttcctttttagccaagtccgcctccgccctcaaggtgtcggagagagccgcactcttggaagtagcagatttagcccgggagtaagtataagccaacttcaaaccgacctgcacaaagaaaaaaagtcagcatatggagctaagtgtggaaagttaaaagggaaatatcagaagagaccaacacatccagagatgagtcactatcaccaccagccagttgctcactgacctcgggaaccagccggttcatataattggacagcatctccttgccctttttggcctctggcagcacgggcaaaggtggagttggtgcctgcacccgctcaggaacactcctgaccagttcagacccagtcgttggtggtctagactcctttgacttggcatatttggggtagaagggttagcagcagtcagctcctcgaaaaaggtcattaacctctccagaaggtctcttctttgaggactcctcaccgcccttaagcttcttggccggaggaaaggcgctagagcttccgcccatccttcttccttacgagcatcaagcatctgtcgagacatgtc

SEQ ID NO: 271945 - DNA, 2391 bp, Cannabis indica
acaactcctcccatgtgtcactattaagtatgtcctcccactttttggaatttcgttcagatcgcaataatccaccaagagattttattgctaatgggaggcctttgcacttgtctactattgatctacccaatacctccaaatctttgtaaaagtgaaggttagcattgtttccgaaagcatgtttgacaaacaattgccaacaatcttcatttgacaaaattcggagatgatgaatattcccagtggtcatagtagaggcgacattttcgcttcgggtagtcacaacaattttacttccatttgctccagaatcgaagcagctctttaaagtgtcccacaaagaataggactcattccaaacatcatcatgaacaaacataaacttcttccccttcaatacttccttcaattttcttcgaatttcgtctgggttctcaatatcacactttttgaaagtgaccccctcaaagatctctcttgtaatttttgaaatatcaaactcatctgacacagtaatccatgctcttagctcaaaatgttttctaactcgatcatcgttgtaaacaagctgagcaagtgtggttttgccaacaccacccatcccgacaattgggatgacagaaatggcatttcctccttcaaccatatcatctttgagcaacagatccacaatggtttccttttcagcatgcctcccataaacatctgattcttcgactaaaggagcaggtggcctttgagtagaattgttttggagacattctctcaagccaagagcatccttttgagcaagaagatcatctagtttaacaaggatctcagtggcatcactctgtacagctttttgaaagttaaacacaaagggtggcatggatctcagttggtgaaacaccttggttgcgcgactgccaagttgatcacgtttaatcttggatcggagagcttcatagtccatcatgtccaccaagtcattggcttgatagatgacatcttgaagcttgaaaagccacttgttgacattgtcatctcgaagttgcttctcctcagcatcattgaagagtgcattagctgataagagcttagtgttcaacttgtccagcagcttcagaatgggcttattctttccctgaaacagctgggatatttgctcagacaccaatttctcaaacaagaactcaagtgaagaagagaccaaagcaccaacaaccaattcagcagccatagtgggcaacaaaaatcgaatcaagctttttttagcagcaaagaatgaatagtattggatgcagttggtttgattataataatttgtttgttcattaaattttttttcagttgtttaatctgattatatttatttaataagtaagctctctctcactctccattccataaagctattgataattaaattaaatggtccaccgttttctcttttatatattattaattaagttggtaagtgggttggttttattaattaaaagtaaacttgggttgtattatggaatctagtgtagtagaactagtaaaagagtatagtaatgcaagcaaaacaactgtcatcatgtgcccctttagtttaattaattaattttacactaatataggattcctaatagtaattttttcatggttgaattgatttgtgtgtcactgcaatgcgactgtgttgaccaataaatagagcataggatattgatttgtattaatattcatgattatcttattatcattggaatggggttacttacactacaactccaatcatcaattttcattttgccaaacaaacactcagcctaaaacatttcatcttttcaatttaaaataatttcatttgatcaacctccatccatttaaactcaaaactaaaataatgtcaagaacaaaacacacaaccaaaaaacaaagtccaagattgaaatccattactaacaaagtctttctctcatttcttactatacttaaatcaaatcatttgaagtcataggaaatgtcccttcatcaaatataattcaaagtgaggtcattcacctcaaaattttcaaaggaggtcttttacctaaaaaatctcaagtaaggttctcttatattaaaatgctaaatgaaatcattcacctcaaaacgacaaaataaattaaaattagaactacgtttgacttgattcttataaaaggatacatgactaagtgcagtcaccaaaccacaaaacggcataaaacagaaatctcaaaattttaaaaaatatcatatttcagtgctaatccaatatgttaacaccatacttaataattttgcaaatagcataaaaatttggtataggaaaagaattcaattgatggcatttcaagtctactggtgtgtgtgcctgttaggctaaaattagtc

SEQ ID NO: 271946 - DNA, 604 bp, Cannabis indica
aggatagggacctgggaaacagaactaggacatggacctattacccgacaaagacccgaacttgaacctagtacccagctcgtgacccggcaccaaaaatggaaccagagcttagacaaaacctgtagtcgcagtctggattcgggacctagaccaagacccgaaccctgacgaggaccagaacccacacccggacctgaacaaagtcccaaaccaaaaagttgacccgaacccgtaccctgtgaccctaaattggaaccaaaaaatgaagttgaccaggactggaactaggacttggactttgaatcataactgaaattggacctagatccaaaaccgtaaccagaccaggacccgaactccaaatcaaacgtagacccgaattgggagccgaacccagatcccaacccaaacctatactcaggacatgaacccgaacctaaactcagacccaaacttggaaccagactaggtacacaggaccagggtaaggacctaaaaccgcaccctagtctcgatcctgaaccaaaactcaaaaacgggaccagggattcaaaaaacggggcctagaatagaccagtagtcggtgtctagatctgggact

SEQ ID NO: 271947 - DNA, 620 bp, Cannabis indica
tatgtgttatagatatcccgtggagttacgaatatagtctagagttcaaaagatataaaagatctttgaactgcatagattgtttcttaacttcttccacccctatcagatcaaaagatcttttattaaacaaaatcttaataattgtttaagaattaacaattattgataaacattgaatttaaattctaagtgtttacgtgttattatctctttgcaaagattgatataccatatattttgtatcaataataaaacacaaaacacataaaacatgataaacatataaatataatatggtattagcatacaagttaaagaaaatatgaagctcaattaatgcataaaagcaattaataatgaaaatctcttaaagagaaaattttattaatactctcaaaataacataatgaattatctgcaatatatgaaatagggataaaaaaatccaatactaatgttttaaattaaattcttcattgattgaaacaattaactcaaaatttaaagaagataacgagcttcatcttcaacttggacaatctttacccttctgtccatccatcagacacaactcgctaggatagccatctaagtttaagcagctggagctgaaataa

SEQ ID NO: 271948 - DNA, 1228 bp, Cannabis indica
tttttgagctttaagtgggtgaatgttttaggtttgggatgcctctgttaagaacacaacggagaagacgatggtgagggagatgaagatttagattctgggttttgttcttttgagtgtttcaatttctcagagtttattttttaattcaaagaaaaagaaatggaaaagaaataaatgttaaaaaacaaaaattaatgacatggacaaatgaatgagtgacacgtggacactaacctgacacataacggagagataccgacggaagttccagagtagtgacggaaggtatttttactgccaaaaataggacttaggtatttatctgctactcggcataaaacttaggtatttacgccagaaactactcttttttttatttacattaagttttacattacacttttggagaagacttcaaaagatgagagggaaggaataataaaaatataatttataagtttgaaaaataagtagcatatagttatatttgaaaaaataaaaaatactgatttaaatatcttgtagctattatatattatttgataaggaaattaattttatggattattctttgatatcccaaaatttgcactaatgatgtcgcatatagcaagataacatgtgataagtatttttgatcttgggtggggcatgtcttttgattgtaccaaccagaccaaatttaaaccgattaatcaaaatatcgctcttcaataattatcattcgaggaaaatcgagatacataacataccgagaagactaaacgtccgagcaactctattgcccaaccagaagaacacgttgagtaaagatctcctacatatcttttttatttgtttccacaaatatagccaacaaaatttttatttttgtgggattggctggctagattgagagattcgtggaattctatatttgaattcctttgccaactaattccttctaaatttgggatactcatttgttgtttcgatttttttagcaattgatgtatggaatttcctttataaatagtgaagccatttcactgaagagggggactttttgccattcttaaactcgcgaacactgtcaaaataattgtacactctttgagaactattaagaaactcacctgaatagaacttgtgatcttgatagtttttctaagtaatataactaaaaggggagtaggctattgccgctataaggggctgaacctttataaatagggaatattgtcgg

SEQ ID NO: 271949 - DNA, 657 bp, Cannabis indica
aagtaaaacgcagagtgactgcccgcccagaaaatcagaagtccatcatcacctgacatcgagtttatctcagacatgatagcctttccttttccagcaaagggataagatgaccgaacaggtgaaatgggctcccttatgcgaagtgcatgttcaacaggcctgggcgtgcccgagagtttcttcttcctcttcaatggtgtcctgctcagcttcagcctcagcctcggcttcatctttaggattcatagcctcctgagcatactgcttggccctggcacctcccttcaacttagcctctcgcttcagttgaatcaactcattcttcggatgagttcgttcaggccggccagcatcagacttccccttcttccccgccacggacttaggagaaaagtcctctgggtaaagcccgtactgcaccagattctcatcagaggtcaactggataatattcctgtcttcctccagcaaccgggcaagtttttgagctctatccctaagagcaagagtgaggggaggacggtgatatgttgggatctgctgaaaccgtgtcccggtgatgctaggatccttcaccatgaagtactcatcaacaaaacgccctattttgctgatggccttatcatccgtaccgctcaaccacttgaagcctgg

SEQ ID NO: 271950 - DNA, 920 bp, Cannabis indica
cgtagacctacgtgttgctctcacacgtctaaagacaataaggccttagaatggttcatctcggttatggttactgagtccaacctgatcatgccttgagcgcataatcctcaaatctcaatacacttaacatggcatggcatcttcacacatttagtactagggtaataaccctaggctaacagaccgttcctattagggtaataaccctaatcccggttactaaacaatcatacatatcattttcaacataagtgccactgcacatactctacgtgctaactactatcttacctgttgtcccgcaatactagagatttcgaatcctcgggtgctcttgatcaggtgccggtaatcctagtcacacaaatctgggatttcacaactagggttaacccctgatttcaaacttataaaatattttcatggcatttaaaatttagataatcacatagagctcgaaacgagctttccaacgatataaagaactcccaaatcggagttcggaatcaaaagttatgagattccaaagttacactcaaactgccctggaaatcgaggacggaccgcagcatgcccaagccatgccgcggcacctgggacaaaatcccaagtttcccaaaaggaagcgggtcgtggcatgctcaacccatgccgcggcacctgggttgaaaacccagaaaaccaacaagaacatcaagttacaagcaattaacacccaaatatcaagttacaagcaattattaaagggtcaaaacccataatccatgcattaatttcccaactataaacacccaaatcagattacttcaaacacataaaattcatgccttaacttaacaaagttcaagctcaaacacaagaatttcaatctaatcaagtttataattccagctacaaactcaatcaatttcacaaag

SEQ ID NO: 271951 - DNA, 1414 bp, Cannabis indica
ccactcaatcaattcctccaaattatatataacagagaaaattcaagtatttcattaattaaaaaatgggacaatagaatgccaatgattcacactacaataccattcacataaaattaaataaataaaaaatcccaaaaaatgaacaaataacaagttttgtaagatcaccaactcacaaatataattacattatatatgtatgtatagatttaaaagcagtaaatgtatgtaatcatttcttatatccacatacataattaagctgccatgatagtaaatattaggctccaactcatagaagctaacaaaaatttaacaaatcgaaattaaaagtaacttagttataagaatttccactgtttgtgtctctgtaattgattttttaaattcaaattatttattaagtaatggagtcataataagatcaacgctaggtagttatgatgtattatcttcagaaacaaaacagaaaatttaggaggaaagaaaccctaaggaattgaaaagaagagagaaaaattgaaaaagtggacctggagaggctgatcgacttgagagaggagatcggaggagtgttgaggtaaaagagagagaagagcagagagagcggtctcagtgtgctttggaggaattctcctcatcagtcccattgctgcctccatattttctttctcactttctttcgaaccaaacagaaaaaacttgaatggagaaaagccgttgttatgaatatgatatgatgagatatgtgagaggaaggaataaaccttttttttttaaaaaaaaaaaataataataataattataatataaaaaattattattattttttggggacacaattctcctagtgagaagtaggtatgcacacgagtcggagaatttgcgaagaatacttttcatctcaatcaccgttaaggatgaaattatttgtgagaaagtctttcaatctatatatatatataatataaaggaaaggacaaaataaatttaggtagtattttagaatttttttattctattttcaaaattttgttagtttttttcttattttgtttagaaaacaactacaaaaatacttggaactaaatgtcccatattgtttataaatgatgtaggcatcattcatgtaggttataaatattattctttttaagtcatattaattcatccaaaagtatttttgttcatgggtagttgattagtttcttaccaagtttttattatttaatgtcttatagttttttatgtttcatctaatatatatttcattatttatatttttaaaagtaattatttaataaatatgtgttttataatttttttacatttgatgtaatatataataataataatatacaatttattataagttaattttttttagattttatatataattctatatttt

SEQ ID NO: 271952 - DNA, 834 bp, Cannabis indica
tgacttaaataaaactctatttcaatgtaatcttttatattcatttatcaataaagaaacagatttattttcaatacttattaaatgtgttatttggttcatgtgatcatttatttgatttataaatttatccaaatccttatcacattgatattcttatttattgtgttgtcaacacagtggaagtaattaagattgtgcgattaaatgtattcctatgatttatcagtacataggatttaactgataggatcatctgcaatgtagtttacttgcaccttggataaggactatgtcatttccagggcattgcttaaagtaagcttggattggatgtatgaaatatgcatcagaaggaaccaatattgaacttggatcagatatgataaacttaccgtaagatctattcaattcaatatcacctagttgatcttagatcaaatgatctcaatccagagatggttaggttctagttcagttgaattatttatgttctccagtctattcattaaagttgaccaatagatcttctcgtgacatatagattaaggacatggtagttcaattgagtgggagcactaatcatagatacagaatctataacttctatctatatgaagaaaccagaaggttataagcttccagagcaggaagagaaagtttgcaaactcaataggttcatttatggacttaagcaagcttctcgctcttggaataaaaggtttgatgaaataatcaaaacctacggctttcaccaaaatgaagatgaaccttgtgtttaccaactcaaggataatctagtggtagtatttctagtcatttatgttgatgata

SEQ ID NO: 271953 - DNA, 1167 bp, Cannabis indica
ttttatgggttccgggcccaccctgccaatgatggggtggtcccgtataataggcaaactcatgttaaggagtatcgccatcgttttttcttctcttccgggttccgagcggtggaacatccggagctcctcacggagtgggttaggattcccccttacgagcggaccgcgcctactcaggtctttcttcggagagcccaggccttcgcctcttatgaccgggcggacctcgacgtcgggggcctggttacgacggagaattgccggaaggcaaaactcatcctgccgcaccaatccgtggaggactctaacctttccagggttatctgtcccaatgtgagggcgcctgccgcggagaagaccttccgggacgagatcatcgccactgccgagaagaagtaccaggactatctctaccggaaggctcaggagaaagcctactctaaggctcaagcagcttccgggaggccacttcgtgtggggagcccggtcgagaggagaagccaggcgatcgctgggaagccccttcatattggggactcggcggagagaagggctcccaggccaaagccttcggctcaggagccgaacactggggctcctggcgccagcacttccggctccggtggtaagtctcctttagcagttcattacgtcccttctgttggcgaatatgccagtcttaggcctgtagggttcgatgagcgtctttataggtttaggatgccctcgacccggtggggagaccatatgaaggagttttatttttccaacttaggagatttcctaggtcggtcccggatgggttctggtcctccggagcccgtccccttagacccttcagcttatatttcatccagctggttccggccttcggacagctatctcggagacgatgctgccagcattaagattcggaactttgctagggccgaattagagagtcagggtaggactagcttgtttgctatatctgagtgtttgttgtttcccacggatgttctaacacttgccttctttcttttgttgtagcaggcgtttccatggacgccatattggccgaacttgccggggttcacactcctgaagctccccctccctttacttcttcccagatggccccccctttaaaggtttcttccagtgctcctccagacactattgact

SEQ ID NO: 271954 - DNA, 599 bp, Cannabis indica
ggacctggacccagacccaaaacagaaacctgaaccaaaatgttatcaggaccttgaaacatgatcgagatagtgaccaggatctggaccaagactgggacccaaaactagaccagaacccagccccaaaactcgtgctccaactcagtccggacccagactaagattgagacttgaacctgaactcgaactcgaactcgggactcgatcctggacctagaccaagcccctaacctcaactgggattcagaccaggacattgacacgaacccagacccggaccggaataccaactcagacccagaccaggatcaaaacacaggacctggaccaccagacgcagaccctgacccgagacacgaacctcgaccaaaaccggaatctgaaaaacccgtcacccggactcaaactaagactcagaccgcgaccacaacctggacccaaacccggacccagaaccaaacccagacccagaatcagaattggaactatgactagaacccatagctgagagcagaaccgaacccaaaccataacccaaattcagataagaacttggacagagaccttgactaggacagggacctgagacttaggac

SEQ ID NO: 271955 - DNA, 1403 bp, Cannabis indica
ttaggacataaaacccaacaacctgttgttaaacttatgagcaatgcggtccacgagaagggaatcccaaaataaaaattaaggcggtagtcttggaaggtgaataatgtactacgttcaaccctaagtactgtgggagaccaaccacattgattaccttaggatgctccttcaccgacttctcaaggggtagtgttttgaagatattgtgcttgatccaagcgatcccaggccttatccttatctagaacggtaatatgttgccaagaagaatacttgggaatcttgtaaccacaagtttacttcttatcggtgagaaggcccaccgatcgcaggttggtctcattgaaaaggaactcgcatgattaaagaccgtagggaagagttatcaagtgcctatgccgactgaccatctcagaggtaggagtaggcctcgtaaagagagctagaaaaacaaacaaaacattggtcagaaacttgaaaaataaggattgatataaatgagaaagaggaaaacaatcacttacgaagtttgcgaaaggtgcttgtgccgatgggggaaagaccagatgtccagaagaagttatccttgaaggataatttatttggcaagtccacaatgattttaggcttgctagaatgagtaccgaggtagtagaagcccactgcagcgttcttccttgacggaatgtccttaatcgagtaaagatactcaatttctactagtgtgggacacccccagttcaaattttcgtacaagaccttaaaactagcgagaatcacgtaggagatgggattcagctagaatggggcaactccaaggtgatttatgtagtccttgaagtagtctcaaaaaggaagtgtggatcctgtactgatatgctcaaggctccaggcacccataccagtcgaaccactggtactagtcttaccactggtccctgggcactgcttgaaaaatgcacaggagggaaacaactgaaatcaccctctcatactgatctaactttgcatgattgcccaagttcgatcccacaggtcttcaacaaatcgcttgtgtagcctgagatagatcgcaccttcgattctatcaactcagcttcaaaggtgacgttggggacctggggagtctttgatgtacgtggcttaggaggcataatttcaaaattcaagtcactggttcaaaagcaatcgtgacgttgggtaaaaacaaaggcttttctataggaataaaggacacgctgcaaggttctggccaggctgcttctcgcaagaatcgacatttgccttcggagatttcttgcaagaaacgcctgtagcgactagcaatatctccctggtgggttctcactacgtgttccctaaccctagaatcattcaactctaatttggaagtgggtttt

SEQ ID NO: 271956 - DNA, 4413 bp, Cannabis indica
acatcctttctaccaggaaccactgctatagcatcagagtcacctgtgaacaatttgcagtttttcagtctctttcaaggaaaaagagagtaaaaagtgatggcagaaggaatgaaaccagggtacttagtcttgtacaaatacaacatacctagttcattggagcaaattgaatcaagttgtaccctttcatgaaatttataagcttcacaacagatcaagactggaactcggaatgcatgagcaaccatagctacagatgcagtgccaactctagaatatacagttccatttgacaatacagaagcagcccccaaaattacttttgtcacatcatgcataacataagaaacagcatttatatgagtgtatgtacaactcaatcccttagacaccagcctccgaactaatgcttgaccttcaaactttgggcgtgagtctactaccacaactcggaactgcttcccaagctcatgggcatacaacagagtcatctcaaccacacaagatgatccatacgtgagaagaacatccccatctctaaccttcgtagcagcatgccttactatgactttgccagcaattagtatcttctcatttataaatgtgtcaatatctgcacaaattgcagcttttgcttctgactcagaaagtgaatgtcctaaattggcaatatgactcttcaaatatctaattgcatttcccatgctgatagaaagtggcctgcattcagtaaaaaaggaaatatagctattgagtttggcagttaagtccctgtaaagacttttctctggtggagtggagtagtctctaaatgcttcctgcaatgattgaagcatggcaatacagcgagcattccctccagaaagatctccagccaaatactgtaatccaacctgaaaaatatcagcgcatacatcattacacgagcgaataatgtcattcaagccctgttagatttactaaatagtgaaaggtatctcttcactgtaatatttactttcagtttaaaatatataaataatgtgttttctgttgtaggttcagagttaagttagcaagagaatcacatacgtaacacacaaaaatgaatatgctcagagaatatgtgcccaaacccaaaaatggcgtgaacatacaagcatgcataggacaacaaaaacggaaaacagaacattatttttttaccttgtacaactacgacttgatacatgttaaaacaattcccaactatttccaaatccattaatatcacaaataaaaaggatctactaatttcccctttcctcaaatttcacaaataaaccaaacgctttcttaagcactgaatgaaaagctatatggcaaaacacagaacaagactaacaatcttgaatgacttaaaggtctgtactgtaaccaacaattcaaggagacattaagataaccctcttggtagtgatcagccatgttgtttgcaacaacaaaatctgagtttgagtcctcgtgggtacctacataacacaattattttaattttctagtctctagtagattaaggcggagccttgtttttttttaaaaaaatgacttaaatgttagtttgcaactattattaggcatgcaacgaaatgacaccatcacactatttccaatcacaagaacgtttgtgcatgcttgttgttttctcaggtattttctagaattaacctgatgttcacattacttcaataagaaatgtctagtttttttgagcttgtctgagtggcaaacaataaaccatacacaagatttaccaaaactgaacataaaatattgtaagcctcatcaacaactgtcaatgatgaatggctgatggctgtcattacattcatagataccttataaattgcaggatgtattggctcaagttggaaaaaccttgattgaagatcaggaagttgggtcccatgttcatactggggtaaatgtagaaacaattcaactctgtttttagcttcagtttgatagaacaatgcacgcttttttgccttctccactcgttgcttatcatcaaattgcatgcgtggtggaggtgcatctttctttctctctttatctgatagataatcacctccttttttatcagaagcagccactgaaggtgcaatagaagaagactctttcctcggtgtaggctgcttcacagatttattggaagcaactctaccagatactgcagcagatttgcttccatctacaattaccatgaagaagaggaacaataaacacagattaattttaaaaaactccattgcaaacaaagcacctagctcacaaaaatatgcatataatcacatttaagaaaatgctacaggaaaacattacaaagcatgatgcctgtacgaaagacatgctactcatatgccaaatgcagatgaacatcacgcaacaaaactaccaagcatcatggcaattacggtagtgaaaaattccagcaatagaataatgaccagataacctattcaagggcagagagaattagagctcatgattcttctctctctgtatgcttctattcaagaattaattaattgaagcaggaaggcaaaccaatttaaacagcatataacgtaacaatctcttgtctctccagcaaaggggattaaatttaatttagacaagaaatcatcttaccttagaacgaaaagagaaacagatagagaaagagaggcaataacgaagagagaaacataatgagaggaataatcgaatagtaaatgaaccttttgcagcgcgttgagcctcctgtaatgcacgtctttccgctttagttgttttggatttcaagggttttgaagtggactgaagctcattttgcacttcagtgacaatcaccccactcttttctgcaagaacgtaatgatttaatcacgtcatggaaaataatgcaagaaataaataaaacatagcagcgcacagaaaactgttctcgcggctcacaacgcatgaactaacataaagctgcaacaagaaactgaaaatgtattatgtactgaatcattaaatgtcattcataacccagtcactactgaattgaaattgcatcaaacaggaagtcccaaaatgtatatatatctcagaagcattcttttcctcattggcctttaacctatatttatgcatcccacaacgtaaacgcgcaacaaatttgcaattgagaactttaaatatgcatcgtatcacaagtaacatactaacaggcaagcaaatagagcatatatgcatgcattgtattcgacttttcgagttctccgatcataaattgaatcatttcagtgttgtagaaatcaaaagatacgtggtaaataaacgaattattaccaggcacgtcaagagatttcttcacttctgaaccaacagccaaattcctcgccttagagactaaattatctggaacagtcgctttcgtcgattcaaaacagccgcccgggaagctcgaagcgagcttaccagaagagttccggcggtacaaacccggtgaagactcctccgagaactccaactctccgtccgcagacaaactcttaggcgaggccgcaggagaagtcccaagcagcgagtctgacgctgggttgtagcttccaaccggtacatggtccccggcgaccggacgacggaacgctgaatccggaaccggtacagcagctgtacgggacgttaggtcagagagttgacgtggcggaggaatcataaccggagataaggaattgctggtcggagacactgaggaagaggattccgcggcggttggaccggactgtgttcggccggacaggggttggacctgagcgtcgggagtgaagaatcctacgcggcggaccttggggtcgctgacggttcgagaggcacgacgcgcgtccatggagcgagaatgttagtcgatgtgaattggaggcgatagcggtgactgagacgactgggtggaattggatgccatgattttatgggtttggcttttgcctatttgaaaggaaaacgtagaagaagtagctagtatacatgaataagttagggtttcatgtggagcgggtttcattactagattctcagaattgaagatggcgatagataattggtaatacaatacggacgatatcggaagaagcttatatatacgcattagggtgtttaaaaaaatttacaaaccgccccaaataaaccaattaaactaaactgagtaaagtaaactgaccaaaaaaaaatccaatcttaataaattaaccaaaattttaaaccatatattcagcatattaaatattaatttcacaatatctaaaattttgtgattaaggaaatgtaatgataaaagaaagattgtatttaatacaacatatcagatcctattacagagagaatactatgttaggttttatgccctaaataaaactcttt

SEQ ID NO: 271957 - DNA, 539 bp, Cannabis indica
taactctaatctcggtttctagttttttcacatatatcacattccatataagcgccattgcgcatatctctacgtgctaactactatcttacctgatgtcctgcaaatatggagattccaaatccgtcggtgctcctgaccaagtgccggtaatcctagtcacaaacctgaaatacacaagtatagggttaacccctaaattcatttccacaaattaataaaattagcatttaaattccaaatattcacatagagctcagaaagagctttctaacgatataaagaacatctcaaacggagtcccgagtaaaaagttatgactaaaacaaaaattcgaacaaaacacaacttgttgccataaaatagcctcggctactgggtttaaagacccagaaaacccagtttctagccacgaaattgcatctaaaaacaccaattttcatgctatatcaaccgacaatcataccaaactatcacctagcataaaccaagtaattagagaggaattacacctaattcactctccaacaacaccaaaa

SEQ ID NO: 271958 - DNA, 1945 bp, Cannabis indica
aattccgtcccaacacagctaaaaatgcacataaattggatccaaaacataggctaaaaatagcctaacaaatactgtttgttagtgtccttgttatcactctcatattgtgtcataaattcaaagtgttggataagcacaaaaaagattccaagaaaaatgacacgcaccaatcattgatatgggaaaaggaagcaaaatttacatttggagaaattgtagaggcaactgaagactttgatgacaagtattgcattgggaaaggaggttttggtactgtttacaaggccatattgagagcacatgagttagttcttgcggttaagcgattgcacatgtcagattcaagtgatatttcagaagttagtcgcattagtttcgagaatgagattcgaactctgaccgaagtccgacatcgaaacattgtaaaactttatggattttgttcaagaaacaatggtttgtacttggtgtataagtatgcaaacaagggcagtcttgctaaagtattatatgaatcatcagatcttgattgggattcaagagtgaagattgttcaaggattagcccatgcaatctcatacttgcaccacgactgttctccaccaatcgttcatcgcgacgtgtccttaaacaatgtactacttggctctgattttgttccaatattgtcggactttggcacagctcgattgttgatgtctgactcgtccatttggacaaatgtagttggatcctatggctacatggccccaggtaattactattgtactcattattaattagtggtgttacatgaaattttttaaatgttcttatttttaaaaatttgttgtgttgtgcagagctggctttgactatgcgtgtgactgaaaagtgtgatgtgtatagttttggagtggtagctttagaaattatgatgggaaaacaccctggagaattgttggaatctttatcgtctactcgttcaacagatgtggagaatatgctattaaaagatgtgttagatcaacggttattacttcctactgggagattatcagctgttgtggtgttgatggtgagcttggcactgtcatgtactagaagtagaccagattcacgacccaccatgcattttgtggcacaagaattatcgacaaggagtcgagcttccatgatctctgagccattgaggactattacgattgagaagcttgctgtactccaatatcaacaacagtagaaagaataatttcttttattacaattaaagctagtattcatgtaacataataggtttaactcattctatatggaacttggaaaggctttttattgatagtgcctaactgagttttaattgttcttttacttaattgcacttattagttttcaattttcacttgtaattgtttatgtgtttttttttttaaaaaaaaaaattgattcaagtttttatgattgctgtataaaactagcatgagggaagcagatgtaacttcagttccttcgaaaatggtattcttattcgtacattatttagttttgttaggaattggatgtatgtagatagtataccataagtaacacaagacatgtaacaatgaaagaggttcttgaatttttgagcttccttgacttaataaatatatttcatttcattgtaaagtcatgctatctattttgtcacactgactaatttggttcttgttattttacaacagtttgataatatttgtgaagactaatgttctatgaatcaacattccaatagttttattttgcttgtacttaactttcaaaatttaaattttagaggcaaaaccttcaacactcgtgttttgttagcaatttaatatttttgtcaattttaggtgttaagtgtcatgttggcctgtccacgtgtacatttatcttgacataatgtatacatgacacaattttattggtccacataaaaaat

SEQ ID NO: 271959 - DNA, 880 bp, Cannabis indica
atctcgtagcagatcaatctagtactttcgcatattatgatcaacaccttatgttgtgctcaacaactatcaacacctaaacgatttttatataaaaactagtgggtgttaaggataggtttcttccactagctagtaggaccagcgaattcttagagaaccttcatgtccattcggacaattaaagcccctacagtgcatacttttgcatattctgatcaaccctccatacttccgtgtccattccattgttccatataactaagttgttgcatcaagggttatgctgatctcgtagacgatcaatctagtactttcgcatattgtgatcaatcatccatgcttagttaaggtgaacatgaacaccttatgttgcactcaacaaatatcaacacctaaacaatttttatatccaaaaccagtgtgtgttaaggatagctttcttccactagctagtagggcccgcgaatttttagagaaccttccatgtcaattcagacaatgaaagcccctacaatgcatatttttgcatattctgatccatcttccatacttccgtgtctattccattgttccatataaccaagttgttgcattaatggttatggtgatctcgtagccgatcaatctagaactttcccatattgggatcgatcatccatgctttgttaaggtgagcatgaacaccttatgttgcgctcgaaaactatcaacacgtaaacgatttttatatccaaaaccagtgggtgttaacgatttttatcatctaattgttaccgaaagtcgacttactccacgacttgacattttcttgcctttctcgaattcaacatgttatgaaaaaaactcgagttagcatcaccctctttgccaacttgca

SEQ ID NO: 271960 - DNA, 718 bp, Cannabis indica
acataactccatgaaattggacaggttcaaatttgggtcttcagaagagcatccaccaaactggattgaagactgcaccatttgtagtatggccaactttatttcaaagttattgacctccacggcaggtggtcttatgcaagactgaacccccgtcaatgttcgaataatgtagtctctcagactacggtcgggtggattacgaccgtttgcttggtcttctactgctcccccattattagagttgttgcctccattaaagttgtcagccatgatttcttctgcttcagctcttactgcacttctttcttgccttttgtttcttctatttcttttgcaggtcttttcgatttcaagatcaaccgacaatattacactttgtccttgacatcgcatgcacccctaatgcctgaaataaaataagacaatctgaaagaaaattagcaataattagaatgaattaaccaaagtagaattgaatctaatttttgtaatatcaatttttaaacaaatcaccagcaacggtgccaaaaatttgttgtcaattttaatacgcaagtgcacgtatcattgttcaagtaataaactcacacgagtgaggtcgaaccacagggaattgaactgaataccactaaattagtcttatgattctatttggtagataaataattttgataaagtttaaaataaagaaacacaagaaaattaaagaaagcaa

SEQ ID NO: 271961 - DNA, 612 bp, Cannabis indica
gataatttcaattttgtagtccagatcttaatcaacggcccaggtgacccatcatgctactacaaaggacaattatctcttgctttatgaagtaaatggtaagttgcctagctttaactccaagaggcttatagcatggataccagtaataagactgtcaccaagctccacagcaacatatttaccttcctgtctcatcttttgataaccttgaatccaaatgacaagggtcgggttgctgctgctagcccagccagtccagcaccaatgattcctccaaattagtacattgttaagtacaataggaaataaaaggcctatgagatcaaatgtctgtactaattactcacagttcctcaaattttcccctttgacaaccacattttaacattcccccctccaccttactaatttataattcctaacaacaatttaatctttcccaccaaattttctcactaccccagctcaaatttcttcctcaagaagtgcattatttgattgcgaacccgagaaacacagctatcatagcttcagttttagtttctttcttcaaatcattatttgttctagtccgtttgttaaaacagcacctagatgcttttcgacaat

SEQ ID NO: 271962 - DNA, 828 bp, Cannabis indica
aaaagttaagttatatttggcacaaaaagtgatttgtgacatttttacatcaacttttactattgtgctccattagaccatatctttaatgtgagatgtaaaaattgtgttatacttggcacaaaaagtaattttgtggtaaatttacaccaaattttaactttgtgctccaatacacaattacaaaattttgatgtaaaatttaatatttaattaatattttattaaaaaaaataaaatctaataactttataatcaattttattattattttaatatgtaagacaataaaaaaaataatataaatgtttcataatttaatgtgatagttaaatatactaataaaataatagaaatgacataatgtaaatgaaaaagtagtgcatttattgtggtgtaaattttacatcatagcaaatgttgtgccaaatttggcacaaaatttgctatgtgccaaatttacatcactttttggcacaccattggagcacacttttttattaaataaactatattttagtttttcagttttcaccatttatttacacctctattggagatgctcttatatattgtaaatcttgatgcaaaatttaatatgtcaattaatatttttaataatttattaaaaaaatataataaataataataatgcaaatgtaaatataaatttaataataataatgctagtcatttaatataaaagagcatgttaactaaaatttaataataaaatattaaaaataacataatagtaaatataatagtatatcatttattatgatacaaattttgtatcatactgtattgtgatccaaatttagatca

SEQ ID NO: 271963 - DNA, 1648 bp, Cannabis indica
aaccttttacatgcttcccaatgaactactgtgggagcatgactgaattgactaagcttgttcataatgaaagtaatgttaggtctagttagtgttaagtactacaaggcacctactgtactttgatacagggtatgatctgcaaatggttctcaattgtccaatgttaggacatgggcagagcttgtaggatttgaagtaggttggcttcttccatgttcacttttgtaaggagatctgttatgtattcagactgagataaatgcatgccagtggagtttcaaagcacctaaactcctagaaagtagtgtagagatcccaaatctttaagagagaattctttgttgagttcttgtataagttgactgatgctaatcatgttggggcctgtgatcaatatgtcgtcgacataaacaagcaaaattatgagatgggggcctgatccatagacaaacatagaggagtcagctcttgaagctttgaatcctttactgagaagtgtgttttttagtttctcgttccaggccctaggtgtctgttttaagcagtaaatagctttgttcagtttgcaaacataatttggtttcattttatcttcgaaccctggtggttgtttcatgaaaactgtctcagttaaggtgccattgagaaaggcgttagatacatccaactgagtaactttccattggtaggagatagcaagagtgaggataattcaaattgttgctggctttaccactggactgaaggtttcaaagtagcctatgctatgagtttgatgataacctttggccaccaacttggatttgcacttagaaggagtgtcatcagcatttagtttcaccctgtggacccacttgttgcctaccacatgcatatctggtctgtaaggtacaagagtccatgtgccattttgaactaaggcaaaaaattcttcagtcatagcaccatgccacttgggatctgctagagcttatttgagaaaggttggttctttgggtagaagtgattctagtagagggtatttgatggcaagatatgctttgtatttatggatgccagacttggctctgtttgcatggagtgagtatcggttgttggtttaagttgaagtagctggttttgaggtgtagtatttggtgggagtggggattagttctggaggaggcattgtatggttaggggtaggatgtggttgactgaggttgggggttgggttagggacagggttagatagttggtttttgggatgaggaggaggttgtgtgaagtaacaagtaaggagataggtgcagaaggtggccttatggtttgttggttgaggctaggtggtgggacaaaggttttatgactgacaccagtagaagtagatcagttggtagtaaccttatttggcatagtaggcaggtgaacaacaggttgttcctcattgacacaaggataagtagcattaggcgttgtattgaaagttgcagaagcaaaaatttgagaatgttgtgagtttacctgtggtgatgttgactttgattaggatggaaactcctcttcattgaacaccacattttgagcaacatagaccttgcctgtttggtttttcacacaagtatcatttgtgttgaaaagagcatcccacgaaaatgcatttttt

SEQ ID NO: 271964 - DNA, 989 bp, Cannabis indica
tgtggtaaaactagtaataaaatatagaagataagtaaaaaacttggtttaaccgtgtataggtatttatgtaataaatttatcattttatagatttttggtgtaaaaattcctatctaaaaatacattaatttctaaaaaaaaaaaaaaaataactttatctaaaattttaataaaatgaatgtgatatatttttatttgaaataattttgtaggaaaaataattttgcggcacattataaaaaaataggaaagaagaaaatactatttttaaaaattaaataataaaattttaatctaaaaataatattattagttggtcaatataaaataacattttattggtcaaacaaaaatataatttgatattacttttaatatttttagaaacaaataattttttagtcaactaatattatattattatatttaccttttactcttagaaaaagagaaataatgttaggaaaaaattacaatgttaagtttttctttttgaaactcacaatgttatgtaaaatatatttttattaaaaaaaaaaagaaagcaaaataactccaataaaccagtcaataaactcagtaagaaaaataataaagaaggatacattaaataactaattatacatttcattattataaaatgattaaactataatagtcaataaactagtcatatgcatagaaataggtatacttacatatttgcattgcctaatcaggtaagtttgtgtcataatgcagcatcatatataatatcactaaaccacctaatcaggtaagctcgtgccataacttggtaccaatatatcgcatcacctaatcaaacgagctcgtacctatgcccggtactcacatgtcactaacgcgcgtacctatgccctgtacattgccaggaaaaaatccaacaacaattttaatctgtgccataactagcattctcatatcactgccacccgtacctatgcccggtacgtcgccaggtatat

SEQ ID NO: 271965 - DNA, 979 bp, Cannabis indica
gagttccagtctcagtttgggtctgagaatagatttgtgttaggttctaggtttgggtccgggccctggtgagggtcctagtcttgttctagggtcctagttcggcaattcttgttcaggttctaattttgggtcccaagtttatgtctgggttctgttcctagtctgagtaccagatctagacaccgactactagtctgttccaggcctcattaccagaatcccgagtcaagatctggataactgtcttgggtctcggtctggttctggttgaggtcccaggtcccatttctgagtttggctttgggatcgagactggggtgtcgttctaggtcccaaccctagttctgtgtccctagtttttttccatgttttggtgtgagttcatgtttgggttcgggtctcgagtccgggtttgcgttgggatccaagttcggctcccaattcgggtctagttcttatttggaaacctggacctggtccagttactgttcaagatctatgtccaatttcagttatgattccaagttcaagtcctagttccagtccccgtcaacttccggttttggttcaaattttgggtcacaaggtacgggttcgggtccacttttgggtttgggactgggttcaggtttgggtatgggttcgggtccttgtcagagtttggatccagggctgggtccaaaatcccgacacttactacgggttttgtccaagccctgggtcaagatgcggatcccaatctcgggtcgcagtttggttccaattctggtgctgggtattgagctgggtcttaggttcaagttcgggtttgggtcgggtacaaggtcccgatcctagttctgtttccctagtccctttcctgattttgggttccagtcgcggttattgtgtgggtttgggttcgactcctactctcggttcgagtttaggtctctatttgggttttgatctgggttcgggtttgggttttggtcct

SEQ ID NO: 271966 - DNA, 1394 bp, Cannabis indica
gtgtttcctgggttttgcaatgcaggatccaccgtctgtaaatttgctggatcggtcaagcccctacgagtctgcaccaccatcgtatttgtggttagattttgaatgaagagcgattcttgattctgctctcaatgaaagcaccaaagtgttgacctcgcttttagccaacgacaatgagtcttatttagtaagcgataagtgatttatagcaattgatatatagtaaagcaatataaagaaacaagaattttatagaggttcagccccgagcagttcggtaatagcctaatcctcgttatttgtattgacttaagaacaaggagaaaggtccttttcttatagctcttacaacagtatctctgaatatgaattcttagataatatctctagggtaaagtctcgactaaactgtttgcgacctttcgcccagtgaacatgcatcactatttatagggctgtaaaacttggagaggaagtgtttcccttctcgttacaatggatataagcagaaagatcgtgagataaatgcggaatacactgatcgtgggataaatgcgaaatacactgatcgtgggataaatgcggaatacactgatcgtgggataaatgcagaatacgctgatcatgggataaatgcagaatacattgatcgtgggatcgtgtgtatgccatatccctgtaatctgatccccaagttatagggatttcgttgatgactcacgatgcaaaagctgaattcgctaagtgttggttgttctgcgcggattgctgattcctttgctttgggtatgccagcgaggcatcctgttcggattgtaccctccgagcagatactccaagttgattccacgtgtcaccattatgcagtgccacgtcagagtgtaaaaattgggataacatgcacatttagtcataaactttccagaaatatattaattaattttaatcttattgtgcacatgcacacatgagattaaagaaaattatttaatacatccaatggttggaactgatccaatctaatacatccatcagatcagatcaaatcgaatgactcaattcaattggatttgatcagatgataaaatttaatatctaataaataattggatttgatcggatcggatcagatgataaaattcaatatctaatatataatgagattagatcacttgggtcaaaatctaatgaatgtgattcaatgaacattcttaatttataaacatacaattataataattgcgtgctaaattttttttttttttttttgtagatattgtatttctcctttagcactatcctaatgtgataaaaaatttattatcataatgtcctagaccgggaaaaataaatatataaattataattatcaataacgagtgaaaaagaag

SEQ ID NO: 271967 - DNA, 911 bp, Cannabis indica
acgactccttattcagttcatccagggtcaacgaaaatgtatcaagacctaaaggccatgtctactggccaggcatgaagaatgacattgctaagtatgttgcaagatgtcttacctgtcagcaagttaaggctgagcatcagaggcctacagggttgctgcagcgattgaacatacgagagtggaaatgggaagatattgctatggactttgtggtaggtatgcctaaaaccaagggacactttgattctgtgtgggtcatagtggacaggtttacaaagtcagcgcactttctacctgttcggacgaatttctccattgaccagtatgctgagttatatgtcagagaaattgctcgtcttcatggtgtcccaaagtccattgtttcggatagagatctgaagtttacattgagattatgggagagtgtgcatcgagctatgggtactcagttaaagtttaacactgcatttcatcctcagacggatgggcaatccgagaggactatttagatcttagaagacatgctacgggcatgtgtgcttgactttgaaggatcatgggtaaagtacttacccatgatcgagttctcttataacaacaactatcaggctacaatcgggatggccccttatgagcttttgtatggaagaaaatgtagatcacctgttcactgggatgaagttggtgaaagaaagttcttgggtcccgaggctattcagagaacaagtgaggcagttaacaagattagagcgcgaatgctcgcggcttagagtagacagaaaagttatgctgatccaaagcgtcggggtattgattttcaaatcggggaaaggtgtttctccgaatatcaccgatgaaaggcattaaacgctttgggaagaaaggaaagcttagcccgaggttcattg

SEQ ID NO: 271968 - DNA, 548 bp, Cannabis indica
ctcagatcgggattggaacttgggactcggacccaacctacaccaagacccaggacgtgaacccacacctggagcctgatttggacctagactgaaatccggacccgaacccaaactcagacaaggactcgaactctgacccaaactcaaactcaaactcgaactcagaatcgcaaatggaactagaaacaaactaggactaggaccaggaccaggacctaaacccaaacccgaacctagatcaaaacccagacagagacctaaacccgaacagagactaggcctcgaactcgaagcttgaccgggacccaaacccacataataaccaggacctggacctagcatcaggatagtgacctgggaaatagaactaggaccgggacctagtacacgcccaagacctgaactttaacctacgacccaggtcgtgactcggatccagaaatggaaccagactcggacccgagattgggatccagatctggacccagggcttggacaaaacccgtagtcggtgtgtggaatcggatcccgaaccctgacaagga

SEQ ID NO: 271969 - DNA, 1294 bp, Cannabis indica
gtgactaaaaataaaaaattttgtagcatatattttgacaatgttatggttgaccgttatatatactttgtttcaagatgttattgtttttttttcacaagattctgagtttaaatagttagaaataaacacatgggtgagagagaaataaagaaagatgcagaattttcttatttcatactaatattccattgatgttataattagatatgtgtggttgtctagtttcttccttcccaaaaaaaaacattaacgtgtgtagtacttttattacacattatttgtaaatatacattgccctttcttgtttacaaagttattaaatgtgcttaatttacaaatcttggcaatgttgtcctttataagggattggaattaccttgagaggaacagctttcctaagcgttattcccattctctcactcatatccatttcacctggcttaatcccatcagccaaaacccaatcaaacgacaacaaaagtgagcctaaagccaaagggagtaccctagaggcaagaggaaccgccggacacatccgacgaccggaaccgaaaggtataaaatcaaaatggtgacccttatagtccttaaccatgtttggctctaagaatctctcaggcttgaactttaaagggtcttcccaagtcttggggtctctccctattgcccaaacattgacgagaatctgagtgtgtttggggatgtaatagccgagcatttggcaagtgtccatggccatgtgtgggactaagaatggaagaggagggtggagccttagcgtttctttgatgactgcttttaggtatgggagattctctacgtctctctcgtcaagcttcttcccatttgagattgttcttctcagctcggactgaacttttgtaagtgttttagggttatgaagaagctcagccattgcccattctaatgtgcttgttgttgtgtctgtccctgcagtgaacatctcctgaaatattttgtgtacatgtacttactcattaaattagtcaatacatatattgcaaagagtttcatgccttcgaaagttgctttcgttaaggtatatgatcttctacataaaactctttgaaaacatatttgaaaacataagttttttttttttttagaaaatttattttacttgttttaatttttacttattttttattctttaagatataccaacttttatagttcctaatagaccaggatttatgtaaattatataatagacttaagtagtgaatgaggggatattaggtaacccacttaaaaaaaagggaaaaaaaca

SEQ ID NO: 271970 - DNA, 849 bp, Cannabis indica
ttcccagcatccatagccaccttcatgttcataaagccagtctgcaaatcgtgaatttgtagccacaaatcaagagaattaaggctcagagtgcgggggttatccccatctttgagtcggattaagaccaacggtttgcgatcataagtccaaggactaccctcaataacacgcttaatgtctaactcgtggtaaaactgaaataagaacctgttttgatctaattgctcagcatacatacccttaccgggtctccacaaatcagccatcagattctgaaaaattcgaaagtctgaaacctttcccattagcagtcgcccaacgagacaccatctggtgtcgatagcaagatcgtcttcctcttcggcttcttcataaaaaacctcctctgcatcttcttcctcaagttggacatttttccaacgttcatcaatatcatccatattaaggctgctagaagccatataaagcaaagacacaagccgcacaaaaaagattacgtacacagacaaaaaccagaaaagaacaaatagcagtcaacagaagatgacactgcatacactcaaaaagagagacaagtcaaaactctcaaaaacagagagactcactaccgtgtatttacatactaggtagcatttaagttaagttagcgaggaggtctcaaatccaaatttctctcaacccaatataaaaaaacagtacttaagtttatgcatctagccatatttaggcatttaagcacaactttagtacttttgctgcaaatataaaaattaattttagatacttgctaaaaataaagataacttatgtattttaactgcaaatattatcctaattaaattatac

SEQ ID NO: 271971 - DNA, 838 bp, Cannabis indica
  modified_base (52)..(52): a, c, t, g, unknown or other
tttccatgtttctaccatcattcaagaaggctaacttcattggaagtgtaangaccccggaggagcttggttgagacagagagatgccattggagaccattttcaggaaaaattcagagacatatttactcagactggggtgtctatcgacgtggaattggagactctgtatcatgataaggtgacgactgtggagaatgatcttatcagccgtgtcccggatgacaacgaaatcaaaaatgtggtgtttaaagttcatcctctaaaatctccgggtcctgacggtttctcaggtatcttctaccgaaaatactggcatattgtgggaagggaagtttgttatctagttaaagattttttcttgaatggggtgataaacaagcaacttaaccagactttcatatgcctaattcctaaaatcctgaatgctgatcgtgtagatctttttagacctataagtctgtgcaattttacttataaaattatctctcgcctcttgactgaccgtacaaagataattttggatagacttgtttctccttcccaatctgcctttatcccaggaagatggattgctaaaagctctttaattgctcaagaaactctccatgctatgaaaaagaagaaaggaaaaaatggggttatggcgattaagaaggacatgaacaaagcgtatgatcgacttgaatgggacttcctccttcgggttttaaaagcaaacagtttcaatgacaaggtctgtaacctgataatgcaatgtgttaccacggtcagctattcaattctcctcaacggagcacttttggctcccttcaatcctaaacgaggtctaaggcaa

SEQ ID NO: 271972 - DNA, 5362 bp, Cannabis indica
tctttactgacaatgtgtctaaggaaacacacctgagatagccaaaactcacacttcttgaatttggcatatattttatgttcccgtagccgctgtaaaaccattcgaatatgttgctcatgctccttttctaattgagagtacacaaggatgtcatcgataaatataataacacaaatatcaagaaaatccttgaataccctattcatcaaatccataaaagctataggagcattggttagtccaaaagacataaccaaaaatttataatacccatacctagtgcagaaagccgtctttggcctgctatttttacagtgggaagctgctcttttttggtactttttctcgaaaccccatttttcaacattttctcgctatttaggttttagtcacgctatttatcgataggaagcttttagttttaagtttaagtccctgaaaagttgtttagcgtatcgcttataagttttgtgtttgttgtgacttaggggcctgtaaatcgtcgagcagcaattccactcaagttgaccggcacacctaaattcagaatagaggtaagattagtataatgatatgcatatgtgattacatatttagcatgcatgtttatgaatgcctgttagattacattgatatatcggtatctgtatacatagagttatattagatatcgatgaatgtgtgtttggcataagtactgattgacctatcacatcagtacgactagagtacctagtataagttgatattatggtcaatagtactatcgtacaaatgttctagactccaaatgtgtgggacatgagatagggttatgattgggtgtatgggaacctagttataatctggtttatgttatgatatttttatactttttttaccgactctgtcgactcacagttattgtttacatgtgtagataagggcaaagctaaggctaagcagcagtgaatgcgagcaaatgaatattgtacatatcggagccgttagacctagagtgttcgatctttggagcaccagactgtattttgaatagtttttaggcgacaacttttttgtaattaatgttttgtaaacatttgtaacttttaaaatacgggatcccagttcatgtaaagtctactttgttttaattaaagattaattgagtaaagttttaattaaacatgatttctaataatctcgttgattagcaacggattgcgtagataattttaaatcgcgatagtatgcctaagctagtagggtgttatagtaatagtctgtttatactcatgcttctgacaacttgcccttactatcagatcatgggaggtttaagcgagttcaatttagaaccgttggatgggtgaccacccaaatcgcttcatggatctataaatctccttcatctcccccttttttttcaaattttcactttcacgacttctcttagaatcccaaaccaataaaaattataggcacaccagattttctcctactttttctctatggtgtcaagcacgagtttacagtcactgcgtaccagctctttcgacagttcaaacttctcccattagtaagttgtttttcatttttattttttttgctggtgatttttttgtataaatacgatatttttacaatatgactgttgtttgacggttttcttcaaccatcttcagtttaattctttggttgtggctaccatacctaaaggttttagaacacaccatttttttttctctttgcctcatgtaccatttcttattgtgtatggtgaaattagcacctcatgcttggcataggaaatttctaatttctaaatatgctagcatccgaagggggcctcttcttaacggttaggggagcccattccctttcttgacttaggatttgatgtgggggttaactgttgagtgtattctgttttttagatgagaaaagtttcgagagatctacacccgcatgaattttatgcatttgatggagaaatcctcaaactttactctaagacaaaaatgtcgaatcttggagccccttccaactattcatctcaggaagcgaccttacttcccgctatcatccctctgttggttgttattcagggttcgtttctgattcgcaaatatttcactgagctattggaggggaagatgatgatctacattcatctctagggtgtgctcatttaaagagaatgagattatacctcaagaacctagggtttttcatcgtctagcttaagaatttgagacccgtactgataattatgagggtttcttggattggagccaaacgcatctcatgtctggggcaagcttgccactctaaaattattttattgactttttaatttttgtaggattatctccttaccaacttattccccaaggctaccgcttattattgggcctctttattttttatgtgtttaggggttggagtgctcccaagcccgtagaaatattatacttttatgaactaatttccattcctaaaaaaggagacagattcaaagatggcttctattcactacaacctcatctagctaacgagaccccagtcccgtttaattttcaaatgaagagaaggatttttttatcgatttttctactcctccagttctaaagctttccagcgtgaggaccttttcactgagtggacctagattccccctttgttgtggatgacccctacttaactttttctcaaccatgtagcagtcttctctttgcttagtagggagtagctgaacgttagaaatctagtgaccacggttaactgccacagaattgggcttctacaaggccatcagccgcttaaggacaccaatttgtctacgatcaattgcccaaatgccagaaacatgaaggctaagaagatgcttgggtttgagataatccaagaggcttagttgaagtacaaggcatatcagaggagaaaggagcaagaaaacatgctcacttgatttcaaagcacaatagagcaagagatgaagaagaaggccgataagaaacttgtggctccaaggccatcttttccttcctcgatcttaaactctgagactcttggagcgagtacatctggtatcagtaagtctcccttatctttgcattatgtttcttcgatttagaactatgctcaagctagaccaactggctttgacaagaggttgtatatgttatgaatgcctcattctcggtggagctatagggagaaagaactatattttttgcatattggagataacctgggtaggtcctgaatgagatcagatcctccgattctgattcttcttaaccactcttcctacattacttcgagccggttcctctcttcagataaatttctagggaatgacaacaccaacgatgtagtttatgaatttattagggaagaattaggccataagggcaggattagttcctcccatttgctttattccagtcccataggtggcaataccctcccatcggtggatttctcaagagtcatcgttactcccgggggcccaaaaagatgctccttcaaacctagaggttgtttttcaaagacgaggaggaagtggccctactagaccgatagtaaaaagatctgaccatcaacttcaggtccacaaatagcctaaagttgtccaagacgtcttcccaaagtactgatgactcagggatccttttcgaagcaactatctttatgggtgtcctgtccatcactttgaccccggtctatccctttgaccccaatccatccaaacaatgctcccttacaactccagttggccaagaacaatttttctgtggatgagcaaacttaggggaatgctaaggcagaggctttgaggacatggttgatgaataaccaggatggccccctcggggggattacgctgaccaagtcagagacctgaatttggatcctatgacagactagttctcaaacttcttggggtcttctctagctccttctgcgtctaaaataatgacccactttgcctctaacatggttcggcttcctacaaagaggttctctgcatgtgcttcatccaacccaatctaccaaatccaggacatgagcatagccttaacctcagtgagtctgggcacatcttatagcttgtttacttcactagtgttttattttactaaatgttacttctcttacagtttgaatagattgttgctgaagctgaccacgtgtccaagactttaactgattagtgatatgtcgttgcggctcatggcagcaaaacataggtgcttaggaagctggaggaggccgagaagcaaagggaggtgttgaacaatgacatccttgcggagaaggtactaagtgttgggattttgtgccctaaataaaacccatttaaaaaataatcatatttactaattaataaaagatcagaaattattttatgttgcatggttcacatgtttgctttcatgattatatgtttaatatataaattctattaaatccagaacatatagttattcatgattatagtgttgtcaacacagtggaatataatcatgattatatgtttcaaagttgatgtcccatgatttttcaatacactggatttacactgacataataatcaacgatagagcttacttacaccttggataagtattatgtcatttccaggacattggaaaagtatgctagaatcggatgtatggagtatacatcggactggatcgattttaaaattggataaaatatcataaacttatcgttatatctatctaagtcaatatcagttagttgatcttaggtcaatagatcttaatcctgatatggttaggttctatctcaactgtattatttatgttcttggagttgttcgctaaagctggccaatggatcggcctaatacttacatcttgggaacattgtagtgcaattgagtgggagcactaatcatagatatggaatcatataatttatacaagtgaaataattatttccttcaagcttggcttaatagagataaatgattgaggcctcatttcaataattacattagtttactgaatatcatttataggtagctaagtattataaggatacaatacattgaagggtagaatggtaaatttgtccttactcgatgtagatcatctatagaggatctttgactatttggattgaaacaatgggtaattcaaattgcatctatcttttgtaatagtctattctatgtaattaagagtgcaattctgaatctattgtggcgcaagaaggaattaataatttagagaatttacttggtaacctctagagctacttattggaagcttgattatatagggacatggtccccacactagttgagatattactgattgtatattcagttaattggttttaatta

SEQ ID NO: 271973 - DNA, 710 bp, Cannabis indica
aaggagtatcgtcatcgatttttcttctcctccggcttcaaagccattgagcgcccggagctgctcactgagtgggttagagtccctcccatacactgcaccgcaccgcccctactcaactctttcttcaacacgccaaagtcttctccacctacgataaagatgggttgaacgtaggggacttagtcatgactgtaaattgcaggagggctaagttaatttcagagggctagtcggtagatgacttcaatttatccaaggttctctgccccaacatttgcaatcctgagtccgagaaagcgttctgggaagatatcattgcctccgcggaggataggtacaagaagtacctcttcaagagggaacaagagtcagcctatatcaaggcccaagatgcctcagggagggttctttagatagaagctggaaaagaacaagcgacctcccggcccaagctcccgttcccagttcctaatgctggggctcctgatgccagcacttctagagctggtaagtccccactgattgttcatcacattccttctgttcaggattattctacttataggctggtggaatttgacgaccgacttcataagtttaggctgcccccttttcgatggggtgatcatgccaagagtttttatttttccaaccttagtcctttcctaggccggtcccggatgggttccggtcctcccgtacccatc

SEQ ID NO: 271974 - DNA, 490 bp, Cannabis indica
caaatagtattatatttttgcataatgaagaactaagtagaaatatgctttaacaattaaaaacatacgatattgaagaagaaaacgacatattttttataagaaaaatccatgaactttgtagcataaataggaaatcaacatacaaaaataaatcctatctagttacattttgtttcatcatcatcttaattatattgaataaagattagaagctcataactagattgaaataaaaatgataaaggataaacatacttgacatgctcttcaaaatataaaaatatggcagaatgaaaatggtagaaatgtgagtgaaatggtgaaaagtagagagttgtggaatgaagagatgtatgaaaaatagtcttccaacaccagatatataggcaaagtggagtgataaaataaatccaaataaaatgtaatgactgtatttcataaaatggttagtaaaggcaatgagcactaattattgatatttttataa

SEQ ID NO: 271975 - DNA, 520 bp, Cannabis indica
ccggagacaatttgtcgccgacaaggaaagtcaacctgaaggtcagcgccttgactaacaccaagtagctgcctacaaagacactaaagaattacatatagaagtttcgggaggaagcctcaaaaaccaaaaaactagatgacggacaacagcttgcccttctccaagcaggcatccatacagggattccattctggaacgaactacaacaagaaggagcttcaaaccttcaggacttccaaaagagagtccaaaaacacattaacctcgaagaggcccaaatagtggcctatggaggatattatcccacgaggggtagcaggatatgtgcctggagcccagctctcgggcactgtgccggcagcagctccaccaatgagtggcatacactttctaccactcctggatatagccagggccaggccctggcccccaaatcgtcccattttggaaatccctcagggatatatggacaagcccctcgcactccgactccgacagccagtctagccggtccttc

SEQ ID NO: 271976 - DNA, 967 bp, Cannabis indica
tgggtctaagtccttggttctgatcctggtctgggttcgagttggggtcgggtccgtgtccgggtctagcttttggtatgattctaggtgtaggtttttgagttcgggtccgagtctgtgtccaggtttgtctccaggtctggacccctatctgggtctacgttcgggtccaggtccaagttcgggtcccgagtgcgggtccaactttggtctgggtcgggttctcggtccagatctttctgcagcatttcgatcccagtttggttcttagttcgagtccagtttcgtatccggatccctatctaggtccaagtctgtgtttgggatcgggtcgcagatttaggtccaggtcagggtctgagttcaggtttgggtacacgactgtgtccgggcccgagttcgagtctcagtttgggtctgaggctaggtctgtgttttattcaaggtctgggtccgggtccttgtcacggtcctagtcttgttatagggtcctggttcggcgattcttgttcaggttctaattttggttcccacgtctatgtctgggttcgggtttggttcttcgtcttgattctggtcctagtctgagtcccagatctagaccccgcctactggtctgttccacgccctgttacccaaatccctagtcaagatctggatcactgtcacgggtttcggtctggttctggtttaggtaccaggtccaatttctgagtttgggttcgggatcgagactggggtgcggttctaggtccagaccctggttttgtgtccctagtctggctccatgtttgggtctaagttcaggttcgagtttgggtctcgagtctaggtttgggttgggatccgggtccggctcccaattcgggtccaggtctgatttggagtccgggtcctggtcgggttacggttctagatctaggtcatattcagttatgattccaagtcaaagtcctagttccagtcc

SEQ ID NO: 271977 - DNA, 816 bp, Cannabis indica
aactaacataaaatcaacattaagcaataatctacttgtcacataagtcacatgaatactctggtttcacataaaacatcgattatcctattttagtattctcaattctcacttttcagatttcgaattaagatcatagaacatgcacaaggtgatcaatattaaacatgaaattaaacacaaataaagataatttcacaaacaagaatggaggaatggcaattatgcattaactaggcaaaaacattaaacaacgttcatcatcctccctaaatgggaaatttagttcagaaataaatccataaccattcctaaaacaatatttagcataaataaattagagaggaatagagaaggaaactgttggtgaatgaattctggatcttcactttgaattactctgctcttcctgccgctctctactgcgttttaggtctccaaatcgcttcccctgatttccaatcgcagttttctatttatatgtgatttttagggttcgccggacgattttacccctgggccgtacgggatctcgccgcggccaagctgtagctcgccgcggccagatttgcctctaaaaacatgcttctgtaatttctatatggccgcggcgagggtgtatctcgccgcggcgacttgagcttcaaaattctggggcttctgccttcatgatttagccgcgaccacactaatctagccgcggccagaagtgcatcacgccacaaattggtgtttttcttggctcagctcgtcttttactggacttttgcatcccgagacctctgttattcctaagaacttgaaaacatagaaaac

SEQ ID NO: 271978 - DNA, 902 bp, Cannabis indica
atgacttttgaaagagcaagagcgtctccgaaacccatgttaactccttgacccgccaaagggtgaacagtatgtgctgcatcacctataagaaccacattcttcgatgcatagttattggcatgacgcaaagataaaggaaacaccatccttcccgatgccaacttcattactttcggtggaacctcaaaggactcggtaatagaagatgtcacatccggtttaagccaagaaaaaatgcctccgtttccaaacctagtcgaactaggatgagggccgaatccataatccagagcataatttacatctttcaaaaattcgctctcgggcatttctttgcggtcagctgcctctttggggttcatagtccaaactatattactatagttatcacctataggcaatagggcaattggtccagaaggtagaaatcgttgccatgcacattgattttcgatatcatgttctactgtacagatgactgcattctgtgagtaattccatccagtggttgtaaatccagccaactctctaacatttgacttggccccatcagccccaacctaacacagtctcatgacttgaataaactcatatgacaaataatactttaagaaattatgctattgaaggaataaagagcaattcaagaacatatattgaaattaccaccaacttcgcacgtaggctgctgccatcagttagatctagcttcactggattcttccactcgtgtgttggcgaagcagacgatgtgcttcccacccccacggacgaagagtttcgatgtaaagtcgttagtctggatggatagatagtcttctggaaatctgttctctgttaaagcttaatcttgttagctctaaaaacgttaaaaactcgcatcaagtaaaaaataatgc

SEQ ID NO: 271979 - DNA, 809 bp, Cannabis indica
ttaccttgattccgaattcaggtgtgccggccaacctgaatggaaaaactgctcggcgaattacaggctcctatatcacatcaatcataacataggtaagtgacacgctaaatcactttcagggaacttaaaactgaaaacaaaagtttccctatcgatgaataacatggcaataccctaaacatctcaaaaatgggaaaaactagggttcccaaaactgccccaaccggtagaccggttctcaactggaattccagttctacggggtttcttgaggaccacctggaattccgattcctacaggtccctctgaaccggaattccggttcagtaaaggattcacttaaaaattcatactcaaccaattcaaccccaaactctatgaacccttccaaacctgctatttagacctcaaagaacaatattaaagcaataaaacacttctacaagttcagaaacaaaaatgccatcaaagagccaagcttgagttctaaaactcaaagcttgctcaaacatcaaaccagccatcacaacaagcctaaaacaacatatctaagcataatttatccactgaaaataataacaaacactagcagcaactatagcaaccaaaatctcaaatcatgcaaactttcacttccttataaatcaagaaactaaaaagaaagccacaagaggcttaccttggcttggattcacttgaaactagctgaacgcacttagaattgctgaagaaaaatcaaaccctagctggttctatgggtttcgaaaatgagaaagagtttaagagtgcaaatgtaacttttgat

SEQ ID NO: 271980 - DNA, 1243 bp, Cannabis indica
aatcaagaaaaagggccaaatatttaattaaaacacaatatggcatgaacatgaacgtacgagccgtcgatacgaacactctcgaccctcccatgcatcaaactagagcaaaacaacaccaaggaaaagtgtcatagacaagaaggcatgaagaaaattcgcttgtcgttttacaattggcggcgaagaggattttcttacgccgcctcgagcatgagtagtatcagttcgagcggctccaaacccattagttccaacgctgccgctgccgctgctgctgccgcctcttcttcgaacgtaagccagaagcttttgtgatcttctattatgatattgttgaggtaattggtaatgggttgaagaagaagtttgaagagaatgggatagtggtaatagaactaagacaaccaataatatataagcatagacaaaacgtttcattcttgatattataatatttgatacttataattactaataaagagagaattgaattatagaactaagatatgattttttttttcttttcttttcaaggggtgtatgatatttatgtttttttttttgataagtgaaattttattgaagaaaaggaaaaaacgtgtatgatatttatgtgatcaatatctctctattatttatatgacaagttgtgctatggtacaatatatttaatgtgaaataattgagcttataaactgttgtctttaataatatttatatgtatatgcataggacatagtaatatgagataggtgataggaatgctatttctattgtcaaacctggccgtctcaaagaatggtttatggccgtacatgtagagataaaagatggatattttgtggatataagatacaagtggtggtggataatagcatgtacaagttgaccaaaattttggacaaatcaacaaaaatgtttgaccacagaacacctactctatcatgtctaataccactataaaatctcattaatgtaatttatatatggagtctcatatatttatgattttttgagattgttattggatatcatctggtactttttatagggagcgtcttattattaattagcgatattttttaaaaattattttattaaattatataaaactcaatatttaattacacaaatagaaatatgataccgaagaaggtactgttatataaattaacatttaacccaagatctatttgtatataacatagaatacaataataagatataataattaggtatg

SEQ ID NO: 271981 - DNA, 1775 bp, Cannabis indica
tagatatctggattctgaatcaatggcctagcttttcctgtttctatgtcagccacccataccttgagcttgctagtactgttttcttcctcatcaactcgaatactgaaggataaatgtttaccgtctggagaccaagtaacaaaattgatcttagcaccatcggggaagccatgaatctctttctctggccctaacgtaccatctggcattaactgatggatcccaattcctgtataaaatgacatacggcttctggtattacatttcccatcaatgcgaattccagccaatttttcttcgggtcttgctagttctgccaaaggaggtaaggctctccgcttaagaaatagtattttatctctgtgaggtgagaatgacaatgcaggaagaggtggggcatcaacaatgtctctaatctctggtggaggaagacgatatccaacttctgctgtggaatcatctatagatcatttgaacccagaaaatgtcaacaacagtttatcgtaaatttgttatctagtaacaacattgttgtgcaatgcaaactatcaactcaaactcaaaatgttacgaaccaaaaagcctaaaagtcaaatttttacttccagttcaacttattcaactcttactccttaatgaactcaaactctattcaaatgtagactcaacaaaatcaaagacgtcgaagcacttcacttcatttcatatgaaaaatctaaaattcaacatcagccttggaatcatctatatatctcatttgaagtcgaactattaactcaagctcaaattgtcacaatcacaatacacctaataaaagcaataacacaagaaaacccccaaaatgcagaatttcaattgaattcattaaagtcttactcgtactcctcaatgaactcaaatccttttcaaatataaacacataacaacatcaaagaccatgaaagcacttaacttcacttcacttcaaattctaaaatctaaaacctttgatttgaattacagtaccttggtcatcagccagagcagtagctgcagaagaagaggaggcagaaccattggaagctccaccaggggtggcattctcagcggcaatcgcgctaagaggaacgagatttcgtagtctggaggaagaggagggcatggtggccatggtcctcagagagcagcggcgaggtcgacggcgggagagtaaagaggaggagagatgagtgtgttttgaagagatggagaggagagagaggggagagatggaggagaggagagagaaacggtgatagagttcattgagctgaagctgaagctggagcacgtctcttaagcccatctaaactcattttttaagggtaaaaaatcagctgaagcttgtattatgcacaaacagagaacaaattacaaacacaaattagttaattacagttaaaatcccacacccaatctgtataaaaagacattttactggcattgaattagcagagccccataccagaataaacaacatttataacagatatatatatatatatccagggcattgctattggacacagtggtggtgcccagcacgtagcaccttatgattagttagcgatattctttaaaaactattttcttaaattatatagaacccgatacttaattacaacaataacgaaaagagaattgctaaaagacaccactggtgcctagaaccatcctcggtgtcataccgctattggtgtaattaagtatcgggtcccataatagtttttcgacaatatcgctaactaatcata

SEQ ID NO: 271982 - DNA, 1343 bp, Cannabis indica
tataacctttataggtttagtttaatatgctaagacaatgtaataatatataatagaaagaaatatttaaaagtaaatgaattaattattctccaataaaataataattttggaagtattataaaaattatgataataataatttattaatattttttaattttaagttgatacggattatctcatatttaaaatacattatcaaaactctattttttttttcaattttactgcacgtatcatacattaatttctttaaaatacatcgttaaaatctcacttttttaagattttattatagtttactcatttcaaatatataatctttatatattaaaagtgattatttaacaacaacttttagtttaacaatttttttaacttctttttttgtccaaaaataagctgaaagctaacgtttcacgttaaccctccttctccaaaccttcttcccacacaattattttgcccctaaccacaatctcaccccccactcccaaacgacccaaattgactgatatatatactctatttctctgtttaattcatagacatctttttgtctctgttctccaatcatttgtgtaaattttactttgtgaagttttctttgtatataaattattctctgtcctcgatttttggcaacgagcttcctgatgcgataattaataatattttggtcataactctttcaatattgctcaaaattagacgattcaagatgttttaaaaagctaaaagagaaatctagaacttttattcacaatatttttccttaaaatgaacgcttcatggtcaaaaattcgcttgaagcttcagatttgattttcgatcacaaacggagcgtcttgagtattcaaaacttaaaatttttcaccacttatagcaaaactccaaattccatgataattcatcatattcatctaactctttaatcttttcatacaacaccgagcataatgaaattgttctttaggttttctcctcttgtcagttactctttgaaaattattcactgcatccactctatatctacaacaggtaggaatttcaattgctgcaaagaaattaaaatttattttctcgttttggactcacaactttaactctcccttttgcacattaattaaagctcgccttatgactaaaaatagtctttctaaaatgatgggaatgtttgcatcttctttcatgtcaagaataatgaaatcagcgaaaaaaataaatttccctaccttcaccaagacatcctttatcactccacgaggatacataatggagcgatccaccatttataagaaaattgttgtaaggcgagtttctcccaattttagacctag

SEQ ID NO: 271983 - DNA, 1167 bp, Cannabis indica
tggtgaggtttttggtaacaaaataaaataaagtgttttaaacagtaaaaatgacagtaacagatattttcagtgatatatagggatattattaagggttcagaatctacttaagtgtatataaatatatttatgtttatattgattctcataatttaatcagtagtcaaaccaattattttctaataaaaaatagatttttcttcactttaaaattataaaatacaaaaatttaatgtaaatacaaaaaatgatcaaaaaaatattatttttattaaaatattagagccaaacattaataatttctaactatcaaaaatacgtgatattatagatgaaagtaattattttaagaagcgaaaagtataggcatatattgtactgagaaataaaattaaaataaatacttaattaaatagactaggtttcatcgtccgccttgataataaaggaacttagaaacccataagaaaattaactaaaaaaaagcggtaaactaacacttactacttcgagtgtttttgctggatttttctatttgaaactctaaaactgtaactgaattttaaaatcctaagcttctatctataaaagggtaaaaggattaatgtgcaattaaacttattacaaattggatgttggttaaaatgtaaatacataaaagtgaaactggagtgccacgtgtcataattggattggctgccattgatgagtcaatgccacatgtcggtcgttggttggctgaaaagagaacaagttggccaattttatgccacttgtcacgtgctgaagggaagaagaaaaaaggctttccagccttggagagcacgaataaggaagcccactctcagttgggccagtggacgaaacacacggaccaggagggtccgttcgcttcacacgcgtgtggggcttcagaggagacaaggtgctgacgcgccttctacaggcaaatgaaagctcgccacgtggcgaggctgtcggctggagagagaggatttgggtcaaaattgggcttttttcttgggttgtttcagcttcaaaaatgccatttttcaagactttggacctcattttattatctttttatttctttttcattcttttcacaaatgttatttactcaatcaaacacaaacaaattaaatccaaacaaaatattttcaa

SEQ ID NO: 271984 - DNA, 590 bp, Cannabis indica
ctgtcaaatttatgagcaactcgctctacgagaaaggaatcccaaatataaaaattaagacgggtgtctcggaaggtgactaatgtgttacgttcagccctaagtactgtgggagaccaaccacattaattacctcgggatgctccttcaccggcttcttgaggggcaatgttttgaagatactgtgctcgagccacgtgatcccaggctttatcctcatctagaacagtaacatgctgccaagaagaatacttgggaaacttataatcacaagtatactccttgtcagtaagaaggctcaccaatctgagattggcctcgttcattaggaagtcgcatgacctaaggccatggggaagagtcattaggcgcttgtgccaactgaccatctcgggggtagggatgggtctcgtcgagagagctgtaaaaaacaaacaaaatattggtcaaaaaactaaaaagcaaggattaatgtaactgagcatgaggaaaataatcacttacaaattctgcgaaaggtggttgtgccgattggggaaaagaccatatgtccagaagaagttgtctttaaaagacactttatttggcaa

SEQ ID NO: 271985 - DNA, 1400 bp, Cannabis indica
tgagatgcttccaattaagcaacagtaaacaacatatcttattcaagttttcaggcaatatgagcgcctttatgcaaacgtataaacattacaaacttgaaatcaagccacaaaatcaaattaaaaaaaatatgataataaacttaaaacacaagtacctcatatgaagaaacatgtaggcttagaatattccaagagcaattaagattcacaagagaattcaacatgttggtgaaccaatctgtgtcatatttcatcttgtcctcacaaaatacgatttttccatttaacaaattggacgactctatcgatatgcaacgatccatattccctttataacaaaaataggccaattctggagctgattccattgtaaaagcattggtcatatcatagaagtatttaaatttcaaactttcaaagtgttcactagagattttaagatggtccaaatgtgtattgctgtcactcaatatcaaattctcaacaagagaaatattagaaacaacaacttctaatgatggttggtcatatataaaagtatggtcagcaaatgtaagatttctaattttcttgcaagaagagatatttatttcatcccaagcaacaccatgtagtaacaaagactcaagatttatggctctaacttgaatttttaattcatatttaatatcactaaatgaaagttcaaagaacttgaggcttaaactttgtaatcttgactgatcatcaatacttaagaattcataatcatgtaaatgcaatttctcaagagaaggactacccgacaagaacttaactaccccgtcatacttggcagtttttgaatttcgaacacctttcaaagacaaactttttagagatgggaaactaaatgaatgagaagtataccaactttacccaattcaactccaaaatagttaagtatcttgcattgtctactaatatattaggtaaggtgtaaaagtggtctaaccaaagatgtatttccttgatcttattctcaactgcaaaagtcaaccacttgtctaagaggccactcttaatttttttgctcaattggctagcctgccttgttgtataatagctatccatatccatgtaaaacttaaactagttatgactgaatcaatgcacatttgttgcgatgttctaaataattattgacataattgtagactttttcaatgttacttgtagtattattggagaaaaagagtgtagggactgaataccacatgagcttccaacgcattgaaagaaggcatgttcgaaccacatcttcagtggggagaaatgagagaatatgatggatcactgcattgggtagcttagaaatcctgtcctcatcacccattgatggtgtccttctaagtgagctgtggagtgtaacaacagaa

SEQ ID NO: 271986 - DNA, 604 bp, Cannabis indica
tgttgtgttgttgttttgttggttggcgcataatggatatgtgttgaaatctgtttctttgatcttcaattgcaagtaaaagaagaggctgacatcgttgaatatttctatcggtggtattcattttttcacttcgtactgtttttgcagtgttgttcttgtttattcgcaccccaatgaagtaagtagtatctgtaatagctcttcatacttgaaatcttttggtatgaattctccactagcctcatatttgacataactatgttcttcttcccattgtccattgctctttatcagaactggtatagattccataacttgtcatttttcacaatatttcatttacttgacctttttttcaattaaaacaccagtaaaataacactaaaaaacaataaataaaaattgttttgctagtgttctttttaattatttgaccgattcccctaattagcaatgaatatatggttatataccaaaaacaattttagaacaaccttgaatattgtaatgtacattattaatcgtttcttagggctaatctatatgaatatatttttttttcttttttaaatagcatgtataattatacattttcaaatca

SEQ ID NO: 271987 - DNA, 1617 bp, Cannabis indica
aaaataatttccaacacggacatcatataacaagctgatagagccaagacatgcgagtctttatttgtttatcaaggcttttgggtcaacggaaccagctcgcaacatagagagtcgatctctatgttttcgcaggaggatttgtgggaatactcgcatatatcctggtatatgcgggttaagggcattccttggtcatacgtaatgcgagtcgtacgaatgcaattagacttggttgtattcgcatcatctcgctgagtctatttcaggcgaggttcatactcgaggggtctctcattgacatctcagctttcttcgaggaaagtgagtacacgtgtcctttaaataggagtcttgtctcaagtttctaggtgagaaaaatctcaccataacacctacgtacgttaagtctttttttttttgtgattttttttttattttttaacaattggttattgtaggtttcttcaccagttgttaattttattctttaattaaaaactaaaaaggtacaattaaaatactattatttctggtagttaatagtacaaaagtactacagacggtaggtccatgttttcggactgaggttatttttgtcttttcatttcttcatatcttctacgtatttctgcgatggtagtggagtacgttatatcatgtaccgagtacacttatagtttctacatgatgtttagtaaaactaaaatatcacgtacctagtacgtgcctttatgtttcatagtacaatggtaagaaaaatttcttataactcatgaaattatgtgttgttatatattgagttttacattggtgtatttgttttattttaattgagttttagtttaaaaattaccaatgaaatattttcgtctcaccttataagattagttttttttactataaataatttagttgttcatcaataataattttaagatttgttcaagatgagataattaccttaaacacctcaagcataacataaagtaaataaaactaggatttttgaagcagtgattagtgtcataaaagttaaaacattaatgggaaaaatatctagtaatatgattcactgtagtatgactcttgtgttgatagaggggggtctggaaaatacgcattggtgtggtcactgaatgagtcagatcttggttgattgttggtagattatggcccctgagatcgattgttctgtttacggtttgggcactgacgataattatgggttgaagagcgacaaatgcaataatatcttgagtttcttgggattttctccttgtttggtccttcccttgtattttccgtacccttggttctcacaacttctgggtctttaataatattaaggttgttacaatatcttccaggttatggcgtctctcgttttagattggagctcaactcaaattcttccttgaacattagtgttagctgctcaatctcttcctttgcatggttatatgaattctataatttttctgcattgaaagtcaagttataagtagtgaagtgaggcatccaaacctagccatctaataaatgtgttgttgttatggtgctggctggtgaaaatgcaggtggagatttttctgcggttttgctccatcgcttcat

SEQ ID NO: 271988 - DNA, 1373 bp, Cannabis indica
tcgtgcacttgcgagtataaatattaaaacactcacttttgaggacaacaacaatacaactacaaaatatatatgcacacaatacatattcaataaaatacaaaatacatacatatatacattaaggtttaaatttttaccttattaacgcaattcgatgacaaataccgacaaaaatccagctaccatgcacagccacaacaacataatcttaataatatcgaaaaaccctcaaaaaaatttacaaaattgaaaataaagcaatgtacattttttttgatgagaggaggctcaaaagagccaccacacaaacacgaaagtttagaactagtaaacagacaaaccagagtacataactagatctggccttaattctaaaacagacgccaatactgttaaggtaaaacaacacaaaagctacagaaaaacagaatagccatccacctatccactaggcaggaaactgtcaaaattggccacttcaatattctcgaattgagaagatcgaattatccattgagccacatcatgggccacacaattaagctttctcaggatccacctagtctcccaaaggtgtaatttctatgcaagagtatgaaagttggcaacaagctcttgaatgttatggtttaacatgtgtatatcccgcttcttgcaagagattgctgagattgcacctccagaataacatttttatgaccaaggataattgcgttctcagctccccaataaagggaagctatttcaccagctaacgggtctttgtaatggagtttggtggtgtgaacacttaagaattcccctgcagaattcctaaagacagcagcaccaatagtgcaatggtgaccaatcacaacatctgtgttacacatacaccatccctccggtggaggaacccatttatctgatataatagtcggcccaacgcttatcacttgagtcttcatggattcccacagtcgggtgttaatctggtgcaacagaacattaattggagtataattgccattatgaatgatgttgttcatctccctccatatcttttcgaaaattatagctgcaccacctaagaaagtgtggaaattgatctcttttggtctatggccatcaactttaaaccattttatccagtagtcccaatttgctaaggatgtaatgcatgttttgacagtccagttgcagccaaaccagatggctctagcaaaatggcaatcctagaacaaatgtagggagtcctccacaactagagagcaaaaagggcataaagggtcatgtatattgaatatggaaaggattttacctcttgttggcagactgttggataagattttccaccatagcatcttcaatctgctatgaattttagcacc

SEQ ID NO: 271989 - DNA, 1395 bp, Cannabis indica
atatattttaaaaaaatttattttttggaccgggacacttgtcattctgaacaacaattaacattaaaatggatggaaagctaaaagaatgactacatttctatagctattaaatataggaaatattttttataggtcatatattttagaggatacaatctaatagtgtcataagtttagggttaaaaatactaattttttcgaataaaagtatttctagattaatatcacaaattagactttatggtcattacataaaatgttatctggtatatagcaataagatcgaccataccaattacattcttggcaaaagcttacttaaccacattatgggcagcaaaattacactatcttaaaataaataaaaaattacaacttaacaaaagattacagagattttacattgaatcacatagttaccaatacacccacaacaagaagtgtcgtttagcgcattgataactgtctcagagtcactctcaatcaacacaaaagtatgcttcaaagagactgttgattccaagcaggttacaacttctccaattagagggtcaaagaagttaagcattttggtagccacccacaagaccgaccccgtgtgatccctagccaaagccaccaggcacattgaaccgcaacaaactttaacatcatagttgattttgacctaatcttcttcgggaccaaacaggagactcaactgtcttcagtgaagtaaatagacaagaactattatctgcataacacatataaatagagtcaatacattctttaatattacacatagaattattgcataccttgtcgttaagggctatcaagattatatccaccacaatcgaagcataaaggaacaactcttgtacatcaacacctctagtctttagactctatagtaatttaacccaatcctaaacacgggcccaagagtccataactagcataaataggatgccctccaaagataaaaagcaaagttgcaacaaaggaaaatatgttctatcgtttcctctccctctccataaataggataggaaactttctcaatgtgcaatcttctagccagaagggaactgatagacagggcatttgagagaatgctccaccaaaagaccttctgacactccaagacttcagaattccaaattttattccacatagtgggagcaacattgcaaagaggagtacgattcaagtgttgggttttgtgccgtaaataaaactcatttgaatataatcagatttactaattaataaatatcagaaattattttatgttacaaagttgaaatgatatttcatgattatatgtttaatgtataaattctattaagtctagaacatatatttattcatgattatagtgttgtcaacacagtggaatataatcat

SEQ ID NO: 271990 - DNA, 1197 bp, Cannabis indica
acacaagatctaaaatagtattttccctatggcaaaatcaagaacacatcaaaaacacttttttgttatgcataaaagtgatgcttttactataatcacacgccctttataagatctttttttttgcttaatcccatttggtcaacagactcgaaccattgtttgaaaacagaagagttttacaatttcaggcaggctttgaatctcatcatatgagcaaaaagaaagaaagaaacatatataataacacagcttatatatttcattaaaatgaggcaaaaaacaacctcaaaaccgcataccagaagacaacgtggagggccaggccaagaagactagtacaactttcactactaaagttgttagcaaactaaacataatttcacagtaaaaatgaatggctctatggccaatctaacttaactacacaaatcaacatgcttacaaaagaggtgccctgctgtttttccacccaaatgatcttcgtttcgctagaggagacgtaaaactaagcccagacatctccttcaaggctcgtccttggtctacaaacctgatcaactgtgccacaattgtagcactcttcttaatgtggttcatatcctttgtgtcgttccataggcggtcagccagctgcctccttcgacgctttgagtccaatgcaatgccccattcttggaatagtctttcctctcttcttctgaaaaccgtttctgcatcttcttgctcagcacctctctctctcgacgaagagctttcatactgtttacaattaaagcatattaaattgaagttagttttcatgtctacatattcagcattgtctttaagggagtgagggagtgaacctttcggccagtgtgggagttcgactatcttctaaagcatgatttccgccagaatatgtttcctttagaaaagatagtcttctgagttccacctccatgtaaatcgaatctgatggttcacctttgaagagcaagacgaaataggttctatgaactaatgacacatgacaagtttgccaaagttccaggatcatcctctgtagtctctcgaattctagaggccaatgagaagagtcttctgtttccataattgggtctactccaatgtctttcatattcttttcatacttctcagctatagaacctgtaccttgtccctgtcgcggaaaagaagaacaattaatggaaa

SEQ ID NO: 271991 - DNA, 502 bp, Cannabis indica
gtttacaatttttttttctttttaaattgggtgggttgcacttatattttagcaacccgaactttagatgaggttaaaaaaatatataggataagccgcctaaaccgatcgatgtacaaccctactttaaagggtttcaaaatcaaaattttggcttagatctgattgtttaatttgtattttatttgtaatatttagttttgatttgggattctaatatgaaattttgttcttgtcaaattcggggtttatttaggttcatgtatgtgttaaacaaattttgtatagtttatgaatattttgttgaagaatttagatttgtttaggtttaataattcaaaaaataattaatttttgatcttgttaaaaatctgaatttagtttctttaactggtttcaatttctctatttgagtttattttttaattcaaagaaaaagcgatgaaaaggaaataaatgttaaaaaaataaaaattaattatattagtttttattaattttt

SEQ ID NO: 271992 - DNA, 622 bp, Cannabis indica
tacacccgatcataaccccatccccgtgtgccacacggtcttgagtctataacgttcatacgacaatactatcgaccataatgtcagcctatattcaatatgctagtcatactctagccttattaatgtgacagcgtcgatcagtatttcagtcaacatacatttattaataatcattgcaattctaagtatactattactgctatcaatgtattctaaaaggaaagactaacatgtatgttaaacatgtaataacatatgcatgacattatactaatcttgccttgattctgaattcagctatgtcgccaacctgagtagaacaactactcgacgaattacaggctcctaaatcacatcgataacaacacgaataagtgacacgctaaatcacaaccggggacttaggttttaaccaaaaacctatctactgtaaattaacatggaaataccctaaactagcagaaaattaaccaaccaaatctctaaaactagcatgaatcgacaacacaaatttttcggggaacccagcagcaaatccgggtaatcggtttacaagtcctgtaaaactggttagccggtttataccagaaatcctgaaaattccaaaacctaactaaat

SEQ ID NO: 271993 - DNA, 515 bp, Cannabis indica
ccatgggcctatgtaaccaagctacaaataagtagttctaacatttaccatgtaaattctctatcttattaattcctcttgactccactatagattcaaaattgcactcctgattacatagaacgctctattcacatacgctataaattatctattatttcaatttaaataatcaaagattctttatagatgatttacatcgagtaggagtgattttactgttttaaccctttaatgtattttatccttaaaaaaactaagcttcttataaatgatattttagtaaaataatataattactgaaataagagtgttcttccatttatgtctgttagccaagctctaagaaaatcatcgtttaacttctaaatagttatagaagctatagattctatatccatgattagcgctcccactcaattgcactaccgtattcccaagatgtaagtcgatcctttggtaacctttaatgaacaaatcaaaggaacacgatgtaatacatttaagccaaaacc

SEQ ID NO: 271994 - DNA, 807 bp, Cannabis indica
attcagaaaataacaactcatgggaatagttttttttacaaaattgagggaagcatatggggtcagagaagaacagtgcttgatctcagacagacatgagagcataattaaggctgatgctcatgtatttctagacataactcatggctactatgtataccacctattaagcaaccttaaagaagaatactagcaaactcgataaaccattcgttgcagcagcaaaagcacacacagagaagaaatttgaataccatatgagcgagtttgatggtttggacaagcgtgttagatcctatttacaataagttagatactgcaaatagtcaaggtaccacatcaaacacaacaggtatacaactatgacttctaacattgccgaatatctaaacttaacaaacttagcagctagagaactaccagtcactacactaatggatcattgagagctttgatacaataatggacatacacaaacaaaaaaaaagtacaaaatatcacaacaattttgacacctattgcctaagaagttaatcaataactttgtggacttattgacaaaaaatgtaagagttcattaaacttaaagttgcataacagttgcgttgtagtttattttttatttttctaacattcaatacattgattattgttaccaaatctactggtgaaaccaataaacgacaacatatttgaggtagtacaacaaacaaggtcatggatggtcaatctaaaagaaaaaaaaatgcagttgcaacagattctaacaagacgaatttccatgtactcatgctcttgctgtgatga
